United States Patent Application Publication US 2011/0183924 A1 - sequence listing, part 67

SEQ ID NO: 235352 - DNA, 329 bp, Homo sapiens
acagggtgtgaggagggtggcagtgggagatcagacaagagaggcaggtggaggccagattgtagaaggtcttcgattccatccctaggagcttgaatgaatctggtaaatgaaggggagccattgaacatctctgagcaggggagtgatatgatgtagcacaacaggggttatcattctggtagcaaagtgcaggaacagattgaagggggctgggtgcaatggctcatgcccgtaatccccgcactttgagaggctgaggcaggaggatcacttgagcccaggaggtcaagaccagcataggcaacatggtgaaaacctgtctctga

SEQ ID NO: 235353 - DNA, 511 bp, Homo sapiens
gcacgagccttgctcaaatgacctgctcacacagaagtctctactcacccacttctttctagctcacacccagaggcagatttcagttctgcacagttccttctgagctgtggggcctcccaccagtccctactctctccaagactcaatttcctcatctgtgagatgggggtaagaagaatcagtgggaataagaggagataaaaatctgtgtagtacttgggcggggtgcggtggctcacccctgtaatcccagcactttgggaggccgaggcaggcagatcacctgaggtcaggagttcgagaccagcctggccaacgtggtgaaacctcatctgtactaaaaacacaaaaattggccaggcgtggtggcgggcgcctgtaatcccagctactcaggaggctgaggcaggagaactgtttgaacctgggaggcgcgggttgcaggttgcagtgaactgagatcacgccactgcactccagcctgggtgacagagcaagagtctgtctc

SEQ ID NO: 235354 - DNA, 769 bp, Homo sapiens
tgagagcaccgcggctacctggcttccctgagtcccggctgccgggaacgggcgcgggggtgaataggtaagttagcgcctagtttccctcgctcatccaagaagcgaagcttggaatcgatctttggtgggactcttccccagatgtaagaagccatacactaaaggggaagggaaggaacattgagtcctgctcatgggcctggaacgtttcaacgccagttatcccatttaacctccacaatcgccattgcagaggaaacgcaaaaagatttgaatgatttgcctaagtcacgttatcaaattagatgagtttctaaatcgttacatgaaaaatttaaaactcaaaatagacattacttttgtagcctcctttcctcgatgaacatgttacatccctaaatgcttatatatcaccgttttttcccagtgattcatggtggcatggtggcatgaatcctggtgtgtagatatctcgcccattctgctattgatatttagatgataatttaaaagataaggctgggctgaatatcttcatacataaatctttgtgtatgtatgtatttataaatgcatcctgcattttcgtacggctgattcctagaggtgtaattactgaatgctccctttattaatttgccttctgcacaaagcctcaccggaaaagtaccctccttttgttaccctcagcagggctgaattctattgtacttctaaacatctttgctcattttgtaggtaaaataataatactggcatttccttg

SEQ ID NO: 235355 - DNA, 3421 bp, Homo sapiens
ctcccagcgtgctttgcggcgggccggcccgctttacccagagtcgccctgccgcaatcgcgcgtctttccaccgaggccccggatgtagattccctcccccgttcagtggtcgtggcctcacagcgactctaagacttggggctctctcattggctgtaactcttccactggattggtagcaaaaaaagaggcggtgcccaaggcgaaaggctctgtgactacagccaatcagaatcgaggccgggctttggcgggaggtgggaacgctgtggccattcggatttggcgcgagcgcggctggagtttgctgctgccgctgtgcagtttgttcaggggcttgtggtggtgagtccgagaggctgcgtgtgagagacgtgagaaggatcctgcactgaggaggtggaaagaagaggattgctcgaggaggcctggggtctgtgaggcagcggagctgggtgaaggctgcgggttccggcgaggcctgagctgtgctgtcgtcatgcctcaaacccgatcccaggcacaggctacaatcagttttccaaaaaggaagctgtctcgggcattgaacaaagctaaaaactccagtgatgccaaactagaaccaacaaatgtccaaaccgtaacctgttctcctcgtgtaaaagccctgcctctcagccccaggaaacgtctgggcgatgacaacctatgcaacactccccatttacctccttgttctccaccaaagcaaggcaagaaagagaatggtccccctcactcacatacacttaagggacgaagattggtatttgacaatcagctgacaattaagtctcctagcaaaagagaactagccaaagttcaccaaaacaaaatactttcttcagttagaaaaagtcaagagatcacaacaaattctgagcagagatgtccactgaagaaagaatctgcatgtgtgagactattcaagcaagaaggcacttgctaccagcaagcaaagctggtcctgaacacagctgtcccagatcggctgcctgccagggaaagggagatggatgtcatcaggaatttcttgagggaacacatctgtgggaaaaaagctggaagcctttacctttctggtgctcctggaactggaaaaactgcctgcttaagccggattctgcaagacctcaagaaggaactgaaaggctttaaaactatcatgctgaattgcatgtccttgaggactgcccaggctgtattcccagctattgctcaggagatttgtcaggaagaggtatccaggccagctgggaaggacatgatgaggaaattggaaaaacatatgactgcagagaagggccccatgattgtgttggtattggacgagatggatcaactggacagcaaaggccaggatgtattgtacacgctatttgaatggccatggctaagcaattctcacttggtgctgattggtattgctaataccctggatctcacagatagaattctacctaggcttcaagctagagaaaaatgtaagccacagctgttgaacttcccaccttataccagaaatcagatagtcactattttgcaagatcgacttaatcaggtatctagagatcaggttctggacaatgctgcagttcaattctgtgcccgcaaagtctctgctgtttcaggagatgttcgcaaagcactggatgtttgcaggagagctattgaaattgtagagtcagatgtcaaaagccagactattctcaaaccactgtctgaatgtaaatcaccttctgagcctctgattcccaagagggttggtcttattcacatatcccaagtcatctcagaagttgatggtaacaggatgaccttgagccaagaaggagcacaagattccttccctcttcagcagaagatcttggtttgctctttgatgctcttgatcaggcagttgaaaatcaaagaggtcactctggggaagttatatgaagcctacagtaaagtctgtcgcaaacagcaggtggcggctgtggaccagtcagagtgtttgtcactttcagggctcttggaagccaggggcattttaggattaaagagaaacaaggaaacccgtttgacaaaggtgtttttcaagattgaagagaaagaaatagaacatgctctgaaagataaagctttaattggaaatatcttagctactggattgccttaaattcttctcttacaccccacccgaaagtattcagctggcatttagagagctacagtcttcattttagtgctttacacattcgggcctgaaaacaaatatgaccttttttacttgaagccaatgaattttaatctatagattctttaatattagcacagaataatatctttgggtcttactatttttacccataaaagtgaccaggtagaccctttttaattacattcactacttctaccacttgtgtatctctagccaatgtgcttgcaagtgtacagatctgtgtagaggaatgtgtgtatatttacctcttcgtttgctcaaacatgagtgggtatttttttgtttgttttttttgttgttgttgtttttgaggcgcgtctcaccctgttgcccaggctggagtgcaatggcgcgttctctgctcactacagcacccgcttcccaggttgaagtgattctcttgcctcagcctcccgagtagctgggattacaggtgcccaccaccgcgcccagctaattttttaatttttagtagagacagggttttaccatgttggccaggctggtcttgaactcctgaccctcaagtgatctgcccaccttggcctccctaagtgctgggattataggcgtgagccaccatgctcagccattaaggtattttgttaagaactttaagtttagggtaagaagaatgaaaatgatccagaaaaatgcaagcaagtccacatggagatttggaggacactggttaaagaatttatttctttgtatagtatactatgttcatggtgcagatactacaacattgtggcattttagactcgttgagtttcttgggcactcccaagggcgttggggtcataaggagactataactctacagattgtgaatatatttattttcaagttgcattctttgtctttttaagcaatcagatttcaagagagctcaagctttcagaagtcaatgtgaaaattccttcctaggctgtcccacagtctttgctgcccttagatgaagccacttgtttcaagatgactactttggggttgggttttcatctaaacacatttttccagtcttattagataaattagtccatatggttggttaatcaagagccttctgggtttggtttggtggcattaaatggcaatttgtgactgagacaccagagggcacccttataacattgactactttgaaaggggatgcttgaggctgaggtag

SEQ ID NO: 235356 - DNA, 729 bp, Homo sapiens
ggtgatctgcccaccttggcctccctaagtgctgggattataggcgtgagggtcaggagttcaagaccagcctggccctcaagtgatctgcccaccttggcctccctaagtgctgggattataggcgtgagccaccatgctcagccattaaggtattttgttaagaactttaagtttagggtaagaagaatgaaaatgatccagaaaaatgcaagcaagtccacatggagatttggaggacactggttaaagaatttatttctttgtatagtatactatgttcatggtgcagatactacaacattgtggcattttagactcgttgagtttcttgggcactcccaagggcgttggggtcataaggagactataactctacagattgtgaatatatttattttcaagttgcattctttgtctttttaagcaatcagatttcaagagagctcaagctttcagaagtcaatgtgaaaattccttcctaggctgtcccacagtctttgctgcccttagatgaagccacttgtttcaagatgactactttggggttgggttttcatctaaacacatttttccagtcttattagataaattagtccatatggttggttaatcaagagccttctgggtttggtttggtggcattaaatggcaatttgtgactgagacaccagagggcacccttataacattgactactttgaaaggggatgcttgaggctgaggtag

SEQ ID NO: 235357 - DNA, 3265 bp, Homo sapiens
ctcccagcgtgctttgcggcgggccggcccgctttacccagagtcgccctgccgcaatcgcgcgtctttccaccgaggccccggatgtagattccctcccccgttcagtggtcgtggcctcacagcgactctaagacttggggctctctcattggctgtaactcttccactggattggtagcaaaaaaagaggcggtgcccaaggcgaaaggctctgtgactacagccaatcagaatcgaggccgggctttggcgggaggtgggaacgctgtggccattcggatttggcgcgagcgcggctggagtttgctgctgccgctgtgcagtttgttcaggggcttgtggtggtgagtccgagaggctgcgtgtgagagacgtgagaaggatcctgcactgaggaggtggaaagaagaggattgctcgaggaggcctggggtctgtgaggcagcggagctgggtgaaggctgcgggttccggcgaggcctgagctgtgctgtcgtcatgcctcaaacccgatcccaggcacaggctacaatcagttttccaaaaaggaagctgtctcgggcattgaacaaagctaaaaactccagtgatgccaaactagaaccaacaaatgtccaaaccgtaacctgttctcctcgtgtaaaagccctgcctctcagccccaggaaacgtctgggcgatgacaacctatgcaacactccccatttacctccttgttctccaccaaagcaaggcaagaaagagaatggtccccctcactcacatacacttaagggacgaagattggtatttgacaatcagctgacaattaagtctcctagcaaaagagaactagccaaagttcaccaaaacaaaatactttcttcagttagaaaaagtcaagagatcacaacaaattctgagcagagatgtccactgaagaaagaatctgcatgtgtgagactattcaagcaagaaggcacttgctaccagcaagcaaagctggtcctgaacacagctgtcccagatcggctgcctgccagggaaagggagatggatgtcatcaggaatttcttgagggaacacatctgtgggaaaaaagctggaagcctttacctttctggtgctcctggaactggaaaaactgcctgcttaagccggattctgcaagacctcaagaaggaactgaaaggctttaaaactatcatgctgaattgcatgtccttgaggactgcccaggctgtattcccagctattgctcaggagatttgtcaggaagaggtatccaggccagctgggaaggacatgatgaggaaattggaaaaacatatgactgcagagaagggccccatgattgtgttggtattggacgagatggatcaactggacagcaaaggccaggatgtattgtacacgctatttgaatggccatggctaagcaattctcacttggtgctgattggtattgctaataccctggatctcacagatagaattctacctaggcttcaagctagagaaaaatgtaagccacagctgttgaacttcccaccttataccagaaatcagatagtcactattttgcaagatcgacttaatcaggtatctagagatcaggttctggacaatgctgcagttcaattctgtgcccgcaaagtctctgctgtttcaggagatgttcgcaaagcactggatgtttgcaggagagctattgaaattgtagagtcagatgtcaaaagccagactattctcaaaccactgtctgaatgtaaatcaccttctgagcctctgattcccaagagggttggtcttattcacatatcccaagtcatctcagaagttgatggtaacaggatgaccttgagccaagaaggagcacaagattccttccctcttcagcagaagatcttggtttgctctttgatgctcttgatcaggcagttgaaaatcaaagaggtcactctggggaagttatatgaagcctacagtaaagtctgtcgcaaacagcaggtggcggctgtggaccagtcagagtgtttgtcactttcagggctcttggaagccaggggcattttaggattaaagagaaacaaggaaacccgtttgacaaaggtgtttttcaagattgaagagaaagaaatagaacatgctctgaaagataaagctttaattggaaatatcttagctactggattgccttaaattcttctcttacaccccacccgaaagtattcagctggcatttagagagctacagtcttcattttagtgctttacacattcgggcctgaaaacaaatatgaccttttttacttgaagccaatgaattttaatctatagattctttaatattagcacagaataatatctttgggtcttactatttttacccataaaagtgaccaggtagaccctttttaattacattcactacttctaccacttgtgtatctctagccaatgtgcttgcaagtgtacagatctgtgtagaggaatgtgtgtatatttacctcttcgtttgctcaaacatgagtgggtatttttttgtttgttttttttgttgttgttgtttttgaggcgcgtctcaccctgttgcccaggctggagtgcaatggcgcgttctctgctcactacagcacccgcttcccaggagaatcgcttgaacctgcgaggcagagattgcagtgagccaagatcaagccattgtactccagcctggacaacaagagcgaaactctgtctaaaaaaaaaaaaaaaacaacaacacaacacaaggttttcacgcctgtaaacctagcacttggggaagccaaggtgtgggaggatggcttgaggccaggagttcaaggctgcagtgacgctatgatggcacactggtactctagccggggagacagagtgcagacacttgtctctaaaaaaaaaacactaaaaaaatgttttggaccctaaaaatctttggtggaattccaaaacactcttccaaaaagacgacgtaaacaacaggggcaactgcgtccttggtgtccacaggctatttaactataacaatacagacgggtttattctacgagcacgcggaaccaccctcggggctggcgcaaaacatctcaccctgggtatgctcccaattactcttaaggagaactgtgttagcctgcctgaacacattctgttctattacaaacttctaactctcgcagtcagtccatgcaacattagcccgaggaatgccctatactgtgacccaagacctgtgtcattctgaacaaatacgacacac

SEQ ID NO: 235358 - DNA, 3280 bp, Homo sapiens
ctcccagcgtgctttgcggcgggccggcccgctttacccagagtcgccctgccgcaatcgcgcgtctttccaccgaggccccggatgtagattccctcccccgttcagtggtcgtggcctcacagcgactctaagacttggggctctctcattggctgtaactcttccactggattggtagcaaaaaaagaggcggtgcccaaggcgaaaggctctgtgactacagccaatcagaatcgaggccgggctttggcgggaggtgggaacgctgtggccattcggatttggcgcgagcgcggctggagtttgctgctgccgctgtgcagtttgttcaggggcttgtggtgctgtgctgtcgtcatgcctcaaacccgatcccaggcacaggctacaatcagttttccaaaaaggaagctgtctcgggcattgaacaaagctaaaaactccagtgatgccaaactagaaccaacaaatgtccaaaccgtaacctgttctcctcgtgtaaaagccctgcctctcagccccaggaaacgtctgggcgatgacaacctatgcaacactccccatttacctccttgttctccaccaaagcaaggcaagaaagagaatggtccccctcactcacatacacttaagggacgaagattggtatttgacaatcagctgacaattaagtctcctagcaaaagagaactagccaaagttcaccaaaacaaaatactttcttcagttagaaaaagtcaagagatcacaacaaattctgagcagagatgtccactgaagaaagaatctgcatgtgtgagactattcaagcaagaaggcacttgctaccagcaagcaaagctggtcctgaacacagctgtcccagatcggctgcctgccagggaaagggagatggatgtcatcaggaatttcttgagggaacacatctgtgggaaaaaagctggaagcctttacctttctggtgctcctggaactggaaaaactgcctgcttaagccggattctgcaagacctcaagaaggaactgaaaggctttaaaactatcatgctgaattgcatgtccttgaggactgcccaggctgtattcccagctattgctcaggagatttgtcaggaagaggtatccaggccagctgggaaggacatgatgaggaaattggaaaaacatatgactgcagagaagggccccatgattgtgttggtattggacgagatggatcaactggacagcaaaggccaggatgtattgtacacgctatttgaatggccatggctaagcaattctcacttggtgctgattggtattgctaataccctggatctcacagatagaattctacctaggcttcaagctagagaaaaatgtaagccacagctgttgaacttcccaccttataccagaaatcagatagtcactattttgcaagatcgacttaatcaggtatctagagatcaggttctggacaatgctgcagttcaattctgtgcccgcaaagtctctgctgtttcaggagatgttcgcaaagcactggatgtttgcaggagagctattgaaattgtagagtcagatgtcaaaagccagactattctcaaaccactgtctgaatgtaaatcaccttctgagcctctgattcccaagagggttggtcttattcacatatcccaagtcatctcagaagttgatggtaacaggatgaccttgagccaagaaggagcacaagattccttccctcttcagcagaagatcttggtttgctctttgatgctcttgatcaggcagttgaaaatcaaagaggtcactctggggaagttatatgaagcctacagtaaagtctgtcgcaaacagcaggtggcggctgtggaccagtcagagtgtttgtcactttcagggctcttggaagccaggggcattttaggattaaagagaaacaaggaaacccgtttgacaaaggtgtttttcaagattgaagagaaagaaatagaacatgctctgaaagataaagctttaattggaaatatcttagctactggattgccttaaattcttctcttacaccccacccgaaagtattcagctggcatttagagagctacagtcttcattttagtgctttacacattcgggcctgaaaacaaatatgaccttttttacttgaagccaatgaattttaatctatagattctttaatattagcacagaataatatctttgggtcttactatttttacccataaaagtgaccaggtagaccctttttaattacattcactacttctaccacttgtgtatctctagccaatgtgcttgcaagtgtacagatctgtgtagaggaatgtgtgtatatttacctcttcgtttgctcaaacatgagtgggtatttttttgtttgttttttttgttgttgttgtttttgaggcgcgtctcaccctgttgcccaggctggagtgcaatggcgcgttctctgctcactacagcacccgcttcccaggttgaagtgattctcttgcctcagcctcccgagtagctgggattacaggtgcccaccaccgcgcccagctaattttttaatttttagtagagacagggttttaccatgttggccaggctggtcttgaactcctgaccctcaagtgatctgcccaccttggcctccctaagtgctgggattataggcgtgagccaccatgctcagccattaaggtattttgttaagaactttaagtttagggtaagaagaatgaaaatgatccagaaaaatgcaagcaagtccacatggagatttggaggacactggttaaagaatttatttctttgtatagtatactatgttcatggtgcagatactacaacattgtggcattttagactcgttgagtttcttgggcactcccaagggcgttggggtcataaggagactataactctacagattgtgaatatatttattttcaagttgcattctttgtctttttaagcaatcagatttcaagagagctcaagctttcagaagtcaatgtgaaaattccttcctaggctgtcccacagtctttgctgcccttagatgaagccacttgtttcaagatgactactttggggttgggttttcatctaaacacatttttccagtcttattagataaattagtccatatggttggttaatcaagagccttctgggtttggtttggtggcattaaatggcaatttgtgactgagacaccagagggcacccttataacattgactactttgaaaggggatgcttgaggctgaggtag

SEQ ID NO: 235359 - DNA, 1294 bp, Homo sapiens
ctcccagcgtgctttgcggcgggccggcccgctttacccagagtcgccctgccgcaatcgcgcgtctttccaccgaggccccggatgtagattccctcccccgttcagtggtcgtggcctcacagcgactctaagacttggggctctctcattggctgtaactcttccactggattggtagcaaaaaaagaggcggtgcccaaggcgaaaggctctgtgactacagccaatcagaatcgaggccgggctttggcgggaggtgggaacgctgtggccattcggatttggcgcgagcgcggctggagtttgctgctgccgctgtgcagtttgttcaggggcttgtggtggtgagtccgagaggctgcgtgtgagagacgtgagaaggatcctgcactgaggaggtggaaagaagaggattgctcgaggaggcctggggtctgtgaggcagcggagctgggtgaaggctgcgggttccggcgaggcctgagctgtgctgtcgtcatgcctcaaacccgatcccaggcacaggctacaatcagttttccaaaaaggaagctgtctcgggcattgaacaaagctaaaaactccagtgatgccaaactagaaccaacaaatgtccaaaccgtaacctgttctcctcgtgtaaaagccctgcctctcagccccaggaaacgtctgggcgatgacaacctatgcaacactccccatttacctccttgttctccaccaaagcaaggcaagaaagagaatggtccccctcactcacatacacttaagggacgaagattggtatttgacaatcagctgacaattaagtctcctagcaaaagagaactagccaaagttcaccaaaacaaaatactttcttcagttagaaaaagtcaagagatcacaacaaattctgagcagagatgtccactgaagaaagaatctgcatgtgtgagactattcaagcaagaaggcacttgctaccagcaagcaaagctggtcctgaacacagctgtcccagatcggctgcctgccagggaaagggagatggatgtcatcaggaatttcttgagggaacacatctgtgggaaaaaagctggaagcctttacctttctggtgctcctggaactggaaaaactgcctgcttaagccggattctgcaagacctcaaggtatctagagatcaggttctggacaatgctgcagttcaattctgtgcccgcaaagtctctgctgtttcaggagatgttcgcaaagcactggatgtttgcaggtgagttacggctctgttgcattcttttatta

SEQ ID NO: 235360 - DNA, 1645 bp, Homo sapiens
actgtataggttttcgggaatatctacagaagcctgttcaaagattttattgaaaagaggaagaaatagggtattcagataagtttttgcaaacccagactcaggtttcttaaatgattaaaggctataagcaatgtgacttttaagcagcgtttgttctcccttgtttcctaccagttatatgaagcctacagtaaagtctgtcgcaaacagcaggtggcggctgtggaccagtcagagtgtttgtcactttcagggctcttggaagccaggggcattttaggattaaagagaaacaaggaaacccgtttgacaaaggtgtttttcaagattgaagagaaagaaatagaacatgctctgaaagataaagctttaattggaaatatcttagctactggattgccttaaattcttctcttacaccccacccgaaagtattcagctggcatttagagagctacagtcttcattttagtgctttacacattcgggcctgaaaacaaatatgaccttttttacttgaagccaatgaattttaatctatagattctttaatattagcacagaataatatctttgggtcttactatttttacccataaaagtgaccaggtagaccctttttaattacattcactacttctaccacttgtgtatctctagccaatgtgcttgcaagtgtacagatctgtgtagaggaatgtgtgtatatttacctcttcgtttgctcaaacatgagtgggtatttttttgtttgttttttttgttgttgttgtttttgaggcgcgtctcaccctgttgcccaggctggagtgcaatggcgcgttctctgctcactacagcacccgcttcccaggttgaagtgattctcttgcctcagcctcccgagtagctgggattacaggtgcccaccaccgcgcccagctaattttttaatttttagtagagacagggttttaccatgttggccaggctggtcttgaactcctgaccctcaagtgatctgcccaccttggcctccctaagtgctgggattataggcgtgagccaccatgctcagccattaaggtattttgttaagaactttaagtttagggtaagaagaatgaaaatgatccagaaaaatgcaagcaagtccacatggagatttggaggacactggttaaagaatttatttctttgtatagtatactatgttcatggtgcagatactacaacattgtggcattttagactcgttgagtttcttgggcactcccaagggcgttggggtcataaggagactataactctacagattgtgaatatatttattttcaagttgcattctttgtctttttaagcaatcagatttcaagagagctcaagctttcagaagtcaatgtgaaaattccttcctaggctgtcccacagtctttgctgcccttagatgaagccacttgtttcaagatgactactttggggttgggttttcatctaaacacatttttccagtcttattagataaattagtccatatggttggttaatcaagagccttctgggtttggtttggtggcattaaatggcaatttgtgactgagacaccagagggcacccttataacattgactactttgaaaggggatgcttgaggctgaggtag

SEQ ID NO: 235361 - DNA, 415 bp, Homo sapiens
agatgaattccttatcattataattttatttttcttgttatgtaaatgttcaactttcttacattaaatgctcatagttcatgacagctgaaatgaggtgttcatataaatgagcataaggtaatatggtgtaaaaaacaatgactccataaaatattgtcttctaggtacattgcatcatatataacaagggtcaaaactcaaatgtctaaaagggccagataggttcataaatggattatgaaagctgggaaaggagcatggtaaagagaagaatgctccctctcgaagagaagacttactcactagttcaccagcttagtgccatgaaggaaggcagactgagagtggttcaaggacagtgagatttacatgaaatctgacatctaaacattgacagctgttttcatcttta

SEQ ID NO: 235362 - DNA, 449 bp, Homo sapiens
agtggcaaagaaatgacatgcttccgggtgagcagactactgcaaatgaaaagaaggcacatcctttgcctagaagaaaacagaacaacagaatccctcacaaccatctgatgctgccgaacagctggaacacggatttcatccagaggaagagcccacagatgaaattacaacactgaatgagattgtttttaaaaaactgtagatacaactaaagtgtatttgaaagagcaagaagatttaaaatgaaagtaatggcataatggaaagacctgagataatctcaatgcaagcatatttaaaaggcaagagatggaagcccccggaaaggacctatcagtatagaaaatcgtcagcagtgatcaacacaaggataattactgctcctgaattagaaaattaaatggaaaagacgattgttcaaaagcatataacattcatctattaaa

SEQ ID NO: 235363 - DNA, 945 bp, Homo sapiens
aactcttcttcctccacgagaccgtagcgtaggttcgagacacaccctgtcagtttgtgggacttaagtggatacttgcatttgctgattaaaaattgaaagacgctgtttctgtggtttcagatcttgacattggtgatgttgaacctgctctaatgcgcctggtcctggtgcattttctagatggtgcttctttttagtctctggatttttctattggaagtcatttcagctttaaacatagctcactattgtatgtggctttgtagcctagagtgcgtttttgccatagtaccctgtgtaaccctcaccaccctgggcagggtgtggtgatgacagccatctcgtggatgaggcggctgagggacttgcccaggtcattgtggatggggccagtccagaagggctgaaggcctgactccagttctgaacccagacagggcggtgaagagggccgcttgccctacagtagctccaggcgtgtgtgggtgtgctcttgggcacacaggaggtttctggaaggaggtgtcagtgcctgggaggtctcaagaggaccctgcgtgttggagcagtggctatggtgggctgtgtccacgctcctgaggccgtggcgggctgtgtgtctctgtgttgccgaggccgtggcgggctgtgtctctgctgctgaggccgtggtgggctgtgtctctgctgctgaggccgtggtgggctgtgtctctgctgctgaggccgtggtgggctgtgtctctgtgctgctgaggccgtggcgggctgtgtgtctctgtgttgccgaggccgtggcgggctgtgtgtctgtgctgctgcctgagctgcttgctatgtgcatattacttcatcgatcagaaaagcagcacaaccaccagagaacaccgtatcctcccagtgcagtcctgtggctcatggtaccactgtcatggaaaaatg

SEQ ID NO: 235364 - DNA, 447 bp, Homo sapiens
aattagccaggtgtagtggcgcatgcctgtaatcccagctactcgggaggctgaggcaggagaatcgcttgaacccaggaggcggaggttgcagtgagctgagattgcagcattgcactccagcctggacaacaagagcgaaaatccatctaaaaaaaaagagttcaagttttggctctggcttggcacagtggctcatgcctataatcccagcactttgagaggccaggagttcgacaccagcctgggcaacagagtgagaccccaacactcaaaaactaaccaaaaaaattagctgggcttggtggctgtagtcccagctccttcggaggctgagattgctagagtccaggatgttggggctgcagtgagccacagtcatgccactgcactccagcctgggcaacagagaaagaccctgtctcaaaaaaaaaaaaaaatctcaga

SEQ ID NO: 235365 - DNA, 647 bp, Homo sapiens
tggctgcaggctgccttgggggcaatgcaaccccttctccacaactggagtccttgggggctgtgtgaccccttctccacaactggactccttgggggcagtgtgaccccttctccacaactggactccttgggggcagtgcgaccccttctccgcaactggactcctgtgtggccgtggctcaagtgaaaggcggtggctgtgaggcctgaaccaacagcacccacaggcccacgagtcaacttggggccggtgaagcagccgggtggggcagcagtgcccctgccatggatcagggcccgaggccgcaggccacagaggggccagcttggagaggaggctgcagaaacagttatggggggagggcctccgtcctgctgggtgaggaaggggtacctatggcaccaccaggggataataagctcaccgcactgtctcaaggccccacggtgagttcctaatgcagcctgcgcaaatgactgttcctgttgggaaaaacattcttcatttgagagcaatactttgaattgcatggtgagaccagtatcgctttactcagctcgcagagtgctgaatgagaagtttgggatgctaccaaaatgcaccagtagaatgtgaaatgcggtaggagaggaaaatctatctgc

SEQ ID NO: 235366 - DNA, 1686 bp, Homo sapiens
  misc_feature (1024)..(1024): n is a, c, g, or t
  misc_feature (1460)..(1460): n is a, c, g, or t
aaataagtatatctgtcaaaaatcatatttttatgagatgtgtcaatactggtctcgtgtcatttaggctacttggaaaaaagataaaaaaaatcctgtttggctccaaaaaggaaaaatcagcccctcctgcatgagtgggagctgcaaccctttagaactgataatcacaaacccctcagaaccaaagtgaaatgaaggaaaatatgtaacattaggcattgatggaagaggactagatcctagtgtaagcatcctaataaaaggaggggttcaaagatgctctccagaaccagtatttcagacttcctatgataaactaaatgtgccagtaccagagactccaggaaaaaccagaaatttgtttttgcaattagccgagcatgtagtccagtctttaaatgtcaattcatgttatgtttgtggaaaaactgtagtaagagtttccataagaagaacttccataagaagcccaagaattagttcctacagacccagttcctgatgaattcccagcccaaaagaaccaccctgacaatttttaggtcctaaaagtctgaattattagacagtgttgcatagctagagaaggaaaaggattcactcatcctataaggcggcttagttgtcttaggcaaaagctgtataatggtaccacaaatacagttacatggtggagttccaattacacagaaagagatccattcagtcaatttccaaggttgcagactgcttgggcccacccagaattccaccgggactggacggcccccaccaggttatactggatatgtgggcacagagcttatgctaagctgcctgatcagtggacaggtagctgtgtaattgacaccattaaaccatctttcttcttactgcccataaaagcaggggaacttctgggcttcccagtctatgcttcccgcaaaaaacaaagcatagccataggtgattggaaagatgataaatggccccctgaaagaatcatacaatactatggacccaccacttgggcacaagatgnctcttggggatatcggacccccatctacatgctcaacggaatcatacggttacaagctgttttcgaaattattactaatacaaccggtcaagccttgactgttcttgcccagcaggagactctgatgagaaatgctatctatcaaaatagactagctcttgactacttgctagcagctgaaagagaagtttgtgaaaaatttaactttactaattgttttctacacacaggtgatcaagggcaagtagttaaaaatatagttaaagatataacaaaactggcacatgtacccatacaagtgtggcacggactcaatccaggatccatgtttaaaaattagttcccagcaataggaagatttaaaactcttataataggagttataatagtaataaaaacctgcttactgctcccttgtttactacttttacttctncaaatgataaaaagcttcattgctaccttagttcaccaaaatgcttcagcacaagtgtactatatgaatcactatcaatctattgcacaaaaagacataagtagcaaaaataagagtgagaactcccactaataaaaagtgagagtctcaaagggggaaaatgaggaaagagagcgaccctctcatattgttctatattgttttatactcagtacctgttttaagg

SEQ ID NO: 235367 - DNA, 493 bp, Homo sapiens
tgccctcctcctccctattttgttagtttgctaacaaatatttgttgtgtaacaagtttgtatacagccttgttttgcgcatgtgtgaggctaaaaaagattctagctgaggacacacaactagaatcttcaatacattcctgaaacaactggaaaactttatgcctgagtagaaagacccaggccctacagcctgtcagagctgagcccaaaccctggctttggcacttacaggctggggactgtggacaagttacccattgcctcagtgtccaggttcttcccttgtagatgggagtaatgatacctaccttgcttctaataatataaatgaggtatacaaggagcccggtcccagcagacacttaccattttatcatcatcttaccaagatgtggcagcacagtgtgcaccgtggggacagacagtgcaagcgccatcaggacgtaggtgggagcctggccaacttggtgaaaccctgtctctattatta

SEQ ID NO: 235368 - DNA, 357 bp, Homo sapiens
gcttttctttcttctattcttggaaatttcctctgtcttcgctgagtggtcagctccacgctgctgtcaaaacaagacatgatgacagatgctgcctgaggcggattgggagagccagggccagtacagctgaaagagggtttatattttcatccagaaacctgcattagggaaagagggatgcgactgtcttcatctttgcaccatcttatccatccttttctgtctctggctattgcagtgttgatttgaagaagggaaacggaaagattcctcaaccataaagtggacatgggaactactttcacaaagttgttggaagaattaaataaaatgcctattattgtttaaaaatta

SEQ ID NO: 235369 - DNA, 784 bp, Homo sapiens
tgttcttatggcaacagatggacaacagcaactggaccagtgtgtcccattttgttctcttgggcatttccacccacccagaagagcaaatcccactcttccttgttttctcactcatgtacgcaatcaatatttctggcaacttggccatcatcacactgattctctctgctccacgcctccacatccccatgtacatcttcctcagtaacttggccttgacagacatctgcttcacctccaccacggtccccaagatgctgcagattattttctcccctacaaagaaatggaaaagccaatcctgaaattcagatgaaattgccagaaacaatgagtagccaaaactatctggaaaaaaaatgaacaaatttgtagaacctacactttcctatttccagaattattacaaagttatgaaataaaagaggatacaaacaaatggaagaacattccatgcgcgcacgtaggaagaatcaatatcgtgaaacacagcttgctgaactcctgcctgaatagaactgagagcggtcactcaagacgctgctcgaacagtcactgggagggtttatattttcatccagaaacctgcattagggaaagagggatgcgactgtcttcatctttgcaccatcttatccatccttttctgtctctggctattgcagtgttgatttgaagaagggaaacggaaagattcctcaaccataaagtggacatgggaactactttcacaaagttgttggaagaattaaataaaatgcctattattgtttaaaaatta

SEQ ID NO: 235370 - DNA, 404 bp, Homo sapiens
ttctctggctgtttccaagcgtgaagcagcttccccaaggagataatgacctaaatggggagaattaggctggattgaacgactcattaaatgtcacctccgtaaaagcaggagggacgagagctgggagtgcagagccacgcggggatcagcgtgaggggtgcaggtggaaacagagcttgaagctgttgctttctgccagccacccccatctgggctgcttaacaacagcctggatcggagcatgacagaggcagaagcaggtcctcagaaggtatttgttgaataaaatgaatgagggaggtggtggcccgccaggtaacaggtaacatgcccatctggctcagcctcaaggtctcggctggctctcctgggggcacagcctgcatccatccgaagggccc

SEQ ID NO: 235371 - DNA, 293 bp, Homo sapiens
acccccagagggacacagcaggtcaggggctgtgggaagccctccatgcaccataccccaagaagcagggcagggctggctggagtggcccctgccctgagggctatgccagtgactgcctcaggcttgacgtaggtcctgaccttttatatattaatagcaattattcttatgttgcaggtcagctgcttagaggagcaaaataagaatatactaaaaattaaaaattaaaaaattttttaaataaataaaaatgtgattgccccccaaaaaaagaaaaccctcaatgtttc

SEQ ID NO: 235372 - DNA, 363 bp, Homo sapiens
ctcagacttgtgatgtggttggacttctctcctggctatgtgcagttgtcttgttgatcatcccagcctgattctccaggcttctaggagattgaggaactatcaataatcctctttatgtttaagccagctagggaagtctgctgtctgcagatagaaattgggaatggtacagctactataaagctgagaaaatatgatgcttcaagggagctaattgtgtttagtactgtttaaaaatggaaattgaaaagtgtttattaaacttagtgataggctcatttgtgaccctggagaaagcatggttttttggtttggttttgttgttgttttgatggaagtggaaatcagttacaataaata

SEQ ID NO: 235373 - DNA, 510 bp, Homo sapiens
cagcgcccgccgggtccacagcgcccgccgggtccacagcgcccaccaggtttgatgtgggctgagcacaccgtcactaactcattccttcattcattcttcactgtgtggggtgtcgggacccagcacgggctcctggcgcagcaggcctcagaccctggggagagctttgctggaggaagtgcagtgccaaggacccatgtcctcattccccctgggtagagcgtgtcgggtgactctgctgcggtctccaggagctggcaagggaggggtgcaccaccagggaagggaattccaggcagcaggcaccaggagcctcatccaagagaaagagaagttccctagactcccaggcagggtgagccgaagggccttggagagtccctgaggtcccgtttcatgggagacttctctcacaaagcgaatgagctcaaatacggaagatggagaaatggaaaacagaaacagaacagaacctccacctgctgggtagatgttaactgaatcttt

SEQ ID NO: 235374 - DNA, 502 bp, Homo sapiens
atctcgggaggctgaggtggaaggattgcttgaccccaggaggtcgaagctgcagcgagtcgtgattgcgccactgcactccaacctgggtgaaagacaagaccctgtctctaatatataagaaatgaataaataaataaattcgattgccaaaattcttgctgttcccagcatattccactttcacctttcagcgcctttgcttatgctgatctgactgtaactgcattcccacccttctccttctgggtaaagggcatcttctttccaaactcaactcttagcatcagaaagctgtccctgatactgcagttgagtcgcatgtgatactgaaaaaaaaagaaaaaaggaaaaaaaagagagctctccctgaatcccttggtggactatgttaggtaaacttcatctttgcctgcatcatattatgtattggttcttctctgccccctcgattgtaaactcctcaggggcagaggtaacagctttgcagccctgggagtta

SEQ ID NO: 235375 - DNA, 338 bp, Homo sapiens
tatctcattccatgattatttgtccatatgtctaacctctagaatactagttcttatgtatcttcagtacctagtacctggcattcggtagacattcagtaaatatttgtttaaccaatgaatgagtgaatgaatgaggactgcaaaatagctaaccttcacacaagcaagaacagttgactggctaacttacagaatctcattaaaaatgcacacttgtcttaaacgttgcaaattgagaaattgaaaatcttcctctcctatagtcagtcagttagtattttgatgtcaatgtgaatttttctctatatatgataaacaatacaataagctataat

SEQ ID NO: 235376 - DNA, 435 bp, Homo sapiens
tgcaacttcttgtgagtcataaactcttccaagataagaagtattttaaaattccatattaaaaagaagggggcttgaaaaccccattgctgagtccttaggtcctatagctgggcttttttttttttttttctttttaaaaaaagggctgggcacggtggctcatgcctgtaatcccagcactttgggagggcgaggtgggtggatcacctgaggtcaggagttcaagaccagcctggccaacatggtgaaacctcatctctactaaaaatacaaaaattagccaggcgtggtggtgggcgcctttaatctcagctactcgggaggctgagtcaagagaattgctggaacctaggaggcagaggttgcagtgagctgagatcgtgccattgccctccagcccaggccaacaacagcgagactacctctcaaaaa

SEQ ID NO: 235377 - DNA, 466 bp, Homo sapiens
cagcgtggtcctgggttacctggtgtgcacctgactccaggagtcccatccttggtgggtcctagctgcaacaatgggtgctcctctgggaactgctgctgctgccccgtctggggtctggaagcagtgtggctagaggccattcggctctgaagttggcgagatgccatcttcctccttccggcctctgagtgaggatggggctagctcccaccttcctttctggccgctctggggcagcccagcgtggccagtgtggagggtggcactcctctatgagggaccccacggagcatgtgccatctccatttaggagctatctgtctcctggatcctgtgtttgagaaatgagttggtgtcttcacagaatgaggatccccagagccatcttgcccggtgctggctccccgcatgtctgtccctctctgggtgggggtcgcctggtggcggtgggactctgcggccg

SEQ ID NO: 235378 - DNA, 332 bp, Homo sapiens
gcccttttagtgatcaagcgtgactagtccatggactctggctggaagatgcaagatttcttaaccagctgccccagactgcctcggagaaaccacttaaggaatgccctgctgttgttaatgatcaacattagccagattgcagtcctcattatccctcaccccaataggaaggtagaagctatcctcttctaaaaatgcttatttagttattgactagcagttgtccctttggaagtctagcaatgttcagtcaagtcaagggaaacctttggttcttttgaagaactcttggatattctgtcaaagatgttattaaattcctggttctg

SEQ ID NO: 235379 - DNA, 332 bp, Homo sapiens
gggtgggtggcaggggcgggggagaagaggacagaagttattgacagtttcagtttgggaagatggaagcattctggagatgggtggagatgtttgctcaacagtgtgaaggtgcttgatacccctgagctgtacccttaacaatggttaagatacagccattatggaaaagagtatggaggttccacaacaaatcaaaactagaactaccgtgtgatccagcaatctcattgctgagtatgtatccaaaggaaatgaaatcagtgtgtcaaagagacgtctgcactcccaggctcagcacggcaccactcacaatagccgggatgtggaac

SEQ ID NO: 235380 - DNA, 334 bp, Homo sapiens
cttgaaaaaaatattgcttgtcctgtctgaattttgctgattgcatctttgtgttcttctatcccttttattttctgcaaattggtagttatatctggagggttgcctgagttcagttttggtgtctttggtaagaatccttcgtaggtggtgttgaatgtggactttcattgggaggcacagaaggtctggttgtctcccttttggggtgatggttgcccggagtatggtttactcttaactcctgtaatgtaaagggagggaggaaggaagaaaggaggaaggaaggaaggaaggagggaaaaaaggaaggaaggaaaaaaggaaggaagga

SEQ ID NO: 235381 - DNA, 300 bp, Homo sapiens
tgaagaaaaaaacatatgcacaacaactgacatcctgttggtagggactcttggtcctaaatttactatgagatttgttatgccagcccagccaacactggctttgatcaaatgcgaagagggaatagagccagcgttcccaactgtttctgcttccagtcatcctgggaccgaagccggaaaacacacacacaagaagcaagctttcattcctgcaaattctaatggttcttccccagcagtctccagcttttcaatgcttccgaaactgagtgctaacaggggcaattagtgctggta

SEQ ID NO: 235382 - DNA, 342 bp, Homo sapiens
ggcatcagagacacttggtggcagcccaggtagtagaagaacattggcatcaggggccagttgcccatcgtgatgttccctcgtaggtcccacctcatttaacttggcatctcagcactatttggccatgttgaccaagctacttcatttccaaagacctcagtttttacaaatgtgagtgagggaggttggtttgggtgattcattcattcagcaagctcctgtggaacgcccgctgtgtgcctggctctggaataacagcagctgccggttgttaagtgccagatactgtgctcatcatttcccatacattatctcattaaatcctcttgtgagcctctg

SEQ ID NO: 235383 - DNA, 436 bp, Homo sapiens
ccacaccagggatttttaacttgccaaatgtatgtgattgatttgaaggcaataatccatcctagacctgcgttttaactctcactcctaaaacagagtaaaatatttcatgacaaagatttggttttccttcaagtttttcagcattaattttagacatccagctcaaatagctacaacaggtttgcgtaccttgtcatgattttggaatgcactgttcatcaaaactattatctctgggagaaattacaaactttagaatctgtgtaagaaaaggaaacagcagattcttctccatttacctaaaccaaggccttcaaaaaatgatgaattgacactgtattctgtgagcattataagtttggttctattaatgtaagaataatttcattttctgtaatttaatgttttctcttaaggtatgccttgacaatct

SEQ ID NO: 235384 - DNA, 409 bp, Homo sapiens
cctgtcattcaccctcctgtgccgacacctgcccctgttgtcctgttgggaccttaacattctgcagccaacctttggactaagtgtgtgcagagtctccatgccgcgtcttgcccccgaagactggccctgcctccgcaggcctggctgccgtctgggttggtgtccagggagtgggtgtcgagctctccctcagctgccacagcccagaccttcctgacattgctgcttggagcagaggcctgggcgcgacccctctgtcttggcagagggggtgactctcacttcgtgtttgtcagggaagaggtgaagtgttgagaatctggtccttggagtgggcacatctttggggagcagcagggcctgcttcagagtttgtttcctaaataaaacaatggctctccagtga

SEQ ID NO: 235385 - DNA, 674 bp, Homo sapiens
tataaaccaccataaaaatcacattaaaaaatttataacccttcttgaaaagtgtcatttagagaaatgatgcctacaaaaatttcctttacagtacataacatcatgaatgtattgaatttacctcaaatctggatatgctgctgctgcttaaaagagggtacctcatttcctgattattattttaaaacgcagacctcttttcagaatgccgctaagcctgagatcttcattttcaatgaaagctagcttagaacttttttatttttttccctaaccactcttaagtggaaaccaattctggactataaatgcagaaacagctataggagaagcagttattaatatagattctctagtgccacacagaagataccagtcagcttttaactgagcacttcacctttttcatttttttaaatatatttgatcatgtttttatgttctagtcataaaacaataccccaatacattatataaagctttagtgttacaaaacagaataaatcatttccctatctcctaaacaacaaaattttctcctatatctaggataattttttttcatattttaaatttgtcaggtcagaatgtctcctgtagttggtgatttctcagcaccattttctcagcatatttcttcagtaagttacataaaataatgatgtatctta

SEQ ID NO: 235386 - DNA, 373 bp, Homo sapiens
atcagtcaccactcccagcctacgtatataatttctaatagaaaaaattaaaacaacccaaaaagttaaaacaagcaaaaaaaccaggcatcaaaaactgcttggcagctgaattctgcatctaagagggtgtgaatctgcctcacctccgagtcctccacaggatcagcaacatttcagggtcactgatcactgccgctacctgggcagcgtctcctccttgccactccctttctcccctccaccctctggggaatctgtccacacgtgaattgtaggtaaaggcctggcctgccttacacatgccagcagatctggggtgggccagcatctgcaggaaggggcctgcatgcagcttcctggggaaggcgat

SEQ ID NO: 235387 - DNA, 1443 bp, Homo sapiens
tgaacaagaaatcttttttctttagctgggcatggtggcttacgcctgtaatcccagcactttgggaggctaaggcaggagaatcgattgcgcctaggagtttgagaccagcctgggcaatatactgagacctcatctctacacaaaatacaaaaatcaggtggttatggtggtgtgtgtttataaccccagctacttgggaggctgaggtgggagaatcacttgagcccaggagttggaggctatagtgagtcatgattgtgccactgcactccagcctgggtgacagaacaagacctcgtctcttagaagaagaatttttgtctctaatgctttgctaaaagaaaagcaatatctaatatcttttctttgttcaaagaaaagcagtatctaaaagtgcagagttttctgcattttctaaagggaacttgttgggaggtgctctctcctgatgcgctgttcttgagtgccatccatgatcagggttaggtttggaacagagagggaggagaagacagagaggctcttttgggataagtgagcaagaggtgggatggatgaggaaatgaggttaaacgagacccgttcttgtaagagcaaggagagtgcctggcgtggctcctggttttccatggtgggtggagggcccgggcagccgctgatgccctgtggggaggaacggaggccactctgcaaaggggcctctcgcttccccagtgtcttcatctcgaaaagcaggcagtcagtagcccccaggatgctcttcccaccaccagggaatcccaggaaattcacttaaacacacaagggagaaagcatcctggccagaggtcatgagtgtaagagagtttggttacagtagatccataaaggaagagctgggtggggggccctgaggggggacctctgtcatcctgatagttccagcgtcccggttctagtgtgttctagaagtcttatgtccttcccattttctaactgacgttgtcccctgggaggacaggttgttaaaactaccctataaatggatttcctggcaagcccagtgcattttaaaagatataacaaggatatttgggtccattcaatacaattatttggaaggatcatctgctttgaaattttgggaagttctgtgtagctttaagagatagatatggccgggcgtggtggcttacgcctgtaatcccagcactttgggaggccgaggtggcggatcacaaggtcaggagatcaagaccatcctggctaacacagtgaaaccccgtctctactaaaaatacaacaaaaaattagccaggcatggtggtgggcacctatagtcccagctactcgagaggctgaggcaggagaatggcgggaacccgggaggcggagcttgcagtgagctgagatcgtgccactgcactccagcctgggccacggaacgagactccgtctcat

SEQ ID NO: 235388 - DNA, 648 bp, Homo sapiens
ggacctcagatgatccacccgccttggcctcacaaagtgctgggattacaggcgtgagccactgcacccagcctaattttcttatatggtataaggtcgaagaagggggcaaagcagacaccctgagctccaaactgcaggctggggatgaggttgtgcacatcaatgaggtgactctgagcagctccagaaaggaggcagtttccctggtgaaaggatcctacaagaccctcaggctggtagtgcgcagggtcccgctttgtcacccagcctggagtgcagtggtgcgatcttgactcaccgaagcttggatctcctgggctcaagcgattctcccgtctcagcctcccgggtggctgggactacagccgagcgcggtggctcatgcctgtaatcccagcactttggaaggctgaggcgggggaatctcttggaggccgggagttagagaccatcctggctaacttggtgagtctctatgtggtggcacacatccgtagtcccagctactcgggaaggctggggcatgagaatccgctgaatctgggcaagtggacggtacgcagacggagggacaatgcactccagactgggggacagagtaacgactccagcccaaaacaacaaaaacacaaaacaacaacaaca

SEQ ID NO: 235389 - DNA, 652 bp, Homo sapiens
ggacctcagatgatccacccgccttggcctcacaaagtgctgggattacaggcgtgagccactgcacccagcctaattttcttatatggtataaggtcgaagaagggggcaaagcagacaccctgagctccaaactgcaggctggggatgaggttgtgcacatcaatgaggtgactctgagcagctccagaaaggaggcagtttccctggtgaaaggatcctacaagaccctcaggctggtagtgcgcagttgaactttcaaaggaaaaggaggctgcctttacatctgacacatgcttatagatggggattatcaacacgcctccagagacatggatggacattcctcccctaccttgcagagatccgggtagaagcctctttgcgctggattaatctggctttgtatttcgtagtgccgtcactttcctgagaagtcttacctttataccttggcacacgtcatcgtcctgagattctgtttcctttgatttattgatgccagagtgactaaggacatttcatttattaactttctttttttctatgtgatctctatactttaaaaaagactggggtgtcttcctggaaacataataggaaggaatgtctgtttcatgaataaatcatttgtgtagtcaaaatgtatatt

SEQ ID NO: 235390 - DNA, 260 bp, Homo sapiens
tcctcaaggtgtgatgcttcgatgcaaggagtccagtcaggagctctctcagtggcctccttcttggtcccgtttcgttgggtcattgcctgaaatgcaaagacaacacttacccaggatgtttccccaaggccagctacaagcccctctgcccccatgcctttcttgggccttcactaccaagggactctcttcatcttctgattgggattgtgtccagtcctctgcttcttctgcaataaatgattaaatctgtttgg

SEQ ID NO: 235391 - DNA, 4515 bp, Homo sapiens
  misc_feature (1986)..(1986): n is a, c, g, or t
  misc_feature (2502)..(2502): n is a, c, g, or t
  misc_feature (3010)..(3010): n is a, c, g, or t
  misc_feature (3594)..(3594): n is a, c, g, or t
tgataatgcttcattgttgaggctgttcgtgcattgtagactgttcagcagcattcctggcttctatctgctaggtgccaatagtgttttttatgacaaccagaaagtgtccagacactgccaaatgccgaggcaggggaagtgcagaatccttagttgagagtcactgctctagggtctggacccttccactaattaaatcttcttgcacctgcatacttagcttaccttggtatgcaggtgggtgaacacctgcctattagtagtgcccgtcgtcaaatcctgcatataaactggtaagaagtggtgctttctcttttcctggtacagatcctagcccagaggtgatgagcagtaaagctgcagattggaagggaggggctggtgaaaacagtggtgcggtgcagatggggagggattctagtagtaggcatcttagacttcagttggtgttggtggcaatggtatctgtacccctctaagaccgcatggcaagaatacaattttatatttaatagtgatcagcatggatgttggtgcgtcacaaacattgactcagcagtgtctaaacctgggcatttagaacaaggcctcacagaatcttctggaagtgcttcaaactcctttccaaacctagtcgtcagttgttttttgtaaccttcccatgttaggcctgggtggatcccctcttaaggctgtactttagggaaatattttttatcttcatatcactttatctgtcattcattctcctattccctgttggctgcatggggcagattaaaacagactctgattggactaattagaataattacttcaaggctaattgcttacttgctgctatctttaatcactgctacgtggtctgtggtgtggtggccacatgcccagagacccaggcctaggccagccgtctggaaatgactgtatcacccaggcacggggcatgcactggtgagctcagcctgtgactcttccagttaacggttggtattgggtggagtgggcacccctgtcagttctgggatagtctgatcttgttcagctggttgaaagcaaaatttagctttctggcttaaaatagttgggaaagtagggcagataggtcctgggccacatctcttgtgtggactcttctgattccactggagggggaggaaccacaggatgaagtcagggctgtgcaccgtcaggaggagctctgggccaggggggttggctgcccttgctgctgccagagcctgacaaggcagagggcagtaaaagaaaggaagctaacagtgaaccatggtgttaatcatgaagctcagagcaagcagagaataaataggccataaaaatttcagagctggccaggcttagtggctcatgcctgtaatgccagaactttgggtggccaaggtggacggatcatgaggtcaggagtttgagaccaacctggccaacatggtaaaaccccatctctactaaaaatacaaaaactagccgggcatggtagtgtgcacctctaatcccagctactcaggaggctgaggcaggagaatcacttgaacccgggaggcggaggttgcaatgagccgagatcgagcccttgcgctccagcctgtgctgtagagtgagactccgtctcaaaaaaaataataaaaaaaaaaatttcaaggccgggcgcggtggctcacgcctgtaatcccagcactttgggaggccgaggtgggtggatcacgaggtcaggacatcgagaccatcctggctagcatggtgaaaccctgtctctactaaaaatacaaaaaacaaaattagctgggtgtggtggcgggcgcctgtagtcccagctacttgggatgctgaggcggcagaatggcacgaacccgggaggcggagcttgcagtgaaccgagatcatgccactgaactccagcctggcagcctgggcgacagagcaagactccgtctcaaaaaaaagaaaaagaaaattcagagctgnctggccagttggtggatagccttcactgatacagtgctagctctctgggggatataggttcatctctgcaaatctctttcatggggctagtgggtgtacgtgtgccctttggtgaggccagcaaggccccctggacaggcttgctaccaggaaacacagatgggcttttcttcctaccgcctccacaacaaaatccagaaagtttgacagcagacttggttggagttacagcaccaccattttaactcgttgacttcggggaaattaagctttttgaggcctcagttttcctcatctgcaaaaccagtctaatgatgctatagagttgttatagaaagttgaatctttgtcatctattgaatgcttgaaatttagctaaaagtgtctcaggagatgggctaccttctgtgtttagtactgtctatcttggtgtgtacagaattgggacttggcaggttgaccttccctctggattcagaaagccccaggacttcttataaagttaggccatgggtngtcttggaggcttgggtctggtaaataattgagcctgagctcacaatcctgcccctgggtccaggtggctggtctgctgcccccaaaagcctgaccttcttggtcctgtgggtctgtcagtaaggcaggtagccatagctggagagagacagtcaccaggctgggatcttggacagtccctccatctctggttcatcctggcctaggcagggcatggagtagatggaaaatggtggccatcttggaaatgtgtcataacaactcagtttccaagaccgtcccctagaggagagatgtacagtcctgcatagtttctttaaagaatttttcagggccaggtgcggtggctcatgcctgtaatcccagcactttgggaggccagggcgggtggatcacctgaggtcaggaattcaagacaagaatggccaagatggtgaaagcccgtctctactaaaaatacaaaaattagccgggcgtggtggcaggcacctgtaatcccagctactcnggaggctgaggcagagaattgcttgaacccaggagctagaggttgcagtgagccaagattgcgccactgcattccagcctaggcaacagagtgggactctgtttccgaaaaaaaaaaaaaaaaaaaaatttcagacacctcatttaatttgcacctaatcttctgaggaggggcttgctgtgatctttgttttgcagaggcagaaacaggttctaagtggtagaatagttcagctcaacacacatttcatttagtgtccactgtgcagggatgagtaaggcctttgaagagctttgtcttgaagggaagacacaatttccacaaggccagatggaatagcaaagaggcatgagagggtgtggttgagcaatgtagggggaacccagcctgggcagtcagggaaaggcccccaaaagaggagatagacatgtcagctccttcgagagtcactctgaggtataggactagtgggtgacatttgcaacatatactggtcagtgcctctggggctggggctgggggctcagcccagagagggagcaggcaagccagatggcataaggttatttcctcttctcctttcnctgtgaaaacaaaaaagcaggaggtcctggaacttttcatgccagcagtagggctggacccaagggcatattaagttgcaagctggccgactgagactttcagacaatttattttgtagcaagtaggttccttaatagtaaataataccctgtggtctctgctcgacattttgtgagattggccaggagagcttcccttaatcaggactttgagctcatgttgccagagcagccggatattctgaggaaagggtcagtgggctgtgtcatagctgctaggaagttctagaagaccagtactaataagccttccaggttgggtcagtgccaaagtcatttttgtgggcctgtgcagccctacctccatactagttcttccaaggcctgggctccgtggcaggaacctgacatggcttattgtttgttctagagccctttgggggatggggtcagggagcatgcgggcagtcaagctttgacaaacatctggatttgctccagaactgcattaagaaaagtggttccttgttggagatgggaagtcagggcccttggttatgcatatagccaagtcaaacagattgataacacttgtcaatggcagggaaggttgcctgtagccagcactgcagattcaggacttagaaacgtgcctctggggccgagcatggtggctcacacttgtaatcccagcactttgggaggccgaggtgggtggatcacgtgtgatcaggagatcgagaccagcctggccaacatggggaaacagtcttcactaaacatacaaaaattagcctgtagtcccagttacttgggggtctgaggtaggagaattgcttgaacctgggacgtggaggttacagtgagccaagatcatgccactgcactccagcctgggcaacagagtgagactctgtcttt

SEQ ID NO: 235392 - DNA, 2432 bp, Homo sapiens
  misc_feature (423)..(423): n is a, c, g, or t
  misc_feature (1677)..(1677): n is a, c, g, or t
atgatcaaagtacagtaggtaagaagtaaattttcaaaaacgtgttgtggtccccctttaattaatgcttcacgcgcagagcaaagccataaaccatgtagcgggggcgctgtctgtgcgccctgcagtcacctccctcctgaaggtgccggagcgccctgatggcactcgcaggagaggctggtgcttctgggcaattctgaaacaggcctttctaaccatgcagtcctctgctccctttgtctcggaatgtcaggttgagacttgtggctgctccagtccctggagatcccttttggtgaatggaatgcaagtccattcttgaattattgtagtgtttgagctgtacctgcagaggccaggtctcagcacgtctgactcacctcagttggaacaccccgattcagagagggaacagattcnaagtgagagattgaccacgccgcctctaactctgtcgccgttgtttctttattaaaagtcagattgatggtaaattaggatactacccgactgaatactatccttgctgttaaaaatgattatggagatcatgcggctccatggaaaaatgctaatgattctgtgccaagtgtaaaaagccaaattcagcatggtactcttgctgtgcttacagttatataaaagtcatgcatctggactggaagggaatttggaaaaatcagatttatgggataagttgatttatggcattgtgggctaattttcagatttccttttttaaaaaacaataatgttcctgcagtaagttttaaaattgtgggtaaaagaatagtaaccccacaaggagtgacaattgagcttgcatttttacctcccctggctccagcatttgaaactttagacctggtcaccgtggcccgccaaggagaagctgcccgtagtgggagccaggccacagggtgggacattggagtggaaacggccagttccaccctataaaactttaatgcggttgttttatttttctggaagaaatgaaacgctcagggatgggactgaggggaagcagccgtgggccacctggtgcttttgaactggtcaccggagggtgtcgacaagggctgtcaggccatcgggatttctcctggttcccctccagggcatcctgacctgcatctccccagtgtcccagcacacagaggagagcaagccttgggcaggcacagcaccgcagctctgcatggatctgtgaaggagtggaaggatgaaatgcccctgggctgcaagccttctttccagaagggctgaaggaaagaacggattattggcccatcctttttgccagcaaagtagggtttttttgtttgtttttcttccccctcttttgatgtggggctgctctccctgtaagccgactgaaagggaaaacggtgtgctagaaccaagccatctgttgccaacaggaagggtattagcaggtctgttatgagttgctcttccgttggtagtattgatgtgcctcgtaagttaacttgcaagaatccaggagaacaagccagaaaggctcacggagcccatgctgccagtcatctgagccctgctaaccctcaggtccagcaggggcagtccatccctctccaggtgttccaggaacattgcagaatggcctgatctctccaactctgtgtgggcccggtccagaccaggagggcnctatggaggcagatggggttttgggccctggaccaaaacactcatctgcttacctcgcctcgccccaagaatggggactttggagcagaccggaataaaggaaatgatcttctggagtgggatctctgagtgccagtgttggccggtttcctggacatcacctctgccagcagtgagctctgggcctcacaggtgtgtctgttcatccagtggtccttttcctctcgtaggaaaggatgcctgtgctgcacctggccagagccagacccttccccaccctgcgcagtttgaccagcgatgggctcagcatctgacacctgacgcctccatccgacaggtgttccctgagtgacacttggttagccagacagccctgccctcatctgccctcctgtagactcacccgtggacacaccatggtgtactcggtttgagagcttaatcatagtgggtagtgctggagaggggaatgggacaggatgtggtcctgccgcaggggctggccgcagcctgcctgagggagccctgggcagggggccaagggtagcccacctgagtatcggccccctggatgctccgcaggtctgcgggttggagtgagggcagaccagccagggcaccctcattctcctgggaggatgccttgctttcttggtctggtggtctcttagttacattacactccggtgtattcgtgtactgatttttcacaaaagctttttagtttggaatggtatgacttactgtaaaattgc

SEQ ID NO: 235393 - DNA, 811 bp, Homo sapiens
atgatcaccattttgtgaccctcaatgaaataattccagcaaggatcagcaggtgaaaggtttttggggaacaggatatttctagggtgtctaagtagcatccttagattaattctcattgtaaaaggagaaccactttaacatggagtgaccttatagtctccacctattccaggtgggcaaagctagtttcactgaaaatggatcaagcctgtattacgtgctcatgtagtgcagtctgacattatcaccatcacctgtggtatattctagcaaaaaatgtctaacctgaatttagtccattggattccctatttacaggaaatatgggggataaaagaataagttagacacaaaattgtggaatactttatgagaatactgacttcacatcttctacagtcattgggtagctgggagagaaaggtgggacagactgctctggattactgagattggccgtaaacaccatgcatggaacttggtttgatcttgggtaagaaggagaaaagctagaaaagatgttaggagccaggaacagtggcacacacctgtaatcccagcactttgggaggctaaggagggcagatcacttgagctcaggagtttgagaccagcctgggcaacgtggcaaaacctcacagccactaaaaaaaccaaaaagttccaggcgtggtggtgcgtgcctgtagtcccagatattgaggaggctgaggtgggaggatcgcttgagcctgggagaagttgcagtaagctgagatcacgccactgcactgtagcctgggcgacagagtgagaccctgtctcaaaa

SEQ ID NO: 235394 - DNA, 426 bp, Homo sapiens
tagctggtgagctaaaaaataaaaaaggtccgtgcatcaatctcataatgttttaagagagtttacgaatttgtgttgggccacattccaagctgtcttgggccacatgtggcccatgggcagaggattggacaggcttggtccgtcacaatcaataggaacccaaagagacagaacaactaaatgtcctgtggtatcctggatggggtcctggaacagaaaagagatactaggtttaaaaaaaaaactaagagaatcagaataaacgatggactttggttgctaataatatatcaatattggcttattaattgtaacaaatgtaccatacaatgtaaggtgtttataacagggaagcaagatggtggggctgggctgggaactctatctgctcgattcttctgaaataaagaactgctctgaaaa

SEQ ID NO: 235395 - DNA, 320 bp, Homo sapiens
ctgacagcaacccaatactcaggtataggtgggtcaaggaagtagcaaaagaggcgagcagcatccccagcgcagccaagatgcctccagtcatcaccacgggcctgggcccgaacttcgtgctcagggcactgcctaccgggctcccaaactgctgcaccgcgattcctatggaggcgatccaggagacgcgcgctgcctgctcctcaaacgccgccacaaactccacgaagaagaccccaaaggagcggagcaccccaaacacaagcgccgactggaagaacgctgagagcaccaccaccaaccatccccagcccccg

SEQ ID NO: 235396 - DNA, 245 bp, Homo sapiens
  misc_feature (164)..(164): n is a, c, g, or t
ctgacagcaacccaatactcaggtataggtgggtcaaggaagtagcaaaagaggcgagcagcatccccagcgcagccaagatgcctccagtcatcaccacgggcctgggcccgaacttcgtgctcagggcactgcctaccgggcctgaggaagtggaaggggcngctgcgagaagatctcaggggtctcccccccagcatctcccgcccctcgcccttccacttcccagtcgccgcattccctct

SEQ ID NO: 235397 - DNA, 998 bp, Homo sapiens
tattccaaaggttcagagctcatctaccaggagccagccaaggccagttttgaagacaagtctttcttgggaatatgcagggtttgagcaactcagtcctgctgagttaaccctttcttgtacagcaagttagctcttcagggagttagctctgtctatcctgcccctgtctgcctagccactccttttctaggtagagtggaccttgctgttcacgtcatagatggccattccggtgtacctagactcctttttattcctttgccaacaagtaattgggaatgtttgggatttaaggaacatgtctgtgctttgcaattttcatgtggaccatgggtgaaattatggcacacattctatcattgtgatttcaacaagtatttttttgaatgctgctgtgcatgaggcatggtgttagatggcagattgacagaaatgactaatacaggtatttggcctcaaggagtttacagtttcataggagaaagaaaaacaaaactagcaattctggtaagcagtatgtgttttggagagcacttaacttcatcagagagcatggttgaaggtgtatctgtgtgtatgagaaggtgttggtgataattagaaggcttccctaaagaggtcactcctggggttgagccataaagatcaagtagatacaagtgggcatgaagctagtattttgctgccagtcatttctgtagttaggttgcctatgtggttggagcatgtatgtattgttacaggtgtagtctgcttggcttccctaagagaatgccccagtcctggccagaatatacatgtcttttttagggtttgcaccaaggggaatagagagtgtctggctcagtacaaatctgtttccgttactccattatccagaaagccactgaaatggcattagcctacacttaatgggtggtagtgttttcacacattgcttctcaaaggaggagtatgtgaatgtttagtttgggcctggtaaaaaaaaaaaaaaa

SEQ ID NO: 235398 - DNA, 167 bp, Homo sapiens
ttttagcactgggacatcatgccaaaaatggagcagccactatcacagatgtaaccttctgactagctatgtcctttaaagacacggttcctgcccaccataccttatggtagccctccccaggtccctctggcaggcagtgcttgtgagctcagtgtaccacaatc

SEQ ID NO: 235399 - DNA, 485 bp, Homo sapiens
caatttacagattcaatgctattcctatcaaactaccaatgtcattcttcacagaattagaaaaaatctattgtaaaattcatatagaaccaaaagggagtccaagtagccaaagcaatccttagcaaaaagaaatgaactgttcttgactgtaacaaagcaatgagaagatatcttctaaatgtattcttagttcatcataagcagattgatttgtatttattttccaaggcattaaggaaaaactcttctaaaatgtcattcaaaaatgtttctaattttgttcagttgctgaattttgccttgcatacaatgactttcaaatttttagtaagctattattcaatctcttcttgcaactaagaaagatttgctcactattctccctgtggtcaatgttgttcaacattcatcttttgtttcagttctcttttatttacaaataacagaaaatcacttctaactgtctaagtaaaataataaaa

SEQ ID NO: 235400 - DNA, 427 bp, Homo sapiens
cagtgtaatatcatcagtccaaaactgcattacttttgtaaaaaacactggttaatttgtataagatatcatataactttttatgctttagaggttaaacaatgtctttgggggggaacatttattgtcatcactctaaatgtggtggtagctcttataaagtttgttgttgttttaatcaaaagccaactgaacagcatataaagactgataaatattcaggctgagtagtattttaacgcttgtcttcaacttgatttgtctgtttaattgaaaagggttgtaagagttaccgttgcattttctggcctactacctttaaaattcctgttgtgtttctttgtatttacaaggaaaggtctgaactttttcttgtcaaaactagcttttttccgacaaataaattatcaggttaaacttgcactaa

SEQ ID NO: 235401 - DNA, 193 bp, Homo sapiens
catctgtcatgggaggtgttgtgcaggtaacgaaagaaggaaaagacacatttggtttcactggaacttccccccactctcttttaatgtcttgcttcttcctccaagatccaaaggctgacatttaatgataccagctccaaattaaaaataaatgtaaaatgcatgtaaaatcaattctctagtcagcaca

SEQ ID NO: 235402 - DNA, 254 bp, Homo sapiens
caccaagtggctcctttccctccctcctgtgtctgttcctaggttcccagtgctctggggccaaataaggaggagctggagtgaagccatcccgtgccctgctttccgtttaggacagtcccccaccgcagggcaggctcccaagtcaccttccagggaggaaccagactgggtaggagagggctgagaggctgactccttctcagacaagctttccacagctttcctatgtcaaccgtatctctactgcctcc

SEQ ID NO: 235403 - DNA, 783 bp, Homo sapiens
aaagatagcattggctttgctgaaagaaaatagaaaccggtcctctaaaacctactgctgtccctcaaagagttaacggagtcagttccaaaggagttaggcaacggctgaaacaggataataaatgtgacactctcagattatcagtagcaaatatttgatcttatcaaataacagaggaagtagtttagttacaaataaaccaatctctcataaaacaagttttcacacaggttcatttcattgagctggagacagttagaggccacttgtaggcagaactcccactctgtacactctgtaacagcccctcgtgattaatggacagccagggggaggctgcatcctgcggctccaggcttcatatcagcagaacagccataaacagcatctcaggattattgcgaggaagtgactcctcctctgggaacatagctgggcttgtgctccttctccctcaccacccgccttctttctgtcccgctcgctctttttccctgtagagcagagaccatcgtgtcctagaaactatagtagatgtcactgcttggcacttgctgtgcaaagagaggacaagtatgtgggtgtgagggggaggtggaatgctactcttaaagtaacagggactgtgctagccagggcctcgatggaggcttttttgttccagtctttgaaaccactttggtgaaggcatccaacttggagtccagaaaaaagtacaaacactgttttagagtaggaaaaaaaaagttagagctccttctttcaaagtaaaattctcat

SEQ ID NO: 235404 - DNA, 855 bp, Homo sapiens
cgagagaagtgtggggagcgtggagcgaaaggcctaagaagtcaggcctttaaaaaaaactctttgaacagctttatttaaggcataattgggaaagagatttttctgctgccctggtgataaagttcagtcgagagtcggtgttaataaaccttccttagaaccaaggtgacttggaaagttgagttctttaggtctgtggtcaaattaacaaaattatgtcaataagccccaggtgagtagggtcaatttacatatgacacacacaaatatttgattatacctcaatgaatgaataaaccttcagaatcttagctaccattttcattcttccatcttgacacaaaaggtgggagttccattattagacacttgcaggagttcaacatagtatttaaatttaagtacagtttgttattaaatgagaagtgttgctaacttagttgcaattttgtatcaggcgggcggtaatagtttgttggtatgacttccatacatgttgccatgtgaaggatgctttcggggtagatttcttaaacatacaagaatcaacaagtcccacctacaggagataacaaatcattatgatgtactggaccattattcactggggctaagaagtaaattatccccttttgaataaaagcacagcaaaatcaaaatgacctagtacatatctgagagcagcagaaggccaaggggagccctagagaatcagctgccctttgtcaccatgttgcagggtaggggtatggggcaatgcagcctgcccagagcagacgttgcagtgagctgagattgcaccactgcactctagactaggcaaccaaagcaaaactccatctcaaaaaaaaa

SEQ ID NO: 235405 - DNA, 759 bp, Homo sapiens
  misc_feature (5)..(5): n is a, c, g, or t
gccanagtaaagcaaagagaaaggaagcaggcccgttggaagtggttgtgacaaccccagcaatgtggagaagcctggggcttgccctggctctctgtctcctcccatcgggaggaacagagagccaggaccaaagctccttatgtaagcaacccccagcctggagcataagagatcaagatccaatgctaaactccaatggttcagtgactgtggttgctcttcttcaagccagctgatacctgtgcatactgcaggcatctaaattagaagacctgcgagtaaaactgaagaaagaaggatattctaatatttcttatattgttgttaatcatcaaggaatctcttctcgattaaagatacacacatcttaagaataaggtttcagagcatattcctgtttatcaacaagaagaaaaccaaacagatgtctggactcttttaaatggaagcaaagatgacttcctcatatatgatagatgtggccgtcttgtatatcatcttggtttgcctttttccttcctaactttcccatatgtagaagaagccattaagattgcttactgtgaaaagacatgtggaaactgctctctcacgactctcaaagatgaagacttttgtaaaccgtgtatctttggctactgtggataaaacagttgaaactccatcgcctcattaccatcatgagcatcatcacaatcatggacatcagcaccttggcagcagtgagctttcagagaatcagcaaccaggagcacc

SEQ ID NO: 235406 - DNA, 583 bp, Homo sapiens
aaggtcgatctaaggatcccgggcagtacggatgtggttgtctacttgatatgtgctctggtgctggacgctggtggctcacgcgttgtatcccagtcactttgggaggccatggctaggcggatcacggacaaccccagcaatgtggagaagcctggggcttgccctggctctctgtctcctcccatcgggaggaacagagagccaggaccaaagctccttatgtaagcaacccccagcctggagcataagagatcaagatccaatgctaaactccaatggttcagtgactgtggttgctcttcttcaagccagctgatacctgtgcatactgcaggcatctaaattagaagacctgcgagtaaaactgaagaaagaaggatattctaatatttcttatattgttgttaatcatcaaggaatctcttctcgattaaagatacacacatcttaagaataaggtttcagagcatattcctgtttatcaacaagaagaaaaccaaacagatgtctggactcttttaaatggaagcaaagatgacttcctcatatatgataggtttgtacatacacacaaacacat

SEQ ID NO: 235407 - DNA, 722 bp, Homo sapiens
  misc_feature (5)..(5): n is a, c, g, or t
gccanagtaaagcaaagagaaaggaagcaggcccgttggaagtggttgtgacaaccccagcaatgtggagaagcctggggcttgccctggctctctgtctcctcccatcgggaggaacagagagccaggaccaaagctccttatgtaagcaacccccagcctggagcataagagatcaagatccaatgctaaactccaatggttcagtgactgtggttgctcttcttcaagccagctgatacctgtgcatactgcaggcatctaaattagaagacctgcgagtaaaactgaagaaagaaggatattctaatatttcttatattgttgttaatcatcaaggaatctcttctcgattaaaagaaaaccaaacagatgtctggactcttttaaatggaagcaaagatgacttcctcatatatgatagatgtggccgtcttgtatatcatcttggtttgcctttttccttcctaactttcccatatgtagaagaagccattaagattgcttactgtgaaaagacatgtggaaactgctctctcacgactctagagatgaagacttcgtaacgtgatctttgtactgcggtaaacaagtgaagtcatcgctcatacatatgagctatacatcatgcatagacctgcagatgacgtcaagatagaccagacacaatgtctatatctgtctcaggctatacactagccaggcagtagcagcacaggacg

SEQ ID NO: 235408 - DNA, 714 bp, Homo sapiens
aattatctacctataaatttggtaaaaaagagaaaaccgagagggctaagtgatataacaaagttaagttactgaacaaaatagtgaatgtgagaataaaacactaatcaccaatgaaagaaaattatatctataatccccaaaattatgtggtcatgatgaacatttgacaattattctcagtacttctgttcatattgcaaaaaataagagacatctgggccacttcaaatcattagaatgatgaataaccttcagacaaatctcatccagaaatagtggaaactaattattttgacattctttaagacttctaattcaaaagtaaagttctcaatcctttggatatcaaataggttttcactgattttgctcataactactacttctcgaacaaatttgtctcttgaaccacctagaaatatctctgaatcctgaaattgctcctaataggacttatttctaacctactactcaatttatgtgctaccccattctttttttgtttttacaacattctattttaatctacatattgttcaatgtttctagttgtccattacacacatgtgcaatggacaattacacacacatgcacacacacctctaaagaagtttgtataagtcagatactcaggtgactttaatgatgaggatcaaatgaggaagatgaatcatttaattacacaatataaactatgatgataatgtcac

SEQ ID NO: 235409 - DNA, 446 bp, Homo sapiens
aaaaaagaaattatcgtttttgtgctcataccttgatatttacagttttatgcttgataccagcttcctgaattgactaagggatatttcagattcttacttaaaacttgcctttttttttttttttttttttgagacagagtctcgttctgtcccccaggctagagtatagtggctcagtctcagctcactgcaacctctgctcccaggttcaagcgattctcctgcctcagcctcacgagtaactgggattacaagcgtgcgccaccacacccggctaattttttgtatttttagtacagaataggtttcaccatgttggtcaggctggtcttgaactcctgacctcaagtaattcacccgccttggcctcccaaaatgctgaaattacaggcgtgagccacacacccgaaaacttgccatttttgaatgagacgtttaagtgg

SEQ ID NO: 235410 - DNA, 292 bp, Homo sapiens
tttttctcctttcattgggttgacagtgtttaaaattatatccagagctgtctaatttgcctattgctctaggcatactgatcctcaggaggtaagattggatgggttaaagtggacaggctcaggggctgagactgtccatctctctgagagtcgggggcagcatttatcaggggcctgtggtcagccaagcttggcttgggctctgtgggaagataaaaccaactggcccagatggacttctgtggggcctggatactgttgggaagataaagcacataagcccggtaag

SEQ ID NO: 235411 - DNA, 447 bp, Homo sapiens
gttgctcaaattttattccattttagataatttacattggaaagaaaccctacaactgtaatgaatatgaaaaaaattgtttaaaaagtacaccttagaaaacactagtttaaggccgggcgcggtggctcacacttataatcccagcactttgggaggccgaggcaggcggatcacgaggtcaggagatcgagaccacgatgaaaccctgtctctactaaaaatacaaaaaattagctgggcatgttgtcgggtgcctgtagtcccagctactgggagaggctgaggcaggagaatggcgtgaacccgagaggcggagcttgcagtgagccgagatcgcgccactgaactccaacctgggcgacagagactctgtctcaaaaaaaaagaaagaacgctagtttatatgaaagcatttaacagatgcagtaaatataaaaaattaat

SEQ ID NO: 235412 - DNA, 262 bp, Homo sapiens
cactttgggttcagaagtcatgaggtgcagtcctgagcctcagagggcttcccaggctgtgttctcatgggttccatagcacccaggcctcccactgtggagccaggactttaaccatctcccttggggtccatagggtggcctgtatcatgctaacagggaaggaaacgtttgttgatttctttatgcatggctgaattaccaagaacacctaatgactggtaatgaagtgtcctggtttggtctctgccatgtctcagtg

SEQ ID NO: 235413 - DNA, 616 bp, Homo sapiens
agaggattaaacagggtcttttttttttaaatgtgtcttcacataaaaaagaggacttgtggctgagtctttattagcagtggtttgagggaaagtttttcttaaaacatgtttattctgtgataggtagaacttccttgacaaggtagcctgtgtcctagatagtatacttatattagatggttatgtcccgcaaaaataactctagatgtctgaaacaaatgtattcctccaggggtcccctgagagcccttaaaagattccccattgaaagactggattagctagccatccagttaaaggcctttctttattgtctagtgtctttctcatagcctgaatttctccagttctccctccctctcagtcatcctccttatctctctacccatccaccctacccagtgctgttccatgccatctttgtcaaccccaaaatgattattcaacctttgaagaattattgttggacaaacaatgcagggaaagcttatgatttgaaaaatcatcaggggcctgcctttaaatgctgactgcaatctaattcacaaatagcattcgtttacagtgacaagagttcttgaaattacaattttgggatgatgctccatttttt

SEQ ID NO: 235414 - DNA, 562 bp, Homo sapiens
agaggattaaacagggtcttttttttttaaatgtgtcttcacataaaaaagaggacttgtggctgagtctttattagcagtggtttgagggaaagtttttcttaaaacatgtttattctgtgataggtagaacttccttgacaaggtagcctgtgtcctagatagtatacttatattagatggttatgtcccgcaaaaataactctagatgtctgaaacaaatgtattcctccaggggtcccctgagagcccttaaaagattccccattgaaagactggattagctagccatccagttaaaggcctttctttattgtctagtgtctttctcatagcctgaatttctccagttctccctccctctcagtcatcctccttatctctctacccatccaccctacccagtgctgttccatgccatctttgtcaaccccaaaatgattattcaacctttgaagaattattgttggacaaacaatgcagggaaagcttatgatttgaaaaatcatcaggggcctgcctttaaatgctgactgcaatctgggatgatgctccatttttt

SEQ ID NO: 235415 - DNA, 415 bp, Homo sapiens
agcaaaaattgcaacaaattattagcacatcaaatcctgcaatacataaaaaaagaataatatgtaattacaaagtgaaacataaacctggaatgcaaagctgattaaacacttaaaaatcaatgtaatatgccatattaacaatctgagaagtaaaaccacatgatcatgtcaattgatgcaggaagaaacatttgacaaaattcaatattcatggtacaaactctcagaaaactagaacaaaagggaacttcctgaactcgataaagggtatctacaaaatcctacacctaaaaatcatacttcacagtaaaagattgctttctccctaagatcaggacaaggcaaggatgtctactttcaccactcctatttaaattatacgtgaagtcctagcccttgcaataaggcaaga

SEQ ID NO: 235416 - DNA, 281 bp, Homo sapiens
aagaaacaacaggatagaaaagacaggaacaggatgctccagctaactccatttcctgggaaataggatttccccagaagactttgtattccagtcagccctctccacagctgcttcctggaaagaacccactttgctcccagaagataccttcctgaatcatcttctattttgaacaattatttggggttttttgttttgttttgttttgcttttaatgtattaatggagaatgtagtaaagagccttggctaagggtcagaagacctgggttcatgtct

SEQ ID NO: 235417 - DNA, 544 bp, Homo sapiens
ctttttctctcctaagaccttgtctattttcgagcaaaagtttttttgttttgttttgttttccttctcagttgactgaattctgttttcacctgatttttttttaactaaaatagttattgcaacaaaggctacgtggttatttaagaaaaaaatgaagtttaattttatttttaatttggctaaaagaaaaataaaaacatctccttctatcatcaccagactttttctctctgtaccttatgttgtaaattttactatttgattttcacctgagttgtttcctttaatgtgcaaatttaaggctatttttctgacagctgcctagggttttgaaacaggttaccaagaatctgaaattctaagatagaaaaaaaaagtggggtgatctttataaatctataaaatgtacttccgttggcatgcctaattcatctttatatgtatttatgtattgtatacaaaatatttcactactaaaaatatataaagtgttctaattaattgacttaaagaaaaaacaaaagtgcttaaatgcgatact

SEQ ID NO: 235418 - DNA, 492 bp, Homo sapiens
taggtcttctgaaagaaaggagtgtaaaatgaatttttggaaatgtaatgcttcttaaagcactaaagaagttttcttctgagcagagagtcacaccataataaactgagtttataattatagattttcacgtatggagtatttgccaataatatttgaaaatttatatctaatcatctagttatcatatattccctttagctcaccattatagatgctatttttatacttatattcagaggttgcaaactggccatgggccataaagggactctgaaagcaggtaggttctgtttggcctgcacagctaaaacattttgggttgccttttggaattcatgcactctccagccttctacatgactactgcttcttactgtgttagaatcaactccctacacctacctggccctagaaagcattaagtttgagatctttgtcacaatcaaactccatccctccaaaacaatttaataacacaagaggaagaaa

SEQ ID NO: 235419 - DNA, 369 bp, Homo sapiens
tggttctcaacccctcatctccctgccacgtgcccggtagttccatcacgacatcaaggcataggcccgtccataaacctacgcacacaaccccaaagcgcaaaaacagcgacagtctggctacagcaatcacacgttcattcactcatccactcagctccagaaatgcaggtgggttgaggggtggagagctggcctatgggttgaacaaggcagaatctttgctgacctgacctcaatccatctcagaaagagggggcaagcaaagcccaagtggagtggattcgaaagaggaagggacttgcgggcaggggcttgtttagtttatgttggcaggagcaatgcaagagggcaggaggacccgggtgc

SEQ ID NO: 235420 - DNA, 117 bp, Homo sapiens
ggagagggggccgcgggtgtctcgtcctgtcccaggcccaaacccccaggggtcctgtcctcaggatctgcttgagccgacttccaccgagggagggggagcttcaggacgcctgct

SEQ ID NO: 235421 - DNA, 452 bp, Homo sapiens
tctcttactcttattccctagacagtcagttcctctctttagaaataattagttttatcagtttcttgagcagccttgtatgtagtgcacatatgagtggtttcacacaacatgagagagtgtgtgtgcattttataacaatacctttttttgttttttttacctaaatagtggtagcattctttaccataaattttttacttaacatcttgggatatcttctcatatggtacataaaaagtattttcattcctttttaaaaagttgctgcttagtggtccattgtgtagttgtaacaatttgactagtaccttattgatggttgtttttaatcttttgctattacaaatagttctataatgaatgcccttctacaaagattattttgcgcctgtgtgagtatttgtaaaagaaattcctagaaatgaacttgcagaataaaaccatatctg

SEQ ID NO: 235422 - DNA, 326 bp, Homo sapiens
ttgccccacataataacaataataataacaataacaataataacatcagcagcagctgaaaactatgtagtgcttcccatatgccaggcactgttctgagtgcttatttcacagaaacataccttctacactaatcctcctgcaaggttattgagttgtacgaaagaattagctcaagagggctttacaaaacacatccatactatgtacaaacactatatatttgataagacactatcaatagaaaatgagcctaaacactatttacttaaatatatgtttaaagtccttctgtttggtttgtaatattaaagtgttttttctat

SEQ ID NO: 235423 - DNA, 510 bp, Homo sapiens
agccatttttgaaaaatttaacaatccaggttcttctggagaactcattctccacacgcacagtttgctgcaaaaggaagttgcaagaatttcttgaggaagaaactggtgacttggtccatcagtcacgaagttctttctattctcgtttagttttcaagaaattattggtttgtgttgctctggggaaattggaaatcattacattgtaaagacaaatatggatgatatttacaggagagaatttcagatctgggtttttgaaagaaaacagaattgcgcattgaaaacgatggaaggaaaaagacaatggtctaatgtgcattcctcattacctctcgtggctttggctgggagttggaaaaagctaaaatttcagaacagtctctgtaaggctctctgtggctccagttcaccattttatattgttgcatgctgtagaaaggagctattgctgttgttttgtttttttatttaaatcactaaggcactgtttttatcttttgtaaa

SEQ ID NO: 235424 - DNA, 391 bp, Homo sapiens
atatatttctagaaatatcaacttttaaatttatctttccactttccttggagtagtttttaggaaagctacattcttaatttttaagtttatcaattttaaaatttatagtttataccctctatgtccactttattaagtttttccctaacttgagatttcaaggatagttttccaataattcatctggaaagcttttgcttctgataactatttcattaatttgcttgaaagcttttgcctttgataactatttcattaatttatcagaaattgagttttaaatatggcgttagtttgaaatatttatttcatttaaatatttttgtatttgcatactttaaaatgtgttattaaacaaaaaattaataaactaaaagtaaatctgcca

SEQ ID NO: 235425 - DNA, 537 bp, Homo sapiens
tgcatattagggatatagactcttaatcatattgatgcaaatatttttccacacttgtttgccttcccatgttcacttatttgatgtactaaagtttaaaatttacctgtaataaaatgcattgctcctttccaggtggtttttaatataataataaagactaataacagcagctaactttagtgtttattagggatcttttaaattcaggtccttttttaagtatgtaataaactagttagcggtagaactggtattttaacctaggtctacctacctgaccttttaactatgctatgttgccgttgttctggttagaactactaacttccttggatctatacattaaataatataataagcagcacaaaaggaataatattgaacttcatttttgactgatttctagataaggttcataatggaatttttttattgtggtaaaacacaacatgaaatgtatcatttaaactatttttaaatgtatagttcaatggcattaagtacattcacaatgttgtgcaaccatcacccttg

SEQ ID NO: 235426 - DNA, 319 bp, Homo sapiens
agtgtatgtcaaactttctttgcatgatgggaaggtttacctggctgacctttaatactctttgtcaactgtaagattgggattctaattgagtgagaatcaccagcagttgccataatactctttagcgttgatagtcatgaggcaagagactgccctgttctcatgattgtttaagaccttgtgatctagaaccacgtggtgagtcagagtaggcaaggatgcaagccatcagagaggccaagatttgagcagtagctgcctgggcctccttgcttggtgctctgcaaataaatgccttactttctatcactgcaaa

SEQ ID NO: 235427 - DNA, 365 bp, Homo sapiens
tcccaaaggtctcaagaggaaagcatttctcagtatcacaatgggatatgctgtttcagtgattgaataataatgctgattcctcactgaattccacttagatgtcacagaaaaagtcacttgctggctggctgcattcacatttccatggccagcttaggtgagtgcttgggtgggtacagtggggcagtgggccgcctcctgtctgctctggacacaatcagcttaacctgagagcttcaggacagctgcaggggtcatttctagagacaggaaaggagtccaggaagccccctctcttcccttccactctccaggctgtaagaaagcacacacccagggaagggatcaaagggagaactgaa

SEQ ID NO: 235428 - DNA, 416 bp, Homo sapiens
gactttgtgaatggagcgcgcggcgcctttcgccgtctacccgcgggcccagcctgcgccgcgcctccagcccgacaccggcacctgtgccgccgctgcaccccgccgctaggcgggcggcgccaaaggaaatagccggctgaggaggccagggctcgggtttgagctttcatcccttggcaccttcgcgcttccccgcgtgacagccccgtaggtttttcccggttacccaagtggagaggggaccggagcgctgctgcccacccagcggggcctgacacctcctagccccagactccccgtgcgctttcggcccggccagtcctttctgaatatgcgattcctgagacgttagcgtatgcattagcgtgatcgattttcatctaaagccattaaatcagttttatagcttcccc

SEQ ID NO: 235429 - DNA, 574 bp, Homo sapiens
cactcatcatttccgacggatgggccggaggggccgccggccgccccagccagggtctcggtagcctgcaaggagagaaagaggtgggagcagcccgcgcggggccctgcgtcttgcataggcgcttctggtaaaatcactcctttatctcagataatgagttggcgctggatcgctgcgtcctcaggtggggctcgaatcgtgacttttagagaaataggttttctttctttttttttttttttttaacaacatggggtttaaagggcgcggaattggaagcagtcgtcacccggaggcctgggcgtgcaagcaccgaagctctggctggccctgagcctccccaccccacccgctcttttcgctggaacgcgtgtactttgggcagttgctgacgtggagacaggacgtatgtcttcatattttagtaaaacccaatgccctctgcctctctgattatgttctttaagttatcgccagttccaatttgtatttcttggaaacggttgggtcttccctcacttttcagtattttcatgtagactcaaatactctggattaatatttgtatttg

SEQ ID NO: 235430 - DNA, 438 bp, Homo sapiens
cactcatcatttccgacggatgggccggaggggccgccggccgccccagccagggtctcggtagcctgcaaggagagaaagaggtgggagcagcccgcgcggggccctgcgtcttgcataggcgcttctgggcgcggaattggaagcagtcgtcacccggaggcctgggcgtgcaagcaccgaagctctggctggccctgagcctccccaccccacccgctcttttcgctggaacgcgtgtactttgggcagttgctgacgtggagacaggacgtatgtcttcatattttagtaaaacccaatgccctctgcctctctgattatgttctttaagttatcgccagttccaatttgtatttcttggaaacggttgggtcttccctcacttttcagtattttcatgtagactcaaatactctggattaatatttgtatttg

SEQ ID NO: 235431 - DNA, 503 bp, Homo sapiens
cagccagcattctgagagacaagtggtagaagatacctgggggtctcactattttacatttctacgttaatcgattaaacttcctgagtttgggctgaacacatggtgtattaatttattcttgcattgctataaaggactaccagagactgggtaatttataaagaaaagaggtttaattggctcacagctctgaaggctgtactggaagcatgcctgggaaggtctcaggaaactcacaatcaagacagaaggtttttctataatgtaccaccagcaactatggtgatgacagcttttggaacatcctttcattatttcaaaagtaaataatcgaatatggtttaattacttgagcctcaacaacaacaaagaagaacataggttcctggctttttttgtttgttttttgagactgaaacttttggggaaactctgtgtatagtcacatagaatacagtgcaaataaagtaataacttgaccccaaacagaaacttcaatg

SEQ ID NO: 235432 - DNA, 834 bp, Homo sapiens
tgagacggagtctcgctctgtcacccaggctggagtgcagtggcgggatctcggctcactgcaagctccgcctcccgggttcacgccattctcctgcctcagcctcccaagtagctgggactacaggcgcccgccactacgcccggctaattttttgtatttttagtagagacggggtttcaccgttttagccgggatggtctcgatctcctgacctcgtgatccgcccgcctcagcctcccaaagtgctgggattacaggcgtgagccaccgcgcccggcctgtaccttctcttaagtcagcttgcaatttaaatttttagttagtaaatttaactaattttaaaatatgttagtgtctgtctgcttaactattgcatacttattaaagaaacatgcgtggttatccattggaagagatcgatcctagggcttcctgatacaaacacacccacagaccccagccactctagatttctggttttcatcccaggtctattgtgtataccctggctattagtaaccagtaaaccactctcccccttctgtagatttagtactaacttagaaaaaggatacaaagaagagtttgtatttaacagctcaggattgccttttcaggtggaagaaataggctctggagttggatctgcttcctttcaaattccggcaatgtcattgcctagctgtgagaccttgagcaaattatttacttctctgagcctaaagtatttgtgaagattaaatgagaaaggcaaagtgcctggcatacagttatcaatcagtacctaataggtatcaccattatcatcaacatcattattattaatacata

SEQ ID NO: 235433 - DNA, 2283 bp, Homo sapiens
ctttaaatggtggacattacaaagacaggaaaaagaattcttgtctttgtttgctcttttaacaatccaaaggtttaggaatttactttgctctaacaaccctctcgatcctcttgtgaccccgttatactcagtgttgctgaaaaagtccattttaaaataatggcacctaccacatccatttttccgtctttaggccagaccctctgatggttggtggattttagtattaaagcttgtgttgaaagtggagggggtgttactactgttgtgtctgaaacaagagttaaggttatattttatgaagcagttttggctttttcaacagatgttggccactcacttttatggatttcacattgagtagtaatgagtcataatcactacttaattttcccaaaccagagggaatatacattttattattggaccctccaggctgtcaatgaagagagaaaacctttctttggaatcaagttgaaaacctgttgttaacacctctctctgggccttctttgctctccttagcacgttcattgctaggggctgccacttccatcttctctgccttggaagcatagagtcgtttctcagcctcattctcacctttatgagttcatttaataatgtgattagaacatataaagtatgcaagaataaaatgtgtcatgatgaccttaaaacttttattattcaaagttatagaaagttacgtattttattgtagactcataataggtgaacctttctgatcttggggatttcttgtatttccttggagagtcttacataggcataagccagtgactgattttttttttttttttgattgttttctcatactatcataggccatttgaggggaataaaacaaatactcgttgggaatctatatgtagaagatcattcaggcaaagattctggtcttaaaggtgttaaagtctactggagaacataaggacttaattataacagcagccacagcctccaccagcccctgtgataaaagcatactatgttatctcacttaatctttatgacagcccatggagggtaggtctcattatcttcatttttaatgctggagactgaagatgagagacctgtggttgcctaaggtcatatagctggtaggggcagagtttgtgtttttgccactgttcttgatagcatatttctgccatatgggggcttctcccggttccgtgagtgaggcatgccctcctgccatagcctccgttccttctgccttcaatgaatacaccttccataccactccccccaacccctcccattaaattctaatcatcatttaagtttcatctttggtggtcttaggtgtcactgttgcagacaggcatttttctggcccctgcaccagcttacagcacccccactccttgacctctataacgctcagctttatacttggttacgtttatggtgtttgttgctctgtttgtctggtgtcctggactctaagctccgcaagggcaggaattgtctggcatcattgctgcacatgacacctggtggatgtacatatttattaaatgaataaatgaatggatgttcatacttttgtccaccatgttttatgctaaatacacacagagtagataatgagagaggctctaatagcgaggtgtgtatcctttgagctatggatgacaaacttaaaaaattgcccattaagttagaaaagaattgagtatatctttttaatatatgtgtttacttaatgtacacgcatattgtaaaaatacatgatattggcattttaaaaaggatgaaaatatttaaaacaaggagtttctaatatgtttttctgtatgttagaggaccagctggtatccaggacccactaaacttggagctgggggtgccagggcaggccctgtgggaatacatgtaactaaacaagctccatggccacagtggaaccagactgcagttgatcaaagcatggttgagggtgggaagtgctgggctcatgcgagggtgtgtgagtgattgtgcatcaacatgaaggatcactgggggagtggtggggtgtaaggttcattggaagtctgggactcagctatgattgaggtcagatacctagttcaggggataagaccatatcatcttgaaatgatgggctgctgaagggtcttaaagaatcatgggtacagtggctcacggttttaatcccggcacttcgggaagccaaggcaagtggatcacttgagcccaggagttcgagaccagcctaggcaacatggcgagacctcgtctctt

SEQ ID NO: 235434 - DNA, 603 bp, Homo sapiens
cccaaaggttgggagggggctcgaggccatcaggctccaggccgcacttggcgctgccccctggcgccagggaaacaaagtgacgggggtcttgctaggttgccaaggctggtcttgaactcctgacttcaagcagtcctcccacctcagcctcctagggtgtccggattacaggcatgagccactgtgcccggccccctatcgcgatatccataagatgccaggatgcccaggaaccgagtttgaaagacattgtgctgctgatcccacctcctgactttacagctgctgaattgcagaagacaaattggtagctaacaggaggctccatcctggatcctgcccctgtccgtgagattcagccttgattaactgtgttcccatgctggtcgtgagcagggcaccatcctaggtccttctttatactcattttccatctccagccaaaatgggttgaaccgaggaacaaggacataatctgtaaagagcaagtgcaagtctctgctctgccattaccagcatcaggctaatcaagcccttggaaactcaatttcttctcctgtaaaatgtgaataactgttacagacctggaaaggctcttgt

SEQ ID NO: 235435 - DNA, 437 bp, Homo sapiens
gcggccgccccctcgcccgtcacgcgccgcacttggcgctgccccctggcgccagggaaacaaagtgacgggggtcttgctaggttgccaaggctggtcttgaactcctgactttacagctgctgaattgcagaagacaaattggtagctaacaggaggctccatcctggatcctgcccctgtccgtgagattcagccttgattaactgtgttcccatgctggtcgtgagcagggcaccatcctaggtccttctttatactcattttccatctccagccaaaatgggttgaaccgaggaacaaggacataatctgtaaagagcaagtgcaagtctctgctctgccattaccagcatcaggctaatcaagcccttggaaactcaatttcttctcctgtaaaatgtgaataactgttacagacctggaaaggctcttgt

SEQ ID NO: 235436 - DNA, 413 bp, Homo sapiens
gtcaccgcggccgactggccaagggcaccagccctggagagggcacagggctcagcgtggccagctcggatgtgagctcattcccccgagaccaccagttctagttcctgcccctcccccaaaggctcgggtcgcaggctggtgcctggcacccaccccaaaggttgggagggggctcgaggccatcaggctccaggccgcacttggcgctgccccctggcgccagggaaacaaaggttaggggcccagagggagttatctggccccaccgccaccgggtgggggaaggggaccaagagggggcgcagttcccctccactcccccagccctactgattcttcgagacactttcacaggcggaaattcccagaggtcagaggagggaaacggttaattccttttattcaatggg

SEQ ID NO: 235437 - DNA, 451 bp, Homo sapiens
ggcttggtggttgaaagctcggagtccgaactctctgaagacatttttcccgccttgccactttctagttggtgaccttggcaagcaaggtactcagccgctgtgtacctcagttttgcggtttgtaaaatgggagttacaatagtgcaccccttgtagagtggctataggtttaagagttaatatacgcaaggtctttaggacggtgctgagcgtacagaaggccctctcttgagtggtcgcagttggctgctctcggcctcatctccgtttgtgaaaacccgtccagattccggtcctcccaggccccagctgaagtttggagagaggctttgctgaatagctgtttagtctcccccaacccccttggccctcggagctcctggaaaaagttcttaatgaagtaatgttgagagcgtccattaaaaatgcaatgctgggagatcaaagt

SEQ ID NO: 235438 - DNA, 453 bp, Homo sapiens
agggtctttattgggacagttggtaagttctgtcccaagcacacagcatgccagcttttgggggctgtctgaaccaactgtagatatgtgggtcccctggggtggagtcctgagttcttcctgaatgttttgcttcataataaagtcaactttaaatgttttaaatgtatggtgtttaatgctttgtacaacttttcatggtctcattatctgagctgttttactcccatgaggtcacacagcattgcatagtgaggctgaagcttgtcacctgggttatccttttgaaatttctccaagctggacttttgccattcttccctaacagcaggttagagctctccagctggcagaaagcacatatccagaatcccaaggagtgccagacccttccttccccagtacggtcggcaaacttagcacactatgccattttccttttctgtcacgtca

SEQ ID NO: 235439 - DNA, 1708 bp, Homo sapiens
  misc_feature (1013)..(1013): n is a, c, g, or t
tttatatataaggaatgcaattacctctcaaaatttatgagaacaaactcaagtccatagaaacctctggagctgagcatcctcagttcaaatgctggctctgccacttaccagctgcatgatcttgggcaagttaatctgcctcaaggctttggcaagatcaaagggttgctatgacctgatgcacacatggtacctgacttcaggtaggtactgagtgcatgtcactggtggcagattgcattgcccaaaggcgtctgaacaattaaagatgtcccagacctcctgctctaacaacatgactgacattgctctcactgagaggtggcgtctatgttcctcccgtttaatctgggaagagaggagttcccaggctaggtcatagaaggtgatgcaggttccactcagctcacctgtgctcactccctcttcttttttttcctctctctctctctctccctccaactccccatacctctgtctctctctgctcacccttgaatgcagctaccatgctgtgaggaaacctggactaggccagctggaaagaggacatggacaggcctatttggggaggagctgagtgaggccccagtgacagcaaacatcagttgtcagatgtgcaatggatgagccttcagcaggctctgctgtgcccttttcaaatgcatatttattatgcagccagagttggcagcaagcactaagctgtgacagtgcatgaagtaatttaattggtgaggcccattcttgcaactacctctgtgactagtggagacaactcagatcccagataaaggatggggtgctgggtcagcatgccaaacccaagctaccccagggggctcagaggaagaataatgtgctggaaagtgctctgtggcatgtaaaaatgggtgtcttctcaggatctagcagtgggactagatttgggtagaagtgccaaatgagagaaagcaaagaccctaaggatgagatttaatgaggttgctgccctgtgtctggcctgtccnccgctggtgctcctcttccaagggcattcctgcccatggggaacagaggctttgggtaaggaacacagccatcatattgtatgaacagccacacagggaggctggcatgaagctaatacaggctagaagtctctcctgggaggaggctgccacgtgggggtcacagagtgctgagggccacttggaaagttgtggatccaacaaggatcctgggccctggaagctccacagcatccctcagtagcaggctgtgaagtatctgacctgtgttatcagtagacggtcttggtcttgactgcaagttgtccaggttcttggtgttttgaacaaagaattagataaaatgcacagcaaagcaaggaaagaatgaagcaatgaaagagcaaaaacagatatttattgaaaatgaaagtacactccacagtgtgggaatgggtggagcagcagctcaaggtccaggatatagaatctacagagtccaaatgccccttagaggtttcccattggccacttggtgttcacccggtgtaaatgaagtggcggcctgctttctgcaaccaatcagaggctgaagtgaagttacaaagttacgctcctatgcaacatctgattggttgcacaaagcaaccaatcagaggtattttcagtttcgcatctgctgcactccagcctgggcgacagtgacactctatctc

SEQ ID NO: 235440 - DNA, 339 bp, Homo sapiens
tctcagacactgctgtatacttccagtgaatgttgatgaaattttcagggttgctaagctgtggatttcagatcctggattgtatgacctaaaagagagacttccctaggagtgagggtccctgaacagtcaactggtttccaagaatgggctccctctcatcaccttatgacagtaatcctctgtccaacagccaaagaggtcctgtggggagggcttgcagatgggagtgcgcagagcccagctcaaagctcctgactaggctcttgttgagtattcctttgattcctgcttctgtctttttaaatcaatggagacaggggagggttatctccatcc

SEQ ID NO: 235441 - DNA, 247 bp, Homo sapiens
aggtgctgcacaaaaccccagactcaacgccttctccatagcacgccgcgcccttcctgctgccatctttgtggggatcaacaggatgactgcccttccttccagcgggcctggtactggggtgccccaggagagggtgtaccagggtgtggccagccagtagatgcccacgactgtgatgccacagccctcggtccccctctgtcgcgtgtaagatgggagcaggagccccaaaggagccagggct

SEQ ID NO: 235442 - DNA, 2280 bp, Homo sapiens
attgagtttctcgctacttctgccactcatcacacttgcttcccagagctttgctgggtgtgctgaagtctccagagaaagtggggaatatgggtgcctagagacttctagggggtgttttcagcccctagagagtagagaagtgtgagaaggggttggtccccgaatattctgtagttttggggaagaagcaatggggacagtggagttggttgccttaagagaggctatggtcccaagagatgggacttggagagtctctacttgcattcctggctaagcccttaatattctcgcacccctccttgcaagactagttccttttgaggtggttcttggctagcttttgagaggctgcagtggctgtgtgcccaggcttaagtcctagctttctccccactctttacctcctaggaaccgggcccatcctgggggaggcagggaggagctcctttttatagtccacatgtaggctttgtgtataggctctgctgcttccttccggccctggcccttcctggtgttggccggtggccctggcttcagcaagactcaggatgcagagtaaacggggcagggcgttctcctacagaagactggcatccctttttactgagcccaggcctggcacagaggaggctggagttaggaagcaagaaaacgaggtgacccagtccttgatcctgagaagcttgtgatctggaccatgcagaaaaccgctaatgcccagggctggcaggagacagctgtgcctaaagtgctgtaggctgggcctgagggccaagatggaatcgcttttctccctgtagcagcccatcctaccccctggggtccctccacctgccagctggcacacaggtgttgggtaaagcatctgtacaaaggctgtgaggggcctgggcgcaaggcagcaaggcttgggtacggaggagagtgggtggtcttactgatgttctgggccctgacagtgaacagctggccaaactggtgaggagttgggccatggcgagtttggccacttgtttgtgtgtgtttagttcttcctgggcacaggtggggagttcactttggggttggcttcctgttttcttggacacctggggatatggttgagttaaaatgttctgagggaaatgattgttgagggcatgggcttgggtcatagtgtccttggcttggccttgcccatggtaggagtcgggtattgaccacactgggttctggctgtgtaggtgtggatgtgtggtgggagaattccaaccccaccttgacttcagcctaaggcccagagagtgtgggcctgagttcacagggtgactaaccctaggaaggagtgaaggagagctccagttggccataggtcccacaggtttctcagcttacttgggggcaggaggtgagctaaggaatacaactccattccctcagttgggaggttgggcagcgatgggggcaggggtgatggtccttctctgaggcactgaagacccactttatggtcaccctattctgcctgatagtccaccacctgtttggaggcagctcccctcttcctgccctagtcacttcctccaccttcaacagtaattgagtataatgtgcctgtgttagcttgtccatcctaactgggactgtggccttttcttgggcgttcttagcatatctaccaaggaggttggaaaaggtaacatatgtcactttgttaaggattttgctgagggccttttgaggccagcagtgaaacacagagcattccctccagtgagaacagaatgtctgttgccagactgatcacaagaggatggcctggttctggcctgagaactggtctacactggaagcatgaagctccatacaatcatgtgtgctagtaaagtttgggcaagcagctgtcctaagcaggtaaaacgataggttattcaacttcaacttcagagaaagaaatccaaggtagccatctctctcagtaggggaggtgagttcaaagaatttaagctgggctgggcacggtggctcacgcctgtaatcccagcactttgggaggccaaggtagggggatcacgaggtcaggagttcaagaccagcctggctaagatggtgaaatcccatctctactaaaaatacaaaaattaaccaggcgtggtgtcaggcgcctgtaacccagctactcaggaagctgaggcaggataattgcttgaacccgggaggcagaggttgcagtgagccaagatcgcgccattgcactccagcctgggtgacagagcaagactctgtctcttt

SEQ ID NO: 235443 - DNA, 433 bp, Homo sapiens
agtaggaaagaggtttacaaatgcaaacatgcagaaccacagactttaaaaatatgtataaataaactgaatttcagcaagtgttaatataggtgcttttaaaaatgacagaggcacagcacttcttttggaataggagattcttggaatgggagatcctgtccctgagggaaaagggatgtccatcccaccaaaacttgggttgctgaagaaataacatgttctgagaagggatcagccaaaatcgcctctcccgatgatataggagagcttactgggacaatctgtgccaaagttgttgtgagagctttccttcctcctacgatccaaccatgtcaaacatttcctacaaagtttgagaaacaggtatttttcattctttttaatgcttttttctttttctttctttagacccaagaatattgaaaaaata

SEQ ID NO: 235444 - DNA, 561 bp, Homo sapiens
aagaggagggcttggtgcactgctggcaggacctttgatctgggtaccacagatcatgatgtgaccaaggagcctcagtcacgtggggcaccagttaagggggttggcccttcctagctgactcccagccacactgcagcagcttctgttcacttctcagcgggctgcagaggcagggagggggaggccaggtggcacaggactgaccccagtggatgccacctcatcaccctgttggtgagagagcaggcaagcagggcacatgggcctggggaagaccacaaggccaggtcctccaggcagggaggctctggcagaaacctctgtgccaaccccctccttcctgtccccgaatgcagaggcctgcccctccccgccccagtgcccaggaggccagggtcaggaagcaaacagaaatgcctgcatgcctgcaaatagactccaaccgatctcaggagaatttccagccagcaggcctgtggcgccctttgctgaaagggccttctgaatgcccgagtcttctcttttgtgctcacaaatgccacccaatcgcagcggccg

SEQ ID NO: 235445 - DNA, 596 bp, Homo sapiens
tgcccgaggacccccatgtcctctatgtgtgggattctgcagtttgcactcacaacccagagccttttacccaactaccctgtttgtaggaatgtgtccaaaataagcatcagacaagtacatgaagatgaatgtgcaaagacgttcataacaggattgtttataatcatgaaaaatgatctgcagatttcctgtctgctgtgcaggatgagttagacggggatgcatccataaaatcactttgccctcatttaaaattatatcatagatctatgtttaatgacatagtaaacggtactcaatgcattaagtgaaaaaagcatatacatatcaggatgtatatgatcaagtttttgttaaatggatgcatgtatgcatgtcagtaactgtctgtgtttgcaaacaaaacgtctagcaagacgtgcatcaaatattaacaatcattatctttggattctggatttattgacttctatttttgactttgccctttgtttttctatgttatctgacacttttacactgagtttatattatttttacaattaaaatatcaatccatcaatctacctccatttgggaagtagtaaaaagta

SEQ ID NO: 235446 - DNA, 759 bp, Homo sapiens
ttttttggtccatgaaggctgaatgccagagagtcactgtctagggtataccacatttaacgggcatatctgtggcataattaattgaaaagctgagatgttcctgagagactgccagggtggatgagaccccaagaccagcccagcatttagcagatgctggggactgctgggaccataaccattagatcttagcagccgtgtggcagagggaacatgtcccgggattggggaggctgttttggctgtgactgttcaggtggggcgggacgcagtatcctaggatcctctcggacatcagaccatttacctgcattcctgctgtgtggtacttcctcctctctgtgagagtgctgtgctcctctgggcactcttccttacttcccttctgtctccatctctcgtagctgactttggggcttcctttgaattgtctgcttgcagttactttatatcatcctgtaaggaggagattatcttgggttttccatcttctttccctgctcctcactctttttctctgggctttgtcggtggggagaagggtgcaggggaatccctcagaaaagaagttcagcattttagggctagagacaggtcccccagggatgggccttcctgccctaggaggcggtgactacttctctgggtcctaatgtgaggttggggcaggttggtagtagctgtggtcttccttcctagttccaggaagactttagaggaggttgtttgatttcatattctttttacctgagtggt

SEQ ID NO: 235447 - DNA, 738 bp, Homo sapiens
ttcagagtgtcatttattagagcacgtttgaaatcgtgggaaccaaattatgacatcaatttatgtaagccccttttacataatacacagtagaaaatagttctagcatatccaaatatcagaaatgtaccttcggaaaaggataaagtagcatcttcagaatatgcagtgataagtgctgtttcatcactgtgccattgcaggtttatttgaaatacaacaatgtccaagaggaaagcactgcaactttcttcatgtgttcagaaatcccaacaatgaattctgggaagctaatagagacatctacttgtctccagatcggactggctcctcctttgggaagaactccgaaaggagggagaggatgggccaccacgacgactactacagcaggctgcggggaaggagaaaccctagtccagaccactcctacaaaagaaatggggaatccgagaggaaaagtagtcgtcacagggggaagaaatctcacaaacgcacatcaaagagtcgggagaggcacaattcacgaagcagaggaagaaatagggaccgcagcagggaccgcagccggggccggggcagccggagccggagccggagccggagccgcaggagccgccgcagccggagccaaagttcctctaggtcccgaagtcgtggcaggaggaggtcgggtaatagagacagaactgttcagagtcccaaatccaaataaactagttttgttcttaaaaaaaa

SEQ ID NO: 235448 - DNA, 1496 bp, Homo sapiens
gaggggcggggcggtgccggcaagatggctgcgcccgagaagatgacgtttcccgagaaaccaagccacaaaaagtacagggccgccctgaagaaggagaaacgaaagaaacgtcggcaggaacttgctcgactgagagactcaggactctcacagaaggaggaagaggaggacacttttattgaagaacaacaactagaagaagagaagctattggaaagagagaggcaaagattacatgaggagtggttgctaagagagcagaaggcacaagaagaattcagaataaagaaggaaaaggaagaggcggctaaaaaacggcaagaagaacaagagagaaagttaaaggaacaatgggaagaacagcagaggaaagagagagaagaggaggagcagaaacgacaggagaagaaagaaaaagaggaagctttgcagaagatgctggatcaggctgaaaatgagttggaaaatggtaccacatggcaaaacccagaaccacccgtggatttcagagtaatggagaaggatcgagctaattgtcccttctacagtaaaacaggagcttgcagatttggagatagatgttcacgtaaacataatttcccaacatccagtcctacccttcttattaagagcatgtttacgacgtttggaatggagcagtgcaggagggatgactatgaccctgacgcaagcctggagtacagcgaggaagaaacctaccaacagttcctagacttctatgaggatgtgttgcccgagttcaagaacgtggggaaagtgattcagttcaaggtcagctgcaatttggaacctcacctgaggggcaatgtatatgttcagtaccagtcggaagaagaatgccaagcagccctttctctgtttaacggacgatggtatgcaggacgacagctgcagtgtgaattctgccccgtgacccggtggaaaatggcgatttgtggtttatttgaaatacaacaatgtccaagaggaaagcactgcaactttcttcatgtgttcagaaatcccaacaatgaattctgggaagctaatagagacatctacttgtctccagatcggactggctcctcctttgggaagaactccgaaaggagggagaggatgggccaccacgacgactactacagcaggctgcggggaaggagaaaccctagtccagaccactcctacaaaagaaatggggaatccgagaggaaaagtagtcgtcacagggggaagaaatctcacaaacgcacatcaaagagtcgggagaggcacaattcacgaagcagaggaagaaatagggaccgcagcagggaccgcagccggggccggggcagccggagccggagccggagccggagccgcaggagccgccgcagccggagccaaagttcctctaggtcccgaagtcgtggcaggaggaggtcgggtaatagagacagaactgttcagagtcccaaatccaaataaactagttttgttcttaaaaaaaa

SEQ ID NO: 235449 - DNA, 251 bp, Homo sapiens
gttgccaggctggagtgcagtggcatgatctcagctcactgcaatctccgcgcaaagattacatgaggagtggttgctaagagagcagaaggcacaagaagaattcagaataaagaaggaaaaggaagaggcggctaaaaaacggcaagaagaacaagaggtatggtaggaatcacgtaactagtgaacaaactgattacttcaccataataactctcatgaagagttgcctatcttgggaggttggagtg

SEQ ID NO: 235450 - DNA, 167 bp, Homo sapiens
  misc_feature (5)..(5): n is a, c, g, or t
  misc_feature (146)..(146): n is a, c, g, or t
ttgcntcacttcatcgcgtctgagagactcagtgactctcacagaaggaggaagaggaggacacttttattgaagaacaacaactagaagaagagaagctattggaaagagagagcaaagattacatgagaattgcttgaacgcgnataagtaggaggcacgggtac

SEQ ID NO: 235451 - DNA, 1067 bp, Homo sapiens
ctccaccagtaaagtcatggttattttcaacagttggaaaatggtaccacatggcaaaacccagaaccacccgtggatttcagagtaatggagaaggatcgagctaattgtcccttctacagtaaaacaggagcttgcagatttggagatagatgttcacgtaaacataatttcccaacatccagtcctacccttcttattaagagcatgtttacgacgtttggaatggagcagtgcaggagggatgactatgaccctgacgcaagcctggagtacagcgaggaagaaacctaccaacagttcctagacttctatgaggatgtgttgcccgagttcaagaacgtggggaaagtgattcagttcaaggtcagctgcaatttggaacctcacctgaggggcaatgtatatgttcagtaccagtcggaagaagaatgccaagcagccctttctctgtttaacggacgatggtatgcaggacgacagctgcagtgtgaattctgccccgtgacccggtggaaaatggcgatttgtggtttatttgaaatacaacaatgtccaagaggaaagcactgcaactttcttcatgtgttcagaaatcccaacaatgaattctgggaagctaatagagacatctacttgtctccagatcggactggctcctcctttgggaagaactccgaaaggagggagaggatgggccaccacgacgactactacagcaggctgcggggaaggagaaaccctagtccagaccactcctacaaaagaaatggggaatccgagaggaaaagtagtcgtcacagggggaagaaatctcacaaacgcacatcaaagagtcgggagaggcacaattcacgaagcagaggaagaaatagggaccgcagcagggaccgcagccggggccggggcagccggagccggagccggagccggagccgcaggagccgccgcagccggagccaaagttcctctaggtcccgaagtcgtggcaggaggaggtcgggtaatagagacagaactgttcagagtcccaaatccaaataaactagttttgttcttaaaaaaaa

SEQ ID NO: 235452 - DNA, 662 bp, Homo sapiens
ttcagagtgtcatttattagagcacgtttgaaatcgtgggaaccaaattatgacatcaatttatgtaagccccttttacataatacacagtagaaaatagttctagcatatccaaatatcagaaatgtaccttcggaaaaggataaagtagcatcttcagaatatgcagtgataagtgctgtttcatcactgtgccattgcaggtttatttgaaatacaacaatgtccaagaggaaagcactgcaactttcttcatgtgttcagaaatcccaacaatgaattctgggaagctaatagagacatctacttgtctccagatcggactggctcctcctttgggaagaactccgaaaggagggagaggatgggccaccacgacgactactacagcaggctgcggggaagaaatctcacaaacgcacatcaaagagtcgggagaggcacaattcacgaagcagaggaagaaatagggaccgcagcagggaccgcagccggggccggggcagccggagccggagccggagccggagccgcaggagccgccgcagccggagccaaagttcctctaggtcccgaagtcgtggcaggaggaggtcgggtaatagagacagaactgttcagagtcccaaatccaaataaactagttttgttcttaaaaaaaa

SEQ ID NO: 235453 - DNA, 407 bp, Homo sapiens
actccgtctctacagaaaatacaaaagttatccaggcgtggtggtgtgcgcctgtagtcctagctactcggaaggctgaggtgggaggatcacttgagcctgggaggcggaggttgcagtgagctgaggtcacgccactgcactccagcctgggtgacagagtgagaccctgtctcaaaaaaaaaagagaaaagtctcagctatatatcctttgaaagcttttcaaaagatctgtgattcaaaagaaaactagaacttgtgtgcgtgtgtgtgttttaattgttccacttgagattcttaaccagagaaaccagatgtgacttacctgacttctgggtttttattagtcctgtgtttgcaccattttaggaagctttgcagaagatgctggatcaggctgaaaatga

SEQ ID NO: 235454 - DNA, 345 bp, Homo sapiens
gagcaggcgagcgggccgatcgtgggcatggaggatgtggtggcaggaagaaaagagaagctgggccaagctaagtgagccaccgcggcagctccattccttcctggtgcgcgctctggtgccctccccggacttgcacgggcggctgtggctcaggcaagcgaggagaggatcaggttggcggatggagaagaactgtctgggagtgggaggatgaggcgatgatagatggctgttctgtaattaaaatacaggaagcaaggtttctctcctcagcacccgaactatttcctttcattgggcacagaggagcggggagctcgggcagcgctgcattgtagccgc

SEQ ID NO: 235455 - DNA, 409 bp, Homo sapiens
tcagaagtggaaaacgttagtgttaaatctgggtagtgcatatataggctgattgatatcttctgtatttttatggatgtgtgaaacatttcatatttgtgggagaaaacagacctggaccaacagggatcaggcacgctgccatgtgccaagtacgccttaaatagatgcaagagtcagctagtatctctattttgcaatctttgattggtaactactttggggaatgttagcctggacaaacaacatttgatgaatggctggtttcttttcctgaattttttatgatagcattcttcattgctccctaggtcagctgcaatttggaacctcacctgaggggcaatgtatatgttcagtaccagtcgtaagtattctgcttgtggatgtcttcctgatttgtcacagt

SEQ ID NO: 235456 - DNA, 1565 bp, Homo sapiens
gaggggcggggcggtgccggcaagatggctgcgcccgagaagatgacgtttcccgagaaaccaagaggagcggggagctcgggcagcgctgcattgtagccgctgatcgtcgtgtatatgtcttaatcttccagccacaaaaagtacagggccgccctgaagaaggagaaacgaaagaaacgtcggcaggaacttgctcgactgagagactcaggactctcacagaaggaggaagaggaggacacttttattgaagaacaacaactagaagaagagaagctattggaaagagagaggcaaagattacatgaggagtggttgctaagagagcagaaggcacaagaagaattcagaataaagaaggaaaaggaagaggcggctaaaaaacggcaagaagaacaagagagaaagttaaaggaacaatgggaagaacagcagaggaaagagagagaagaggaggagcagaaacgacaggagaagaaagaaaaagaggaagctttgcagaagatgctggatcaggctgaaaatgagttggaaaatggtaccacatggcaaaacccagaaccacccgtggatttcagagtaatggagaaggatcgagctaattgtcccttctacagtaaaacaggagcttgcagatttggagatagatgttcacgtaaacataatttcccaacatccagtcctacccttcttattaagagcatgtttacgacgtttggaatggagcagtgcaggagggatgactatgaccctgacgcaagcctggagtacagcgaggaagaaacctaccaacagttcctagacttctatgaggatgtgttgcccgagttcaagaacgtggggaaagtgattcagttcaaggtcagctgcaatttggaacctcacctgaggggcaatgtatatgttcagtaccagtcggaagaagaatgccaagcagccctttctctgtttaacggacgatggtatgcaggacgacagctgcagtgtgaattctgccccgtgacccggtggaaaatggcgatttgtggtttatttgaaatacaacaatgtccaagaggaaagcactgcaactttcttcatgtgttcagaaatcccaacaatgaattctgggaagctaatagagacatctacttgtctccagatcggactggctcctcctttgggaagaactccgaaaggagggagaggatgggccaccacgacgactactacagcaggctgcggggaaggagaaaccctagtccagaccactcctacaaaagaaatggggaatccgagaggaaaagtagtcgtcacagggggaagaaatctcacaaacgcacatcaaagagtcgggagaggcacaattcacgaagcagaggaagaaatagggaccgcagcagggaccgcagccggggccggggcagccggagccggagccggagccggagccgcaggagccgccgcagccggagccaaagttcctctaggtcccgaagtcgtggcaggaggaggtcgggtaatagagacagaactgttcagagtcccaaatccaaataaactagttttgttcttaaaaaaaa

SEQ ID NO: 235457 - DNA, 1489 bp, Homo sapiens
gaggggcggggcggtgccggcaagatggctgcgcccgagaagatgacgtttcccgagaaaccaagaggagcggggagctcgggcagcgctgcattgtagccgctgatcgtcgtgtatatgtcttaatcttccagccacaaaaagtacagggccgccctgaagaaggagaaacgaaagaaacgtcggcaggaacttgctcgactgagagactcaggactctcacagaaggaggaagaggaggacacttttattgaagaacaacaactagaagaagagaagctattggaaagagagaggcaaagattacatgaggagtggttgctaagagagcagaaggcacaagaagaattcagaataaagaaggaaaaggaagaggcggctaaaaaacggcaagaagaacaagagagaaagttaaaggaacaatgggaagaacagcagaggaaagagagagaagaggaggagcagaaacgacaggagaagaaagaaaaagaggaagctttgcagaagatgctggatcaggctgaaaatgagttggaaaatggtaccacatggcaaaacccagaaccacccgtggatttcagagtaatggagaaggatcgagctaattgtcccttctacagtaaaacaggagcttgcagatttggagatagatgttcacgtaaacataatttcccaacatccagtcctacccttcttattaagagcatgtttacgacgtttggaatggagcagtgcaggagggatgactatgaccctgacgcaagcctggagtacagcgaggaagaaacctaccaacagttcctagacttctatgaggatgtgttgcccgagttcaagaacgtggggaaagtgattcagttcaaggtcagctgcaatttggaacctcacctgaggggcaatgtatatgttcagtaccagtcggaagaagaatgccaagcagccctttctctgtttaacggacgatggtatgcaggacgacagctgcagtgtgaattctgccccgtgacccggtggaaaatggcgatttgtggtttatttgaaatacaacaatgtccaagaggaaagcactgcaactttcttcatgtgttcagaaatcccaacaatgaattctgggaagctaatagagacatctacttgtctccagatcggactggctcctcctttgggaagaactccgaaaggagggagaggatgggccaccacgacgactactacagcaggctgcggggaagaaatctcacaaacgcacatcaaagagtcgggagaggcacaattcacgaagcagaggaagaaatagggaccgcagcagggaccgcagccggggccggggcagccggagccggagccggagccggagccgcaggagccgccgcagccggagccaaagttcctctaggtcccgaagtcgtggcaggaggaggtcgggtaatagagacagaactgttcagagtcccaaatccaaataaactagttttgttcttaaaaaaaa

SEQ ID NO: 235458 - DNA, 859 bp, Homo sapiens
gagatggagtctcgctctgttgcccaggctgaagtgcagtggcacaatcttggctcactacaacctccacctcctgggttcaagcaattctcctgcctcagcctcccaagtagctgggattacaggcgcctgccaccatgccaggctaatgttttgtatttttaatagagatggggtttcatcattttggccagactggtctcaaactcctgacctcaggtgatccacctgcctcagcctcccagagtgctgggattacaggcgtgagccactgcatctgactcctttgactctttttctgggcacttggtcagatataaagactataatttttagcttcctttgcagctaggtgtggcctcatgatacattctgcccagtgtgatagaaatgagcaaaaagcatgcgcccttcaaaatatgaccttaaagagagaagtaatgcccttctcctttgttggctggaaagactgcctgtagacttgatggctggagctcaagcagccgtcttgaactatgaggatgaccccacatgcccatcacatctgaaaggcctcaaggcctttgggcgagacggtatgggccaggcaaccagcctcatgatgtgtcccacaccgcctaacagatgagtgagtgtcccaggtctgggttcccttacccctctcttgaatctacagaagagaagtttcatgatctcagatcacagccctatggaagctcttgccaaacactggggaagcctaactctaataaaagtgttcccatgggaagtccaacacagctctcattctgaatgacctgtattgttggtccaagcagggatacatcaaagagactggtggtttattagcattacccag

SEQ ID NO: 235459 - DNA, 500 bp, Homo sapiens
tctgtagaagaagtaatccattctactgagaagaagtaagaagaaattaaatgagtaggattgtggaaggtagatgattaaagggtggaagacatttcaggtggagagacgagttgaactctagtcagaaggtgaaactacatgggaatgtttggggaataattgtgagtatgagcagagtaagcaatggaaagagggatgatgttggagatgtgttggaataagagagtaagaccagggtatcctagaattcagatacatggatgctgcacagttgttggcgacccagtttttctagatctgcaaaatatttaacttgagttcttatgtaaatggataaaaggggaaaaactagaattggtatatacaattgtttcaagaagcatcaggaggaaaattccgttcttccttcctgcttgtattattctttgtctcttaattacatgtcaggcattatgctgaattttaaagatagcaagaaaagtgaaacagacatcttg

SEQ ID NO: 235460 - DNA, 523 bp, Homo sapiens
tgagttctttcaggcctttatggtgtttcctgtgtcataaatttggcctcccatttaaaatattcagtgtctgccctactggaggagatccttgtgaatgtgaaccaccatgtatgtgagcacacatgtattatgttcagggcaattacttcccctttctaggtacctttgaatacatatgaaggcttttaaagtagtttgtaaacctaaacttctatacagatgtaaagttgtactatttttattattagttttttaaaacacagatgtaagtagttgatatttttcagaatatgtcatgagctatacacacttcacctgtaacatttatatgtgactgttttaatggcatatgctgtaaaatctgtcatacatctgtacaaaatacatgagtaaaagctgcatgttccaatagtgaaacgatcacagggatatctgtgataaaaaagaggtatgttaaaccaatcttgggcaatattttgctataaatatttaaactgttatggaatcaaatcctttacta

SEQ ID NO: 235461 - DNA, 445 bp, Homo sapiens
ttttatgtagcactacattcttactatttagtgtggcagttaagctttcctggttatgaaaccatagcctctcagttgttcagggccttgctcaagtgccccttgcaaagctatcttgatcggcctcagcagataaagggcttcctagaaccttttaaaaatttctgttttggcactaatcccattgtattgtacttgattgttttccacttacttatgtttgactttagcacttaacttttaccaaatgctcagttaactttttgaatgaatgaatgaagttgaagaaattaagaataatttagtccttccacataagtattgctgtatttgaaacaactctgttccttttgggtttcattctactatttttatagggtatactgtacttggaacataataaatatggaatttaataaatatgtgatgaataaaaattgaatta

SEQ ID NO: 235462 - DNA, 182 bp, Homo sapiens
ttgcccactttttgaggagattatttgtttcttgctgatttgtttgagttccttgtacattctggatgcttgttttttgttggatgcataatttgtgaatatattctcccactctcttgattgcctgtttactctttctttccctccctcccttccttcctccctccctcccttccttcttc

SEQ ID NO: 235463 - DNA, 533 bp, Homo sapiens
cccgtttcccaatttgcaggatccagggccacgcggctttttgtgcccagactcttggagctcaagaacggagccgccgaggctggacagcttgggaaagggaacccaagcagcattttctgtgctgctgctttattcataacttagggttgccactgggtattaaggttgcttttttttttttaatgaagacagaaaattgcctttatctttgtattgcttcattttataatgcaaacatccaagagttggcagttagaatatttgccattttattaaaactgtgatttgttaccattttgatcgagacctaccaaaagctgtttgttctgccctttttgccaagaggcagtaatgagggctgcctactgcttgttaggcactaggagttcagagaagagacacgcttccagctttcagagatctctggtatctctgcaagagtgattccatgttttgcatttcagaagtgtttttccccctttaataattgtatacattgtcggtttagaaaaagaaatcgatttttaaca

SEQ ID NO: 235464 - DNA, 357 bp, Homo sapiens
caaattgttgcaatgcatagtgtaatggccagagcagacgaatgtgtagagaggatgggcccaaagtctgtgcaaaagttttgcagccacaatttaacttgagctcaaaactgttttcacaccctgtaaaaagagcaggtatagatgaaagatgaacaatcagcgatgaccattaattatcccttcctatttctacgctccacagtgctggtgccatcagctctctgagccctggctctgttcttaatgcatttttttttccttaatattgggtgctggccaggtgcggtcactcacgcctgtaatcccagcacttcgggaggccaagacaggcagatcacttgaggtcaggagttg

SEQ ID NO: 235465 - DNA, 137 bp, Homo sapiens
gtgtttataattacataatcattaaccttttcacctcaaaagcactgctcattcaatctaggtcaatattctctataaggacttaccaatcttactaatatattttagaggaaaataaatgtcttgaaaaacaaaaa

SEQ ID NO: 235466 - DNA, 372 bp, Homo sapiens
gagacagagtctcctctgtcccccaggctggagagcagtgatatgatcttggctcagtgcaccctccacctcctgggttcaagtgatcctcctgcctcagcctcctaagtagctgggattacaagcatgcgccaccacacccagctaatttttgtatttttggtagagatggtgtttcaccatgttggccagaccagtctcaaactcctgacctcaagtgatccgcctacctcggcctctcagagtgctgggattacaggtgtgagccactgtgcctggcctgattttctagtttgaagtggttgttgaaaagtcttatgccattcaaaatcttcatccttcatatgtgacctggccctacgatcttttgtc

SEQ ID NO: 235467 - DNA, 430 bp, Homo sapiens
gctttcacagacaaatctgcacagaggctgccaggccctcaaagcaaccacaggggttaaggcagagccaagggccagcatttctggagctcccaggcaaggctgtctgggtctggcacagcaggagagcccacgtgggcttaggagactgtcagatctgtttcctaacttggcctctaccacttttccagctggggaccttaggccaggggccttgggctattcacctgtaaaatggggacagtgataccaccctcactggaggatatgctatagcacaacaaaaagtcccattgtcctaaggcagctagacacacacaggggtcgttggggcaggaatgggggtaaggggtctttccattcctgacttggcaagctgaataatgatggtaacaagaaacaacgcaaggcactttataagcatcttgca

SEQ ID NO: 235468 - DNA, 333 bp, Homo sapiens
agtagtaagaggtgagagcagatgggaggaaggtctcagcacaggtcaggcctctggctttgctgagagtgatggatgcctttgcagggttttgaacagaggaggcacatgatttgacttaacgttttaacaagctgtttcctgctgctgtgttgagaataagctgtaggcggcaccaaggtggcagctgggagggtattgccacaaaacaagcaagagatatgatggtttaggccagtggtaatggtggagagtgtgagaagaggacagattctggatgtattttgaagtagagcccgcagaatttgttgatgaacttgatgcagagtgtta

SEQ ID NO: 235469 - DNA, 418 bp, Homo sapiens
caggggcgggaaacactgaccacagaagacacgttgagctgtatattctttgagatacttgagatctttctggttcatgccctcatctggaaaatggaaataataacatctctgcatggagatgacaaagtgtgggtacaatgcctaccacactgtagctactcaagaaatggaagtcacaatcattctcatgccaccagcctactgagcagatcaatgttctggtgatgttctgcatccagaccatctttcaagaactgaatggttactaccctgggtcttctaccgaaagaaagaacatgggtgtgggcattcaagtatagcctctaaaaaaagaacacataagtggttgctgggtgctgttatataatcacacacatacaaggcttaaatcatgaatatttcctttttgaagggg

SEQ ID NO: 235470 - DNA, 204 bp, Homo sapiens
ctaaatgcacaaagaccaaagtaggatgatttgacactttccccacacactattttacattgagaagattttaaacttatcaccttgattcttctctttactttttgctccaataatgaataagaaattggtactaagtgtgaaagctaataagaggaataccatacaaatgaatgagaattcaaacataataattccaggcta

SEQ ID NO: 235471 - DNA, 582 bp, Homo sapiens
tctgaataatcagttattgtctttcagcctacccagcaacactttattcacatgatacttattactttatatctgagatattttccacttattttaagagactgaaacctaactgaaaaggaaaagcgacttatctaccattatctgccagaatagtgtggccttccaccagtcaaagcccttgtgcaaagaaagcatcttactcctgagataaaggtttgggaatgcatgatctcatctcattagtggaaagtgatttatcatttcgcctgaaattgtatcaacagtgtctgcacagggagttgaaattgtctctgaataactcttgtgaaatggctattactgaaactattaatgacgattatgtagatatccaaagaaagtggcaaaaatagttatagagaaacatatttgtgataggaggaaaaaagctaaggttgtcctggaaccttggacacactcaagtttggtgtccaaaatctgattctttttcaaacttgaaaacattgtgcattaacagcttgaagggagaggtaaagactatatattaaaagagttaccagaaaagtaaagctgaatagg

SEQ ID NO: 235472 - DNA, 455 bp, Homo sapiens
atcctggttcatagcaagagaccagtcaagaaggcaatccccgttttgttctttgatgggaaaacatatagttaaaaagaaaataatgaaagtgacgtgtctattgaaatgtgatttgaaaactttacatggaatagactacattttaggtaatatgacccaatcttccaaatatttctattaggcacactaaggtgtatcatgctttaggagagtttataaagataaaagtcagaataaaccaaggtttgttatgggacttggaaaaactagaaccaaaatgaaaatgttcatgccggctacaattatcctattgataaacacatactgatagccatgatcataaggatgtgttgctagggctaccctctggattacctacttgtttattatggctttgtgtgaataatgaagttgccaataaaaccaattgtattcgataccaagaaaaataa

SEQ ID NO: 235473 - DNA, 444 bp, Homo sapiens
cgcgggggtgctcccggccacctgcagcttccgtccctgggggccgagcatggtctgattgaggggaagatgaggagaaaagagcagctctcagaagccaggtctcgaggtgttaacgttcttggtaggtttccaagtgtgatgaattcagctgcgaaactattttaatatgtgaaatagatctaattttcctttttgaacaaaaccccttatttacattttgcggttattttgagcctttgccatctgttcggccggcttctgcctcccgctcttgggcgtgtgggggcggagcccggtccatctccagggcagaccgccgcccccggcccgcgccccagatgtggaagatgctgactgctgccggctcgcaccaggtggccaagagcacagcctcctgtggccctcggcccaagaagcactatcttgttttcttcctaaaaa

SEQ ID NO: 235474 - DNA, 810 bp, Homo sapiens
gaaattatatatttagaaaatgaacatttttttcttttgagatggaattttgctcgttgcccaggctggagtgcaatggcctgatctccgcccactacaacttccgcctcttgggttcaagagattctcctgcctcagcctcccgagtagctgggactacagactctgtctccaaaaaaaaaaaaagaaaataataaaaaatgaaagacagaacaaagttatttttcatgatgctagagggcagaactaggaactaccactagaagttatagggaagccacgtttgactcaacgtaaggaataacgttctaacaactaaaattttctaagcaatgaatgacctgccttatgaggtaatgcgttttgcattattagaactctaagcaaaggctaaacggtcacttggcaaaaatatatagaacagacttatgtgttaggagattaaagagaagctcttaatgatccttttctactttaagtacttataatttcatagaaagttttccatttgcagggataccagaaaggaagttgttggtatttctttttaagtgtattataaaaaaaaaacccatggggcactaaactaaagagattatacttacattagaataatggagttgaggatgatttactttgttacattctacatcaataatatatacattattgataaagtgaaaagagataactaacccaatggagaggattcaaactgaactggcaagaactacatttgaatctactccttactaaattctctgtggctgaaaacctgaagaattacactttttaaggttaaatgcaata

SEQ ID NO: 235475 - DNA, 450 bp, Homo sapiens
atctttatactgaaggtaacttgttccttgatattttgagttaaaatttcactgtcactgaaaagtggatgttaaatattccctttcatgaaaaatgaaaacagtagctaagagtcagttgacatgtaagaaaattagtaacttagaaaaacttacttggtaaaaaaaatcttccttttagaatacaaaagtttactttaagtacacactgactcatttgaggtgataagggataaaataagtaaaagttattcaaccactaagtacattaggtactgatacttatctttccactctaattgaaatgtatttagattactcattatgaatactactagaactatcacaaagatctctggggatccaaatcttcagattcccatctgaccctatttatttttaattttatataatagttcaacagaccatatgtcatatgatgaagtaatc

SEQ ID NO: 235476 - DNA, 475 bp, Homo sapiens
ttccagacccccagcttctccttactaactaagccacatttctggaaggtcatgcccagtgaaggtggcagtgagggcagaagccccatgtcagaggccttggagccgtggggagcgcgtccagccgcagatgcattgccagcttccctaggatgtgccccaatcggtgagtagggggtgctcaccttacaattctcagcctggattacaccttaaggtttaaaacaagctaagaggagataccttcagaaagactcagtaacaccttggaaagacagaggcctgcccaggtctctccctggagtgacctgtaggaggtctgctggggacccttccaaccacacccaaagcctcagagcacagccgccctcgcgagccaccccacatctggcttcccactggggagtctgtagggtccaggtctctgttgacaaaggcagagattttgaggcagaacaatggctaacataattta

SEQ ID NO: 235477 - DNA, 311 bp, Homo sapiens
ctttggggtttatgccaggataagaagagactagaagaaagggacagctagtattttaatatgtaaatctgtttgcataatatttcctaggtaaactattcgttgatccaaccaaaattcggcggggctggggggtatcgttattgaggatgactcgctctaggggagaacgcggacgcattttcccatcagagttccctccataaatcaaaacctcaaaagaagagttaaagacgacacccaggtgtctacagtatccaagggccgggccaggagaggtccttggccacctggcgccgagttcgcggccg

SEQ ID NO: 235478 - DNA, 463 bp, Homo sapiens
aaaactgcttttctgaagtttaaagtgcacattttgatacatcttgacacatatatacacccatgaaatcatcaccacaatcaggatagtagatctatccattaccgccaaggtttacttgcactcctttgaacttttccccactcctcaccccctgcctatccccaatccttaagcaatcactgatttgctttctgtcactatcagttaatttgaatttttcagaaatgtatataaataaaatcattcgacgtgtatgctctttttctgttcacccggtacaatttgagatttagccatgtttttgcatgtgtcaatagtttatttttttgttgctcagtactaatccattttatggatacagagaaatgtattaatgcaatcccatattaataggcatttgggttgtttccaggtttgggctgttacaaataaagctgctatgaacatttttgtgcaagtc

SEQ ID NO: 235479 - DNA, 408 bp, Homo sapiens
cagggtttcaccatattggtcaggctggtctcagactcctgacctcaggtggtccacctgcctcgacctcccaaagtgctgggattagaggcgtgagccaccacacctggccttttattttgtacttctttttcttgcctaattgtcctggcttgcactctaatacagtgttgaatagaagtggtgagagtaagcacctctgtcgtgttcctgatcgtagaaggaattagttcagtcacttaccattaatcaagtatgatgttagctgtggggttttttgttaatgtcctttatcaagatgaggaagttccatctattccaaatctgagtttttttttttatcatgaaaaggatcttgtcaaatgctttttctgtgtctattgacatgatcatgtagtaatttttata

SEQ ID NO: 235480 - DNA, 332 bp, Homo sapiens
aacagtggacttttctcactcactgatatctgaggacccagcaccatcccccaaaagaatgttttatatccccacctgcccagactgatctgtcaacacagggaatactgtcaatatttcagagtataaattcaaggagagattaactgaacaaatctcaccttcatcttgagaatgtgtccttgaaggcatcaggacaaactttttacctggtaccaccacacccacaggcagaaggactttaaagtgcagaaaatgttctctccttctggcctttgttgtagaattcagaaacaatgacctgctaaataaagatgaaactgtgacttact

SEQ ID NO: 235481 - DNA, 348 bp, Homo sapiens
aggcagataatataaagatctcagaaaggttccttatatttaggggtataaaaattcatgtgtcctctgccacaaccagcctagtgacttggtggcctcccataaccctcttggtttcagttttctcatctgtaaaataagggtgtgggatttggttgatctttaagttgccttctggtcataaaattctgtgttttgaattttctgtcatctagagaatctattaatgtaagcatgattttttatatctagttatattcaattgttatagaacttgcatgtaaagaagaatacagggcattccattatgcagtgtaaatcaataaaatgaaaatgtatacattgaca

SEQ ID NO: 235482 - DNA, 190 bp, Homo sapiens
gaaaagcagcacacactgaggagcctggtggtagaagaaccatccttgttgaaggagtgggtccctggaaaagccttgcctactggagccaagtgaatgccctggaactaggaagcccaattcttttcccttgcaatgcttttccagagccgtctactgacacagcttaatgtcatgtcagctggcagat

SEQ ID NO: 235483 - DNA, 352 bp, Homo sapiens
agcaggtccggtatggcaggcgggggaactgaggctactaagagacattaagatgcttaaggacagccgggcgcggtggcagacgcctgtaatcccagcactttgggaggctgaggcgggcggatcacgaggtcaggagaccaagaccatcctggctaacacggtgaaaccccgtctctctactaaaagcacaaaaaattagccaggcatggtggtgggcgcttgtagtcccagctactcgggaggctgaggcaggagaatggtgtgaactcaggaggcggagcttgcagtgagccgagatcgcaccactgcactccagcctgggcgacagagcacaagactccatctcaaa

SEQ ID NO: 235484 - DNA, 289 bp, Homo sapiens
aattctgggatttcatatacccaaaacatggtccagtggagaagtaggctcccccatggaaagcaatccccttgctctcatgtacaccttgttccatggaatgtagttggagggtgccaaaggagaccttttaaaagagaagcaaaaggctgggcacggtggctcatgcctgtaatcccagcactttgggaagccaaggcgggcagataacaaggtcaagagatcaagaccatcctggccaacatggtgaaaccccgtctctactaaaaatacaaaaattagccaggca

SEQ ID NO: 235485 - DNA, 513 bp, Homo sapiens
cgagaatgagaaaccctgcgacgagtctgctgacagctaatataagtctgcaaaatcagctggaccaccaaacggcaattgagagctgcacaacctgcaattacctttattcaattaatgcaaaaacaaaaatggggagatgttacaggccgaaagaatgaaggtcgtgaccaactcagtataccactgaaggctatatgagcaaacagaaaactgttctcatgaaagcaggatgttggaaaactaacaactgtgtctgccgccagaagggttgctgagggcagtcatgccccaagcgcagtgttccttgtgattatctatagtaacatctgaagcctgttgtacaaaggaagcaattatgtgtacctgtgataaatcaagcagctgaccaactgttacctctccctccctgctctttctacctaataaatatgaagggctgtagaagctcagggcccttgcccactagaagcaaggagtcccctgaccccttcttccaaaaatactcttttt

SEQ ID NO: 235486 - DNA, 1266 bp, Homo sapiens
tttaatctgaaaatatgcattatcaaatctaagatagaggaaaacagtctaaagggttttccagatgtatttgacaattaaatctcattttgattggatgtaaattaaaatttcattgagatgtactttgtaaaatgctaaaatattatcagcactattttatacctgagaaaactgggcctcagagaagttaagcaactttcctattgtcaaacagctaataagcgggagggattatgatttgaaaccaggtctttctcgctccaaaaacatacacttggccactggacaattattttaacagaactccaattcttagaagatatgtaacgtacaaagctataggttgttacactacaaccctaacaattctggatagaacagtccgaacaaaaaccaaaaaaacacctccgcataccaagtcaggagtctcagtcttaaaagacagcacccactcccaatacaggaaaacagccaaaaaaaaaaaaaaaagccactgtgtttccatacgaccaacgttttcctgatgtcaggtaactgagaccttcacactacactcagccctacacctaccttactgcttctcaccgtagactactctgctggccccgcatctcaaaacgcgggctccacctatagtggcccatacctttccctattttagtggtgcttagtgacagctcgcatctggtttttccctcagcaaaggcaactgcagctcactgctgagaatattactaaagcaaataattcatttagcccaaacctaataatccctcctcaaaactcagagaatatgaaaaagaattgccccttctagttccctcggcattatgggaacaagcaagactttcatttacttcagcagtccatatgtttgaaggtcaaacaacacctgggtatttctttgaaatgaactaattgagcctggatgatttagagttagtcttgctgaaagactcactggatctccaatggtaacccaaaacctgcttttgaaaactctggattcctccaaccccagctttatcaaatggcaaagaatatttgatgctgttcaaagattaaggcctggatcaaactgagtaaaaagaaagagaaaggattgctttcaaactactatgaaaaagagccttggccccaggtgttcagagtggtaaagaaatcagagccagccaaagggaaatcaggcagagggcctagaaaggaatagttttcaaatgctaagtgtgcatagagagcaactgggaggcatcttgacaatgc

SEQ ID NO: 235487 - DNA, 352 bp, Homo sapiens
taaaagaaaagcaattgagaggactgcaaatcaagcagtacgacttccgagggggtccccaaggagcttctactataattcctgccacagagtccaaaaaaaggagccaaggagcctttcctcactgttagaggagaacatgaaggcggccgaaggtcagaagagccaccttgtgaccagccacagatgctcaggagggagtttgagccatgaaagagtcttgacaaagaggagacttttattccaaagcagaacaccggcacagcagtcacgcttaggccgaaaacgtctctgtccagcatttcaatttatcccaccctctgatttttataataaaaagaacttgtcagca

SEQ ID NO: 235488 - DNA, 409 bp, Homo sapiens
cagaacaggcttcaaacgtcagaactggtggaagagtttccatttcttttataatgttgttttcagaaagcagactggtaatattaataaaaccttaaatgcattcatttctttaagattataatttcactcctagcagcctatcataagaataaatcttaggaaatcatctgtgcacatttcagtagtacttacaatagcagaaaattggaaatgtcctaagtgtacagcaacaaatacactcactatacattttgtcatatccatgtttgttaagtgatattacaaagatttcatcataaccattgaaagttttatattattctgtgaaaagttagtatacaaaaccttatctgtgtttttaaaaccaaataaaaaacagcttgaaaaaagtactaggaggaactaa

SEQ ID NO: 235489 - DNA, 752 bp, Homo sapiens
ctctgctcatgccctccattcgggtgccctgcatagctctgcctcccaggctctgcccgggctatttattttctgtttttggaaagcccttcctgtctctgcactcaaggcacctctatctgtcttcgaggtctggctccctgccacctccaagcttgggtatgtggagctgccagccttgaatcgatcaactcccagataatggcaccatcatgggtacactttacagcagaagcaaatccccaaccctcataacaacctaatagggaaactgagacccgagccagttcagcaacttgccacattagattgagcttcccagcttccctgttctgatagggaagttcagaacagaggagggtgtggaccaagtgggaacctctaaggctcccactgcccctgctcagcacaagcctcatgcacagagcagtgttaagatgggcccctgggcctggcgcagtggctcatgcctgtaatctcagcactttgggaggccaaggcaggcagatcacttgaggtcatgagttcaagaccagcctggctgacacggcaaaaccccatctctattaaaatatatatataaaaattagccaggcattgtggcaggtgcctgtaatcgcagctactcgggagactgaggcaggagaagcgcttcaacccaggaagcagaggttgcagtgagccaggattgcaccactgcactccagcctgactctgtctcaaaaaaaataaataaataaaaaataagatgg

SEQ ID NO: 235490 - DNA, 331 bp, Homo sapiens
caaaataagtgtgtctttaggcacgctctttgcatattctattgctaactacattttgccagacactgcttgtgaatgcagtatgtgtgagaccactgcccagcttcctgtagtgctagtcctacatttccacagaactcctcacctagccaaattcttgagcgctttgcagtcagcagcactacctgaggctctgcctgagtgtcactttagttgtcttgcagaaagcttcagatgtccttggttctatttaggttgtgcaaatagacatatgaggtttggttctggttagtggttgctagtaccagatcaccttgcttactggtgagtt

SEQ ID NO: 235491 - DNA, 474 bp, Homo sapiens
ccttcatcaagaacaaattttcatcgaattgaaataatggtgtagtttttggaagaaaactagcttattatgagaaataattagcaggcatctaagaaaaaaattttaattgaatttggcttcatattttttaagggctttgtaatttgggcttaatatttgataagggtaaattaaccaagatcaaaacctttaaaatattcgaattgataactattttgtaattattgaaataacttttctctaataagtaaaggagaaatacattgaacaaaataaccagccaactttctgctacacactaaattttgatagactgtccttgtctaaaatagttattcagctataaatacagaacacttgagctagagtcagaatacctggattcaagtcctggttctgccattagcatgctgtgtgaacctaggaaggtgaacttaggaaggtgaacctattagatcaaatgagaaagga

SEQ ID NO: 235492 - DNA, 372 bp, Homo sapiens
ccagggtaggggagggcggtttggataggggtagctgtgctgtgtttggccctcactctactccctgggtatccttaaaaatgaaatttgggccaggcacagtgtctcacgcctgtaatcctagcactttgggaggccgaggtgggcggatcacgaggtcaggagatcgagaccatcctggctaacacggtgaaaccccatctctactaaaaatacaaaaaattagccgcgcatggtggtgggtgcctgtagtcccagctactcgggaggctgaggcaggagaatggcatgaacccaggaggcagagcttggcagtgagccgagatcacgccactgccctccagcctgggcgacagagtgagactccgtctc

SEQ ID NO: 235493 - DNA, 532 bp, Homo sapiens
catcatgttgtataccacaaatagatgcaattttgattgatcaattatacctttaaaaagatgggaaggaaaaatgcaaaaatttaatcatctatttttgcaagtagataagaactggctctagtacatcactgggtggaacccaggtttcattattttttaaacctcacccaatatggagccaaggctgagaaccactgagctaccaaagccagaattatgtgggagccttggggatcttggaataatacaaacaaaaaaagtctatgtaaagcatacaaggggaaaggaagagagtaatgaagaaaactatcccctgaaatgcaacacagaacaagatggtcacagctagggtaacaagagccagcttctccagggtcagttatctcttaagacatgcctattcttcatttgggttttagaatgccagggccacggatgcttttactgactgcttttcaaggaatataaagatgcattcttattgaaaataattgcttcctatgtgtagtaattaaacaaataaaccctt

SEQ ID NO: 235494 - DNA, 494 bp, Homo sapiens
gcaggagaggtgagacatacaggcaaagtgggagccgccatgatgtcgcggaagcagcattgcacctgggtttaggagatgtgctttcagcctgggctgtgcttccaacttactattggatccaaacttactattggatcgtggataagatacattatctcactgcagcctcagtttctgctctataaaatgaggaggtgaactagatgtaaggccatcaaaatgtcttgttgaaaatatagacctaaacttctgcttctggaaaatgcaatagatgttcttatctatatttctcctgctaaatacaactaaaaacccaagacattctgtataaaatgaacgtaagaagactcggagaggtggagggaagaaggcagacctgctagggtgcccagaacctgaggaacgacacagcgaggagcttgttttctttttgcctcatgtgtcccatacttggcactaggaaatgctaatggacacaggcaaaaaaaaaa

SEQ ID NO: 235495 - DNA, 420 bp, Homo sapiens
gctctacctatctccgacttcattcctgagctcttgaacaggggtaaggcaaactttttctgcaaaggaacacgtggtaagtattttcggccttgacggtcacatgtctctgccacgagtcgtctgccttggggcgcaaatgcaggcttgggcagggaagaaataacaaaacttgcttcctggtcactgaaacatgaagtccaggtcacactcactgttacaaaatactccgaattttcagactgtggttcaatacacatgacataaaatggaccttcttaaccatttgtaagtgcacggttccgtggaattcagtatattcatgtggctgtgcaatcatcaccaccatccatctccaaaagtttctcattttcccaaaccgaaagtctgtccccattaaacagcagcttcccatgaccc

SEQ ID NO: 235496 - DNA, 601 bp, Homo sapiens
gaggccaaatgcttggagttcaagtttctttagtagtcccagcagacagattgaaatgatctattttaattatcaacaagtgtgtgtcaatagaaaattatctattgacacacacttccttctttctactaaccatgacctctaaacttctctttccatgctttaataaataaaaggagatttcttattaaggacaatatattatcttggcaattataatccttttattgataatataaacccagacaaatagtctatctgtaataatatataataaacataatggccatgccctaaaatcaacagcttaagttataacaaacttaataaaataaatggtaaacagaaaaactgctccaccaacataaggctaaggcaaacacttaacaatgttatttactccagggggatttttatctccctgcctgcttcctttttctttgaacaaatgtttttgtatacctactatgtacttgatactgggctactacagtgaagaaggacacaatctctattttcaaaagtgtggtctaaaggccaggcttggtagctcatgcctgttgtcccagcactctgggagggtaaagtgggatcgcttgag

SEQ ID NO: 235497 - DNA, 546 bp, Homo sapiens
aaaccaggctgaagaactgagatgggaagagatgagcagagtgggaggtgccagtgggatagtccaaaggagctgtcagcctggaactcaggagagcgctccaggttacaggtgaaagtgtggtatcgtctgttccctggagctcactggagttgtgcatggctgaggtcactgtgggaaagtatagaccatggagagaaagttgctgcaggcacaatggcaggcaacacctgccctgagcccacaggcaaaggcagaggaagcaacagattgagatggagcaacaggaaaaggcagtccccggagagggcagcggccaggtagccatggagaggtaatggcagcaggtggtgagcagccctgtgtgatgccgcaggcactgcatgggaaaaggacaagttaagagttgaaaagggaaggatcgagagcatgggcagaggatggtcttggagaggtggaagggcagagaggggagagtcacgagagaggggaggctcagagcaaccttgaaaggatgagggacctcacactgttggcctttgcagc

SEQ ID NO: 235498 - DNA, 554 bp, Homo sapiens
ctctcccacctccacccctgctctttcgtctcctctcagcatgtctggctggcccagacttgcaatatgcccacaggctggtcctccagggttccagggcacctcccagaagcttctcccaccttggcctcctaaagtgttgggattacaagtgcgagccattaccatgcctggccctgcccttgtaatttatatagccttttataatttccaaatttcttctagattcttcacagctaccccctgaaatgggcgaggataggattttcatcgcatttagcagatgccaagaactcaaagaagtgaaacaacttctccagggttagagggcttagttgaccatcccgagtccaaaaatctgaaacctgaggtactccgaagtccaaaactttttgagggctgatatgacgcccaaaggaaatgatgagtggagcattttgtattttgtgtttttggatctgggatgcttaactggtgagtcccaggaacatccagccaaaggcaagttctttgggagcccaagctcatggcagtgacagctcccccaggagacg

SEQ ID NO: 235499 - DNA, 521 bp, Homo sapiens
ctctcccacctccacccctgctctttcgtctcctctcagcatgtctggctggcccagacttgcaatatgcccacaggctggtcctccagggttccagggcacctcccagaagcttctcccaccttggcctcctaaagtgttgggattacaagtgcgagccattaccatgcctggccctgcccttgtaatttatatagccttttataatttccaaatttcttctagattcttcacagctaccccctgaaatgggcgaggataggattttcatcgcatttagcagatgccaagaactcaaagaagtgaaacaacttctccagggttagagggcttagttgaccatcccgagtccaaaaatctgaaacctgaggtactccgaagtccaaaactttttgagggctgatatgacgcccaaaggaaatgatgagtggagcattttgtattttgtgtttttggatctgggatgcttaactggtaagtataatgcaaatattttaaaataaagatcagaaattcaaaac

SEQ ID NO: 235500 - DNA, 558 bp, Homo sapiens
tgggcccccgcctgcaagcacacatggcaaggagggctttagcaggctcacataaccgagtggcaaggcccctgctcccagaggctggatttgaatgaactccgggcctgtttggggaggtgaagctgccaggtgtgcacaggggcctcccaggctcctggctccaccagccaaggaggtgggggcaagggtcagggcaatgggggacaatgccgctcagggtgcagtgagctcccctgggaaaaccgaagccagcaagaccaggagagggccacctcactgggcctgcctcccccacctcctgggcctctctgacctcagctcctagaccctggacccttggctgggactcagcattttccagtctttttcaggggtagacaggggagcctgggttaaactttaccactgtgccctggcccaggcatcaccaacacggcctccctgcagctgccctgccaccgacagaccccgattaaacccacacctggccttggcctcccctgctctataccttgcatggtttttgcctcacttggaataaaattccaactcctc

SEQ ID NO: 235501 - DNA, 141 bp, Homo sapiens
agtttcactttgctgtagtttgaatgtttcactgtaacatatgcttctgtacccacatatgttacagtgaaacattaaaactacagcaaagtgaaactcctctgatgcacctgccacctcccagcctccatacccgtcccc

SEQ ID NO: 235502 - DNA, 878 bp, Homo sapiens
atgtccaggccacctccctctgcctccagagggctgcctgtaccgcctcgtgactccccagccttcaccttcccagcaggcccggcccagcctccactgtgaccagcgggagctttctccagcacagctctgaccctggcgctcccacttcgagcctctaccaccagtccagaacttgcagtgggtgcggtaaacggtggcccctcctcagcaaacatttccaggggattctggcagcagagtttccatgggaacatgtgctggttctgcgctgaacccggtgtggctggggttcccttcacagccaatattgcaggaactgagcctggtggcctcggccagggtaggcagtgctctttggccacccagtgtcacaaacctgaactcaagttacaggcaaaacctgcttttcctttttctttctctctctctctcttttttttttgttaaagcacattctaatgtaaagtccatgctccattctaaagatgcctctgggatttcagggatggatttttatgtagttcaatagttttcttggcagacagcttatgcaggagaggtgggccgttggctcagtccagccaggctgagtggcgtcactccattccttgcaatgccaggggatgtcatttgtccacctgagggggcttccccagtctcccttccctgacctgtggtcagaatgatggcctcagccttgactgagcgcgggtcaggccagactctctgaacttggtgttggcgtgtgttttgtgtgtgtctggaggtgacatatgtgggtgacagaagcatatgttacagtgaaacattaaaactacagcaaagtgaaactcctctgatgcacctgccacctcccagcctccatacccgtcccc

SEQ ID NO: 235503 - DNA, 984 bp, Homo sapiens
cggctggtactgcctcggatgttcgggattggctgggtgtcgggtgcccgtggctgttgggctctgcttcctgcccctgctcccagaggctggatttgaatgaactccgggcctgtttggggaggtgaagctgccaggtgtgcacaggggcctcccaggctcctggctccaccagccaaggaggtgggggcaagggtcagggcaatgggggacaatgccgctcagggtgcagtgagctcccctgggaaaaccgaagccagcctctaccaccagtccagaacttgcagtgggtgcggtaaacggtggcccctcctcagcaaacatttccaggggattctggcagcagagtttccatgggaacatgtgctggttctgcgctgaacccggtgtggctggggttcccttcacagccaatattgcaggaactgagcctggtggcctcggccagggtaggcagtgctctttggccacccagtgtcacaaacctgaactcaagttacaggcaaaacctgcttttcctttttctttctctctctctctcttttttttttgttaaagcacattctaatgtaaagtccatgctccattctaaagatgcctctgggatttcagggatggatttttatgtagttcaatagttttcttggcagacagcttatgcaggagaggtgggccgttggctcagtccagccaggctgagtggcgtcactccattccttgcaatgccaggggatgtcatttgtccacctgagggggcttccccagtctcccttccctgacctgtggtcagaatgatggcctcagccttgactgagcgcgggtcaggccagactctctgaacttggtgttggcgtgtgttttgtgtgtgtctggaggtgacatatgtgggtgacagaagcatatgttacagtgaaacattaaaactacagcaaagtgaaactcctctgatgcacctgccacctcccagcctccatacccgtcccc

SEQ ID NO: 235504 - DNA, 763 bp, Homo sapiens
atgtccaggccacctccctctgcctccagagggctgcctgtaccgcctcgtgactccccagccttcaccttcccagcaggcccggcccagcctccactgtgaccagcgggagctttctccagcacagctctgaccctggcgctcccacttcgagcctctaccaccagtccagaacttgcagtgggtgcggtaaacggtggcccctcctcagcaaacatttccaggggattctggcagcagagtttccatgggaacatgtgctggttctgcgctgaacccggtgtggctggggttcccttcacagccaatattgcaggaactgagcctggtggcctcggccagggtaggcagtgctctttggccacccagtgtcacaaacctgaactcaagttacaggcaaaacctgcttttcctttttctttctctctctctctcttttttttttgttaaagcacattctaatgtaaagtccatgctccattctaaagatgcctctgggatttcagggatggatttttatgtagttcaatagttttcttggcagacagcttatgcaggagaggtgggccgttggctcagtccaccttgactgagcgcgggtcaggccagactctctgaacttggtgttggcgtgtgttttgtgtgtgtctggaggtgacatatgtgggtgacagaagcatatgttacagtgaaacattaaaactacagcaaagtgaaactcctctgatgcacctgccacctcccagcctccatacccgtcccc

SEQ ID NO: 235505 - DNA, 604 bp, Homo sapiens
tgggcccccgcctgcaagcacacatggcaaggagggctttagcaggctcacataaccgagtggcaaggcccctgctcccagaggctggatttgaatgaactccgggcctgtttggggaggtgaagctgccaggtgtgcacaggggcctcccaggctcctggctccaccagccaaggaggtgggggcaagggtcagggcaatgggggacaatgccgctcagggtgcagtgagctcccctgggaaaaccgaagccagcaagaccaggagagggccacctcactgggcctgcctcccccacctcctgggcctctctgacctcagctcctagaccctggacccttggctgggactcagcattttccagtctttttcaggggtagacaggggagcctgggttaaactttaccactgtgccctggcccaggcatcaccaacacggcctccctgcagctgccctgccaccgacagaccccgattaaacccacacctggccttggcctcccctgctctataccttgcatggtttttgcctcacttggaataaaattccaactcctccctgtggcgtaggaggttcttgggggctgacccatcacccctctgg

SEQ ID NO: 235506 - DNA, 200 bp, Homo sapiens
ttttaaacaagtaaggaaatcaccaaatacagtttgggcaacttcagcttgcctgtaggtgtgtgttgtgttcagtgggggtggggaactgaattaaagtccttgctgtggctgggtccccaggaacaggcagcaggtgtcaaaggggtggttagatgaataaaaggcagtccaaccaaataaacttgacatagaattta

SEQ ID NO: 235507 - DNA, 1147 bp, Homo sapiens
aggccgcgctcagcaggcggggcgggagccgcgtgcgcccgaggacccggccggaaggcttgcgccagctcaggatgaggacaggctgggcgacccctcgccgcccggcggggctcctcatgctgctcttctggttcttcgatctcgcggagccctctggccgcgcagagcagacttgtggccttgtttggggaagcactggaattttgaacccccagccatttgggtcaattgtttggcaagagtgtccgcttcatgatgctggtgatggcatgcacctcgtcacatgtgcacggctaggcttgtgcaggtggcctctattacccaaacactgaaggagcccctctgtgtccttggagagatgccaggtgcttagtttacatttttgcctgcttggagagctaacagcttgaagtaaaccaatccatcagggactcctgaggttttcaccagccaacaccacccaatcgtgcgtgaagactttctgactccctggacattgccatggactcaactgtcacttcaggacctgtttttgaactaacaaacctagacttctgattctctcttgctgcacctacctgtacattccgaacacatggtagagactctacaaaatgcttaatatgtgatctatggacggttcccctgaaattataaatgctgccatcttcatccttcttgttttcccaagctatttccctatccatttgtctgtggttataaatgtcaatatccagcttctctttggaatgtgtgaagctctttggtctagggaccaaaggcaggaattatttagtgatcagacaataagaaaacactgaaagagatgatttgcctttgatggatgtaaaaatactaaaaatttattttcaatttatggtaatgctacttagccattttctctcaaacaccactggagaatttatataacatgaagcatatacaaaatgcatctagggggtaatgaggcttctcttcatcaacttctgccttttagatttgccccaatattgtacttggaggtaaatattaaaactccattgaggactggtataaagttgtaaagtgaacaaaacccagtagaaagctattgataaagaatctattttataaaataagttttatacaataaaatctactctgt

SEQ ID NO: 235508 - DNA, 1346 bp, Homo sapiens
aactaccaaaagaatcctttaaaataagatcctttattgccttgataatttattctgcctgccccacaatccaaggtggaaaagttcactgcagcaactaactacagtgaaaatgcactaacttttcaatcactaacctcttggttcccatcgacatctgcttcagtcctgtttttatctccttcacaaatttcaggatttccctaattcttgcaatctctgcaatcactgccctttatcactgacccaaagcgaaaagcaccaggtttaactctgttccccctgtgctaggtccccacaggttttgttatcctgtatccttccttactcctagcagctactctgatcgattttctctcaccctcagagcagacttgtggccttgtttggggaagcactggaattttgaacccccagccatttgggtcaattgtttggcaagagtgtccgcttcatgatgctggtgatggcatgcacctcgtcacatgtgcacggctaggcttgtgcaggtggcctctattacccaaacactgaaggagcccctctgtgtccttggagagatgccaggtgcttagtttacatttttgcctgcttggagagctaacagcttgaagtaaaccaatccatcagggactcctgaggttttcaccagccaacaccacccaatcgtgcgtgaagactttctgactccctggacattgccatggactcaactgtcacttcaggacctgtttttgaactaacaaacctagacttctgattctctcttgctgcacctacctgtacattccgaacacatggtagagactctacaaaatgcttaatatgtgatctatggacggttcccctgaaattataaatgctgccatcttcatccttcttgttttcccaagctatttccctatccatttgtctgtggttataaatgtcaatatccagcttctctttggaatgtgtgaagctctttggtctagggaccaaaggcaggaattatttagtgatcagacaataagaaaacactgaaagagatgatttgcctttgatggatgtaaaaatactaaaaatttattttcaatttatggtaatgctacttagccattttctctcaaacaccactggagaatttatataacatgaagcatatacaaaatgcatctagggggtaatgaggcttctcttcatcaacttctgccttttagatttgccccaatattgtacttggaggtaaatattaaaactccattgaggactggtataaagttgtaaagtgaacaaaacccagtagaaagctattgataaagaatctattttataaaataagttttatacaataaaatctactctgt

SEQ ID NO: 235509 - DNA, 300 bp, Homo sapiens
aggccgcgctcagcaggcggggcgggagccgcgtgcgcccgaggacccggccggaaggcttgcgccagctcaggatgaggacaggctgggcgacccctcgccgcccggcggggctcctcatgctgctcttctggttcttcgatctcgcggagccctctggccgcgcagctaagctaagttaccatctggtttagacttccttcggagagcgatgggaagagatttctcagagtgtgaatggcatcatcctatctacagcaaggacctggaaatgaaccctgctctgagtcacacttctct

SEQ ID NO: 235510 - DNA, 5604 bp, Homo sapiens
aggccgcgctcagcaggcggggcgggagccgcgtgcgcccgaggacccggccggaaggcttgcgccagctcaggatgaggacaggctgggcgacccctcgccgcccggcggggctcctcatgctgctcttctggttcttcgatctcgcggagccctctggccgcgcagctaatgaccccttcaccatcgtccatggaaatacgggcaagtgcatcaagccagtgtatggctggatagtagcagacgactgtgatgaaactgaggacaagttatggaagtgggtgtcccagcatcggctctttcatttgcactcccaaaagtgccttggcctcgatattaccaaatcggtaaatgagctgagaatgttcagctgtgactccagtgccatgctgtggtggaaatgtgagcaccactctctgtacggagctgcccggtaccggctggctctgaaggatggacatggcacagcaatctcaaatgcatctgatgtctggaagaaaggaggctcagaggaaagcctttgtgaccagccttatcatgagatctataccagagatgggaactcttatgggagaccttgtgaatttccattcttaattgatgggacctggcatcatgattgcattcttgatgaagatcatagtgggccatggtgtgccaccaccttaaattatgaatatgaccgaaagtggggcatctgcttaaagcctgaaaacggttgtgaagataattgggaaaagaacgagcagtttggaagttgctaccaatttaatactcagacggctctttcttggaaagaagcttatgtttcatgtcagaatcaaggagctgatttactgagcatcaacagtgctgctgaattaacttaccttaaagaaaaagaaggcattgctaagattttctggattggtttaaatcagctatactctgctagaggctgggaatggtcagaccacaaaccattaaactttctcaactgggatccagacaggcccagtgcacctactataggtggctccagctgtgcaagaatggatgctgagtctggtctgtggcagagcttttcctgtgaagctcaactgccctatgtctgcaggaaaccattaaataatacagtggagttaacagatgtctggacatactcagatacccgctgtgatgcaggctggctgccaaataatggattttgctatctgctggtaaatgaaagtaattcctgggataaggcacatgcgaaatgcaaagccttcagtagtgacctaatcagcattcattctctagcagatgtggaggtggttgtcacaaaactccataatgaggatatcaaagaagaagtgtggataggccttaagaacataaacataccaactttatttcagtggtcagatggtactgaagttactctaacatattgggatgagaatgagccaaatgttccctacaataagacgcccaactgtgtttcctacttaggagagctaggtcagtggaaagtccaatcatgtgaggagaaactaaaatatgtatgcaagagaaagggagaaaaactgaatgacgcaagttctgataagatgtgtcctccagatgagggctggaagagacatggagaaacctgttacaagatttatgaggatgaggtcccttttggaacaaactgcaatctgactatcactagcagatttgagcaagaatacctaaatgatttgatgaaaaagtatgataaatctctaagaaaatacttctggactggcctgagagatgtagattcttgtggagagtataactgggcaactgttggtggaagaaggcgggctgtaaccttttccaactggaattttcttgagccagcttccccgggcggctgcgtggctatgtctactggaaagtctgttggaaagtgggaggtgaaggactgcagaagcttcaaagcactttcaatttgcaagaaaatgagtggaccccttgggcctgaagaagcatcccctaagcctgatgacccctgtcctgaaggctggcagagtttccccgcaagtctttcttgttataaggtattccatgcagaaagaattgtaagaaagaggaactgggaagaagctgaacgattctgccaagcccttggagcacacctttctagcttcagccatgtggatgaaataaaggaatttcttcactttttaacggaccagttcagtggccagcattggctgtggattggtttgaataaaaggagcccagatttacaaggatcctggcaatggagtgatcgtacaccagtgtctactattatcatgccaaatgagtttcagcaggattatgacatcagagactgtgctgctgtcaaggtatttcataggccatggcgaagaggctggcatttctatgatgatagagaatttatttatttgaggccttttgcttgtgatacaaaacttgaatgggtgtgccaaattccaaaaggccgtactccaaaaacaccagactggtacaatccagaccgtgctggaattcatggacctccacttataattgaaggaagtgaatattggtttgttgctgatcttcacctaaactatgaagaagccgtcctgtactgtgccagcaatcacagctttcttgcgactataacatcttttgtgggactaaaagccatcaaaaacaaaatagcaaatatatctggtgatggacagaagtggtggataagaattagcgagtggccaatagatgatcattttacatactcacgatatccatggcaccgctttcctgtgacatttggagaggaatgcttgtacatgtctgccaagacttggcttatcgacttaggtaaaccaacagactgtagtaccaagttgcccttcatctgtgaaaaatataatgtttcttcgttagagaaatacagcccagattctgcagctaaagtgcaatgttctgagcaatggattccttttcagaataagtgttttctaaagatcaaacccgtgtctctcacattttctcaagcaagcgatacctgtcactcctatggtggcacccttccttcagtgttgagccagattgaacaagactttattacatccttgcttccggatatggaagctactttatggattggtttgcgctggactgcctatgaaaagataaacaaatggacagataacagagagctgacgtacagtaactttcacccattattggttagtgggaggctgagaataccagaaaatttttttgaggaagagtctcgctaccactgtgccctaatactcaacctccaaaaatcaccgtttactgggacgtggaattttacatcctgcagtgaacgccactttgtgtctctctgtcagaaatattcagaagttaaaagcagacagacgttgcagaatgcttcagaaactgtaaagtatctaaataatctgtacaaaataatcccaaagactctgacttggcacagtgctaaaagggagtgtctgaaaagtaacatgcagctggtgagcatcacggacccttaccagcaggcattcctcagtgtgcaggcgctccttcacaactcttccttatggatcggactcttcagtcaagatgatgaactcaactttggttggtcagatgggaaacgtcttcattttagtcgctgggctgaaactaatgggcaactcgaagactgtgtagtattagacactgatggattctggaaaacagttgattgcaatgacaatcaaccaggtgctatttgctactattcaggaaatgagactgaaaaagaggtcaaaccagttgacagtgttaaatgtccatctcctgttctaaatactccgtggataccatttcagaactgttgctacaatttcataataacaaagaataggcatatggcaacaacacaggatgaagttcatactaaatgccagaaactgaatccaaaatcacatattctgagtattcgagatgaaaaggagaataactttgttcttgagcaactgctgtacttcaattatatggcttcatgggtcatgttaggaataacttatagaaataagtctcttatgtggtttgataagaccccactgtcatatacacattggagagcaggaagaccaactataaaaaatgagaagtttttggctggtttaagtactgacggcttctgggatattcaaacctttaaagttattgaagaagcagtttattttcaccagcacagcattcttgcttgtaaaattgaaatggttgactacaaagaagaatataatactacactgccacagtttatgccatatgaagatggtatttacagtgttattcaaaaaaaggtaacatggtatgaagcattaaacatgtgttctcaaagtggaggtcacttggcaagcgttcacaaccaaaatggccagctctttctggaagatattgtaaaacgtgatggatttccactatgggttgggctctcaagtcatgatggaagtgaatcaagttttgaatggtctgatggtagtacatttgactatatcccatggaaaggccaaacatctcctggaaattgtgttctcttggatccaaaaggaacttggaaacatgaaaaatgcaactctgttaaggatggtgctatttgttataaacctacaaaatctaaaaagctgtcccgtcttacatattcatcaagatgtccagcagcaaaagagaatgggtcacggtggatccagtacaagggtcactgttacaagtctgatcaggcattgcacagtttttcagaggcatgagccaccgcgcctggcctctgcttactttttatatagcacattattatgtaaatatgaagagtttttttctgtttataattgtttataaaacaatgacttttaaagatttagtgcttaacattttcccaagtgtgggaacattatttttagattgagtaggtaccttgtagcagtgtgctttgcattttctgatgtattacatgactgtttcttttgtaaagagaatcaactaggtatttaagactgataattttacaatttatatgcttcacatagcatgtcaacttttgactaagaattttgttttacttttttaacatgtgttaaacagagaaagggtccatgaaggaaagtgtatgagttgcatttgtaaaaatgagactttttcagtggaactctaaaccttgtgatgactactaacaaatgtaaaattatgagtgattaagaaaacattgctttgtggttatcactttaagttttgacacctagattatagtcttagtaatagcatccactggaaaaggtgaaaatgttttattcagcatttaacttacatttgtactttagagtatttttgtataaaatccatagatttattttacatttagagtatttacactatgataaagttgtaaataattttctaagacagtttttatatagtctacagttgtcctgatttcttattgaatttgttagactagttctcttgtcttgtgatctgtgtacaattttagtcactaagactttcctccaagaactaagccaacttgatgtgaaaagcacagctgtatataatggtgatgtcataataaagttgttttatcttttaagtaaaagtaaaaaaaat

SEQ ID NO: 235511 - DNA, 4183 bp, Homo sapiens
aggccgcgctcagcaggcggggcgggagccgcgtgcgcccgaggacccggccggaaggcttgcgccagctcaggatgaggacaggctgggcgacccctcgccgcccggcggggctcctcatgctgctcttctggttcttcgatctcgcggagccctctggccgcgcagctaatgaccccttcaccatcgtccatggaaatacgggcaagtgcatcaagccagtgtatggctggatagtagcagacgactgtgatgaaactgaggacaagttatggaagtgggtgtcccagcatcggctctttcatttgcactcccaaaagtgccttggcctcgatattaccaaatcggtaaatgagctgagaatgttcagctgtgactccagtgccatgctgtggtggaaatgtgagcaccactctctgtacggagctgcccggtaccggctggctctgaaggatggacatggcacagcaatctcaaatgcatctgatgtctggaagaaaggaggctcagaggaaagcctttgtgaccagccttatcatgagatctataccagagatgggaactcttatgggagaccttgtgaatttccattcttaattgatgggacctggcatcatgattgcattcttgatgaagatcatagtgggccatggtgtgccaccaccttaaattatgaatatgaccgaaagtggggcatctgcttaaagcctgaaaacggttgtgaagataattgggaaaagaacgagcagtttggaagttgctaccaatttaatactcagacggctctttcttggaaagaagcttatgtttcatgtcagaatcaaggagctgatttactgagcatcaacagtgctgctgaattaacttaccttaaagaaaaagaaggcattgctaagattttctggattggtttaaatcagctatactctgctagaggctgggaatggtcagaccacaaaccattaaactttctcaactgggatccagacaggcccagtgcacctactataggtggctccagctgtgcaagaatggatgctgagtctggtctgtggcagagcttttcctgtgaagctcaactgccctatgtctgcaggaaaccattaaataatacagtggagttaacagatgtctggacatactcagatacccgctgtgatgcaggctggctgccaaataatggattttgctatctgctggtaaatgaaagtaattcctgggataaggcacatgcgaaatgcaaagccttcagtagtgacctaatcagcattcattctctagcagatgtggaggtggttgtcacaaaactccataatgaggatatcaaagaagaagtgtggataggccttaagaacataaacataccaactttatttcagtggtcagatggtactgaagttactctaacatattgggatgagaatgagccaaatgttccctacaataagacgcccaactgtgtttcctacttaggagagctaggtcagtggaaagtccaatcatgtgaggagaaactaaaatatgtatgcaagagaaagggagaaaaactgaatgacgcaagttctgataagatgtgtcctccagatgagggctggaagagacatggagaaacctgttacaagatttatgaggatgaggtcccttttggaacaaactgcaatctgactatcactagcagatttgagcaagaatacctaaatgatttgatgaaaaagtatgataaatctctaagaaaatacttctggactggcctgagagatgtagattcttgtggagagtataactgggcaactgttggtggaagaaggcgggctgtaaccttttccaactggaattttcttgagccagcttccccgggcggctgcgtggctatgtctactggaaagtctgttggaaagtgggaggtgaaggactgcagaagcttcaaagcactttcaatttgcaagaaaatgagtggaccccttgggcctgaagaagcatcccctaagcctgatgacccctgtcctgaaggctggcagagtttccccgcaagtctttcttgttataaggtattccatgcagaaagaattgtaagaaagaggaactgggaagaagctgaacgattctgccaagcccttggagcacacctttctagcttcagccatgtggatgaaataaaggaatttcttcactttttaacggaccagttcagtggccagcattggctgtggattggtttgaataaaaggagcccagatttacaaggatcctggcaatggagtgatcgtacaccagtgtctactattatcatgccaaatgagtttcagcaggattatgacatcagagactgtgctgctgtcaaggtatttcataggccatggcgaagaggctggcatttctatgatgatagagaatttatttatttgaggccttttgcttgtgatacaaaacttgaatgggtgtgccaaattccaaaaggccgtactccaaaaacaccagactggtacaatccagaccgtgctggaattcatggacctccacttataattgaaggaagtgaatattggtttgttgctgatcttcacctaaactatgaagaagccgtcctgtactgtgccagcaatcacagctttcttgcgactataacatcttttgtgggactaaaagccatcaaaaacaaaatagcaaatatatctggtgatggacagaagtggtggataagaattagcgagtggccaatagatgatcattttacatactcacgatatccatggcaccgctttcctgtgacatttggagaggaatgcttgtacatgtctgccaagacttggcttatcgacttaggtaaaccaacagactgtagtaccaagttgcccttcatctgtgaaaaatataatgtttcttcgttagagaaatacagcccagattctgcagctaaagtgcaatgttctgagcaatggattccttttcagaataagtgttttctaaagatcaaacccgtgtctctcacattttctcaagcaagcgatacctgtcactcctatggtggcacccttccttcagtgttgagccagattgaacaagactttattacatccttgcttccggatatggaagctactttatggattggtttgcgctggactgcctatgaaaagataaacaaatggacagataacagagagctgacgtacagtaactttcacccattattggttagtgggaggctgagaataccagaaaatttttttgaggaagagtctcgctaccactgtgccctaatactcaacctccaaaaatcaccgtttactgggacgtggaattttacatcctgcagtgaacgccactttgtgtctctctgtcagaaatattcagaagttaaaagcagacagacgttgcagaatgcttcagaaactgtaaagtatctaaataatctgtacaaaataatcccaaagactctgacttggcacagtgctaaaagggagtgtctgaaaagtaacatgcagctggtgagcatcacggacccttaccagcaggcattcctcagtgtgcaggcgctccttcacaactcttccttatggatcggactcttcagtcaagatgatgaactcaactttggttggtcagatgggaaacgtcttcattttagtcgctgggctgaaactaatgggcaactcgaagactgtgtagtattagacactgatggattctggaaaacagttgattgcaatgacaatcaaccaggtgctatttgctactattcaggaaatgagactgaaaaagaggtcaaaccagttgacagtgttaaatgtccatctcctgttctaaatactccgtggataccatttcagaactgttgctacaatttcataataacaaagaataggcatatggcaacaacacaggatgaagttcatactaaatgccagaaactgaatccaaaatcacatattctgagtattcgagatgaaaaggagaataactttgttcttgagcaactgctgtacttcaattatatggcttcatgggtcatgttaggaataacttatagaagtaagttgtaaatctgccaactttctctatttgtttttgtacttcattataacataattatcaagccatagttcttcaaagtacatgtctatcaatacgtgaaagtataattatgtacttagcataacttacataaataccaagacagttt

SEQ ID NO: 235512 - DNA, 2598 bp, Homo sapiens
aggccgcgctcagcaggcggggcgggagccgcgtgcgcccgaggacccggccggaaggcttgcgccagctcaggatgaggacaggctgggcgacccctcgccgcccggcggggctcctcatgctgctcttctggttcttcgatctcgcggagccctctggccgcgcagctaatgaccccttcaccatcgtccatggaaatacgggcaagtgcatcaagccagtgtatggctggatagtagcagacgactgtgatgaaactgaggacaagttatggaagtgggtgtcccagcatcggctctttcatttgcactcccaaaagtgccttggcctcgatattaccaaatcggtaaatgagctgagaatgttcagctgtgactccagtgccatgctgtggtggaaatgtgagcaccactctctgtacggagctgcccggtaccggctggctctgaaggatggacatggcacagcaatctcaaatgcatctgatgtctggaagaaaggaggctcagaggaaagcctttgtgaccagccttatcatgagatctataccagagatgggaactcttatgggagaccttgtgaatttccattcttaattgatgggacctggcatcatgattgcattcttgatgaagatcatagtgggccatggtgtgccaccaccttaaattatgaatatgaccgaaagtggggcatctgcttaaagcctgaaaacggttgtgaagataattgggaaaagaacgagcagtttggaagttgctaccaatttaatactcagacggctctttcttggaaagaagcttatgtttcatgtcagaatcaaggagctgatttactgagcatcaacagtgctgctgaattaacttaccttaaagaaaaagaaggcattgctaagattttctggattggtttaaatcagctatactctgctagaggctgggaatggtcagaccacaaaccattaaactttctcaactgggatccagacaggcccagtgcacctactataggtggctccagctgtgcaagaatggatgctgagtctggtctgtggcagagcttttcctgtgaagctcaactgccctatgtctgcaggaaaccattaaataatacagtggagttaacagatgtctggacatactcagatacccgctgtgatgcaggctggctgccaaataatggattttgctatctgctggtaaatgaaagtaattcctgggataaggcacatgcgaaatgcaaagccttcagtagtgacctaatcagcattcattctctagcagatgtggaggtggttgtcacaaaactccataatgaggatatcaaagaagaagtgtggataggccttaagaacataaacataccaactttatttcagtggtcagatggtactgaagttactctaacatattgggatgagaatgagccaaatgttccctacaataagacgcccaactgtgtttcctacttaggagagctaggtcagtggaaagtccaatcatgtgaggagaaactaaaatatgtatgcaagagaaagggagaaaaactgaatgacgcaagttctgataagatgtgtcctccagatgagggctggaagagacatggagaaacctgttacaagatttatgaggatgaggtcccttttggaacaaactgcaatctgactatcactagcagatttgagcaagaatacctaaatgatttgatgaaaaagtatgataaatctctaagaaaatacttctggactggcctgagagatgtagattcttgtggagagtataactgggcaactgttggtggaagaaggcgggctgtaaccttttccaactggaattttcttgagccagcttccccgggcggctgcgtggctatgtctactggaaagtctgttggaaagtgggaggtgaaggactgcagaagcttcaaagcactttcaatttgcaagaaaatgagtggaccccttgggcctgaagaagcatcccctaagcctgatgacccctgtcctgaaggctggcagagtttccccgcaagtctttcttgttataaggtattccatgcagaaagaattgtaagaaagaggaactgggaagaagctgaacgattctgccaagcccttggagcacacctttctagcttcagccatgtggatgaaataaaggaatttcttcactttttaacggaccagttcaggtaatactttaagaatgagaatttctatgctgaatttgatgtcctctagatattcaaaattgacatgttcttaccctcactctctgttggaaaaaaaatggacatgttttattatctaaaaggtcatttggtgcttagcagtcatggaacattaagcactcttaatgtgcagacactatgaggaatctaaaaatgaatgagatgtattccctaccctttgtttaataaagtccaacagcaatgtatggcagaaaatctagaatataggcaaggaagggccttgggaattcagaggagggagggagtgtttctgggagtataatcaggaaaaatgtcataaagaaggctgattcttggaaggtaggtattatttcaaaaggcaagataggagaaggagaaggagccag

SEQ ID NO: 235513 - DNA, 6944 bp, Homo sapiens
aggccgcgctcagcaggcggggcgggagccgcgtgcgcccgaggacccggccggaaggcttgcgccagctcaggatgaggacaggctgggcgacccctcgccgcccggcggggctcctcatgctgctcttctggttcttcgatctcgcggagccctctggccgcgcagctaatgaccccttcaccatcgtccatggaaatacgggcaagtgcatcaagccagtgtatggctggatagtagcagacgactgtgatgaaactgaggacaagttatggaagtgggtgtcccagcatcggctctttcatttgcactcccaaaagtgccttggcctcgatattaccaaatcggtaaatgagctgagaatgttcagctgtgactccagtgccatgctgtggtggaaatgtgagcaccactctctgtacggagctgcccggtaccggctggctctgaaggatggacatggcacagcaatctcaaatgcatctgatgtctggaagaaaggaggctcagaggaaagcctttgtgaccagccttatcatgagatctataccagagatgggaactcttatgggagaccttgtgaatttccattcttaattgatgggacctggcatcatgattgcattcttgatgaagatcatagtgggccatggtgtgccaccaccttaaattatgaatatgaccgaaagtggggcatctgcttaaagcctgaaaacggttgtgaagataattgggaaaagaacgagcagtttggaagttgctaccaatttaatactcagacggctctttcttggaaagaagcttatgtttcatgtcagaatcaaggagctgatttactgagcatcaacagtgctgctgaattaacttaccttaaagaaaaagaaggcattgctaagattttctggattggtttaaatcagctatactctgctagaggctgggaatggtcagaccacaaaccattaaactttctcaactgggatccagacaggcccagtgcacctactataggtggctccagctgtgcaagaatggatgctgagtctggtctgtggcagagcttttcctgtgaagctcaactgccctatgtctgcaggaaaccattaaataatacagtggagttaacagatgtctggacatactcagatacccgctgtgatgcaggctggctgccaaataatggattttgctatctgctggtaaatgaaagtaattcctgggataaggcacatgcgaaatgcaaagccttcagtagtgacctaatcagcattcattctctagcagatgtggaggtggttgtcacaaaactccataatgaggatatcaaagaagaagtgtggataggccttaagaacataaacataccaactttatttcagtggtcagatggtactgaagttactctaacatattgggatgagaatgagccaaatgttccctacaataagacgcccaactgtgtttcctacttaggagagctaggtcagtggaaagtccaatcatgtgaggagaaactaaaatatgtatgcaagagaaagggagaaaaactgaatgacgcaagttctgataagatgtgtcctccagatgagggctggaagagacatggagaaacctgttacaagatttatgaggatgaggtcccttttggaacaaactgcaatctgactatcactagcagatttgagcaagaatacctaaatgatttgatgaaaaagtatgataaatctctaagaaaatacttctggactggcctgagagatgtagattcttgtggagagtataactgggcaactgttggtggaagaaggcgggctgtaaccttttccaactggaattttcttgagccagcttccccgggcggctgcgtggctatgtctactggaaagtctgttggaaagtgggaggtgaaggactgcagaagcttcaaagcactttcaatttgcaagaaaatgagtggaccccttgggcctgaagaagcatcccctaagcctgatgacccctgtcctgaaggctggcagagtttccccgcaagtctttcttgttataaggtattccatgcagaaagaattgtaagaaagaggaactgggaagaagctgaacgattctgccaagcccttggagcacacctttctagcttcagccatgtggatgaaataaaggaatttcttcactttttaacggaccagttcagtggccagcattggctgtggattggtttgaataaaaggagcccagatttacaaggatcctggcaatggagtgatcgtacaccagtgtctactattatcatgccaaatgagtttcagcaggattatgacatcagagactgtgctgctgtcaaggtatttcataggccatggcgaagaggctggcatttctatgatgatagagaatttatttatttgaggccttttgcttgtgatacaaaacttgaatgggtgtgccaaattccaaaaggccgtactccaaaaacaccagactggtacaatccagaccgtgctggaattcatggacctccacttataattgaaggaagtgaatattggtttgttgctgatcttcacctaaactatgaagaagccgtcctgtactgtgccagcaatcacagctttcttgcgactataacatcttttgtgggactaaaagccatcaaaaacaaaatagcaaatatatctggtgatggacagaagtggtggataagaattagcgagtggccaatagatgatcattttacatactcacgatatccatggcaccgctttcctgtgacatttggagaggaatgcttgtacatgtctgccaagacttggcttatcgacttaggtaaaccaacagactgtagtaccaagttgcccttcatctgtgaaaaatataatgtttcttcgttagagaaatacagcccagattctgcagctaaagtgcaatgttctgagcaatggattccttttcagaataagtgttttctaaagatcaaacccgtgtctctcacattttctcaagcaagcgatacctgtcactcctatggtggcacccttccttcagtgttgagccagattgaacaagactttattacatccttgcttccggatatggaagctactttatggattggtttgcgctggactgcctatgaaaagataaacaaatggacagataacagagagctgacgtacagtaactttcacccattattggttagtgggaggctgagaataccagaaaatttttttgaggaagagtctcgctaccactgtgccctaatactcaacctccaaaaatcaccgtttactgggacgtggaattttacatcctgcagtgaacgccactttgtgtctctctgtcagaaatattcagaagttaaaagcagacagacgttgcagaatgcttcagaaactgtaaagtatctaaataatctgtacaaaataatcccaaagactctgacttggcacagtgctaaaagggagtgtctgaaaagtaacatgcagctggtgagcatcacggacccttaccagcaggcattcctcagtgtgcaggcgctccttcacaactcttccttatggatcggactcttcagtcaagatgatgaactcaactttggttggtcagatgggaaacgtcttcattttagtcgctgggctgaaactaatgggcaactcgaagactgtgtagtattagacactgatggattctggaaaacagttgattgcaatgacaatcaaccaggtgctatttgctactattcaggaaatgagactgaaaaagaggtcaaaccagttgacagtgttaaatgtccatctcctgttctaaatactccgtggataccatttcagaactgttgctacaatttcataataacaaagaataggcatatggcaacaacacaggatgaagttcatactaaatgccagaaactgaatccaaaatcacatattctgagtattcgagatgaaaaggagaataactttgttcttgagcaactgctgtacttcaattatatggcttcatgggtcatgttaggaataacttatagaaataagtctcttatgtggtttgataagaccccactgtcatatacacattggagagcaggaagaccaactataaaaaatgagaagtttttggctggtttaagtactgacggcttctgggatattcaaacctttaaagttattgaagaagcagtttattttcaccagcacagcattcttgcttgtaaaattgaaatggttgactacaaagaagaatataatactacactgccacagtttatgccatatgaagatggtatttacagtgttattcaaaaaaaggtaacatggtatgaagcattaaacatgtgttctcaaagtggaggtcacttggcaagcgttcacaaccaaaatggccagctctttctggaagatattgtaaaacgtgatggatttccactatgggttgggctctcaagtcatgatggaagtgaatcaagttttgaatggtctgatggtagtacatttgactatatcccatggaaaggccaaacatctcctggaaattgtgttctcttggatccaaaaggaacttggaaacatgaaaaatgcaactctgttaaggatggtgctatttgttataaacctacaaaatctaaaaagctgtcccgtcttacatattcatcaagatgtccagcagcaaaagagaatgggtcacggtggatccagtacaagggtcactgttacaagtctgatcaggcattgcacagtttttcagaggccaaaaaattgtgttcaaaacatgatcactctgcaactatcgtttccataaaagatgaagatgagaataaatttgtgagcagactgatgagggaaaataataacattaccatgagagtttggcttggattatctcaacattctgttgaccagtcttggagttggttagatggatcagaagtgacatttgtcaaatgggaaaataaaagtaagagtggtgttggaagatgtagcatgttgatagcttcaaatgaaacttggaaaaaagttgaatgtgaacatggttttggaagagttgtctgcaaagtgcctctgggccctgattacacagcaatagctatcatagttgccacactaagtatcttagttctcatgggcggactgatttggttcctcttccaaaggcaccgtttgcacctggcgggtttctcatcagttcgatatgcacaaggagtgaatgaagatgagattatgcttccttctttccatgactaaattcttctaaaagttttctaatttgcactaatgtggttatggagaaattagtcacttaaaatgtcccagtgtcagtatttactctgctccaaagtagaactcttaaatactttttcagttgtttagatcttaggcatgtgctggtatccacagttaattccctgctaaatgccatgtttatcaccctaattaatagaatggaggggactccaaagctggaactgaagtccaaattgtttgtacagtaatatgtttaatgttcattttctctgtatgaatgtgattggtaactaggatatgtatattttaatagaatttttaacaaaacttcttagaaaattaaaataggcatattactaggtgacatgtctactttttaatttttaagagcatccggccaaatgcaaaattagtacctcaaagtaaaaattgaactgtaaactctatcagcattgtttcaaaatagtcatttttagcactggggaaaaataaacaataagacatgcttactttttaatttttatttttttgagactgagtctctctctgttgcccaggctggagtacaatggcgtgatctcggctcactgcaaatctccgcctcccaggttcaagcgattctcctgcctcagcctcctgagtagctgggattacaggcaactgccaccatgcccggctaatttttgtatttttagtagagatggggtttcaccatgttggccaggctggtctcgaactcgtgaccgcaggtgatcctcccgcctcggcctcccaaagtgctgggattacaggcatgagccaccgcgcctggcctctgcttactttttatatagcaaaatgattcctcttggcaagatgtttcttatattattccaaagttatttcataccattattatgtaaatatgaagagtttttttctgtttataattgtttataaaacaatgacttttaaagatttagtgcttaacattttcccaagtgtgggaacattatttttagattgagtaggtaccttgtagcagtgtgctttgcattttctgatgtattacatgactgtttcttttgtaaagagaatcaactaggtatttaagactgataattttacaatttatatgcttcacatagcatgtcaacttttgactaagaattttgttttacttttttaacatgtgttaaacagagaaagggtccatgaaggaaagtgtatgagttgcatttgtaaaaatgagactttttcagtggaactctaaaccttgtgatgactactaacaaatgtaaaattatgagtgattaagaaaacattgctttgtggttatcactttaagttttgacacctagattatagtcttagtaatagcatccactggaaaaggtgaaaatgttttattcagcatttaacttacatttgtactttagagtatttttgtataaaatccatagatttattttacatttagagtatttacactatgataaagttgtaaataattttctaagacagtttttatatagtctacagttgtcctgatttcttattgaatttgttagactagttctcttgtcttgtgatctgtgtacaattttagtcactaagactttcctccaagaactaagccaacttgatgtgaaaagcacagctgtatataatggtgatgtcataataaagttgttttatcttttaagtaaaagtaaaaaaaat

SEQ ID NO: 235514 - DNA, 5379 bp, Homo sapiens
aggccgcgctcagcaggcggggcgggagccgcgtgcgcccgaggacccggccggaaggcttgcgccagctcaggatgaggacaggctgggcgacccctcgccgcccggcggggctcctcatgctgctcttctggttcttcgatctcgcggagccctctggccgcgcagctaatgaccccttcaccatcgtccatggaaatacgggcaagtgcatcaagccagtgtatggctggatagtagcagacgactgtgatgaaactgaggacaagttatggaagtgggtgtcccagcatcggctctttcatttgcactcccaaaagtgccttggcctcgatattaccaaatcggtaaatgagctgagaatgttcagctgtgactccagtgccatgctgtggtggaaatgtgagcaccactctctgtacggagctgcccggtaccggctggctctgaaggatggacatggcacagcaatctcaaatgcatctgatgtctggaagaaaggaggctcagaggaaagcctttgtgaccagccttatcatgagatctataccagagatgggaactcttatgggagaccttgtgaatttccattcttaattgatgggacctggcatcatgattgcattcttgatgaagatcatagtgggccatggtgtgccaccaccttaaattatgaatatgaccgaaagtggggcatctgcttaaagcctgaaaacggttgtgaagataattgggaaaagaacgagcagtttggaagttgctaccaatttaatactcagacggctctttcttggaaagaagcttatgtttcatgtcagaatcaaggagctgatttactgagcatcaacagtgctgctgaattaacttaccttaaagaaaaagaaggcattgctaagattttctggattggtttaaatcagctatactctgctagaggctgggaatggtcagaccacaaaccattaaactttctcaactgggatccagacaggcccagtgcacctactataggtggctccagctgtgcaagaatggatgctgagtctggtctgtggcagagcttttcctgtgaagctcaactgccctatgtctgcaggaaaccattaaataatacagtggagttaacagatgtctggacatactcagatacccgctgtgatgcaggctggctgccaaataatggattttgctatctgctggtaaatgaaagtaattcctgggataaggcacatgcgaaatgcaaagccttcagtagtgacctaatcagcattcattctctagcagatgtggaggtggttgtcacaaaactccataatgaggatatcaaagaagaagtgtggataggccttaagaacataaacataccaactttatttcagtggtcagatggtactgaagttactctaacatattgggatgagaatgagccaaatgttccctacaataagacgcccaactgtgtttcctacttaggagagctaggtcagtggaaagtccaatcatgtgaggagaaactaaaatatgtatgcaagagaaagggagaaaaactgaatgacgcaagttctgataagatgtgtcctccagatgagggctggaagagacatggagaaacctgttacaagatttatgaggatgaggtcccttttggaacaaactgcaatctgactatcactagcagatttgagcaagaatacctaaatgatttgatgaaaaagtatgataaatctctaagaaaatacttctggactggcctgagagatgtagattcttgtggagagtataactgggcaactgttggtggaagaaggcgggctgtaaccttttccaactggaattttcttgagccagcttccccgggcggctgcgtggctatgtctactggaaagtctgttggaaagtgggaggtgaaggactgcagaagcttcaaagcactttcaatttgcaagaaaatgagtggaccccttgggcctgaagaagcatcccctaagcctgatgacccctgtcctgaaggctggcagagtttccccgcaagtctttcttgttataaggtattccatgcagaaagaattgtaagaaagaggaactgggaagaagctgaacgattctgccaagcccttggagcacacctttctagcttcagccatgtggatgaaataaaggaatttcttcactttttaacggaccagttcagtggccagcattggctgtggattggtttgaataaaaggagcccagatttacaaggatcctggcaatggagtgatcgtacaccagtgtctactattatcatgccaaatgagtttcagcaggattatgacatcagagactgtgctgctgtcaaggtatttcataggccatggcgaagaggctggcatttctatgatgatagagaatttatttatttgaggccttttgcttgtgatacaaaacttgaatgggtgtgccaaattccaaaaggccgtactccaaaaacaccagactggtacaatccagaccgtgctggaattcatggacctccacttataattgaaggaagtgaatattggtttgttgctgatcttcacctaaactatgaagaagccgtcctgtactgtgccagcaatcacagctttcttgcgactataacatcttttgtgggactaaaagccatcaaaaacaaaatagcaaatatatctggtgatggacagaagtggtggataagaattagcgagtggccaatagatgatcattttacatactcacgatatccatggcaccgctttcctgtgacatttggagaggaatgcttgtacatgtctgccaagacttggcttatcgacttaggtaaaccaacagactgtagtaccaagttgcccttcatctgtgaaaaatataatgtttcttcgttagagaaatacagcccagattctgcagctaaagtgcaatgttctgagcaatggattccttttcagaataagtgttttctaaagatcaaacccgtgtctctcacattttctcaagcaagcgatacctgtcactcctatggtggcacccttccttcagtgttgagccagattgaacaagactttattacatccttgcttccggatatggaagctactttatggattggtttgcgctggactgcctatgaaaagataaacaaatggacagataacagagagctgacgtacagtaactttcacccattattggttagtgggaggctgagaataccagaaaatttttttgaggaagagtctcgctaccactgtgccctaatactcaacctccaaaaatcaccgtttactgggacgtggaattttacatcctgcagtgaacgccactttgtgtctctctgtcagaaatattcagaagttaaaagcagacagacgttgcagaatgcttcagaaactgtaaagtatctaaataatctgtacaaaataatcccaaagactctgacttggcacagtgctaaaagggagtgtctgaaaagtaacatgcagctggtgagcatcacggacccttaccagcaggcattcctcagtgtgcaggcgctccttcacaactcttccttatggatcggactcttcagtcaagatgatgaactcaactttggttggtcagatgggaaacgtcttcattttagtcgctgggctgaaactaatgggcaactcgaagactgtgtagtattagacactgatggattctggaaaacagttgattgcaatgacaatcaaccaggtgctatttgctactattcaggaaatgagactgaaaaagaggtcaaaccagttgacagtgttaaatgtccatctcctgttctaaatactccgtggataccatttcagaactgttgctacaatttcataataacaaagaataggcatatggcaacaacacaggatgaagttcatactaaatgccagaaactgaatccaaaatcacatattctgagtattcgagatgaaaaggagaataactttgttcttgagcaactgctgtacttcaattatatggcttcatgggtcatgttaggaataacttatagaaataagtctcttatgtggtttgataagaccccactgtcatatacacattggagagcaggaagaccaactataaaaaatgagaagtttttggctggtttaagtactgacggcttctgggatattcaaacctttaaagttattgaagaagcagtttattttcaccagcacagcattcttgcttgtaaaattgaaatggttgactacaaagaagaatataatactacactgccacagtttatgccatatgaagatggtatttacagtgttattcaaaaaaaggtaacatggtatgaagcattaaacatgtgttctcaaagtggaggtcacttggcaagcgttcacaaccaaaatggccagctctttctggaagatattgtaaaacgtgatggatttccactatgggttgggctctcaagtcatgatggaagtgaatcaagttttgaatggtctgatggtagtacatttgactatatcccatggaaaggccaaacatctcctggaaattgtgttctcttggatccaaaaggaacttggaaacatgaaaaatgcaactctgttaaggatggtgctatttgttataaacctacaaaatctaaaaagctgtcccgtcttacatattcatcaagatgtccagcagcaaaagagaatgggtcacggtggatccagtacaagggtcactgttacaagtctgatcaggcattgcacagtttttcagaggccaaaaaattgtgttcaaaacatgatcactctgcaactatcgtttccataaaagatgaagatgagaataaatttgtgagcagactgatgagggaaaataataacattaccatgagagtttggcttggattatctcaacattctgttggaatgtctgtgtccccacaaggaacccatgcctgccttctcttagagttctagtgcctgtcaccgcatggatttgcagcttataacttcgttattcagaaagttatcttcttgttattcccttctctctaagaatatttttaccactggttaaaattatgtcttaatagtaatctttaaaaactgtcttagtgttaggttggtgtgaaagtaattgcagcttttgccattacttttgcgccaacctataaaattgcagataattgattcaaagaaaatttgtggaaggattttttaatacgaaatagtagatacagggtttaggtgaacttggaattggtagaaataagagtacaaatatgacagaagataaggtttttcacattttatgcaaagttgaattttaaattattaaaatgtgaattttaaaatgttaagtacttgtcaaaaaataaaaggattccaagttgtccatctaaatgaa

SEQ ID NO: 235515 - DNA, 2367 bp, Homo sapiens
aggccgcgctcagcaggcggggcgggagccgcgtgcgcccgaggacccggccggaaggcttgcgccagctcaggatgaggacaggctgggcgacccctcgccgcccggcggggctcctcatgctgctcttctggttcttcgatctcgcggagccctctggccgcgcagctaatgaccccttcaccatcgtccatggaaatacgggcaagtgcatcaagccagtgtatggctggatagtagcagacgactgtgatgaaactgaggacaagttatggaagtgggtgtcccagcatcggctctttcatttgcactcccaaaagtgccttggcctcgatattaccaaatcggtaaatgagctgagaatgttcagctgtgactccagtgccatgctgtggtggaaatgtgagcaccactctctgtacggagctgcccggtaccggctggctctgaaggatggacatggcacagcaatctcaaatgcatctgatgtctggaagaaaggaggctcagaggaaagcctttgtgaccagccttatcatgagatctataccagagatgggaactcttatgggagaccttgtgaatttccattcttaattgatgggacctggcatcatgattgcattcttgatgaagatcatagtgggccatggtgtgccaccaccttaaattatgaatatgaccgaaagtggggcatctgcttaaagcctgaaaacggttgtgaagataattgggaaaagaacgagcagtttggaagttgctaccaatttaatactcagacggctctttcttggaaagaagcttatgtttcatgtcagaatcaaggagctgatttactgagcatcaacagtgctgctgaattaacttaccttaaagaaaaagaaggcattgctaagattttctggattggtttaaatcagctatactctgctagaggctgggaatggtcagaccacaaaccattaaactttctcaactgggatccagacaggcccagtgcacctactataggtggctccagctgtgcaagaatggatgctgagtctggtctgtggcagagcttttcctgtgaagctcaactgccctatgtctgcaggaaaccattaaataatacagtggagttaacagatgtctggacatactcagatacccgctgtgatgcaggctggctgccaaataatggattttgctatctgctggtaaatgaaagtaattcctgggataaggcacatgcgaaatgcaaagccttcagtagtgacctaatcagcattcattctctagcagatgtggaggtggttgtcacaaaactccataatgaggatatcaaagaagaagtgtggataggccttaagaacataaacataccaactttatttcagtggtcagatggtactgaagttactctaacatattgggatgagaatgagccaaatgttccctacaataagacgcccaactgtgtttcctacttaggagagctaggtcagtggaaagtccaatcatgtgaggagaaactaaaatatgtatgcaagagaaagggagaaaaactgaatgacgcaagttctgataagatgtgtcctccagatgagggctggaagagacatggagaaacctgttacaagatttatgaggatgaggtcccttttggaacaaactgcaatctgactatcactagcagatttgagcaagaatacctaaatgatttgatgaaaaagtatgataaatctctaagaaaatacttctggactggcctgagagatgtagattcttgtggagagtataactgggcaactgttggtggaagaaggcgggctgtaaccttttccaactggaattttcttgagccagcttccccgggcggctgcgtggctatgtctactggaaagtctgttggaaagtgggaggtgaaggactgcagaagcttcaaagcactttcaatttgcaagaaaatgagtggaccccttgggcctgaagaagcatcccctaagcctgatgacccctgtcctgaaggctggcagagtttccccgcaagtctttcttgttataaggtattccatgcagaaagaattgtaagaaagaggaactgggaagaagctgaacgattctgccaagcccttggagcacacctttctagcttcagccatgtggatgaaataaaggaatttcttcactttttaacggaccagttcagtggccagcattggctgtggattggtttgaataaaaggagcccagatttacaaggatcctggcaatggagtgatcgtacaccagtgtctactattatcatgccaaatgagtttcactgtatataatggtgatgtcataataaagttgttttatcttttaagtaaaagtaaaaaaaat

SEQ ID NO: 235516 - DNA, 390 bp, Homo sapiens
gtcattgcttttccctctgtgagctgactcctttttttatatcctaggcagttgacactgatgatatccagttatgttttctctcatttggagcatttaaataaaatttcccaagaaaagcaaagagcagctgttcacactataacatcattttcaatcttttccccattcagcagttcctttcccagtattaccacaacaatctatatcccatgaagaatagctagaataactatagtgaataggcagcatactttagtggttgagagagtaaagtctagtctagagttaacatctgggttcacatcttggcaccactgcttactggctgggtgagccattaaatattgatttgtaaaattgggataatgacaaggcttaacttacatg

SEQ ID NO: 235517 - DNA, 288 bp, Homo sapiens
atgcacccattagactggctaaaattcaaaatactgacataatcaaatgctagtgaaaatacgaagcaacaggaatccgcattcactgatggtaagaatgcataatggcacagccactttggaagataacctggcaggagggaggaaataaatgagaactcactgtagttttattcgatttttttgtaaaataaaaactgctctaaaaaataaaatgtattttttttaaaaaagaggcagtataaaactattcctgaaacaaaaatcacataaagatatacacaaaat

SEQ ID NO: 235518 - DNA, 845 bp, Homo sapiens
acaacagtcaacaccatagacatcacaattggttcagcttacagaattctgactgaaaaatcaaaagttgagcaaactttccacttgatgggtgccaaaaccagatcagctgcaaagaacagagctttcaatggaaattttaaacaagtaggctctattggttgctacaaaattaattgcagtttttgccattgaaagacatgtcaaaaaccgcaattacttttgccccaaccaatagatcatgaagcatctattgggaaagtgtaacaggaggtgaaatgtggctttccaactatggagacaaagtacaatcgaagtaatggctccgaagatgtggaagtggtccagtcaaagcaaaagtggtctggtcaagagcaaaggtcatggaaatagttttttgagctgcttgagaaattttgcttgttgactttctggagggccaaagaaaaataacatctgcttattatgagagtgttttgagaaagccaaagctttagcagaaaaatgcccaggaaaacttcaccagagagtccttttctatcacagcaaaggttctgctcacgcctctcatcaaacgggaaattttgagagagtttcaatgggaaaccagtaggcattcaccctacagttggtatttagctccttccaacttcttttggtttcctaatgataaaaaatctgtaaagggtaccattttttttccagttaataatgtaaaaaagattgcattgatgtaaattcccaggaactccaattctttggggatggataaaatggctagtatctaagtgctgtgagcaagagacaaaaataaataaataaatggctaatatcattgcctacaa

SEQ ID NO: 235519 - DNA, 347 bp, Homo sapiens
gacaaaagaaatttataggtaaattggacatcaaaactttttaaaaagttgctacaaatgataccatgaagaaagtgaaaggcagcccattggctgggagaaaatctttgcaaatcaataatttatctgatgaaggactggtagccagaatataaattcctacaattcaataattaaaagagaaatcacatgttttaaaaatgggtaaaggacctgaatagacatgtctccagaaaagatataaagaagaccaataagcacataaaaaatgttcaacatcattatccattagggaaatacaaatcaaaatcataatgaaataccacttcacacacactagaactgct

SEQ ID NO: 235520 - DNA, 411 bp, Homo sapiens
aagaatagaactcacctgctggtctctgactcctcttgggccacaatcagcacttggggaccgtggggtgctataaattaggcagcctcccttgtaccattgtctcagctattgctggactctgctgcctgtctgccccctgttcctctaaaccacatgtctgctgtccttgcaacatcctctgggcctccagtggcttgactggactcctagtttgtttcctcttgggtctatctgttcccactgaggcctccaaattcaggaatcctccctccacactgcactttgggcgaacttgagggtgcgctcataatcagaggcactgcctggcggagacaagaggtgaacagagagcgttagcccaggacactgatctgcatggcacagagataaacgttacgataatcatta

SEQ ID NO: 235521 - DNA, 431 bp, Homo sapiens
aggctcaaataatctttgcaagtaaaagcaagttctcttttataaaaaaaaaaaaaagacaactttcaccagtgaggggagaaagtagaataaatagagcccccaaaggaatctatagagaggcaataactctttggagtcagtcgggaccttagtacctgagactactagaagtggagaaatacttctgcccaacacagatgtttttctttacctgaaacagaaatgtggattttttgaaaacgcactgaacaaattccatattctgagtcagaagagagtggatggtgaaatgaccacaatttgtctaaaaagtactcaagcccgttctcaaccaaacaatccaaaacatgtaacagagctcattgaggaatggtcacatgctcttcatttagagcttagaaaagagacatgtattttgggggggaaaa

SEQ ID NO: 235522 - DNA, 407 bp, Homo sapiens
ggagtaccaaataaatttaagacctgagatcaaatagctgctggatttgagtcaatattttggtgggtgacaattaataaaaacgtagattagataaattccacctattacaaccaacagcggtttattaactatactagagatgctgttaaaggaatagctgagcaattagggcttactagccagatggcttgggaaaatagaatggccttagacatgattttagcagaaaaaggggaagtttgcatcatgattaaaactcagtgttgtaccttcatcccaaacaataccgcccctgatgaaagtataacaaaggcattgcaaggtctaactgctctgtccaatgagttagcaaaaaactcaggagtaaatgaccccttcacagggtggctagaaaaatggtttgg

SEQ ID NO: 235523 - DNA, 564 bp, Homo sapiens
aagaggagaataattccattctcccaacagaaagagggtgaatagttccaacaggaccgttcacctggcccagccctaccatgacagttgttggaactggtgttggtgctggtggaaatccagcccttcttctttgcacagtattccaaaatataggggagagtagaaactaggtgcaatggaatattacggtcagaggcaattagagatgagggtgttgggaattttggagttaaatctggtgtacttggaaggaggtctgcacttggggcaggaaagatatcataggttctatggggaggagtctggtatcatgtctgaaccagattcaccctgagtcaccactgcgctcctccagggcctggccagtcttgaagtctgagctgtgccaagtagtagtttaaaaggtatccaggatttaacttatagatataactgagtgatgtgtctctactctcaggggagattatgagggtaatcacactttaaatcatcttaaaatacatagtttttttgtaatatgtccttctcacaaaatataagatccacaagaccaaaactggg

SEQ ID NO: 235524 - DNA, 296 bp, Homo sapiens
aaggaaagccctttcttggagagttgcccacggcagacacaatttaaattaacttaaactatttccttcccctcccccacctcgttatcctttttcagagagtagggaagagaaaacgttttcgggagaaagctacgggaggagctcctctctctctcttccgtccagcggatgccggggctgcagaggccaaagtttgcagcgggcgcggcggggcgggagcggggagcggcgggtggggcggctgctaagggaacgcgcgggcgctcccggagcccggggaaggatggcggccg

SEQ ID NO: 235525 - DNA, 319 bp, Homo sapiens
gcttttttgtcatcataatgttgttttgttttgttttgtttgtttttgagacagggtcttgccgtgttgcccaggctggtctcaaactcctgggctcaagcaatcctcctattaatcctcctattaatctcccgagtagctgggattgtagagacgcaccacagtgcccagtgatacagttgttatactcttgaaactttagtttccatcctgtatccttcctgatacccccttcagtaccatatgcagtatcttaatatgatggtatgttaagaaagatagaagattttcccaactttgttgcatagtctgtgacagt

SEQ ID NO: 235526 - DNA, 234 bp, Homo sapiens
catttgccctaaaggcatttgccaatctgtgaataggtaaaaacttctgttttgatgacttttgatggcaaggggagcagaagttgaagtctttggtttcctagagtggaaacttcaatagaacccataacacatgaattttggattcccagaaaacataccttcagagggaaggagacataactaccaccagaaagtatttttctaaaaagttgctcagaacttggaggaata

SEQ ID NO: 235527 - DNA, 136 bp, Homo sapiens
atgagccactgtgcccagcccatttaacaattttaaactgtgttgttcagtagctttaagtaccttcacattgacttacaatcattaccaccatccgtctccagaaattttttcattttgcaaaaacgaaactctg

SEQ ID NO: 235528 - DNA, 472 bp, Homo sapiens
tggaatcgccaaccagctgaggatgcgcagccacagaccaccttccagaaatctccaaaaggctttccaaaacaggaaaacaaggaaggctgccatcagcaggaattccagggctttcagaatgaggctgtcaggagtgaagggagctgtgctccacatgcagggcagtggccagggctgccaggccttgtttatctgggagcgccaggctgcctgcctgcacctggtctgggcacctgaaggcagagctgctcctgcttagggtctgtggcaactgtcctcctcagtgggtgctgctgggagctcctctgattcctggtgggcggcttctggcctcgcctcttcacccacggtgtagggtgtgggatggagatgcagggcctctgctctccttctcccctcccccaagcagcctgggttgtacctccactaataaacaccaacacccgcgcccagggtgggttcggcaaaa

SEQ ID NO: 235529 - DNA, 642 bp, Homo sapiens
ctctctccctttctaatcttcgccccaagtcctgcctccaggtttatgctgcagagtgtccgtggaagggtggctcttacatggtagctctgaaaagcttgacattattttactaagtgaatgcaagaattctcatgtgggcatctccactcatggataggattgccagatttagcaaataaaagtacaatgaaatatccaattacacttgaatttcagataatcaacaaatacttctttttcgtacagttatgccctgtttaacctctactgttccactagggatatacttgtattgcgcacttacctgttgtttatataaaattcaaatttaaccaggcatcccactcatggggccccagaccaaacggaagccccctccctacccctagccaaatgctggttgagttttttgggatgataatgaggaaaataaggccagaagacccacattgcccctcatctatagcacctgaaacttggaaccacccaacagatccagttctgccctgccctgaagagagttgccttcattttcagcagagtctagagagtaatttaaagtttgaattggcccctggaggaagaacattgtgttaaacttcctatgtgacttgaaataaatttcgttttctctgaaag

SEQ ID NO: 235530 - DNA, 323 bp, Homo sapiens
tcagcatggatagtgttttccagattctgaaagtggatttgtgttgttcattctcagcaatgcctgttgtgaacaaagctgaaccaactttcccctaaatatatcagagagaatcaaattaagctcaggccttgtttaagctggaggaaaatttctccattttaatttgtgatcctttgaaattgagtgagtttggctgggtgtggtgactcatgcctgtaatcccagccctttgggaggctgaggcgggtggagtgcttgagcgcaggagctctagaccagcctgggcgtctagaccagatggtgaaaccctgtctctacaa

SEQ ID NO: 235531 - DNA, 400 bp, Homo sapiens
aaaacctcaacatagacttaggtacaaggtgcaatacaatacatggaatataaacttgtgcaactcaactcaaggaatactgccagctacaaatacaaatgaattccaaaaatgtttagataactgcataactttatcatccactagaagagattgtccccatgagggtcaccttgatttcggggccagagagcacactggccaagacagacaatttcttagtaaggcattttgtaaattaggttttaaatggatgacatataagatagaagggcttccttaggtagtaatctaagtaaaactatcatttttcctttacagaataaattcttttgtgtcttttttaaaaaagtatagtttgctttaattgccaggttgatgaacagtttttaaacattga

SEQ ID NO: 235532 - DNA, 393 bp, Homo sapiens
cccatggggccatctcggcttgtccgtggccctcggccccagggcatgcgttccccctaccgcaggccaggtatgggctggcccaggccccgatttcccaggatgttcaagtgtagccgcagaagatatcaacagggtctccgaggtcgaactgccagcagtgcagccatcaatcctgccaccagggccatgggtatcaacaacacccacactgacaccaccatagtgtggatcttcccacctcaagttctcagacatctcaggcaacctgggatttttctgatcctctagaagtgcccagaagctagcccagaagcttggtttgccctggacctgcatctcctaggggccgtgtgggtggtgaacaacaaatacagtcattctgctcaaaat

SEQ ID NO: 235533 - DNA, 965 bp, Homo sapiens
aagctcactgaattaagatacaacttcaagaaatcataaaagcaatgcatgaagaacatgagaaggacaaccaacatacagaaattatgacgaactacacagaaactctcgggataaaaatacagtaactaaatggaaaaactcaatacatgggttcaaaatcagaattcattatgtaaattaaaaactagtgaagaggggtcaggcaaggtggctcacacctgtaatcccaggactctgggaggccgaggtgggtggatcacttgaggtcgagttcagagaacagtctggccaatatggtgaaaccttgtctctactaaaaatacaaagattagctgggtgtggtggctggctcctgtagtcccaggtactctggaggctgagtcaagagaagcacttgaacatggaaggcagaggttgcagtgagccggattgccccactgtactccagcctgggtgacagagcaagactgtctcaaaaaaaaaaaaaaaaccaaaaaacaaagaaagaaaattccaggactatcttttatacacctgagcaaaaggaatgtctctctccatgtctaaggttctgatggcatgaatcctaaacatgtaattattttcccagaaatatgacagtaatacgttcaaaataaacacaagtgtgaacacatagctataggtgtttaaaacactgaaagaggccaggcgcggtggctcacgcctgtaatcctagcactttgggaggccgaggcaggtggatcacgagctcaggagattgagaccatcctggtccacatggaaaacccggtttctactaaaaatacaaaaattagcctggcatggtggtgtgtgcctgtaatcccagctactcgggaggctgagacaggaaaatcattggaacccgggaggcagaggttgcagtgagccaagatcacaccactgcactccagcctgggtgacagagtgagactccttct

SEQ ID NO: 235534 - DNA, 455 bp, Homo sapiens
aagctcactgaattaagatacaacttcaagaaatcataaaagcaatgcatgaagaacatgagaaggacaaccaacatacagaaattatgacgaactacacagaaactctcgggataaaaatacagtaactaaatggaaaaactcaatacatgggttcaaaatcagaattcattatgtaaattaaaaactagtgaagaggggtcaggcaaggtggctcacacctgtaatcccaggactctgggaggccgaggtgggtggatcacttgaggtcgaatggaaaacccggtttctactaaaaatacaaaaattagcctggcatggtggtgtgtgcctgtaatcccagctactcgggaggctgagacaggaaaatcattggaacccgggaggcagaggttgcagtgagccaagatcacaccactgcactccagcctgggtgacagagtgagactccttct

SEQ ID NO: 235535 - DNA, 2003 bp, Homo sapiens
  misc_feature (714)..(714): n is a, c, g, or t
tcaagatgagatttgtatggtgacaaagagccagaccatatcaagtacctaactcattactatcctataactatgagtattactggtattcttattggccacttgacaccaacacaagtggggggccttatatcacttaagaagaggaaatatatagaaaaaagtggcctggagagaaacttgctccctgaatttccaatatatgtccaaactgatgactggggtgagaaagatctattctggcttttgcatactgactcagataaaaaacaaagctcatattattacaaagtcaaaaacaaaagatactggtagggctgcagagaaaagggaatgcttatacactgttggtgggaatataaattagttcagccactatgaaaagcagtttggagatttctcaaaggacttaaaacggaatcgctgttcaacccagtaatctaattagtgggtatatatgcaaaagaaaacaaatcgttctaccaaatagacacatgcactcacatgtttactgcaacactattcacaacagcaaagagatggaatctacctaggtgcccatccatggtggattggataagtaaaatgtggtacatatatactatggaatattacacagccacaaaaaggaatgaagtcatgtcctttgtagcaacatgcatggtgctggaggtcactatcctaagtgaattaacacaagaacagaaaaccaantatcacatgttctcacttgtaagtgggaggtaaacattgggtacacatggacctaaagatagtaatggtagacaccagggacaactagagggggcagtcagggaggggagcaaggaatgaaaatctaactattgggtattgtgctcagtatgtggatgacaggatcagtcacatccctaacctcatcatcattacaatatactcgggtaataaacctacacatgtaccccctgaatctaaaataaaagttaaagttattttttaaaaaaactaaaaatgtctggtacacctgagtaatcctcttggtgagagcttcagccagaaaccaggctccttcaatcctaagactgacccatggatatggatggggcactggggcattcctgttctgggagcaaaggaggtgttttttggtgaagatatttgtgaaactgaacccttctggtggagctgaagtctcagctcactgagaagtaagccatgcaagccagagggctcagaggtgggtagcccagacaagacaaggagctcttttccttgattgacacttatttcactccattggtttgtctccctcttacatagtgtcactgtcactagagttggggatggacaaaggattcctggttggtcttaaagccagcacagtgggaggtgggctgttggatggctaagacagattagagtaagagtgtctggtggatggtgatgatgagagatctcacctccaaagccaggtcctacctgcacagcatctttggtttgacatagctttgtcaagcagagcccgagaaataagaggctctcagtttccactagaccaggccaccctagtcattggcaagtcaaagctctggtcctgatgttcattcttcaactgaaggggcaagggaaatctgtttcctcctccagaagcttctgccatgggactgcgtaatacagaggtatctcctagtgtgggaaatggacagatggtggtgatgctttagtgcaccagctcactttccagttatgttctctttctctgggagagagagacagggagaaagagagagggagttgagggagaaaaaagaggtggatgacatgcagcatgagctgtgcactagttgtggagaatacgactgcctgttggtccacggcaaattctaaattaaaaaacaaactgggccgggtatggggacccacgcctgtaattccagcactttggggggctgaagtgggaggatcacttgaggccaggagtttgtgaccagtcttggcaacaaaatgagaccccatctctattt

SEQ ID NO: 235536 - DNA, 575 bp, Homo sapiens
acacactaagtagaaatgaaaaaacatatttatctatctatacttaaactatactatactaagccaaccgaattattctcagtgcttttcatgagttatttctaaattggcaggactattcttttagttgtaaaattctttcaaacaaaaatttaaatattctaatgtgggtagaacatgagcattaaaaataggttatgaagtttttttatagtgctatttaaatttgtacaataccttaaatacctgtaataaaaaatatcagggaaaattctggatgctactgtcaggttactggaaagggagtgatactggcttgggattcctggttacctctgtgatcactcattttttagtttcacaaagtcttgataccaccagagggagctgttgatatcgaagtcttcgaatgaagaagttggtggtgagagttaagactagggagcagcttatgctgatctgtgaagcataatcattatcttgtctgtaatttgtaatcttatagactcttccccacagcaaacattttccttccatgtttcatttcagatattcttcccacattgacccttttc

SEQ ID NO: 235537 - DNA, 783 bp, Homo sapiens
gttgctataatgttccccagaaaccatttattaattggtatgaacatgagactagaaaagttttcctgtcaatgttaatgctacatgttaccacttagggtaggaacttcggtatcatcttggactcttctgagtccattatctttcacatacagttttcatgaggcaagttttactctgcaatggtccttaaatttcttttttttaaattgccactgaggcaaccctagttcaagaactcattcttccttgcttgtactattaaactcttttctgagttctctcttctcttctgagccacccttcattgatcagaaatactatcttcctaaaactcttcccttcctaaaatgcttctagcccttcactcttcccagcctatcagtggtatccacatgtcagttcttagatattcagagactctcccctttacatgaccccctcttaggcttgttttactgccttctgtctttcttcccgcctctccaggttgacagccttctctgaacgacctctccattactctcatgctttgctcatgctcttccctcacaatgcttttaaagtccttttttttttttgatcgattgaaatcttttgccaactaagtggacatcagtctccatttttggctacatgtccgagtgagttgctcttccacagcagttacataagttttgtattattttttttattcgtgcatatttgctcatgtcacaggaatatggaagagattgtgtattcattttttacatcttcctcagcattaacataccacttttt

SEQ ID NO: 235538 - DNA, 868 bp, Homo sapiens
tgtgcagggcagggctgcctcccacggcaggggcaggcagaggcctctgcgccaggtacagcctaggtaccgcctacccccatggctgaccctgggccccaaatccagcgggaggcctgggagcatcttctccgcctgagtcaccgggctgggcccaggaccccagccaagggctttgcctctgggaagaaaagagctttggagtccagcaaaacctgggaagcagggggaagcttccctagcaggtgctatttgagcagaggcctggaggagggagactagcaattatttggtcttcgaggcaagttagcaccacacagagactcttctggatataaaggaaagactgtaaagaatttgcagagagaataactctcgctatgtgacccgaggtgattttatgctttgcctgtgcagcctataaaataatcttgtgtggtccccatgatgcacatcaaccaggagatgctggagagtctgagacagcgtgctggcagcactctgccgggggaaggacacggaggtgtccaggctcggctccaaaagcagacaagcctgcactgcgctggagcaggtgagaagtagctgggttccaccgtgcccttttcgtctgtgtcccttgccacccaacacgagctcagcacacagttgatcttcactaactagtcacccctccaagcttttgcaatggttgttccctctgctaaagatacccccttctcccaccttgaccacccgactaactcttaagctcagctcccaggtgcctcctcctccttcttcttggtacatgagtgccccgcttggcattcgcttaggggtgtctatacacactatttcctctgcctggagtatcttcttccatggg

SEQ ID NO: 235539 - DNA, 382 bp, Homo sapiens
tatccagatttctccctcttaccaaacagttttacattcctctttctggtggccaccaaattttgcaattctcttccctcccacctgtaaataaaagcaattccttcctaaaaagcgactaagagaatggccattctgaaagtttcttcttcattaaaacccagtgcttaagttgtagagttatctggctttcagtattacaactgaggtcaaatgtttacaaaatctgaagtgctggggcatttaattttgtatttaactgtctacacagtaagatttaatggcaggaatggaatcatccaacaggtgcacttggactaaagtctccaatggaatcatccaacaggtgcacttgaactaaaggacctctatatttaaaaaa

SEQ ID NO: 235540 - DNA, 473 bp, Homo sapiens
atttacaaaaagaaaaataatattgacacaggaaatatgcaaaaatgttctatgttatttaaaaaacaagaaatataaattaaaactaaatttaaatacacttcttaccatttgattggcaaaactttaaaaatgttgtaataacacattttgttagctagtttcaaggcaagagtatatttatacattacttctgcaaatggaaatggtaccaaaaaattaaggcaacttgacaatatgcaacaaaatttctattaatatcttcacttttcaatcctgctttctgggatgtactcttctgatgtatcttcaacagggataatatacaaatgtacaagtgtatttataacagcatcatttgtaataataaaatattggaagtcactgaaatgtccataaattgcagcactgttatataaaccactcaatggaatttatgcagttttaaaaataaattactccatatgacatga

SEQ ID NO: 235541 - DNA, 593 bp, Homo sapiens
agcaggttccaggggaattgaaagtaagccacagatgagctagagaaggctgctgataagaatatgttgcacaaattatctggcttatccaggtgctctgccgtgcgtctaacccgttgagcctgtgtgttatctccacgtgacttaatctgtgagatcttgccacaggttaacttgctcgtgtgtacaagaggcggacattcctttcagtgcagtcggaactactgttgatcaagcagagagtggcagttactgaagtgtccctgcaaagtggaaacacacctgttccttatacagttggctctcctaacctcagatttcgcatctgcagattcaaccagccacagatggaaaatatgtgaatagaaaataaaataaaaataatgcagcaattaaaataatacaaataaaaacaatacagtataacaactatttacacagcatttatattatattagttattataagtaatctgtaaataatttaaagtgtatgagagaatgtacataggttatatgccattttatataacggacttgagtatccgcagattttggtatctgcaggaattaatcctccacagataccaaggg

SEQ ID NO: 235542 - DNA, 450 bp, Homo sapiens
aaaatcctgcacttaggccctgtatagacagtgtgttccaaacctaaggaggtgtctgcaacaggggaggctgctgagtgactctgcagagaacagatgacatctgttaaatgtcaaacaccatcacgtcgtacttcaagttgtactttacttggaacatggaagccatctgtctggagctcccacatccatttcaaatcttcagggttccccattccaggggaggagctgaacctcctgacaccgtccacttccctcctgcctccttcaaacatcatcccttttttctcccgaatccctaaatgtttctgcacccaagggctctaccccaataaacacagctaagactctttgattcttaaaatgtcttcctttaacgtcccaccctccagaatctattgtcgtatgttttgttcaccaaaggtaataaaaataaatgtggattttggt

SEQ ID NO: 235543 - DNA, 366 bp, Homo sapiens
cgcccggcagcaccaccattttcttttgggagaccctcccttattcttagtctgcgtggttaggaagaggctgacagccactccctccctaccattcctctctaggctcattctgttttcctgggcgcggtgattggttcaagcataaaccttgacaacaggactattgctggaacttttgggaaaagagaagcctggactcttcctggaaataaaagcatgctataaaataaaataattagcctgggcgctggtgcacgcctttaatctcagcactttgggaggccgaggtgggcagatcacctgaggtcaggagttcaagaacagcctagccagcatggtgaaaccccgtctctactaaaaata

SEQ ID NO: 235544 - DNA, 2811 bp, Homo sapiens
  misc_feature (1107)..(1107): n is a, c, g, or t
  misc_feature (1964)..(1964): n is a, c, g, or t
  misc_feature (2068)..(2068): n is a, c, g, or t
cgccttgcagtttgatctcagactgctgtgctagcaatcagcgagactccgtgggcgtaggaccctccgagccagtgagatgaacccggtacctcagatggaaatgcagaaatcacccgtcttctgcgtcgctcacgctgggagctgtagaccggagctgttcctgttcggccatcttggctcctccctcaggtatccttcagaaagcctgggcaataaaccgaaggcttctaaaaagagcaaagtgtctggtgagtcaagcagaatctcaaagctgaactaaatttggtgaatctggactttgccagccctgaagaagaataagcatgaaggaactcttcaagtagctagtgcatttgtgttgctgtcagcaaaatagccagttggagagctatgctgttctccactaaaagaattgtagaaccattgggctttaatagatttgaaagactgtataattgaatttataatcatctggcttagaaaatatgcaaaatcacattcatagtgagcagatgagttatggtatccgtggacaattctgataggaaatattggttatatctggtgaaacccatgataaaccaaaggcacgttaagggcagatggttggagttggggtatgagtgttggtcatacggtggaggggaaaagagtaggatgttaggatcatgcagaaattatgtggttgccctacagaaatgataagccataaagttctactctggccagtgttttaagtcgatgctagaaaagaaaaacaatagtggcacaggggttggttatttgttttccacaggccaagaatatgtcaaaataaagcccaataggatgtatattcagtggtcaagtagactgagagatgttaacacacttattcatggcatcatttcagattttgcctatagtaggcattcaaaagatgtttgttaaattttataaataaacaaaagctatatcagcatggcctttttctaatccaaaacctgggcacacagccaggataaacttaagctgtccaaaagccatgtgcgctctcgccagaatcatcaattctctccagtcatttcactatgaagaaggcctggatgaacttaatgggaaagncccattagctgccactcttggattgcatatctacgtatccttcagatttcatgtccctgatatatttgtgttcttgctagtcctgattttaaattattgcttttccttttaatattgttctgatttatttttatatgttactcaatattctttaatgacagcaaataatgataaaaataatagctgccatggcctattgaggcttcctatgacagaaactcttctaagataaaatttcatcctcatgacaactcataacctttgagaaagtttccatagatttctattttactactaaaaatactgtggtttagtgagattatgcaattaactcaaattcacaaagataggaaatgcttcagctgggatgcaaacctctatctaagagaaaaacccgatttcctcattgctatatataccattaatttggagcaaagcagaatcacttaaaaatccttttaagtgatgattaaataaatcatcaattgttaaacaatgattagattcctaattattttcagtcatttgtttaccactaaatataacaatagtagtaataataataatgataacccatctgcctgtgttcttaagtgtcttatatattagttgtggaaataagacatatatgatgaactgttaaaaactatagaagagaatttatacctaaatatgttcatgtattaagtagtacaagaaagtcatctggaaattttaaaatgaaaggaaatctgcaaatattaagtcaactgggcatttcttttcaggaaatgaaaattaagctgaatctgaagggtgctaagaacaaaattgatggaggtgaagacagagacttctacataaaggaaatagttagnaattaagcacagagacaaaaataaaagacagtgttttgtaggggcagagtgattgggcatagccaagaaacaggatatattaagtagattgataataaggtttnaatgcttcaaaagttctaagcttagatgcttggaaacaaaatttgaccaagaatttgggtaataaatttgaagaataaaatgagaagcttaatttgcatgtgttcagtttaaaatgatatccggttggaaataccaaattgtagagctggagacattgtactgggaattgagtaatggtcaggatttattacactgggacagaagagaccaacacatagaatacactgaaggtcaggttctgtccagaaaccactcaacaccagagcattaatgaatatgtgaataagtaagtgcatcttcttagctcaggcatggaaactgatttaaaatgtaagaagtctgtatggatgggagaaagaagtggaaatcaatttaagggaaaaaaaagcaaaatcagaatatacaatctctcttctgaggccctagtcatatgttgctaactatagaggagtcattagataaaagtgtgtacatttggaagcaaacaaagactgcatcccatgagatttcataagctatgattattataaagagcaatagactctcaaaaatactcttaaaatactatacataaaaatagctagtatttaaaggctcataaaattcttgaacaggtattagccatttaagaagtgatggtagaaagagaaatgtataggtcagagaacagtccttggaaaatgaaaggagttaggaagtaaaagaaagaaaatcaagggaaataaatgaaagaatgacagag

SEQ ID NO: 235545 - DNA, 2198 bp, Homo sapiens
  misc_feature (1253)..(1253): n is a, c, g, or t
  misc_feature (1315)..(1315): n is a, c, g, or t
  misc_feature (1471)..(1471): n is a, c, g, or t
tttttgccctgtcttgtacagtcatattaagatttgcaatatgaatatccatatctggaataggactataataccataaatagcttaaaacatagtcttcatgttttcagtaaatgttatgacagtgtattatatattaattataaattaatatgtaatacaaatcttcacaaatctgaaaatgccaaatttagtgaatattcagctttttaaattttgaaatggagtctcactctgtcacctaggctggagtgcaatggcgtgatcttggctcactgcaacctctacctcctgggttcaagtgattctcctgcctcagcctcccaagtagctgggaatacaggcacctgccaccatgcctgtgctattttttttttttttcatagagatggggtttcactgtgttggccaggctggtcttgaactcctgacctcaggtgatctgcccacctcagcctcccaaagtgctgggattacaggtgtgagccactgcacctggccaatattcagcttttaataaaatttttcttttaaagatgattttactttctatcagattcctattgcattgaggacttattttgctttatttttattgttttttcaaatgttttaccaagtacaacttgtctctaagattcaaaacagtgtacattttgaatagatgtatcatttattttatgtatatgcataataatggttagaatgctcacagttatactgttcatcagtaaccctgtgaatacagggttcacatccaagatgttctcactggtccgtggcaaagtaagaaaatgagaacaactttccacatttttcataaaaatagaaaggatacaatttaaataattgtcctccattttgatattatgggttttaaaaactaatgatggtttttaaatgccctttgtttcatgaaataataatgatgctttattaaatgatagaaatatattggaggttattattacttggaaaaactaagagctagaactcctatatcaatttcacaaatcgatcacacatttatttttaatttcatattttttctctgaaaattatgaatctggaaaccactgctgtgagcggaattttgttattcctagatcagagatgacacataatgttgaatgatttgtctgtggtcagttacgtactaagtggtggagccaggaggaatatcagctacccgtgtgccagcacctcatggtccccctctcatcaccattattattagaatacatggctagatngcaatattaggtaggcaaattgagagtccatgtttgttcctcatagcaatgtgatttgttcnttatgtgaggtattccttcaaatttaaaaaggattgtgttctaatctaaaaggtcattcataagccactcattcgaaacatcttcccagatacttagttttatgaaattctcaagactgacaccccaaagcatccttaatctataataaacacagnagtacagggaagctcacctccactttgtttacatttctatgggcaaatgtgccgactttctagtgagatgtgaggaatttaagtgcccttactgcagccttgggaatagaaacaggatcatcaacagcctccactcctgccatcctcacccatgcatgagcaaggcctgtttagagagggagaaagaaaaagaccttatattacttggaaaatgagaagcaaagattttagacaagaaccaatgactgggaaccaaaatgcaatgagggcttggcagcccaggagtagtggctgctgttgtgagacacatggagctaaaatgggagagatgagaaactgtgagctttgaggattgtaagaaggaagggagctgcaacaaaggtcacaggtctgtggggttgccacgcctcctattttctatctctaatctcccttttgattttcacaattggtcctgttcttatatgtctgggtgaaagtaagggaagatctgtggtttttggtaggatagagtttcatgtgccatcatctccttccttgccattattgtaaagattcctccactagagttagtgatgatggcaacagacaaatgccggatgagaggtttgggttatctctcatattattaaatagtgatagaaaattggcaagttaaagactggccgcaaaaagcttctgtaagggccaagggaaaacttctcttttgccctctgaaggtttgctg

SEQ ID NO: 235546 - DNA, 530 bp, Homo sapiens
tcttgttcctcttgtgaattctcatttcagttcgactttagttggaatggttaggatactgttcaggcagtaaataacctttacgtaggaaaaactgctacaaggcttttgtatttttgtttgatcatgaccaattcaggataggtaatttgatgggagggaaaaagtggcccctcggcgggagtttgaggctgctgtgagctgtgctcgtcccactgcactccagcgggggcaacagagcgagaccttgtcacttaaaaaaggtagctcatggtaaacaaccttggagcaccttctcttagtgatttcatgtttcaaccagtacattgtggtgaatactgaaatatcttgtttaattcagataattaaaatggtggcaaaggaagctgtttagccagagcccttcttgactttgaggaacagtggtagtataagacttgaagacagacgtgtaaaaagtactactcactggtaggctcaggtctggttgattgactgattcttgagacagagcaagactccatctcaaa

SEQ ID NO: 235547 - DNA, 446 bp, Homo sapiens
actgtctgcttccttctagactgatacatgccctcttgttaaatcacagctacaaccaccacaagaaaatagctatcattgagtacttacgatcgtcagcaggcaggcatgtctgttacggacttatacatggtaaaagaaaagtaaaaacaacaacaacatgatttttctaagaagagacaattatcagtaagagtcaataggaatatctaaaaagatgttaaaaagaggtaacagttctttgagaagatcccgcaaccctgcagtccaatgacggttcaactccctgcatctgataagcaccttttcccctcaattaaaaggaaggaggccaggcacagttgctcacacctgtaatcccagcactttgggaggctgaggtaggcggatcacttgagctcaggagttccagaccagcctggccaacatagtgaaatcccatctct

SEQ ID NO: 235548 - DNA, 423 bp, Homo sapiens
tttgaggcttaggtttgggaggtgaatgtcaactctcacccctgtgaggtggcagctttgctctgttggcctcctcagaggctaaataaagaaatgctgagatctataaaccacccagcccagagagaaaaaggagggaggaagggcagctccctagaaaaaaatccaccccctccccaccactaaacacatttttaattgtcccttgggaacatttgtacatttgaccaaagcaaatctcaaagcagcagcagcaaaatgagtcagaggggctggtggtccagagagagctggggatcggagatggggaggtgaggagaggtggcaggcatgtttgggaaggtgagaaacttggttcctttcccaccatctctgtcaagctatagaaagaaagtgagcaggagaaataaagttccaggggaa

SEQ ID NO: 235549 - DNA, 404 bp, Homo sapiens
cagtgtcattgctttgtgtgatttctgaatgttgtatttgttcatctcaaccctagatgtatatagctctgagttattaatggttataaagctcttgttattgatattacctatttacatcaaaaagcttttagaaaatggtatgatgtaagcaattcttgtcatggtgaaatctgatggtgtaacccgttttactattggcgctgcttcataacaaaaatgaaaagctatatacatctacagccagaatggattgtttatgtcatataatttcctttactaagttcacttacattacttacagagttttattcattgccataatagagccatgtaggaaatgcactgactgcatgttattgtggcaagaatatcctaaatgtcattaaaatcctccaacatga

SEQ ID NO: 235550 - DNA, 289 bp, Homo sapiens
tacttcgactcggggccgcccccggccttctcgccgccgcccccgccgggccgcgcctacgacacggtgcgctccagcttcaagcccggcctggaggcgcgcctgggcgcgggcgctgccggcctgtacgagccgggcgcggccctcggcccgctgccgtatcccgagcggcagaagcgcgcgcgctccatgatcatcctgcaggactcggcgcccgagtcgggcgacgcccctcgacccccgcccgcggccaccccgcccgagcgacccaagcgccggccgcggccgc

SEQ ID NO: 235551 - DNA, 585 bp, Homo sapiens
cagttcctggaccctatatactattaatgcccttggctgagacttggtgcatttgtgtagttttggaaactccttcaagcaagagagaaatttttctgaaaaaatagagaaaccttagattctattttattagaaatgctgtatcttgctttcatttagcagaaattctatgccttattccatgaagcaaacaacataataagtaaagggcttgctctgtcttggcttctgagagagctagatttgcctcctgggtcatcttcttaagtgaactcctttgggctggagagctgttctctgattaatgccagagccaagcccagggagatgctcaatcagataaaatagcgttgatgcctaattatagactcaccatgtcttgtattttgcagcctgacccttcctggaattttgacgatgctattcaggataccacttcctattcataatctgcatatttaagatggcttgattcaaaacaatgttttggatacaaacattccaacatttttccaaaacacaggctttatcagcatataaagtaatttgccacatgcattgtgtttgcatcctagcaagtggata

SEQ ID NO: 235552 - DNA, 1000 bp, Homo sapiens
gagaccagcctaggcaacatggcgaaaccctgtctctacaaaaatacaaaaaattagctgggcctggtattgtgtgtgtgcctgtaatcccagctacttggtgagggctgaggtgagaggatcacctgagctttggatgcagaggttgcaatgagctgtgatggcaccattgccctccagcctgggtgacagagtaacaccctgcctcaaagtaaataaataaaatgttacacttttatagggcagctctgttacaatcttatgtggccaccattgtatatgcagtccattgttgaccaaaatgccttatgtaacacatgatttcatagggaaagaaagcctcttccttttggtcaatgaaagaaggtggagtgaagaaaggtgagagtaaggagaggaaatataagatgtttttgttctgatttcaggtatagaggaacctagggacagagggactccagatttttagccatgtggatacctagaccgaggaaacctcttgctggaatttggttcctttttgatgtggaaggagcccataattcccagctctctgggggtgtgggaaggcagctgacctgtgagtcagtgggccagtcatgcatctatcatagcagggggcagagctggaggtgggttccctaagctcggggactcaatagaggaagtgacaggtattgagggagtctgtacttatagtcggagcaagcatgaggctaccaggccctatcaagctgagagaccaacttattaaatacaagttgagcatttgagatcagtagcacatgcagccgccagagggcagcacaaggacgtgcgtgggccagagccccttctcccatgttcccacatgccccatggaagccactggggccaggagcggggagagactgagcaatcgtcccacactgtttatgttataagatggggctaacttctaacccttaggaccacctgtggtgtagagatagcagtgtaggggaaaggtggtggtttgtga

SEQ ID NO: 235553 - DNA, 363 bp, Homo sapiens
caaagcctgaggtgactttctaaccaggagcacaaatgtctctgacgcgtgtcccagctagaaaacacaccgaggtacagataccaccatcccttccagacctcccttgcacacacgccccttggtaaagtacccagcaccaaggggacaagggaaaggctgatggaatacttggatggtctggggtagcgtatctgtatgcccgttggtatcttccctggacatcccttctaatatatgccaacctccacagctctgtgaaaggtttttttttttttaaagactgagtcttggtttgttgcccaggctggagtgcagtggtgtgatcttggctcactgcaacctctgcctcctggattcaag

SEQ ID NO: 235554 - DNA, 416 bp, Homo sapiens
caaagcctgaggtgactttctaaccaggagcacaaatgtctctgacgcgtgtcccagctagaaaacacaccgaggtacagataccaccatcccttccagacctcccttgcacacacgccccttggtaaagtacccagcaccaaggggacaagggaaaggctgatggaatacttggatggtctggggtagcgtatctgtatgcccgttggtatcttccctggacatcccttctaatatatgccaacctccacagctctgtgaaagggttaccaagggatggaagagatcctcactcactgtgcctgaggcaggaatttttttttttttttttaaagactgagtcttggtttgttgcccaggctggagtgcagtggtgtgatcttggctcactgcaacctctgcctcctggattcaag

SEQ ID NO: 235555 - DNA, 560 bp, Homo sapiens
caacattcctgtgatttgtgggcacgagaagcgacttctcccgaatctccggccattttgggggccccagggctaagctcggcttccttagatcgcattctaacggcgttttattttatttagggcacagtttgcataataaaattaaaaggatcccattactccccttttctctctgagcactgcccagcaaggtctttcagactgttatttgaacatctagagcggccttcagaagtcgaattagcattgcttttctatgggaaagaaaaagggaaagaggtaaatagggcaaagtgagaagcgggtaaggtacaaggagtgaggtggattaaaacatgcagggagcggtgaaggagactggggacagaagaggacaagagaggagatggggcagcagggaggcgaagagataaacgctgagtcaccctaacaggtcattgggtacacaggagcgagatgccgcaggccaggaaaatccgggtgcaaatcgcaccccatcttctgggcctccttcccgccaagccgtaggagcgccggcttggagctcggcgccgccc

SEQ ID NO: 235556 - DNA, 525 bp, Homo sapiens
atttcactgactagaattaccagtactatgtcaaataagagtgactagtttggacatattttttcacaatcctggtagaataaaagcattcattttttcatggttaagtatatgactgatgaatgccagatgcctctagtgagccaccttgaatcactattctgaatacatcttgagtaaaaagagaaaattgctcatgtttccatgtctatctgaatcatgttattggaccatgagagcaagcagctggatctcattctgtccaggctattgctaaggcaggctggctgccttcatcttccccagtattctaggataacctcaaagaaatcacaacagcttgttttctacaattaaaacatttgggttttgatagtgtgcatggtctacaaagaagtgagaagtgtagctgtttgtatggaatcttatggtgaacattgctggctccaacatataacttgattggtgcgacatcaaggtaaatgaatcctcaaagagctagcaaatggatcaaataaaagtaga

SEQ ID NO: 235557 - DNA, 450 bp, Homo sapiens
cacttctatgaacttttatgaactgtaacactcaccgcaaaggtctgcagcttcacccctgaggccagggagaccacgaacccaccggaaggaatgaacaactccagacgcactgcctttaagagctgtaacacttaccacggatgtctgcagcttcactcctgaagtcagcgagaccacaaacccaacagaaggaagaaactcccgacacatctgaacatctgaaggaacaaactctggacacaccatctttaagaactgtaacactcaccgtgagggtcaaccgcttcattcttgaagtcagccagaccaagaacccaccaattccgtctatctgaatcatgttattggaccatgagagcaagcagctggatctcattctgtccaggactcctggaaacagcagctctaacaaaattgtcttcaataaataagtttttttgcatcaca

SEQ ID NO: 235558 - DNA, 104 bp, Homo sapiens
gaggctgagaggagcaggacgcacagacacatggcaggcaccaggagagccaggctgctctgctctgctggcgatccatgtgctgtccccctctgtctcttgac

SEQ ID NO: 235559 - DNA, 4066 bp, Homo sapiens
  misc_feature (511)..(511): n is a, c, g, or t
  misc_feature (2211)..(2211): n is a, c, g, or t
  misc_feature (2959)..(2959): n is a, c, g, or t
  misc_feature (3814)..(3814): n is a, c, g, or t
cgcgcctgtagtcccagctactcgggaggctgaggcaggagaatcgctggaacccgggaggcggatgttgcggtgagccgaaatcgcgccactgcactgggcaacagagcgctacttcgtctcaaaacaaaaaaggcgttttacagtcaggcaaaccctgcctctgcccagtccagcgcccgcctcgccctcctgcgccggtcgctgctgacccggggctccacccacgtgcggtcccgggggtcccgcctgccgtccgtccaccgcgcggtcgcagtcagagctcggctcggggcggacacgcatgaacgcgagtgagaagcggcgactggacggcgggcggcagcgtgtcccgcgggccgggcactcgggtgcgctccggcgtccggtgtgtgtttcctggtcctcgggggcgcttcccccggtgcttccttttgccgtcggcctcacttccaaccgaaggtcaggacggcaggcctcggccccaggggcgacccttccacctgggaanggtgggcgcgagcctccagcagagaccgcctttacccgccccgcgtgggaagcgccaggatcgcgaggaaacgcgacacgtgcatcgcgacggcccaggcacggagccgcaggaagctggcacctgacgcgcctgcgcccacccaactcgagttggtggcgcgtcaccttcccctgggatcgcccgcagcaggggcgcccacgcacgtgccagtccacgtggccccgccctagcgaccgttgctaaggggcgtggctcagccgcacggaacccgagcccccggcgacttataaatatttgcgtattcaaatgaggcctggctcccgttgctatggcgcccaggccgcaaccccgcggcggccggaagaacagcctgggagtaggagacagcgcctggaggtggagggcgcccagggccgagctgccagggccggacacctaggctgagccctcagccggccaactcgcctggcacaggggcagctctagacgggatggagaggatgcatcttcagtgtccacacgtggtcaacagataaaagccatggccagaacgttctaagtggctacatgtgcatctgcctgttcacggattccttcgacaaatatttgagcatcccctcctgcgactgtggacagcagaggagcacgcaggccacgtgcagcccacagctctggggcgaggcaggccctcaaccgaacacgtatagagacagggtttcaccgtgttagccaggatggtctcaatctcctgacctcgtgatctgcccgcctcagcctcccaaagtgctgggattacaggcgtgagccactgcgccccgccagacgtctgcatctttaaggggcaacaccagcaggtgacatgtgaatggatctgggctgggacagatcccgtgggcctcggcggagcacctccagcgtccgggtgcgggagctgagctggcaaggcctgcacaacccctgcccacagagcaagggccctggcagtcagagggacagacttggagagcagctggtggaagagtacctgtcccctgcccggctgcaggccctggcccgggtggatgaccttcggctggtgaggacgctggagatgtgtgtggacactcgtgagggcagcctggggaactttggggtgcacctgcccaacctggaccaactgaagctgaacggcagccacctgggctccctgagggacttgggcacgtctctgggccacctgcaggtgctgtggctggctcgctgtggccttgctgacctggatggcatcgcctctttgccagcacttaaggaactctacgcctcctacaacaacatctcggacctgagcccactgtgcctgctggaacaattggaggtgctggacctggagggcaacagcgtggaggacctggggcaggtgcgctacttgcagctgtgcccacgcctggccatgctcaccctggagggcaacctggtgtgcctacagccggcccctggccccaccaacaaggtgcccaggggctacaactacagggcagaggtgaggaagctcattccccagctgcaggtcctggacgaagtgccggccgcacacacaggcccaccggcccccccgcggctgagccaggactggcttgcggtgaaggaggccatcaagaagggcaacggccttcccccgctgggtacggcagctgcgcccggaggacccactgctgagncccagctccccccaggaagaggcccccaccccaggcttctcagaaacggatagccacatctcatgcacttctccagccttgaccccggtccccagagctgtgcacacccggccccaggccaggacactgtctctgagcagcccacagagggagaggaaggtctgaagatgagggcctctctagaaggctgcagcgtgagaggccagcctcaggccatgcagcatggggattggggcccctggtctgtggacagagtctggggggcgctctcaggctgggccttggtgacctctgcttctgaacctcgggcagactgtccccgtggagcccccatccggagacttgaccccgagctgtccctgcctgagacgcagtcccgggcctccaggccctggcccttctccctgctggtccatgggggccccctgcctgaaggcctgctttctgaggacctggccccagaagataacaccagcagcctcacccatggtaactgacttgcctcaaagctgaccctgcagcccctcggccccgaaccaggcccagccatgctgtctcttgcaggtgctggccaagtcctctgtgggaaccccaccaagggcctgcgggagcgtaggcaccagtgccaggccagggagccccccgagcagctgccccaacacaggccaggagatccggccgccagcacttccaccccagagcctgaccctgcagacagctctgacttcctggccttggctgggctcanggcctggagggaacatggcgtgcgccccctcccctataggcacccggagtcccaacaggaaggggctgtagccccctggggcccacggagggtccctgaagagcaagtgcaccaggcagagcccaagactccctccagccccccaagcctggcctcagagccctccgggacctcgagccagcacctggtcccttcacctcccaagcacccaaggccacgagattctggcagcagctccccgcggtggtcgacagacctgcagtccagggggcgtcggctccgagtcctgggcagctgggggcctggcctgggtgatggggtggctgcagtgcctgtcctgagagccctggaggtggcctcaggcctgagccctcgagcccagggatgtcctggcccaaagccagcaccacatgcagcagctagacctcccagggcagctgaactctctcaccccagccccgtccccacttaatatagcccccactgccaggcttgcctgtgctggggccacgacttgcccacatatgtggtcacagagcacagaatacctgggcgggtgtgttggggggtggaaggagtgcctggccctggggaggaccctcttggtggaggggagtgggggactgggaccagccagggaggcagcagaggctggaacccagtttaggcccccaactgggtttggcctggggagggagggtccggctccccagcccttccttagggccaggctttcccgcgggcacgggggtggggggtggtcacccgagcaggcctgtgagaggcctctcctgctagaattgggcatggccgaggggcaggggctggagctgcgagtccaccactcccttgccngccccagggtaagagccacctcctaggccgcagtggcccaaggtcccagctgctcgcctgaggccgccgggggtgcggtccaggcctcccgtctccgggggatctgtagggttcccgcactgcgatagggcggcccgtcccctcctcttggcgcaggacgccccggaacccaaaccaacatttccagctctcaggtgtacagaaatgcggtttactttgtaggccacgttggttcaataaatgatgcagcgg

SEQ ID NO: 235560 - DNA, 4141 bp, Homo sapiens
  misc_feature (511)..(511): n is a, c, g, or t
  misc_feature (2286)..(2286): n is a, c, g, or t
  misc_feature (3034)..(3034): n is a, c, g, or t
  misc_feature (3889)..(3889): n is a, c, g, or t
cgcgcctgtagtcccagctactcgggaggctgaggcaggagaatcgctggaacccgggaggcggatgttgcggtgagccgaaatcgcgccactgcactgggcaacagagcgctacttcgtctcaaaacaaaaaaggcgttttacagtcaggcaaaccctgcctctgcccagtccagcgcccgcctcgccctcctgcgccggtcgctgctgacccggggctccacccacgtgcggtcccgggggtcccgcctgccgtccgtccaccgcgcggtcgcagtcagagctcggctcggggcggacacgcatgaacgcgagtgagaagcggcgactggacggcgggcggcagcgtgtcccgcgggccgggcactcgggtgcgctccggcgtccggtgtgtgtttcctggtcctcgggggcgcttcccccggtgcttccttttgccgtcggcctcacttccaaccgaaggtcaggacggcaggcctcggccccaggggcgacccttccacctgggaanggtgggcgcgagcctccagcagagaccgcctttacccgccccgcgtgggaagcgccaggatcgcgaggaaacgcgacacgtgcatcgcgacggcccaggcacggagccgcaggaagctggcacctgacgcgcctgcgcccacccaactcgagttggtggcgcgtcaccttcccctgggatcgcccgcagcaggggcgcccacgcacgtgccagtccacgtggccccgccctagcgaccgttgctaaggggcgtggctcagccgcacggaacccgagcccccggcgacttataaatatttgcgtattcaaatgaggcctggctcccgttgctatggcgcccaggccgcaaccccgcggcggccggaagaacagcctgggagtaggagacagcgcctggaggtggagggcgcccagggccgagctgccagggccggacacctaggctgagccctcagaccaggccagtgaggcacccagagcctgagccactgccccgctccaacactcccacccaccacctctgtcaacagccggccaactcgcctggcacaggggcagctctagacgggatggagaggatgcatcttcagtgtccacacgtggtcaacagataaaagccatggccagaacgttctaagtggctacatgtgcatctgcctgttcacggattccttcgacaaatatttgagcatcccctcctgcgactgtggacagcagaggagcacgcaggccacgtgcagcccacagctctggggcgaggcaggccctcaaccgaacacgtatagagacagggtttcaccgtgttagccaggatggtctcaatctcctgacctcgtgatctgcccgcctcagcctcccaaagtgctgggattacaggcgtgagccactgcgccccgccagacgtctgcatctttaaggggcaacaccagcaggtgacatgtgaatggatctgggctgggacagatcccgtgggcctcggcggagcacctccagcgtccgggtgcgggagctgagctggcaaggcctgcacaacccctgcccacagagcaagggccctggcagtcagagggacagacttggagagcagctggtggaagagtacctgtcccctgcccggctgcaggccctggcccgggtggatgaccttcggctggtgaggacgctggagatgtgtgtggacactcgtgagggcagcctggggaactttggggtgcacctgcccaacctggaccaactgaagctgaacggcagccacctgggctccctgagggacttgggcacgtctctgggccacctgcaggtgctgtggctggctcgctgtggccttgctgacctggatggcatcgcctctttgccagcacttaaggaactctacgcctcctacaacaacatctcggacctgagcccactgtgcctgctggaacaattggaggtgctggacctggagggcaacagcgtggaggacctggggcaggtgcgctacttgcagctgtgcccacgcctggccatgctcaccctggagggcaacctggtgtgcctacagccggcccctggccccaccaacaaggtgcccaggggctacaactacagggcagaggtgaggaagctcattccccagctgcaggtcctggacgaagtgccggccgcacacacaggcccaccggcccccccgcggctgagccaggactggcttgcggtgaaggaggccatcaagaagggcaacggccttcccccgctgggtacggcagctgcgcccggaggacccactgctgagncccagctccccccaggaagaggcccccaccccaggcttctcagaaacggatagccacatctcatgcacttctccagccttgaccccggtccccagagctgtgcacacccggccccaggccaggacactgtctctgagcagcccacagagggagaggaaggtctgaagatgagggcctctctagaaggctgcagcgtgagaggccagcctcaggccatgcagcatggggattggggcccctggtctgtggacagagtctggggggcgctctcaggctgggccttggtgacctctgcttctgaacctcgggcagactgtccccgtggagcccccatccggagacttgaccccgagctgtccctgcctgagacgcagtcccgggcctccaggccctggcccttctccctgctggtccatgggggccccctgcctgaaggcctgctttctgaggacctggccccagaagataacaccagcagcctcacccatggtaactgacttgcctcaaagctgaccctgcagcccctcggccccgaaccaggcccagccatgctgtctcttgcaggtgctggccaagtcctctgtgggaaccccaccaagggcctgcgggagcgtaggcaccagtgccaggccagggagccccccgagcagctgccccaacacaggccaggagatccggccgccagcacttccaccccagagcctgaccctgcagacagctctgacttcctggccttggctgggctcanggcctggagggaacatggcgtgcgccccctcccctataggcacccggagtcccaacaggaaggggctgtagccccctggggcccacggagggtccctgaagagcaagtgcaccaggcagagcccaagactccctccagccccccaagcctggcctcagagccctccgggacctcgagccagcacctggtcccttcacctcccaagcacccaaggccacgagattctggcagcagctccccgcggtggtcgacagacctgcagtccagggggcgtcggctccgagtcctgggcagctgggggcctggcctgggtgatggggtggctgcagtgcctgtcctgagagccctggaggtggcctcaggcctgagccctcgagcccagggatgtcctggcccaaagccagcaccacatgcagcagctagacctcccagggcagctgaactctctcaccccagccccgtccccacttaatatagcccccactgccaggcttgcctgtgctggggccacgacttgcccacatatgtggtcacagagcacagaatacctgggcgggtgtgttggggggtggaaggagtgcctggccctggggaggaccctcttggtggaggggagtgggggactgggaccagccagggaggcagcagaggctggaacccagtttaggcccccaactgggtttggcctggggagggagggtccggctccccagcccttccttagggccaggctttcccgcgggcacgggggtggggggtggtcacccgagcaggcctgtgagaggcctctcctgctagaattgggcatggccgaggggcaggggctggagctgcgagtccaccactcccttgccngccccagggtaagagccacctcctaggccgcagtggcccaaggtcccagctgctcgcctgaggccgccgggggtgcggtccaggcctcccgtctccgggggatctgtagggttcccgcactgcgatagggcggcccgtcccctcctcttggcgcaggacgccccggaacccaaaccaacatttccagctctcaggtgtacagaaatgcggtttactttgtaggccacgttggttcaataaatgatgcagcgg

SEQ ID NO: 235561 - DNA, 4659 bp, Homo sapiens
  misc_feature (511)..(511): n is a, c, g, or t
  misc_feature (2804)..(2804): n is a, c, g, or t
  misc_feature (3552)..(3552): n is a, c, g, or t
  misc_feature (4407)..(4407): n is a, c, g, or t
cgcgcctgtagtcccagctactcgggaggctgaggcaggagaatcgctggaacccgggaggcggatgttgcggtgagccgaaatcgcgccactgcactgggcaacagagcgctacttcgtctcaaaacaaaaaaggcgttttacagtcaggcaaaccctgcctctgcccagtccagcgcccgcctcgccctcctgcgccggtcgctgctgacccggggctccacccacgtgcggtcccgggggtcccgcctgccgtccgtccaccgcgcggtcgcagtcagagctcggctcggggcggacacgcatgaacgcgagtgagaagcggcgactggacggcgggcggcagcgtgtcccgcgggccgggcactcgggtgcgctccggcgtccggtgtgtgtttcctggtcctcgggggcgcttcccccggtgcttccttttgccgtcggcctcacttccaaccgaaggtcaggacggcaggcctcggccccaggggcgacccttccacctgggaanggtgggcgcgagcctccagcagagaccgcctttacccgccccgcgtgggaagcgccaggatcgcgaggaaacgcgacacgtgcatcgcgacggcccaggcacggagccgcaggaagctggcacctgacgcgcctgcgcccacccaactcgagttggtggcgcgtcaccttcccctgggatcgcccgcagcaggggcgcccacgcacgtgccagtccacgtggccccgccctagcgaccgttgctaaggggcgtggctcagccgcacggaacccgagcccccggcgacttataaatatttgcgtattcaaatgaggcctggctcccgttgctatggcgcccaggccgcaaccccgcggcggccggaagaacagcctgggagtaggagacagcgcctggaggtggagggcgcccagggccgagctgccagggccggacacctaggctgagccctcaggtgagagccgagcgcacccttggggtgggagccgcaagcctcgccctatgaccggtgccaggagggaacctgcgccgaggcgtgggcgcggggacgaagcagcacagccatcggggacccagtgatggccccgcatgtcagatctggtcccctgaggacccttgcctccaccaccccctggccctgcactgaaagggctccctgtcaggagacaggaggggccccaagccctgcccctgagggagactcagaggcaatgacccagggtgctcagggttccagggtggggctcaggaggggagcgggctctgccttccgagcccccatggtgaaggggcgagggcagcaggggacccagaggtgatggctacccaccagggaatggcactagcaggggtgtggagacaggccccccagttaccaatttggggagcatgggggcttgcagaggggacacagggtgggagcagggccgtgaagtgtgtggatgggttcaggcctgggtgagaacactaggtgcagtgtctgaggtgggagttcaatggggtctttggatcccacagcctccaaccccttgcacccccaggccttggggctcagaccagtctgatgcttggggctcttgggcacagaggagacaagggtagctgactcagcccttagtgtcacccataggtgtccaggggctgcccgtgaccccgccagctcacgccctccatgaggctcgaggctggcaggcctgggatggaggtggccagagtctttggggggatgcagtgttggggtcctgctgtgaggcctggggccttgcactggctggagaaaggcaggcagtgggggagatttgggctggaaactccatgagattctgctttgggcttcacttctttgatccttggtgcatggtcaccttccagaccaggccagtgaggcacccagagcctgagccatgcgccccgccagacgtctgcatctttaaggggcaacaccagcaggtgacatgtgaatggatctgggctgggacagatcccgtgggcctcggcggagcacctccagcgtccgggtgcgggagctgagctggcaaggcctgcacaacccctgcccacagagcaagggccctggcagtcagagggacagacttggagagcagctggtggaagagtacctgtcccctgcccggctgcaggccctggcccgggtggatgaccttcggctggtgaggacgctggagatgtgtgtggacactcgtgagggcagcctggggaactttggggtgcacctgcccaacctggaccaactgaagctgaacggcagccacctgggctccctgagggacttgggcacgtctctgggccacctgcaggtgctgtggctggctcgctgtggccttgctgacctggatggcatcgcctctttgccagcacttaaggaactctacgcctcctacaacaacatctcggacctgagcccactgtgcctgctggaacaattggaggtgctggacctggagggcaacagcgtggaggacctggggcaggtgcgctacttgcagctgtgcccacgcctggccatgctcaccctggagggcaacctggtgtgcctacagccggcccctggccccaccaacaaggtgcccaggggctacaactacagggcagaggtgaggaagctcattccccagctgcaggtcctggacgaagtgccggccgcacacacaggcccaccggcccccccgcggctgagccaggactggcttgcggtgaaggaggccatcaagaagggcaacggccttcccccgctgggtacggcagctgcgcccggaggacccactgctgagncccagctccccccaggaagaggcccccaccccaggcttctcagaaacggatagccacatctcatgcacttctccagccttgaccccggtccccagagctgtgcacacccggccccaggccaggacactgtctctgagcagcccacagagggagaggaaggtctgaagatgagggcctctctagaaggctgcagcgtgagaggccagcctcaggccatgcagcatggggattggggcccctggtctgtggacagagtctggggggcgctctcaggctgggccttggtgacctctgcttctgaacctcgggcagactgtccccgtggagcccccatccggagacttgaccccgagctgtccctgcctgagacgcagtcccgggcctccaggccctggcccttctccctgctggtccatgggggccccctgcctgaaggcctgctttctgaggacctggccccagaagataacaccagcagcctcacccatggtaactgacttgcctcaaagctgaccctgcagcccctcggccccgaaccaggcccagccatgctgtctcttgcaggtgctggccaagtcctctgtgggaaccccaccaagggcctgcgggagcgtaggcaccagtgccaggccagggagccccccgagcagctgccccaacacaggccaggagatccggccgccagcacttccaccccagagcctgaccctgcagacagctctgacttcctggccttggctgggctcanggcctggagggaacatggcgtgcgccccctcccctataggcacccggagtcccaacaggaaggggctgtagccccctggggcccacggagggtccctgaagagcaagtgcaccaggcagagcccaagactccctccagccccccaagcctggcctcagagccctccgggacctcgagccagcacctggtcccttcacctcccaagcacccaaggccacgagattctggcagcagctccccgcggtggtcgacagacctgcagtccagggggcgtcggctccgagtcctgggcagctgggggcctggcctgggtgatggggtggctgcagtgcctgtcctgagagccctggaggtggcctcaggcctgagccctcgagcccagggatgtcctggcccaaagccagcaccacatgcagcagctagacctcccagggcagctgaactctctcaccccagccccgtccccacttaatatagcccccactgccaggcttgcctgtgctggggccacgacttgcccacatatgtggtcacagagcacagaatacctgggcgggtgtgttggggggtggaaggagtgcctggccctggggaggaccctcttggtggaggggagtgggggactgggaccagccagggaggcagcagaggctggaacccagtttaggcccccaactgggtttggcctggggagggagggtccggctccccagcccttccttagggccaggctttcccgcgggcacgggggtggggggtggtcacccgagcaggcctgtgagaggcctctcctgctagaattgggcatggccgaggggcaggggctggagctgcgagtccaccactcccttgccngccccagggtaagagccacctcctaggccgcagtggcccaaggtcccagctgctcgcctgaggccgccgggggtgcggtccaggcctcccgtctccgggggatctgtagggttcccgcactgcgatagggcggcccgtcccctcctcttggcgcaggacgccccggaacccaaaccaacatttccagctctcaggtgtacagaaatgcggtttactttgtaggccacgttggttcaataaatgatgcagcgg

SEQ ID NO: 235562 - DNA, 538 bp, Homo sapiens
tcagtcgaccagagttctggggatgattatgtttttccctgaatacagagttctgggatgattatgtttttcttcttcaagcatttaaaagatgttgcattgtttcctgtcttccatggtttctaatgagaagtcaggtgtggtgtcagtagtatcattattcccatgtatataataatgttttgatattctctggctgctttcaggattttctctttatctttggttttcagcagtctgactatgatgtgcctaggtgtggttttctttgtattcatcctgcttgggggttgctgagcttcttgaaactgtaagttgatatttttcaccaaatttgtgaaaagcttgacttttatttcttattctttttctgtctcatttctctctcctcttcctctgtaactctaattacatgaatgttagtatatttgatattttgtagattactgagggtctgttcgttttcttcccagtgtttttacttttagttcctcagaatagatacactattcatgtattttcaaggagatggaccaat

SEQ ID NO: 235563 - DNA, 460 bp, Homo sapiens
ggcccagctattctactctcaggtatttaccaaagagaaaggaaaatatatgttcatacaaagacttgtacctgaatgttcatagctttttgactcatttattcactcaaaaaaaaatcatgctgttcacactaagaaatagtcttggaaaagaaagaaaacaaacaaaaaaacccatcattctgtgtgaaagaagacagacaaaatagtgcctattgtgtaaatctatttacgtgaagttctagaactggcagtatcaatctacagtaatagaagcgtagtggttggcagccatagctgtagaggggattggctggaaaacgcaaaagtgaactttctgggaaatgttttatagcttgattgggatggtctacatgtttgtcaaaactcattgaattgcacagttgaaatgtatgcaatttattgtatgtaaattaatcttgaaaaaactattttaaaa

SEQ ID NO: 235564 - DNA, 454 bp, Homo sapiens
gtttatgtattattctgtcttaagaaaagcagaccaaaaagtttagtggtccacggaagttctgccgtactggaactgaaccatagcaaatgcatctccatttccatgattcagtagctttgagtgacaaagtaactaatctccagccctggttattgagaaactcctgaattgtttgcactgagctgccggtttcatccagaattcctggcaaaggtgttagaacggctccatgattgaatcaccagtgatttttagtataaatacggcagagctggaaacctggaaaatagaacaaaatgaatggattggttatcctaccgctgaagcaatcaaaacagcacaacttgggaagagaaaatttagggttcacaattgtttttagttctgtaattaagccaatcattcgaacacaaatatgttatttaaaaataaaaaccatttccctagcttt

SEQ ID NO: 235565 - DNA, 451 bp, Homo sapiens
ctccattctctcccccaattcgctcaaatcctcacccccctagtggtccacggaagttctgccgtactggaactgaaccatagcaaatgcatctccatttccatgattcagtagctttgagtgacaaagtaactaatctccagccctggttattgagaaactcctgaattgtttgcactgagctgccggtttcatccagaattcctggcaaaggtgttagaacggctccatgattgaatcaccagtgatttttagtataaatacggcagagctggaaacctggaaaatagaacaaaatgaatggattggttatcctaccgctgaagcaatcaaaacagcacaacttgggaagagaaaatttagggttcacaattgtttttagttctgtaattaagccaatcattcgaacacaaatatgttatttaaaaataaaaaccatttccctagcttt

SEQ ID NO: 235566 - DNA, 771 bp, Homo sapiens
  misc_feature (27)..(30): n is a, c, g, or t
actaatcacttattggtaagaaaaaannnnttgcatgccattgcagcatcaagtggtccacggaagttctgccgtactggaactgaaccatagcaaatgcatctccatttccatgattcagtagctttgagtgacaaagtaactaatctccagccctggttattgagaaactcctgaattgtttgcactgagctgccggtttcatccagaattcctggcaaaggtgttagaacggctccatgattggtcagtgaaatcatcaccatcttcccagaactcaggtgcaagctgttgggatgggaagccagtcacccactttattttcatttcctgaaagtgatctggtaccgtttgtcatgggtctttgtcttaagaagcctcaaccgtaagcgtagagactggggacaccacagtggacactgatgctccagggatgaggcgtgcccagccagtgcagttttaagacggaaaagtgaatgccttggtcaccattggcaccggccattattgttactctgcaaagcatttcatgtatttctcttatctgtctgtcctgaagacatttgaaatgccatccccagttagagttcagaaagttaaactacgtccttcattaatagcagaacaaactgtgatataaccatgcagataatatgttcatgcatggaataccatccaactgtttaaaataataaactggctgagcatggtggctcacacctataatctcagcactttgggaggccaaggcaggaagatcctttgagccca

SEQ ID NO: 235567 - DNA, 235 bp, Homo sapiens
  misc_feature (1)..(1): n is a, c, g, or t
natcactgcgtgcgaacctgaatcaccagtgatttttagtataaatacggcagagctggaaacctggaaaatagaacaaaatgaatggattggttatcctaccgctgaagcaatcaaaacagcacaacttgggaagagaaaatttagggttcacaattgtttttagttctgtaattaagccaatcattcgaacacaaatatgttatttaaaaataaaaaccatttccctagcttt

SEQ ID NO: 235568 - DNA, 342 bp, Homo sapiens
aggtcagcgcttgagatattttgcagagcctggacttgatggatcagctggcaccacccagatccataaattggctcatctgatcttgtggcccccatccatctgtgttcttgtggaattcacccagaatcaccagtgatttttagtataaatacggcagagctggaaacctggaaaatagaacaaaatgaatggattggttatcctaccgctgaagcaatcaaaacagcacaacttgggaagagaaaatttagggttcacaattgtttttagttctgtaattaagccaatcattcgaacacaaatatgttatttaaaaataaaaaccatttccctagcttt

SEQ ID NO: 235569 - DNA, 486 bp, Homo sapiens
ctccattctctcccccaattcgctcaaatcctcacccccctagtggtccacggaagttctgccgtactggaactgaaccatagcaaatgcatctccatttccatgattcagtagctttgagtgacaaagtaactaatctccagccctggttattgagaaactcctgaattgtttgcactgagctgccggtttcatccagaattcctggcaaaggtgttagaacggctccatgattggtcagtgaaatcatcaccatcttcccagaactcagaatcaccagtgatttttagtataaatacggcagagctggaaacctggaaaatagaacaaaatgaatggattggttatcctaccgctgaagcaatcaaaacagcacaacttgggaagagaaaatttagggttcacaattgtttttagttctgtaattaagccaatcattcgaacacaaatatgttatttaaaaataaaaaccatttccctagcttt

SEQ ID NO: 235570 - DNA, 419 bp, Homo sapiens
ccaggacccagctcttgaatgttttctctttctacacttactccttgatgacctcatctaatctcattgcttttaaaataccatttaggtgctaatgattccccaatgtacttttctcaccttgatcacttctctaaattccaactagttttttccaacaccctaatacctaaacttagatttttaatagaggttatcaaaattaacataacaaaatcttagttaatgagcccgcactccattcctccttccgtctgtcctagagtccagccatttaccatctgcacatttactatctgcactactaacacctgaaccaagccaacaccggctgtcatctggcttactgcagtaactctatttcagaacagccagagtgacattttaaaaacattgtcattgtacacagtggttaacta

SEQ ID NO: 235571 - DNA, 507 bp, Homo sapiens
ctcactctattgcccaggctggagtgcaatggcgccatctcggttcactataacctctgcctcccaggttcaagcgattctcctgcctcagcctcccgagtagcaggaattacaggcatgcaccaccatgcctggctaattttttttgtatttttagtagagatggagtttcaccatgttggccaggctggtctcaaactgttgatcagcccacctcggcctcccaaagtgctgggattacaaatgtgagccgtgagccactgtgcccggccaaatttttttttttttttatagacagggaaaacatcattaagatggaagagatcaattactggcctatcttcagcaagagctattttctgcagagtacaggaccagatgaaaagatagctcctggtctaaattccgctaataaaaacctgaacatattagagtaatgacatattgtaaggatctaaagttcctatgattcctttttcaaagctaataaatcaatagattaaagag

SEQ ID NO: 235572 - DNA, 395 bp, Homo sapiens
gaatgaattcaccatgataaccactttcaacccagatactccttaatagaaaataaaacaactgtatttccctgtctttgtaatttatgcaaataaatgtgcagaaccaaggctgaaaatgatgtcatggagcacagtgatcttccatagcttctttatcatttgtcctattaaagggcatgtagctaaatagtaattctaataggaatttcagacatgaatctggaattgtatgttgtcactttctgtacaggtctgatattttttaaatgtgagcatacaaaagagacaattgtccatcattgttctaaacttaggatgctagaagtggcctggaattattactataacttaaataagaaaaatgatctcaatgataaacctgagcagggctc

SEQ ID NO: 235573 - DNA, 685 bp, Homo sapiens
caaagctaataaatcaatagattaaagagcttggtggaatatttttaattccatgactaagaaatttaatgattattacatgattaaaccctccagtgatggtttcatcatttatcctaaaattctttttccaaaaccgtcaagagtttatgaaacaaccacttaaacctataataatttcatgtcacctttaaacaatgagccagagtggatgggcgttaccttctatcacagcagaatgaattcaccatgataaccactttcaacccagatactccttaatagaaaataaaacaactgtatttccctgtctttgtaatttatgcaaataaatgtgcagaaccaaggctgaaaatgatgtcatggagcacagtgatcttccatagcttctttatcatttgcagaagcaataaatcatatttagtagagagaaaaggacccatcaaagtgatttttcctattaaagggcatgtagctaaatagtaattctaataggaatttcagacatgaatctggaattgtatgttgtcactttctgtacaggtctgatattttttaaatgtgagcatacaaaagagacaattgtccatcattgttctaaacttaggatgctagaagtggcctggaattattactataacttaaataagaaaaatgatctcaatgataaacctgagcagggctc

SEQ ID NO: 235574 - DNA, 546 bp, Homo sapiens
ggaagagcaaaaaaggaaaaagagagaaagagattaacagggattatttcttgagaaagagaatctgtggagaaaacggagatgggaaagctggggtgaggccagggccgatttgcgctgtccacagaaggactccaaggggaaggccgaggcccaccctgcaaaggaccccaaggctccgaggcatagttgagtccccggctctcaggagcctgagcccctctgcgccatgagagccaagtggaggaagaagcgaatgcgcaggctgaagcgcaaaagaagaaagatgaggcagaggtccaagtaaaccgctagcttgttgcaccgtggaggccacaggagcagaaacatggaatgccagacgctggggatgctggtacaagttgtgggactgcatgctactgtctagagcttgtctcaatggatctagaacttcatcgccctctgatcgccgatcacctctgagacccaccttgctcataaacaaaatgcccatgttggtcctctgccctggacccgtgacattctggactatttctgtgttta

SEQ ID NO: 235575 - DNA, 180 bp, Homo sapiens
ttccttcttgctagcagaagtagcagattgtcctgttgcatctggtgaggtgtgagaaagagagagggagagttgggaatgatgaatgttttgactcctttcttctctatatgatttatcagtagaaaaacagaagcactgatgaagacgtgtgccttcactaaattcagtgggttttca

SEQ ID NO: 235576 - DNA, 582 bp, Homo sapiens
ggcgtgggaggcttctgtgggtcggggcgcagctttgcaaggttcagctccaagactgcttcctccagggagccttccctcccttcccccaggtaagtgctcctccccagttgctcattccaccagggcctgatcacaccctgctggcagtgtcagagcccggctttgtcttccaccacccctcctagaactggtggcagggacagatgaatggatgaatgaatgaatgggaagtgagaattctactactggaccatcaatgcagccctcggaatgagtgagtgagtgagtgagtgagtgagtgagtgatggaaagtggtctggaggcagggagagggacaggccgatcatgcgaggaatcccagcccaagcccccgaggtccccgctcccgccctaaaagatgcacgcgccaagcccttgggccagaaaaaaaaaaaaaaaacgggccgggattggctcaggctgggggaggcgggtctacgacgagacacgattttctattggcttactcgccaggactctgcccaatcgacgcgatcgtcttccccagaagacccccgcctccctcccgccggcggccg

SEQ ID NO: 235577 - DNA, 352 bp, Homo sapiens
agcctaaactatttattatctggccctttacagaaaaagtttgctgaccgtacctagtgctcttgtcagatgaagtcacgcgtaagcaaatggaattcatgctgtgttcacattgttccctcatgtatcaatttgaaacaaatttgcatcttcaaagcaaatgttgtggcaatattgtctctacatggaacttaagactgtagtccacctctggagagcagagtgaaggcaacaaaggagagacaccttcctggaagccctttgaatcccctcaatctctctgtgctgaaagtgagaccaccccttagatagtttccattatatgaatcaataaatttattttcattcaagc

SEQ ID NO: 235578 - DNA, 429 bp, Homo sapiens
ctttcagatgttcctcccaccatcctttgataattttttcacttcaaggaccatctcgtgttttcacctccccgtgtatgggtgctggctgacgatccgatcacatgagccgcgtgaaggctctgaatctccacggtgccatctccagtttctgggcatcgcgttcctctcaagaatgaacggcgatttcaaaaggaccccaacactgggtgatggcgtgcaaagtgttaccgagaaataaacttcaagcagtgaagacagatggatgagatggagctgtgattgaacatgtctcagaggctagacatctaagaaacagtcgcagaggacaaagaacacattgatttttaaataagcaattcacgatggaatgaaaaatggaattaaaaggaattttgggcaaataaatgactgcaggtagtaaattaa

SEQ ID NO: 235579 - DNA, 726 bp, Homo sapiens
ggagtgtcctcccatccgccgcaccaacaactggacagatgaaaagaatcaaaaaggagaggaagaagagggtgcaagcacaatgcccactgccttgccccaggctgggcgaggccagcactcaggtagagctgaggacaaatggagatgagaacagaaggggaggcttccgggcaggcgaggcgcccaaaagccactccacagaggccctgactgcatgcgtcaacccctcctgtgagtacagggagaaaggctgccaggcctccagcacccagggggaactcagaggacacgatggggatatgaagtcaacactacttaaccaactagagatgcagcctccgctaggcttagaagatcaggggttgcttgtgttcttggcatacgtgtctgaggcttggcaaaacctacatccctggttgcttattgatacaggaaaagccagagataagcttgtctccattcctgtaagtgacatgaggaagtttcccagtcaccaggagcaaggcttagcacacggactgacctttccttagttactctgtcctcaaatagcccttggtgcagggataccagagaaaacaacagcattttttgcagcccttatgagaccttcgtccatacttcagagaatctgggactttctagaactcttacgagctaggaaatccctcagtgcaatgagaaggcttcttgttgccctgcctgggagcctcagactcagga

SEQ ID NO: 235580 - DNA, 399 bp, Homo sapiens
ggaactcatcaagtgtactgaaaataggctagaaagctttccatatatttatgtaaagttttgacatcttcgaatggacataatgatgcatttgcaatctccacaatcatgagggcctaaagggagagagatgtgtagagccctggaattgaagatccatggtgtgactggggggggaaagtctctgaaaagttaaaagaagacagggcactgaaccctgatctaatatgtaatggggttatgaaatttaggcagagggtagtcatagaattattcatgaaatcctagaatagtaatactagaggtcaaacttcatattcagaaaagtacaaatagggtcaggtaataaagcactattccatatttttttttaatgcctgccttggaaggtagcaaaac

SEQ ID NO: 235581 - DNA, 320 bp, Homo sapiens
ccacacactgctgctgaccgtggtccgctccccacgctggtaagcccgtatgagctcaggaaactgcggggtcttcccagtgcgccctcctgctctttgggctgtctgtatttccagctggggaaggggagtgggccccaaagcacctgtccactctcggcctgcacccgcccgccctgcttcccttcaaatgctgtggactaagggtcctccctacccaattctggggcctctgagcatgagcaatcagggccccaccagtgggggcaggggaggggggctgagagcatgggacagaggcagagggcactcccctttcc

SEQ ID NO: 235582 - DNA, 356 bp, Homo sapiens
aggaagagaaaggcatcacaatgcctctgcccttcctccacccatgcagccaaagtcctcatcccccaagagagtctggtgtactggagagaagtccaggtttctcatcccattcctaactggctatttgaccctgggtaggttatttcccaatgagattttaaaatgacaattaatgtaaagcacttagttcaagtgagttttcattaagtggtcactattattgttttattactactgttattattattgtattattaatactgtggaaagagtggtcagcaagatttaacgaaataatgtagccaacgcttctagcatagtatctgacccatagtgggtactcaatgaatacg

SEQ ID NO: 235583 - DNA, 843 bp, Homo sapiens
caaatacggaatctgcagataacgaggcctgactaatttccaatgactgcttttatcccttctagtagaggtaccggagtaaaccgacctctgctagtttttggaatggtgagggtgtgtactttcagtggccgagtgtaacttcctcctgcctgctttttcctagtgtggaagccagctctccaggccacggaagtcctctgagcagcctgttaccttctgcctcagtgccagagtccatgacaattagtaagtactttcgcagccccctccaccagctctgggatgacttctggcccacgtctcatggcggtgcctttgtgcttctaaccctgtgactgtgggttcacgtcaggtgtgtacgtccctggttgtagactggaggtgtggtacgtgcttgtggatatccagaaccgtggttaatgcgtggcgcttgggcgtgtgcgcgctaaagggcgtgcctcaggatggagcagccttgccgtagacttctgtggttccaggttttggggtttgcctcccataatgcagttagctacagaggacctattctagttggatttcctttgtaactctgaaggactcatttttgtaagtgaagaagaatatgtctctccaagatgattaaactttgctaatgatcaggcttcaactgtttccaactttactacctagaaaaagtattagagatatagcaaggaagactaggtttgaatggctttgtataacaaagaataaaccaactgttatgtaaactgacgggtgctcctggtatctcactggtggcttgagccagcatttgtcccatggcctcccctggaggcagagggggcacttgttccc

SEQ ID NO: 235584 - DNA, 593 bp, Homo sapiens
agtgaagaggtgccagaatccgcgaagagggtcgacgaatgcgctgccgcggagggccgtggaagaacttgccgatggagggaccacagagggatctatgggagaacaacggcaactgcaggagagtgggccaaataatcatggcaacaggacttttagaagcacgtcctctgaaagccattttctgcctgtggttggaaagggactgtgagtctttcctcaggaagtcagtagccctacctggtgaggtgatcaagagtttgctagcacaagaaatgaagcaacaatggccatgagggattcaaggattatgcgtctctgcaccctacaatacaccagctggcagttccatcatttgaaagaaaatcttcaaggtaaagacatttacaatgacacaaaaacctttcaaaggcatcatggtcctaaagggctttccccaagggacagcacagtgtgttccaggccctgacaagaggtttaagacctgtgacacagactgaagctctcctggcatactctgaagctctcctggcaccctcccctttatgcttcacaggtgtttctcctaataaatttcttgtatgtctcatccc

SEQ ID NO: 235585 - DNA, 713 bp, Homo sapiens
  misc_feature (649)..(650): n is a, c, g, or t
  misc_feature (674)..(674): n is a, c, g, or t
  misc_feature (706)..(706): n is a, c, g, or t
agtgaagaggtgccagaatccgcgaagagggtcgacgaatgcgctgccgcggagggccgtggaagaacttgccgatggagggaccacagagggatctatgggagaacaacggcaactgcaggagagtgggccaaataatcatggcaacaggacttttagaagcacgtcctctgaaagccattttctgcctgtggttggaaagggactgtgagtctttcctcaggaagtcagtagccctacctggtgaggtgatcaagagtttgctagcacaagaaatgaagcaacaatggccatgagggattcaaggattatgcggtaaggtcttatgaaacacttaagagctacataaggacctagactttaggtttgctccacaggaccacacttccagttctgtttcacttccagattttcccagttttccatgccttttctctggtgatggcagaagaagcactgagctgattcaagggcaggcaggagaggagaaagccaaatcaagagcctgaataagcaatacccagcataatttcattgaccacattcagtctatcagtcttttgggaaatatttatatttttccttctccctgcctttgtcaccaagaataatctcttaggaaaggcagccaaaccacagcacaccttgnntcttttgggagtttgcttatcctnccatttgaaagtatgtgagttgttctatttgngtctgtc

SEQ ID NO: 235586 - DNA, 472 bp, Homo sapiens
ggttctctcctcttctcagtttactgttggatttccctttcttgctattctctttctctccagacccctctcaattgcctttcctaaagacagaccttagcaagatgggccaggacttgggacttcgcacagcaccctgcagtcccaagccagcatctactgcaccccatcttcaggactctatcccccaaacatgctggaaggcatcagcttatgagaacccacttttttctgcatgactagcttgtaaggaagaatctatggacaggatttccaagaatttcccactttttcaaaaaatgtatgtgacttatatttggcttcaatccaagagcaaactcagtggtgaacagctccatttctgtgcacatgttggtggaatctgcagaaatcgatgcaacatttctttcctgtctgggctgtttgtataattgtatataaatgtagcaataaatatattctaacatcaaac

SEQ ID NO: 235587 - DNA, 464 bp, Homo sapiens
gaatcataagagatggaatatgggaaatgccagcaatatctaaaagagaaaccaggacaaagaaaatccagagtgttttgcaaagaaggcaagggtaagagcatgtagagttggaattcgtgggatcagcagtttgcaattggctgcccttacaaattagggaacattgaatatatctggaccagaggactaagaaaagttagcaaagtggtacatggtagagatagttattcagtacatcaagtaatttgtattttcccagattgatgaaagtgtcttcataaccacaagaatgaaaaacatgtatgaaactatggtttttatgtgactaaaagttgacagaatatcaaatgtatctaaattgaattatctttgatcatgcctgggcattcagctgagctggtgatatttggatgagtaataaaataatgacctgattaataaattatcatatatttttccat

SEQ ID NO: 235588 - DNA, 596 bp, Homo sapiens
cggccgctccaacatcagctaattaatccacgccctgtgccctgtgaggtagcttaagtatgagtaagattaaagttgatctcttttgaaagacttttcacacaatgtgctctgttcagggcaggtgacaggctgtgttgtaagcatgttggtttccgatgaactcatactggctgcacagaatcatagttggtcttgcaccctgaaatattacacataggaaaacacgcagcattttcaaatggtattcctaggagagacccagagagtctggttgttcgaagtcgttttggaaggcagctgttgtgtgttgcacgctgtgccccttcttccctgagcggaggtggagctgtgtggctgtgtgagtggcacatgagtgctctccccttgagctttgggtacagcctgatgctggcagttccctggcaggtctttccattacattcggagcatttgccagtaagctctgaggaagaacttgagtggcccatggtccctgcttgtttggaaggcctggagggtgggtatatgtgttgaccagtctctgaaggaggcatatatggggaagtaacatattagagttgactaaaataaag

SEQ ID NO: 235589 - DNA, 650 bp, Homo sapiens
ggtcactggctaataggcataagaattaaagaccgaattccagtaaactgtgtttcacgggtgagaagggaagggagaaggaaaagaagttaatagaaatgaggttgggaggagacatgtgctgagaccagtgagtaccagagtcttggagactcccggaagctcagagagtgtctgtcccaagctctatcggagatcccatagtctggttgttccccctgtggatggacatcaagactgctgcccatttttcactgtttcgagcaatgcagaaacaagcattgtatgagcatcctggttctttgtgcacaaacatatgaatatatttcttacccgtgacaactaaaagtggaactgctgggtcttagtggtaggcacattaaaaattttaatagctacttccaaattgccctcccacaaggctgtcccggtttatgcttttacccccacctgtctttaaacaagtttatggggactgtaaagtatttacacacacattcaaacactcaggctggtttctccatatggcttcagagagagcaaagtatatcccctgaaacagaagtgcatttagtaaaagcctcagagaacctgggttaggctgctagtttaactacactcaagggtgtaaatgaggaggtgggtatctg

SEQ ID NO: 235590 - DNA, 436 bp, Homo sapiens
gaaatcagtattttcttttgcaaccactttaaaggatatttagaatgtatgttgtaacatgcctaacttcatcctgtgtcatccctaagtatcgttgtattattagatctcctcagtaggaaacataaaactgaatgttaaaaataattttttacttaagatcacaaaatttactaattttaacctttttgcttgcctctggatggtccatcttaccaagctaaacaattatttatttttagcttggatttttgtattaatttagtaaagtttttactgaaaatatatatttaaatagtctatattaatagcagactaatagagattttcgagtgagtggtttactcttccaagttctgtagggcaaaatgcatagagttcatattactaataatgaatttgttgaatgaatagttagatgtattaggacagtttt

SEQ ID NO: 235591 - DNA, 363 bp, Homo sapiens
aaggacaaggtcagacagacagagacaaggaggtgggttgacacatagacacagataaagaaatgaagacaccatgcctgtaatcccagcactttgggaggctgaggcgggcgcatcacctgaggtcaggatttcaagaccagcccggccaacatggtaaaaccccgtctctactaaaaatacaaaaattagctgggcgtggtggcacatgcctgtaatcccagctactcgggaggccgaggcaggagaatcacttgaacctgggaggcagaggttgcagtgagccaagatggcgccattgcactccagcctggccaacagagcaagactctgtccaaaaaacaaacaaacagacaaacaaac

SEQ ID NO: 235592 - DNA, 256 bp, Homo sapiens
gagacagagtcaacctctgtcacccaggctggagtgcagtggggcacgatctcagctcactgcaacctccaccgcccgggttcatgccattctcctgcctcaccctcctgagtagctgggactacatatgccatggaatacagaattttgtttaatttgactcattatattttaccctttttattcagaaaaagagagagctcccctcccaaaataaaataactgccatactatctttcattgcccttcaaaactc

SEQ ID NO: 235593 - DNA, 354 bp, Homo sapiens
atttattgtcacactgcaaatatggcaagtgtgtgatacaaaactgaactcgtaccagttctagggcacactcatgaaatcagctgtttgagtaagactctaagatcagttctcatcaactcacaaagctttcatatttactggcaaagagttggcaatacacacaaatgctgtttttaaaagtagctagaggctatggttaaatataaatgaaacagtgtaataaagtggtcagagaaagggatgggtgatctgaatgccagcgggtggaagctgagggaacccttctgcaatggagacccttaccccagggctcctccacctgaaagaattgtcagggtttcagatcagcta

SEQ ID NO: 235594 - DNA, 402 bp, Homo sapiens
tcccggccattgagcaagctcctttcccttccacatgtccttttctccccagagccagcccctttccagttaaggaagagaacagaagaccccatggactctaccctcaggcaggagacacccaggggcccctgtgcgctaacaaagagaggcacattgttctccgggtggctggtgtctcaaacacttggagcgcaggggcacagaactccaggttctaggaaccagagcggaagaaaacaggtggtggaaatggcctttctcagaactgcagtgacacaccagccagagctgaaagccacatgctggcccactgggagggatccagacccccacccatcccaggaggcccctgctcaggctgtttggggtgtggccgaaggcttactcagcctctgcaga

SEQ ID NO: 235595 - DNA, 453 bp, Homo sapiens
gttgaacttttgtgaaattgtgttcaacaggagaacattagggcgtggctatgagtgccaggtctgctcctagcaacaccaaagcctagctggtagtaccacatgagctcccagaagctagggtgctctttctcaaacaaaaaaatcagatgtgccagtgaaacgttgttggtctgcaatttgttttcataattaacactggagttctgtgaatatactgtgttactaagcaactctgcttttgcacgtgctgtttggtctgcctagattgtctatccagttaatgatttttcttctttaccattatactgtctatatctgttagctaccctactgttttctacatccactggattattattagctccataaaccaagtgttttaatcctttctctcccaacacctagcataacacatatagtattcaataaagtggctgttgaattgcactg

SEQ ID NO: 235596 - DNA, 393 bp, Homo sapiens
ttttttcatgtaatatgtcctgaagtttgttctgtactagcatgtagaggtatttatagctgcaaagtaccccactggtatatgtatcataatttgactggtcctctgttgatagacactcaagttctttttaatttctttttgtttttacaaatagtcctgaaatgaatagcctgtgtatacattttttatcttcaccaatgttatctgtgggatggattcctagaaatggaattgctgggtcaaaggttatatttcactttgtgtggtagctatttgttaagccactattttaagtggcaaggaatggcctctgaaaatttccctgataccaagattcgtctctttttttgaacttgtttcttatcagtaaacatgaaactgtatattatt

SEQ ID NO: 235597 - DNA, 251 bp, Homo sapiens
attcctagaaatataacctttgacccagcaattccatttctaggaatccatcccacagataacatggtgaagatggattcctagaaatggaattgctgggtcaaaggttatatttcactttgtgtggtagctatttgttaagccactattttaagtggcaaggaatggcctctgaaaatttccctgataccaagattcgtctctttttttgaacttgtttcttatcagtaaacatgaaactgtatattatt

SEQ ID NO: 235598 - DNA, 428 bp, Homo sapiens
agctgtatctcttgcccgcctctgtaactgacagctctcttcttaacgcttactatgtaagaaggtcttaaagtttatgtagagcctccagcaaatcagggaggagagaggggcatctgttgaactataaggtggtgaacacatggccaggcgcggtggctcacacctataatcccagcactttgggaggctgaggcagggagattacttgaggccaggagtttgagaccagcctggccgacacggccaaactccgcctctactaaaaatacaaaaattagctgggcctggtggcttgcacctgcaattccagctactcaggaggctgaggcacgagaatcgcctgaacccaggaggcggaggttgtggtgagccaagatcacgccactgcactccagcctgggcgacagagctagactctgtcttaa

SEQ ID NO: 235599 - DNA, 640 bp, Homo sapiens
agttttgctctgtggcacgatctcagctcgttataacttccattgccagggctcaagagatcttccctcttcatcccaagtagctgggactacaagtgtgcatcactgcaattggctaaattttttgtatttttggtagacacagggttttaccgtgttgcccagactggtctcgaactcctgaactcaagggatcctcccacctccacctcccaaagtgttgggattacaggcatgagccaccacacccagccctgaccctatcttctttttgttttttttgtcggagtttctattctctgtttcattttttgagatctatggatgtgaataagcttcctgccgtaaagaagacatcattatttatttctgtagcttttgtgtactaccatggagatgacatggagcatcagttgaggggtcctgtagagtgacagctagcagatgggtagaataactattattagtgctgcttctcctctctgtcagttctcatagcagacattgctaattgatcacagtactttttctcagcaagcctgactgtggcctatgaatcttcctctcaaggagtgccagccactgataatcgatagcacttgactgaaatgtatttcccctcccttctctaattgttgtg

SEQ ID NO: 235600 - DNA, 434 bp, Homo sapiens
tagtgtaatgtcgattatggtccctggtataggtgcaataactgatcttattttacataacattaaagaggaacagcttttcttttatactgtaaaagaaaaattagaccagaccaattaaacggggaaggaaaaatttattcaagactattgcaataggaaagggagattgaactcaacaaaaggcaagaggattttaaatgctaaagagagctaatagaaaagtaagatagaatgggggaggtgtgtctgtatgattaggctatctgtgtttgctaattggcacttatctaagctaggttcttactctcccacagagtctgggagaccaaggctctgtctttctggatgattacatttcaaagggatggctcacaggttcttgaggaagatatccctagtttgtaaaagatttacatctcaaagagccagag

SEQ ID NO: 235601 - DNA, 945 bp, Homo sapiens
accaatcagtgatctccacattgcagcccattccaacactcttaaaaacccctacccccaaatgcctcagggagacagatttgaggtttcttctcatctcatttagtgaccctatgattaaacccctttccttgctacaacctggtgtctcagcttattatttgctgtgtgcatggggcaatgaacctatttcagttacacttgtgcactgttggcaagaaggtaaaatggtacagccactatggaaaatggtatgaaagtttctccaaaaattaaaaatagaattctcatgtaacccagcagtcccacttctgggcatatatatccaaaggaagtcaaattagtatctcaaagagacctttgtacacccgtgttcgtaatagcattattcacagtagccagaagttgggaacaatccaatgtccattgacagatgcacagataaacaaaatacggtatatacataacaatggaaaattattcagccttgaaaaaaactgaaagtctgacatgtactataacatgagtgaaccttgaggacagtatgataagtgaaatgagtcagaagcaaaaagacaaatattgtatgattccatttacataaggtacccagagtagtcaaattcatagagatacaaggtgtctgctggaatggcggttgccaggggatgggggaagggaaaatgggaagctgttgaaatgagtccagagtttcagtttggaaatgatgacagagctctggagattggttgcaccacaatatgaacatagttaacactatggcattgtacatttagaaatgattaagatggaaaattttacgttagatgtattttaccacaactaaaaatttaaaagaaagaaaaaaacagctatgaagatttctaagtcttgggccttattttgccatgaggaaaaataaatacatcccataaaaaaaatcct

SEQ ID NO: 235602 - DNA, 687 bp, Homo sapiens
acaaactggcaagacgacataagcattgtcttatggtccttcagttaaaaaaaaaattgtgtaaaaacaaaaatggacaaagacccattaatttcatggtggttgtagtgggttgaaaggtggccccctaaaatgtatgtccacccctggaaactggggatgtgaccttttttggggaaagggtcttttctaatgtgattaagttaaggattgcaaaatgagagcatcctggatttgggtggaccctaaatcgaatgttatgtgtactgagaagagaagggagaagacagaggagaatgccagatgaagacagaaacagagattgaagttatgtggccataattcaaggattgctggcaacaccagaagccaagagaaagatgaggaagaattctcccctagacctttcagaaggagcgtggcccagccaacaccctgacttcagacttctggcctccagaactgtgagaataaattcttactgttgtaatccacctgatatgtggtaatgtgtacatttcagtgggttttagtatatatacagaattgtgcatccatcaccacaattttagaacattttcatcacccacaaaataaatcttaaacccagtagcagtcactccccctttcaccctccccataaacccctggtaaccattaatctactttgttttatggattttgcta

SEQ ID NO: 235603 - DNA, 507 bp, Homo sapiens
gggtttggcagttcactcaccaaggtgatctgatggagtgcacttcgcacgattccaagtacttgcctaatgttcatcctttcctctagacgggagaagggagaagacagaggagaatgccagatgaagacagaaacagagattgaagttatgtggccataattcaaggattgctggcaacaccagaagccaagagaaagatgaggaagaattctcccctagacctttcagaaggagcgtggcccagccaacaccctgacttcagacttctggcctccagaactgtgagaataaattcttactgttgtaatccacctgatatgtggtaatgtgtacatttcagtgggttttagtatatatacagaattgtgcatccatcaccacaattttagaacattttcatcacccacaaaataaatcttaaacccagtagcagtcactccccctttcaccctccccataaacccctggtaaccattaatctactttgttttatggattttgcta

SEQ ID NO: 235604 - DNA, 533 bp, Homo sapiens
tgtcatcttctgcctgaagcagactgcttctgtgtttaagaaggtggagaccctttttctatcagttttcctttgagcagtaacttactatagtggataaccttgacttacccggtcctactctctgctgtaaaatgtacataagtagagtccctcaaccctcttcatgagatttcggatggttccaatggtcagctcttttatgctgattgagaagtccaacttgcatagcagtgcagcttcatacctggcattatacacacgcttaatcccacttttgctgaagaaagagacagcattggcaggcagaacaagtcctgtagctttgggacaaaagtggctgagtcttgagtcttgtccccaaaggtcttaccttccttatccactccaaagcagaagttggcatgcagttgaggcaactaaccaaatatcgagagataggagtttttcaggtgtccaccaatgggaaactggttgaaatgaatttgagtgaattatggtagagtcacatagtgaagtgctatgcagccata

SEQ ID NO: 235605 - DNA, 857 bp, Homo sapiens
tgtacttgtgattgtcaagatttattaaaacatatttttcccattcatttgctacttagacatctccagcaaagactcctggaaggtggtatctcagctgctatgtcctttgcttcccatggcatgaagcagaggactgtgccagttgatgatgcccaataaatacccactgattggatcaatgagtgagagtgggaatgagtcagactttggagtggttacatcatcattttgaagagactcagttcagttttgggtgccacattgtaaaaagcaaatccatgttttgttgctggatgtttcctggttcagggtttaggccaagaaaggcagaggaggagcagtctattcccatggtggcagcttgaagcagttactcctgtgggtagatcagtccaggcacttctttcctgggctttgataaagttgagtttaatgttgatgcaattttacatatcttatttacctttactcttctactaaaactgaatagcccatatagatcacttttgttaaaaaaaaaaaacaggctttcataaaatataatttgcacaccagaaaatctaacacttaaaattcagtgatcttagtgttatgttactttttaaaaattagcatagcatacggaacctacaattggacactctaacccattttaattgtacagttcaatggcattaattacattcacaatttccctccttttattttagctcatttgaattttgagaacttagtttagagaggtacatagaaaatataaacccaaggagagagggatcaattctagttgggttctaactatagaaatatctaaaaatatttgatgaatttttgtagaatctcttttctttttc

SEQ ID NO: 235606 - DNA, 259 bp, Homo sapiens
tcagcttaagctgtatttccatagtcatttaaagcaacataacatgtttttaatatatgtgctttttccctgaagtcagaggagttcaggtaaatcaagtgagccccatagtgtcatctctaattagaacctgtagggttttatttatttatttatttattttgatagagtctcactctgtcaccagcctgaagtgcagtagtgagccgagattgtgccagtgcactctagcctaggcgacacaatgagactccgtctc

SEQ ID NO: 235607 - DNA, 280 bp, Homo sapiens
cctccctccctccctccctctttcctctctccttctccctctgtccctctccctctctctccttccctccctgttttcccctttgcacctcttctttctttgacagggtcttgctttctctgttacccaggcttagtgcagtggtgcgattatacttcactgcaagctccacctttcaggctgaggcaggagaatcgcttgagccagagaggcaaaggttgcaataagccaagatagcgccattgcattccagcttgggcaacaggagcgaaactctgta

SEQ ID NO: 235608 - DNA, 197 bp, Homo sapiens
taaaaaccagtgtaacattttattctaagtcagaagtaattactgagctgtggttttgtgttctgtatgtataatctcatttattgacagttctaacctagtaatgaaagtgcaacaggagaattataaccagaaacatctaactgttatattatacatacatgtactgtttaactgtaattgtgaaaatgcatttt

SEQ ID NO: 235609 - DNA, 691 bp, Homo sapiens
cttagtatcacagaattttgagtcagggttcaaattttcaattatctccaaatttatgacatagtttaacatgtttttctaacctatctctgtagtttctgtaagtcggaagttggatctaaactctggatcaagattctgttttgtgtttttgttcttgttttttattgatgagattatgtcatagctatattcgttcttcctttgaggaggcatataatttctcactttcttttttgtgatgcagttcacgcttaatgtctagatccatttgctcattattagttcagatgttcaaattcttgatttattacctggaatacttctaccaagagaatttatggaattaaataattttgtatgttttaattcactttagttcttattaatgcctgaattgttccaacttagaccagtgggagcctattcaagttttattctgagtttttctatagatctagtagtctttaacagctttattattatcagatatgataagatggtccagacttatcttgtatatttcatgactcaggcctgaatcagctatttcttcaatgacccttaattcctttcagaaggaaatagtgtttagagatgcacaatctgggcactagggttgtccattgctactgggttggttggcttccttccttcctcgcttcctcccttccttcctttcttgagacca

SEQ ID NO: 235610 - DNA, 401 bp, Homo sapiens
gactgccgtgagctgagatcacgccactgcactccaccctgggcaagacagagcgagactccgtctcaaaaaaaaaaaaaaaaaaggcattctatattacaaaataactacagaagcttttgaatattctcatcacaaagaaataaatgcatgagatgatggatatgctaactgccctgatctgattattatacaacatatatgtatcaaaacatcaagttgcaccccacaaatatatacaatgacatgtcagtaaaaaaaaaataataaagaaatgtgccagatgggcctgtactgacataggacaatgtctgagataaactggcaactgaaaaacagaggttgcaaaacaacacctaaaataaaacccagttcctgtggggaaagatagcagacatatg

SEQ ID NO: 235611 - DNA, 547 bp, Homo sapiens
gaaatgctcagagcgtcatggagaagccagcacaaccatgagccccagagggcctgctgaaggccagcccaggggataggaccagtcagacaaggtcctgctgttgaggagccccagtctagatcaaaaggaggtaaacagcctctgggacagtgaatggaaatgggagattgaatcagagccccagataaccagaggccaataccatcccatggtccacaagagtccctgggctgaatgtcaagggtgaatgaacacagggcaggcatgttcctggggatgctcctcaaaggaaacagaactgggagagtttgagaggagaggaggggcacctctaacccacattttcaggtctcctgggtccactgtgctgtgccctttgtcaccagggcagcaaagaccctggaggtctgctaacagccaggaatccactctgaggagggcaactccccaagcctgcaggctgggtagagctaattaaccacacaggaaccagaggcatgttgatttaaatctgtggaaagccatagctcctgtggtttctaca

SEQ ID NO: 235612 - DNA, 542 bp, Homo sapiens
  misc_feature (394)..(394): n is a, c, g, or t
cagacatatgtctttaagatagcctttttgatggcatttccatgcaaattttaaatcaaggttgataccattatcagacaataaacacttgtggttttaatcttcatgattttgactctttggaaaagatcttgatgatccatgaaatttttaaaaaagtattatcaaacctcatctctaaaaatgttgtggtggccactccacatgtctctgtcctttctttttctacattcatttcccaatcaaatgacatgacttcaaatgcaaaaaatgtttatcatttcctgaaattattacttagctagttaattctcatatctttatttaacctttcttatgtttctgcaatgttttctcaattatttttaatttcttctgaagccggacttcatantattgatactctgcatcatcattcctgattcaaagtgaagtactctaagcctcccacaaagcttctgtccattcagttcattcatgcgttcattaatttttctacttcatttatttattcatgcaataaatatttattgagtacgtat

SEQ ID NO: 235613 - DNA, 984 bp, Homo sapiens
gccaagcctagcccaagaccaggtgaaaggagaggggaggaggagccacctgcaagagatggaaagagcaggcggcagagggggctggcagggaggggctgttaagagtggggttggaggtgggagagaagctaggacaagggagatggagaaaggacctatacctggctcacggaaggccttcaggtcactacacgttgaacatccccagtgtttgagcccccaaagctagggtgcaagagcactgccatcgaatgccagtgggtgaggccaagtgagggtatttgcagctctagacataaccaagaagcgtaaaggtgagttgtttggtggtacgactgcctgtgccttcttccgatggcactggggtggctgaaggaacagacatctttgggtttcgtcagcctcctccaagactgctgcagtgcctacactttagacttcagaaggagactaaagacttctagaatttagaaggagatctgaagtctcctttctggagttacaacccaaaggatgttagcatttctcaggtcatcccactgcaaagcccagaaggcttggggctcccaggctgctctgaagccccactgtctgaccgcctcagggcttgctacgagggactggggcacggccaagctgactaggaacagctctcgtgctcctgagggacctggaggatgggcctgcctcccagccattgagctggattctgggataattcttaactcgaaataaggggaagcatccatcagggaatgctggcctttctagagccacgtagaaaacaattttctggttcttcaaacctcaaagagtccttggtccaaaaaacagaatgttttggcttcgggtgtcaaaaaaaaaattttcacgatgtcagaaatagtatgtttttaacaatagtaatagctttgtaaaaaaataaaaagctttaacagcgaggccataaacaatgaaatgaataaaaacggtggtcattca

SEQ ID NO: 235614 - DNA, 1065 bp, Homo sapiens
gccaagcctagcccaagaccaggtgaaaggagaggggaggaggagccacctgcaagagatggaaagagcaggcggcagagggggctggcagggaggggctgttaagagtggggttggaggtgggagagaagctaggacaagggagatggagaaaggacctatacctggctcacggaaggccttcaggtcactacacgttgaacatccccagtgtttgagcccccaaagctagggtgcaagagcactgccatcgaatgccagtgggtgaggccaagtgagggtatttgcagctctagacataaccaagaagcgtaaaggtgagttgtttggtggtacgactgcctgtgccttcttccgatggcactggggtggctgaaggaacagacatctttgggtttcgtcagcctcctccaagactgctgcagtgcctacactttagacttcagaaggagactaaagacttctagaatttagaaggagatctgaagtctcctttctggagttacaacccaaaggatgttagcatttctcaggtcatcccactgcaaagcccagaaggcttggggctcccaggctgctctgaagccccactgtctgaccgcctcagggcttgctacgagggactggggcacggccaagctgactaggaacagctctcgtgctcctgagggacctggaggatgggcctgcctcccagccattgagctggattctgggataattcttaactcgaaataaggggaagcatccatcagggaatgctggcctttctagagccacgtagaaaacaattttctggttcttcaaacctcaaagagtccttggtccaaaaaacagaatgttttggcttcgggtgtcaaaaaaaaaattttcacgatgtcagaaatagtatgtttttaacaatagtaatagctttgtaaaaaaataaaaagctttaacagcgaggccataaacaatgaaatgaataaaaacggtggtcattcagtcaacggaacttatttgttttggaacacactgtttttcaactctgctgagtgttttgaaaaaatgaactattgtttttcc

SEQ ID NO: 235615 - DNA, 447 bp, Homo sapiens
tctaggtagagtcaatgcatagtctggcaggtgggtcacaggctctgaatcctgcaactgagtccccaccctgcctctttctagctttgggatcacagctatcatcatttctccatgtttctttttctccatctgtaaggtgtaatgaaagttttaggtgataattgtggacttagcatatcatatcaatttctccttagatggatggcaaaaatgtccatgaccatattctccccatagaaggttcgtttgcctacatggaaaatatgggaaaatatggggtttagtgtagtccccttcatcaacaatctcagctagatcttctggagaacttgctgcagcttctccatcagcaattgctgtttctccttgcacgtttatgttacggagacggctcctttccttaatctcttccaacttttgtttgcagttgtctcacccctctca

SEQ ID NO: 235616 - DNA, 565 bp, Homo sapiens
cctccctcactctccatgctggcagagcaggagggagactgaagtaagagatggcagagggagatggtggcaaaaaggtttagatgcaggagaacagtaagatggatggttccggccagagtcgatgtggggaggaacagagggctgaagggagagggggctgactgttccattctagctttggcacaaagcagcagaaagggggaaaagccaatagaaatttccttagcttcgccgccaagaactccaccactgactgtgtctcagacgacatgaagaaatgaagaggggatgtttacttccttaaagtatgataattgctttggggtgaagttagagaaaggaatccttgttgccaaaggattcatgcatgaaagaacacactgtctggtgcttgctttaaaactacccacgaggagtggggtgacacagaaatgaccaaggctgactttaagttggagccgagtcataggtagttgggggcttatgttatgatcagctctacttttgtgtttgaaactttccacgataaaagtgtttacaaataaaaatgaatgccaagcaa

SEQ ID NO: 235617 - DNA, 863 bp, Homo sapiens
gatgtttctctttccccagtcctcacatccaatttttcatagccaagtttttttttatcatttgaccccacctaacattcccactgaatactcctgccagactggaccaatagctcttcactggcctcctctgaactttttcaggtgatattccttctgcccagaacagcttacagtaataataggttaattttttttatgagtgtgaagataaagtcacagtgattctcctttctctgggaattgctcccaacaaatggctgtgcttactgtcaccatgtctgtagttggtgtgactctgttctctgtttacttcagaagaggatatctgactcaacaagacaagtgaaatttgctagggtattggaaattttgaacccaaagacagattggaaataattggaaatcactttaggtcagcactggataagaagtaacatgtgtctcaggaggcatccttcagattgagctgggtgtcagcattcaattccacaaggctacctgtttaagaagaatggaaatatttcatagaaactgtttgcttggatgatgaagtaatggaggtggggtatgtgagaaacagtatgagagaagtatacattacttacgttgaggagcagtgtaataatattgtcatttatttagtctctcataactggtaaaataccttcatatccctgacctcgaagtggcagcactcatccagctacctcagagttgacaacatcactcatcagaccttacacataaaggatttcaaattgttttgttcactcactgctacatcccaagtgcatagagctatgcctggcacatggcaggcatccaataaatatttgttggctgactttaaagatgaagag

SEQ ID NO: 235618 - DNA, 726 bp, Homo sapiens
gatgtttctctttccccagtcctcacatccaatttttcatagccaagtttttttttatcatttgaccccacctaacattcccactgaatactcctgccagactggaccaatagctcttcactggcctcctctgaactttttcaggtgatattccttctgcccagaacagcttacagtaataataggttaattttttttatgagtgtgaagataaagtcacagtgattctcctttctctgggaattgctcccaacaaatggctgtgcttactgtcaccatgtctgtagttggtgtgactctgttctctgtttacttcagaagaggatatctgactcaacaagacaagtgaaatttgctagggtattggaaattttgaacccaaagacagattggaaataattggaaatcactttaggtcagcactggataagaagtaacatgtgtctcaggaggcatccttcagattgagctgggtgtcagcattcaattccacaaggctacctgtttaagaagaatggaaatatttcataggtaatatgttctaatttctaatatgtcatatgtaatatgttcatttcttaggtagtttcttcctctaaatagctcttaaaatattttccttgataatgttatttatgatatttagcatttgttgagtgcactgtaccatgtgttgtgttaagcactaaatattcatgatgataattaaacctcacaataacacca

SEQ ID NO: 235619 - DNA, 453 bp, Homo sapiens
tatgtaccaggcgcccttctaggctcttggcctgcagtaactccagatctggcagctgcaccagggggtgggcattctgattaaccctgactttgcaggtgaagaaacaggctcaaaatagtgtagcgaagctttattataaagtcacacagctctgaaatgatggaaattgggactcaaacatgattgtctcacagcccagtgtcttaatatctgcctcaaagaacactgcccacagcatgcaggcttctttatgttgcaagaacagaaaaccccactggcttaagccacaatgcgcagctgattcaacacccagcaccccacttccaggctaattctaccaagacctggcttgaatgacatcattttctttctcagaaactcttcatgagtcttgctttattgtttagagcaggaaagaaaataaaccacaaaccctcagtagtcatttgt

SEQ ID NO: 235620 - DNA, 278 bp, Homo sapiens
caatgtctggacacatacaacatactaagattggatcaagaagaaatattaatagaaaacctgaacagaccaataacaagagatatcccctttacagatgatatgatcctataactagaaatacctaaagagtccaccaaaaaactcttagatgtaataaattcagtaatgttgcaggatataaaatcaacatacaaaaatcagtagcattcgtgttcaccaaaaataagctagctaagaaagaaatcaataaggcaatccaatttataatagctaca

SEQ ID NO: 235621 - DNA, 427 bp, Homo sapiens
actgagaaactgagtgatagtgatctgggactcctggtagaagccagtgcaaactctctggataaatagaccgtaaacccaggcctcctaggattctcaagattagatctgagcttacaatccaaaatttaaaaatacacaaataagccaccataagggagaaccagcagactcagcagacagcacaattaatatgaataggacttaagatattggaatttttaggtaaagaatatatgtagtgctatctatgagtgtttgaaacttttggagaaataagagatgaaatggaaaatgtgagcaaagaatatgaaactactaaaatgatcagacaggttttaaaaagaaccaaatagaaattttagaaattaaagtttcaatctttaaaattaaaagtttagtggaatgattttaattggcagattag

SEQ ID NO: 235622 - DNA, 450 bp, Homo sapiens
ttagtccattttcatgctgctataaatatactacctgagactgggtaatttataaagaaaagagatttaattgtctcagttctgcatgactggggaagcctcagggaacttacaatcgtagccgaagacaaagaggaagcaagatttcttcaaaaggtggcaggagagagagagtgtatggggacactgccactattaaaaccattaaatctcatgggaactccctcactaacacattgaggaacagccaccatgatccaatcacttcccaccagagggatccctcaacacgtggagattacaattgtagatgagatttgtgtgggaacacaggaccaaaccatattattctatcccagacacctctcaaatatcatgtcactctcacatttcaaaacactattatgcctcctcaggagtcccccaaagtcttaactcattcaagcatta

SEQ ID NO: 235623 - DNA, 502 bp, Homo sapiens
caaggtccacacagtgacaaaaatctctgagccagtctgaaaggcctagatgagatatttgaatattccctgcagtaaaatcaccttttaaccaaggtttaggccattatttggatgcttcataaaatgatttaaatcagagtttattcattgcctcctggtaagttcacaagtgactgagaaatcctttcatggtaaaattatgagagaaatgacacatctttgtggctgttttaagctcataagtggttataaggttgtagaaaagaaaaaaagaacatctcgcaaaaaaaaaaaaaaaagtggtctgacaactcaagttgaagttgttcacattaatgcacaagtttaagaggaaaaaaacctcagaatcagatgttcagattattcagtgtttacatgatcagagccctgactcattcccattcttttgggggatattttaaaggaaaaaaaaatggcaagagaaataatctaaaatacattcacacccataaaagaa

SEQ ID NO: 235624 - DNA, 424 bp, Homo sapiens
ccagttccggcccagcgtggtggctcacgcctggaatcccagcactttgggaggccaaggcagacagatcgtgaggtcaggagtttgagaccagtctggccaatatggtgaaaccccgtctctactaaaaatacaaaaattagctgggcatggtggcgagcgcctgtagtcccagctactcgggaagctgaggcaggagaatcgcttgaacccaggaggcgaggttgcattgagctgagatcgtgccactgcactccagcctgggtgacagagagagatgccacctcaaaaaacaacaaagacaacaacaacaagagcaaacttcccagttctgctacactcttaaggcaagttactaaacttttctaaatcttcacttcctcatatgtaaagtggggatcacaatattaaagcctataaaagg

SEQ ID NO: 235625 - DNA, 2214 bp, Homo sapiens
  misc_feature (1047)..(1047): n is a, c, g, or t
  misc_feature (1253)..(1253): n is a, c, g, or t
  misc_feature (1834)..(1834): n is a, c, g, or t
  misc_feature (1999)..(1999): n is a, c, g, or t
  misc_feature (2063)..(2063): n is a, c, g, or t
atacaagaaaaaaatcacatctttatgccaataccattctttcacaatactagaagaacagattcagagtagaattacataactggttggttacattttgcatccagtgagtaacaccatcatcttcttagtttctatatcaatttatttatttatttatttatttatttttgagaccaagtcttgctgtgttgcccaggctggagtgcagtagcacgaactcggcctcttcagtggccagtaccacaggcgtgcaccaccatgcctggctaatgttttttgtatttttggtagagacgggatttcactatgttgcccaggctggtctcgaactcctggcctcaagtgatgcgtccgccgtatctcaaaataataagagctatttatgacaaacccacagccaatatcatactgaatggacaaaaactagaagcattccctttgaaaactggcgcaagacagggatgccctctctcaccactcctattcaacacagtgttggaagttctggccagggcaatcaggcaggagaaagaaagaaagggtattcaattaggaaaagaggaagtcaaattatccctgtttgcagatgacatgattgtacatgtagaaaactccatcgtctcagcccaaaatctccttaagctgataagcaacttcagcaaagtctcaggatacaaaatcaatgtgcagaaatcacaagcattcctatacatcaataacagacaaagagagagccaaatcatgagtgaactcccattcacaattgctacaaagagaataaaatacctaggaatccaacttacaagggatgtgaaggacctcttcaaggagaactacaaaccactgctcaaccaagtaaaagaggaccaaacaaatggaagaacattccatgctcatggatgggaagaatcaatattgtgaaaatggccatactgcccaaggtaatttatagattcaatgccatccccatcaagctaccaatgactttcttcacagaattggaaaaaactactttaaagttcatatggaaccaaaaaagagccngcattgccaagacaaccctaagccaaaagaataaagctgaaggcatcaccctatccaacttcaaactatactacaaggctacagtaaccaaaacagcatgctactggtaccaaaacagagatacagaccaatggaacagaacagagccctcagaaataataccacacatctacaaccatctgatctttgacaaacctgacaaaaanaagaaatggggaaaggatgccctatttaataaatggtgctgggaaaactggctagccatatgtagaaagctgaaactggatcccttccttacaccttatacaaaagttaattcaagatggattaaagacttaaatgttagacctaaaaccagaaaaaccctagaagaaaacctaggcaataccattcaggacataggcatgggcaaggacttcatgactaaaacaccaaaagcaatggcaacaaaactcaaaattgacaaatgggatctaattaaagagcttctgcacagcaaaagaaactaccatcagagtgaataggcaacctacagaatgggagaaaatttttaccatctacccatctgacaaagggctaatatccagaatctacaaagaacttaaacaaatttccaagaaaaaatcaaacaatcccatcaaaaagtgggcaaaggatatgaacagacacttctcaaaagaagacattcatgcagccaacagacacatgaaaaaacacatgcacacgtacattgactgcagcactatttacgatagcaaagacttggaaccaacccaaatcaatgatngactggattaagaaaatgtggcacatatacaccatggaatactatgcagccaaaaaaaggatgagttcatgtcttttgtagggacatggatgaagctggaaaccatcattctgagaaaactatcacaaggacagaaaaccaaacactgcatgttctcactcatangtgggaactgaacaatgagaacaccaggacacagggtggggaacatcacacactggggcctgtngtggggtggggggagaggggagggatagcattaggagatatacctaatgtaaatgacgagttaacgggtgcagcacaccaacatggcacatgtatacatacgtaacaaacctgcatgttgtgcacatgtaccctagaacttaaagtataat

SEQ ID NO: 235626 - DNA, 447 bp, Homo sapiens
tggaagagaggagaggaggtttcagaagggcctttggatggctctcctccatatcgccttgcccaggacctctatgtgggccaccttggggtgcgtgtggacatgccttcccttccacggttggaccagtcctgacaagcgctgcggggccaggcgtcacaggactggagtcacccgactgtcgcagcactgccacctgctggctgcaggagaaaatgcagaattcaacagagagtccacacttgttaaagaccagcttcagaaacacacaggcagagacccgcgcacacacatacctacatatacaccacagaacagagcccctccgaccctggctagaccacagcagcatctgtgattttgcctgtgtaacaactacagatgggttcgatttctcccttcaggggacagatgagattggagtgggggagaagaattaaaaaaaaa

SEQ ID NO: 235627 - DNA, 287 bp, Homo sapiens
tcatcactattttcaatccagatatactttacaaaaatgagaagggcttatttgcatttttatttacatattgaaagggaagcatctgatctcatcaatgattgccatattttttgaaaaagtaatcctatttcaatctttccttgtgtgaaatggccataataccagagtgcacttccctacctcacaggttaggattcaaagtgtgtattcccccattgtgtaaattgagtgattgtgttactacttgaaacagatgaagtaataaagatgaagtatgagatgta

SEQ ID NO: 235628 - DNA, 292 bp, Homo sapiens
cagaagagcacaaggctaggacattgaagataaagttaaatgatagtttctaccatttgaaagctttattcagaatctagatacacgagaaaataaataaagaggctcatgtttattaacatggtgagggagcaagaagccggggtatttgcataattagaaggagtggaatcacttgagcatcaagtacatatttttgttgtattgggacaacctcaaggtggaatttattattttattttattttattttgtttctttttcccgagacagagtcttactccgttgcccag

SEQ ID NO: 235629 - DNA, 424 bp, Homo sapiens
  misc_feature (35)..(35): n is a, c, g, or t
ttggggacggagtctcgctctgtcacccaggctgnagtgcagtggcacaatgtcggctccctgcagcctccaccttccaggttcaagcgattctcctgcctcagcctcccgagtagctgagaatggctgtggaataagcaagggaagcaatggtggaggctacgtctaggacctggatggaggcaggacagcagggatagagtggagaggtactgcgagttaaaatccacaggacttcaagatggaacaggagtgagaagtaggggagggggttatctagaaggactcccagggttccagcctacaggaatgatgatggaaccctctcctgaaatgcggagggccaggaggatccagcttaggatagggatgaaaacctgagttctgagtcagggccccgtcccacccctcccatcagccaggc

SEQ ID NO: 235630 - DNA, 719 bp, Homo sapiens
tctgtttactgtctgcagaaaccctgtccctccttcaagactctactcctgtgggaaaccctccccgacctagcattgtcatctgtatcagagtataactcttaccagttgctactggatatttatgactcacgctcttcctagagacttctagacttgggagggaaccttacagtcctctactccagctccctgattttacagatcggggacccaccattcagggctgataacaaactcaggtctcttcaccctcagtctgatactattttcacttcatcttcaacttttcatttatgcacgtctcatatctctgcctagagtataagcttttttaaagattcttaagggcagggatcatgtcttattcttactttgatgtccctagcatgtatcataaagcttgacccaaagatagaagttcaacaaatatttgctgatttgctgttctgcatactagggcgcccacagccacaggaatgtctccctccttccccatcatcacagttactatgccaccaatgccccctcccaagacctggcattgcttaccaccagccaccactcctactgtcatgactgccctggccagggttatgcctggcactgcttacagccagtgtgtggagcacgcagcagaacccagcttccaaaggaagggttgggggcagagttttttcatgttgttgttacaccacgactacagttagtattggagt

SEQ ID NO: 235631 - DNA, 505 bp, Homo sapiens
atatttacaagctacatatctgacaaaggactcatatctggagtatgtctcaaacctcaatgcaaaaaacattcaattagaaaatgggcagaagacatgagaaacattttaccaaagaggctatatgaatagcagatgagtacatgagaatatacttgtcattgttatctgttaaagaaagcaactaattctgcaactatacacctattaaaacaatataatagtggcagtaccaagtgctgtcaaggatgctgaaaaactagctctgtacattgctaatgggagtgtaaaatcgtacacctactctggaaacatttggcccatttggtaaactaaacattaccttaacatattttaactccatattacatatccatatgaataacatattaaatattcactttgagctttttttcagaggtatgaaatcttatgttcatgcaaatatctatatatgactattcatactagctttatttgtaataaactgaaactggaaacacta

SEQ ID NO: 235632 - DNA, 327 bp, Homo sapiens
gagagtttaaggtaggaaaacgtttgggaacagtaaaaaagcagccttggccaggcgtggtggctcacacctgtaatctcagcattttgggaggccgagatgggtggatcatgaggtcaggagtacgagaccagcctggccaacatggtgaaaccctgtctgtactaaaaataaaaaattagcccagcgtggtggcacacacctataatcccagctactcaggagactgaggcaggagaatcactttaatccaggaggcgcaggttgtggtgagccgagatcacaccattgcactccagcatgggtgacaaagtgagattccatctc

SEQ ID NO: 235633 - DNA, 596 bp, Homo sapiens
gagtgctgggattataggcgtgagccactgctcctggcacaaaaccattacttcttgttaactctagattttagaacatctgataagaagcctagagtgagaaagtcatgtgcatgcatacattttgtatgtttaaagtttatgtaggacggtgcggtggctcacacctgtaatccccctactttgtttgggaggctgaggcaggagaatggtttgagcccaggagtttgagaccaacttgggcaacatcgggagcctctggttctacagaaaaataaaaaaattagctcgggggtggtggcacatgcttgtagtcccacctattcaggaggccgatgtgggagggtcacttgagcccaggaggtcaaggctgcactttagtcttggcgactgagtgagatcctgtcttttaaaaagaaaaaaaaaaaagttgatgtacctgaaagtggatgacaagagtggtaacttaataagtattcttaagtatttgtaataataaaaacaaaaattataacttttattaagaggtcattttatttcctaccagaattactgatctgatttttctacttaaaagtaaggtgttacacccagtg

SEQ ID NO: 235634 - DNA, 576 bp, Homo sapiens
gataggcttactctggctaccatgatatcatttcattcatgtatttttcattaataattaaataccatcgctgctttcattcttaattcttagatgaaaacatgcttcttcatttgattatattgtttaatttttatttcgctctcctgttattcattacttaatatttcccttgaattatttagtctttttctaaggtgctgtaatttgcatgaaaaactcaacataaaataaaattgtcctgctttcaatgaccagaaaaaatgatttaaaagttcaggccacacacgatggctcacaccatgttggccaggctgttctccaaatcgtgacctcaggtgatctgcccacctcggcctcccaaagggctggcattacaggcatgagccactgtgcctggccaaaaattttgttttgagatgatctgcacacaggaatgaattgctcagaaataattggccgatgtcaaccacatatctgtttccgtggaaaatgcagcaacattacttcaaatagtttcatttgtgaatgtgatgaacaattttcagataaaaaaatacatatatatacatatat

SEQ ID NO: 235635 - DNA, 408 bp, Homo sapiens
ctcaacttgctatattgaatagactaatattgttgtgaaatatgaatgaatatgcttttgaaagtcagatgagaaatgtattttgccttctgaaatttgaacaattgccttgttaatacaaactggattggttggtgtagctaatctgacaaaagatgcaattggataaaacaataataaaaataataactaacacatgactcattacatgctaggcactgtattaaacacatatgacaacaggaggcaaaaagaggttaacttgctaaggtcaagcagctagtaaggagtcaaacccttactattcctatcttatttaccatccctctctattcctaaccaccgtactatctataccataatctaattaaccgctctgcagtgtctaccagcacttcccaagatttc

SEQ ID NO: 235636 - DNA, 623 bp, Homo sapiens
ggcaggtggatcacctgaggtcaggagtttgagaccagcctgaccaacatggagaagccctgtctctactaaaaatacaaaattagccgggtatggtggtggcgcatgcctgtaatcccagctactcaggaggctgaggcaagagaatctcttgaacccaggaggcagaggtggtggtgagtcgagatagcaccattgcactccagcctgggcaacaagagcgaaactcccatctcaaaaaaaaaaaaaaaaaagttaagcctaaaatcttggcttggctgatggagcatgtacagaaaaatgagagcactgtagggttcagacattttaaaaggttaaggaaccaaatccacaaggaaggttaacttcctttgaccctgagaaagctcttatgttaatcatgcctggttactttatcatcttgaacattgttctgtttttaatcagcattattgtgagttcagggttactgctcctatatatcttacatcatggttagtcaatcggatttagcatgtggaagagtcaatagatgctcatagatcattctctgaaaattttttaccaagagcaacagtgggttaatcctttatttgccagacttgagtctaaataatttttgg

SEQ ID NO: 235637 - DNA, 451 bp, Homo sapiens
gtctccaaccagtgctctgaacagagttcaccacccaagggagccctctctgactgctgtcccccgagcacctgctttgttcccttcttgagatagtgtcttgcaatgtcgcccaggctggagtgcagtggtgcccctcctgttgtgaatgtatctcctgatctgtttaactcctgtgtgtgaaactttgtgattcatgcaatgagaacaaggctttacgtgaacagaccagagcccaggtgcagggcggtcattccagagcccaggtgcagcaggtgcagggcggtcattctgcccacacagctgtgtccatgccagggctcaagatcccacacctcagcctagcattgctctgtccaaaggcagacagcctggtacagccatgtgtgcagttattttcacttcaaaaaaaaccttattaaacaaaaaccaaatatatgtaaacacacca

SEQ ID NO: 235638 - DNA, 611 bp, Homo sapiens
gcggccgcctactactactactgctcgaattcaagcttctaacgatgtacggggacatggtgattgttcacctgcagtactgtggagttttaacattttgtcctcttttcagtgaaacagagtaaaaatattcatctaccattactgttatttgctgattttgttttattttttgatggtaatattctatccttatgacactattgcaaccaaattggctttaccatcttggctttagtaggtatagaagacaatggattaccatctttattgctgtaatgtgttaagcattatatgctagtagaatctagtttaattgtttcaggtggaaagtattctttgagtttccatattgaatgtgtttggactaaacaaacaataaactactgatgtctgcagcatttatatatgtccctaatttaatctatagtttttattgttcccaaatgttttctcccagttgcatttcatacaaactaagtgggaataataagcagttgggttttaaaacaatttatttgtgaaatttgatacgtataaaaaaagtaaaacatttaagtaacacttgaccattgtaagagatctattccgtccagttagactgctggtat

SEQ ID NO: 235639 - DNA, 2668 bp, Homo sapiens
agcggaagagggggcggtggcaaagggggcgggacgtccgtggtccttgtcgcacgtcgcagcgcctggcgcccgggaagaggtggttgtgaggcagacgaactcgcggctctccggcttccgaggcttccgagttgtcggaggaagggggcggcgagcaataagaacccgccgcacccggtcctcagcgactcttctgacctccgcgcgacgtacccgccgccgccgttggctggagcatttgacattgtgcagcaaagaaatggttatggagaagcccagtccgctgcttgtagggcgggagtttgtgaggcaatattatactttgctgaataaagctccggaatatttacacaggttttatggcaggaattcttcctatgttcatggtggagtagatgctagtggaaagccccaggaagctgtttatggccaaaatgatatacaccacaaagtattatctctgaacttcagtgaatgtcatactaaaattcgtcatgtggatgctcatgcaaccttgagtgatggagtagttgtccaggtcatgggtttgctgtctaacagtggacaaccagaaagaaagtttatgcaaacctttgttctggctcctgaaggatctgttccaaataaattttatgttcacaatgatatgtttcgttatgaagatgaagtgtttggtgattctgagcctgaacttgatgaagaatcagaagatgaagtagaagaggaacaagaagaaagacaaccatctcctgaacctgtgcaagaaaatgctaacagtggttactatgaagctcaccctgtgactaatggcatagaggagcctttggaagaatcctctcatgaacctgaacctgagccagaatctgaaacaaagactgaagagctgaaaccacaagtggaggagaagaacttagaagaactagaggagaaatctactactcctcctccggcagaacctgtttctctgccacaagaaccaccaaagccaagagtcgaagctaaaccagaagttcaatctcagccacctcgtgtgcgtgaacaacgacctagagaacgacctggttttcctcctagaggaccaagaccaggcagaggagatatggaacagaatgactctgacaaccgtagaataattcgctatccagatagtcatcaactttttgttggtaacttgccacatgatattgatgaaaatgagctaaaggaattcttcatgagttttggaaacgttgtggaacttcgcatcaataccaagggtgttgggggaaagcttccaaattttggttttgtggtttttgatgactctgaaccagttcagagaatcttaattgcaaaaccgattatgtttcgaggggaagtacgtttaaatgtggaagagaaaaaaacaagagctgcaagagagcgagaaaccagaggtggtggtgatgatcgcagggatattaggcgcaatgatcgaggtcccggtggtccacgtggaattgtgggtggtggaatgatgcgtgatcgtgatggaagaggacctcctccaaggggtggcatggcacagaaacttggctctggaagaggaaccgggcaaatggagggccgcttcacaggacagcgtcgctgaagctccactgttggcaaagtcttggcagtggtacattattcatcgtgtttgcattcttgttaattttttttttggctttggaatgtgacacagcctttttgatcatttctttgatgtgaaaagcatctttggttatcagttaaattgaggtggacattatttccccaatttcacaacaggattcacattgttaatttataaatctagacttggagaattaaggactgagaaatgaccatatcttaaactatctacgacaaagtgaacttaaaaggacatgcccactgaattcaggtcctttgagtaaaaaaaaaatcttctgctgcacattttgtttaagtgttactgtttctgcctgttaatgctgggaacacaaatagtgcaatttgtgcaattggagaatcttgccttttttcttggctccccccaaaaatacaaaccaacagaaacttgttatgcactcatcaaaatgtactaatgggtactctgaactcattaacattgacatctgcaacaggaggcaacagggaaaaaatctcatcttcttttccagtagaaaatagtttgtgaaatgatgagggcattttatctgcttgctgtgaccagcgtgtgtacacataaaccttaacaagactacaagtatattccagaaggaaatcattttagttatgaactaaataataaaaattagaacttcaaatgcgatggtcttgactattagaccagatttagtagctccatatctaagatttttctacctgcccctcttcagtacagggatggctggctgctcaacacactcctcctccccttttttcctttctttaagctgtgtacagtgaaaattgtctttactgtatttttgttctctggtaatgtaataagcatgatggtgccttctattaatacatcattccagtcttgctggtaattttgtacagtatagtgtatgaattgctgtgctgcaaagccaaacagctgcaaaatgttgaaaaatcatcgaaatgtataaaaattgcagtatctttaaaatcagtaaaatggactagcatatta

SEQ ID NO: 235640 - DNA, 4258 bp, Homo sapiens
agcggaagagggggcggtggcaaagggggcgggacgtccgtggtccttgtcgcacgtcgcagcgcctggcgcccgggaagaggtggttgtgaggcagacgaactcgcggctctccggcttccgaggcttccgagttgtcggaggaagggggcggcgagcaataagaacccgccgcacccggtcctcagcgactcttctgacctccgcgcgacgtacccgccgccgccgttggctggagcatttgacattgtgcagcaaagaaatggttatggagaagcccagtccgctgcttgtagggcgggagtttgtgaggcaatattatactttgctgaataaagctccggaatatttacacaggttttatggcaggaattcttcctatgttcatggtggagtagatgctagtggaaagccccaggaagctgtttatggccaaaatgatatacaccacaaagtattatctctgaacttcagtgaatgtcatactaaaattcgtcatgtggatgctcatgcaaccttgagtgatggagtagttgtccaggtcatgggtttgctgtctaacagtggacaaccagaaagaaagtttatgcaaacctttgttctggctcctgaaggatctgttccaaataaattttatgttcacaatgatatgtttcgttatgaagatgaagtgtttggtgattctgagcctgaacttgatgaagaatcagaagatgaagtagaagaggaacaagaagaaagacaaccatctcctgaacctgtgcaagaaaatgctaacagtggttactatgaagctcaccctgtgactaatggcatagaggagcctttggaagaatcctctcatgaacctgaacctgagccagaatctgaaacaaagactgaagagctgaaaccacaagtggaggagaagaacttagaagaactagaggagaaatctactactcctcctccggcagaacctgtttctctgccacaagaaccaccaaagccaagagtcgaagctaaaccagaagttcaatctcagccacctcgtgtgcgtgaacaacgacctagagaacgacctggttttcctcctagaggaccaagaccaggcagaggagatatggaacagaatgactctgacaaccgtagaataattcgctatccagatagtcatcaactttttgttggtaacttgccacatgatattgatgaaaatgagctaaaggaattcttcatgagttttggaaacgttgtggaacttcgcatcaataccaagggtgttgggggaaagcttccaaattttggttttgtggtttttgatgactctgaaccagttcagagaatcttaattgcaaaaccgattatgtttcgaggggaagtacgtttaaatgtggaagagaaaaaaacaagagctgcaagagagcgagaaaccagaggtggtggtgatgatcgcagggatattaggcgcaatgatcgaggtcccggtggtccacgtggaattgtgggtggtggaatgatgcgtgatcgtgatggaagaggacctcctccaaggggtggcatggcacagaaacttggctctggaagaggaaccgggcaaatggagggccgcttcacaggacagcgtcgctgaagctccactgttggcaaagtcttggcagtggtacattattcatcgtgtttgcattcttgttaattttttttttggctttggaatgtgacacagcctttttgatcatttctttgatgtgaaaagcatctttggttatcagttaaattgaggtggacattatttccccaatttcacaacaggattcacattgttaatttataaatctagacttggagaattaaggactgagaaatgaccatatcttaaactatctacgacaaagtgaacttaaaaggacatgcccactgaattcaggtcctttgagtaaaaaaaaaatcttctgctgcacattttgtttaagtgttactgtttctgcctgttaatgctgggaacacaaatagtgcaatttgtgcaattggagaatcttgccttttttcttggctccccccaaaaatacaaaccaacagaaacttgttatgcactcatcaaaatgtactaatgggtactctgaactcattaacattgacatctgcaacaggaggcaacagggaaaaaatctcatcttcttttccagtagaaaatagtttgtgaaatgatgagggcattttatctgcttgctgtgaccagcgtgtgtacacataaaccttaacaagactacaagtatattccagaaggaaatcattttagttatgaactaaataataaaaattagaacttcaaatgcgatggtcttgactattagaccagatttagtagctccatatctaagatttttctacctgcccctcttcagtacagggatggctggctgctcaacacactcctcctccccttttttcctttctttaagctgtgtacagtgaaaattgtctttactgtatttttgttctctggtaatgtaataagcatgatggtgccttctattaatacatcattccagtcttgctggtaattttgtacagtatagtgtatgaattgctgtgctgcaaagccaaacagctgcaaaatgttgaaaaatcatcgaaatgtataaaaattgcagtatctttaaaatcagtaaaatggactagcatattatttatcttgttcttcagttaacaactttgtgttctctgtgggagggagggagtcctgtgtgtttgtggggagagggaaggaggaagtcagttatttgagtaagcctctagttgacttttctcttagcctgaatgtggacgttgaaacatatcacttcagggcttggaaaagtcagtcaacttgacgtacatttttagtgacattttaaaagcagtcagattctataaatggcaagtaagcctgaagtgaggatactgcaattttcggagaaaagaacagcagctctttaagtgtttgcattttctatttggggggcagggaactgtcattcattttgcacaattcttgaactgatgtcagcacccgagtggctcctgaatttaagtctgggacgacatcttttatttttacatgaatctttaaacaattctgtgagcaaagtttgtagctgctggattattgtctgtctttatagcaagttccagtaaaccacaagtatggcaaagcttatccaattttatgcttggagcagtcagtacataccagtttctgatgtttcaggcaggagtggggtaaataagtgtgaccacttaaagctgctcgttagcatggaagacttctccattctatctttgtaaaacagacaagatatgcacttgacatagtagcaaattggttctgaattatgcaactgtttgctatttagtaaactagcaaatgatgcatgtatttgtttttcatgtactgggcaatatgagtaaaatctgtccctttttccccctttgaatgaggtcttccatgtttgagggaaagtcttgcactattgcatatattttggggacacagattttcatagtttccatttttggggggcttaaggattttttttttttctgtttgaaacagttttatactttctgatatagtacttgaaattcttaccagaaaattactttggagttttgaagcctttattaatactacttttaaagaagcagttgttttattgtcaatgttttttttcccccaagcatattttcttgtatttctgtttccatatatatattatatatataatttccaattcaggatattgccctgccatccatgaaaactgttctggcaccaaaagtaatgacaaatgttaagtgtaataatagaaaagtagagcaaagagccattcagcttcagtctttacataccatgaataaaacattaaaacatcatatggagaagtttacatggtgattgttcacctgcagtactgtggagttttaacattttgtcctcttttcagtgaaacagagtaaaaatattcatctaccattactgttatttgctgattttgttttattttttgatggtaatattctatccttatgacactattgcaaccaaattggctttaccatcttggctttagtaggtatagaagacaatggattaccatctttattgctgtaatgtgttaagcattatatgctagtagaatctagtttaattgtttcaggtggaaagtattctttgagtttccatattgaatgtgtttggactaaacaaacaataaactactgatgtctgcagcattta

SEQ ID NO: 235641 - DNA, 4357 bp, Homo sapiens
agcggaagagggggcggtggcaaagggggcgggacgtccgtggtccttgtcgcacgtcgcagcgcctggcgcccgggaagaggtggttgtgaggcagacgaactcgcggctctccggcttccgaggcttccgagttgtcggaggaagggggcggcgagcaataagaacccgccgcacccggtcctcagcgactcttctgacctccgcgcgacgtacccgccgccgccgttggctggagcatttgacattgtgcagcaaagaaatggttatggagaagcccagtccgctgcttgtagggcgggagtttgtgaggcaatattatactttgctgaataaagctccggaatatttacacaggttttatggcaggaattcttcctatgttcatggtggagtagatgctagtggaaagccccaggaagctgtttatggccaaaatgatatacaccacaaagtattatctctgaacttcagtgaatgtcatactaaaattcgtcatgtggatgctcatgcaaccttgagtgatggagtagttgtccaggtcatgggtttgctgtctaacagtggacaaccagaaagaaagtttatgcaaacctttgttctggctcctgaaggatctgttccaaataaattttatgttcacaatgatatgtttcgttatgaagatgaagtgtttggtgattctgagcctgaacttgatgaagaatcagaagatgaagtagaagaggaacaagaagaaagacaaccatctcctgaacctgtgcaagaaaatgctaacagtggttactatgaagctcaccctgtgactaatggcatagaggagcctttggaagaatcctctcatgaacctgaacctgagccagaatctgaaacaaagactgaagagctgaaaccacaagtggaggagaagaacttagaagaactagaggagaaatctactactcctcctccggcagaacctgtttctctgccacaagaaccaccaaaggctttctcctgggcttcagtgaccagtaaaaacctgcctcctagtggtactgtttcttcctctggaattccaccccatgttaaagcaccagtctcacagccaagagtcgaagctaaaccagaagttcaatctcagccacctcgtgtgcgtgaacaacgacctagagaacgacctggttttcctcctagaggaccaagaccaggcagaggagatatggaacagaatgactctgacaaccgtagaataattcgctatccagatagtcatcaactttttgttggtaacttgccacatgatattgatgaaaatgagctaaaggaattcttcatgagttttggaaacgttgtggaacttcgcatcaataccaagggtgttgggggaaagcttccaaattttggttttgtggtttttgatgactctgaaccagttcagagaatcttaattgcaaaaccgattatgtttcgaggggaagtacgtttaaatgtggaagagaaaaaaacaagagctgcaagagagcgagaaaccagaggtggtggtgatgatcgcagggatattaggcgcaatgatcgaggtcccggtggtccacgtggaattgtgggtggtggaatgatgcgtgatcgtgatggaagaggacctcctccaaggggtggcatggcacagaaacttggctctggaagaggaaccgggcaaatggagggccgcttcacaggacagcgtcgctgaagctccactgttggcaaagtcttggcagtggtacattattcatcgtgtttgcattcttgttaattttttttttggctttggaatgtgacacagcctttttgatcatttctttgatgtgaaaagcatctttggttatcagttaaattgaggtggacattatttccccaatttcacaacaggattcacattgttaatttataaatctagacttggagaattaaggactgagaaatgaccatatcttaaactatctacgacaaagtgaacttaaaaggacatgcccactgaattcaggtcctttgagtaaaaaaaaaatcttctgctgcacattttgtttaagtgttactgtttctgcctgttaatgctgggaacacaaatagtgcaatttgtgcaattggagaatcttgccttttttcttggctccccccaaaaatacaaaccaacagaaacttgttatgcactcatcaaaatgtactaatgggtactctgaactcattaacattgacatctgcaacaggaggcaacagggaaaaaatctcatcttcttttccagtagaaaatagtttgtgaaatgatgagggcattttatctgcttgctgtgaccagcgtgtgtacacataaaccttaacaagactacaagtatattccagaaggaaatcattttagttatgaactaaataataaaaattagaacttcaaatgcgatggtcttgactattagaccagatttagtagctccatatctaagatttttctacctgcccctcttcagtacagggatggctggctgctcaacacactcctcctccccttttttcctttctttaagctgtgtacagtgaaaattgtctttactgtatttttgttctctggtaatgtaataagcatgatggtgccttctattaatacatcattccagtcttgctggtaattttgtacagtatagtgtatgaattgctgtgctgcaaagccaaacagctgcaaaatgttgaaaaatcatcgaaatgtataaaaattgcagtatctttaaaatcagtaaaatggactagcatattatttatcttgttcttcagttaacaactttgtgttctctgtgggagggagggagtcctgtgtgtttgtggggagagggaaggaggaagtcagttatttgagtaagcctctagttgacttttctcttagcctgaatgtggacgttgaaacatatcacttcagggcttggaaaagtcagtcaacttgacgtacatttttagtgacattttaaaagcagtcagattctataaatggcaagtaagcctgaagtgaggatactgcaattttcggagaaaagaacagcagctctttaagtgtttgcattttctatttggggggcagggaactgtcattcattttgcacaattcttgaactgatgtcagcacccgagtggctcctgaatttaagtctgggacgacatcttttatttttacatgaatctttaaacaattctgtgagcaaagtttgtagctgctggattattgtctgtctttatagcaagttccagtaaaccacaagtatggcaaagcttatccaattttatgcttggagcagtcagtacataccagtttctgatgtttcaggcaggagtggggtaaataagtgtgaccacttaaagctgctcgttagcatggaagacttctccattctatctttgtaaaacagacaagatatgcacttgacatagtagcaaattggttctgaattatgcaactgtttgctatttagtaaactagcaaatgatgcatgtatttgtttttcatgtactgggcaatatgagtaaaatctgtccctttttccccctttgaatgaggtcttccatgtttgagggaaagtcttgcactattgcatatattttggggacacagattttcatagtttccatttttggggggcttaaggattttttttttttctgtttgaaacagttttatactttctgatatagtacttgaaattcttaccagaaaattactttggagttttgaagcctttattaatactacttttaaagaagcagttgttttattgtcaatgttttttttcccccaagcatattttcttgtatttctgtttccatatatatattatatatataatttccaattcaggatattgccctgccatccatgaaaactgttctggcaccaaaagtaatgacaaatgttaagtgtaataatagaaaagtagagcaaagagccattcagcttcagtctttacataccatgaataaaacattaaaacatcatatggagaagtttacatggtgattgttcacctgcagtactgtggagttttaacattttgtcctcttttcagtgaaacagagtaaaaatattcatctaccattactgttatttgctgattttgttttattttttgatggtaatattctatccttatgacactattgcaaccaaattggctttaccatcttggctttagtaggtatagaagacaatggattaccatctttattgctgtaatgtgttaagcattatatgctagtagaatctagtttaattgtttcaggtggaaagtattctttgagtttccatattgaatgtgtttggactaaacaaacaataaactactgatgtctgcagcattta

SEQ ID NO: 235642 - DNA, 4162 bp, Homo sapiens
agcgggggcgcgagcgtgtgcgagcgcggcagcgtactgcgcgtgctccgcagagggacacgggaaggttgggtccggctctggaggagatgcgtgattggctgacgctgtgctcgggggttccctggccctttcggcagggcatttgacattgtgcagcaaagaaatggttatggagaagcccagtccgctgcttgtagggcgggagtttgtgaggcaatattatactttgctgaataaagctccggaatatttacacaggttttatggcaggaattcttcctatgttcatggtggagtagatgctagtggaaagccccaggaagctgtttatggccaaaatgatatacaccacaaagtattatctctgaacttcagtgaatgtcatactaaaattcgtcatgtggatgctcatgcaaccttgagtgatggagtagttgtccaggtcatgggtttgctgtctaacagtggacaaccagaaagaaagtttatgcaaacctttgttctggctcctgaaggatctgttccaaataaattttatgttcacaatgatatgtttcgttatgaagatgaagtgtttggtgattctgagcctgaacttgatgaagaatcagaagatgaagtagaagaggaacaagaagaaagacaaccatctcctgaacctgtgcaagaaaatgctaacagtggttactatgaagctcaccctgtgactaatggcatagaggagcctttggaagaatcctctcatgaacctgaacctgagccagaatctgaaacaaagactgaagagctgaaaccacaagtggaggagaagaacttagaagaactagaggagaaatctactactcctcctccggcagaacctgtttctctgccacaagaaccaccaaagccaagagtcgaagctaaaccagaagttcaatctcagccacctcgtgtgcgtgaacaacgacctagagaacgacctggttttcctcctagaggaccaagaccaggcagaggagatatggaacagaatgactctgacaaccgtagaataattcgctatccagatagtcatcaactttttgttggtaacttgccacatgatattgatgaaaatgagctaaaggaattcttcatgagttttggaaacgttgtggaacttcgcatcaataccaagggtgttgggggaaagcttccaaattttggttttgtggtttttgatgactctgaaccagttcagagaatcttaattgcaaaaccgattatgtttcgaggggaagtacgtttaaatgtggaagagaaaaaaacaagagctgcaagagagcgagaaaccagaggtggtggtgatgatcgcagggatattaggcgcaatgatcgaggtcccggtggtccacgtggaattgtgggtggtggaatgatgcgtgatcgtgatggaagaggacctcctccaaggggtggcatggcacagaaacttggctctggaagaggaaccgggcaaatggagggccgcttcacaggacagcgtcgctgaagctccactgttggcaaagtcttggcagtggtacattattcatcgtgtttgcattcttgttaattttttttttggctttggaatgtgacacagcctttttgatcatttctttgatgtgaaaagcatctttggttatcagttaaattgaggtggacattatttccccaatttcacaacaggattcacattgttaatttataaatctagacttggagaattaaggactgagaaatgaccatatcttaaactatctacgacaaagtgaacttaaaaggacatgcccactgaattcaggtcctttgagtaaaaaaaaaatcttctgctgcacattttgtttaagtgttactgtttctgcctgttaatgctgggaacacaaatagtgcaatttgtgcaattggagaatcttgccttttttcttggctccccccaaaaatacaaaccaacagaaacttgttatgcactcatcaaaatgtactaatgggtactctgaactcattaacattgacatctgcaacaggaggcaacagggaaaaaatctcatcttcttttccagtagaaaatagtttgtgaaatgatgagggcattttatctgcttgctgtgaccagcgtgtgtacacataaaccttaacaagactacaagtatattccagaaggaaatcattttagttatgaactaaataataaaaattagaacttcaaatgcgatggtcttgactattagaccagatttagtagctccatatctaagatttttctacctgcccctcttcagtacagggatggctggctgctcaacacactcctcctccccttttttcctttctttaagctgtgtacagtgaaaattgtctttactgtatttttgttctctggtaatgtaataagcatgatggtgccttctattaatacatcattccagtcttgctggtaattttgtacagtatagtgtatgaattgctgtgctgcaaagccaaacagctgcaaaatgttgaaaaatcatcgaaatgtataaaaattgcagtatctttaaaatcagtaaaatggactagcatattatttatcttgttcttcagttaacaactttgtgttctctgtgggagggagggagtcctgtgtgtttgtggggagagggaaggaggaagtcagttatttgagtaagcctctagttgacttttctcttagcctgaatgtggacgttgaaacatatcacttcagggcttggaaaagtcagtcaacttgacgtacatttttagtgacattttaaaagcagtcagattctataaatggcaagtaagcctgaagtgaggatactgcaattttcggagaaaagaacagcagctctttaagtgtttgcattttctatttggggggcagggaactgtcattcattttgcacaattcttgaactgatgtcagcacccgagtggctcctgaatttaagtctgggacgacatcttttatttttacatgaatctttaaacaattctgtgagcaaagtttgtagctgctggattattgtctgtctttatagcaagttccagtaaaccacaagtatggcaaagcttatccaattttatgcttggagcagtcagtacataccagtttctgatgtttcaggcaggagtggggtaaataagtgtgaccacttaaagctgctcgttagcatggaagacttctccattctatctttgtaaaacagacaagatatgcacttgacatagtagcaaattggttctgaattatgcaactgtttgctatttagtaaactagcaaatgatgcatgtatttgtttttcatgtactgggcaatatgagtaaaatctgtccctttttccccctttgaatgaggtcttccatgtttgagggaaagtcttgcactattgcatatattttggggacacagattttcatagtttccatttttggggggcttaaggattttttttttttctgtttgaaacagttttatactttctgatatagtacttgaaattcttaccagaaaattactttggagttttgaagcctttattaatactacttttaaagaagcagttgttttattgtcaatgttttttttcccccaagcatattttcttgtatttctgtttccatatatatattatatatataatttccaattcaggatattgccctgccatccatgaaaactgttctggcaccaaaagtaatgacaaatgttaagtgtaataatagaaaagtagagcaaagagccattcagcttcagtctttacataccatgaataaaacattaaaacatcatatggagaagtttacatggtgattgttcacctgcagtactgtggagttttaacattttgtcctcttttcagtgaaacagagtaaaaatattcatctaccattactgttatttgctgattttgttttattttttgatggtaatattctatccttatgacactattgcaaccaaattggctttaccatcttggctttagtaggtatagaagacaatggattaccatctttattgctgtaatgtgttaagcattatatgctagtagaatctagtttaattgtttcaggtggaaagtattctttgagtttccatattgaatgtgtttggactaaacaaacaataaactactgatgtctgcagcattta

SEQ ID NO: 235643 - DNA, 4464 bp, Homo sapiens
agcggaagagggggcggtggcaaagggggcgggacgtccgtggtccttgtcgcacgtcgcagcgcctggcgcccgggaagaggtggttgtgaggcagacgaactcgcggctctccggcttccgaggcttccgagttgtcggaggaagggggcggcgagcaataagaacccgccgcacccggtcctcagcgactcttctgacctccgcgcgacgtacccgccgccgccgttggctggagcatttgacattgtgcagcaaagaaatggttatggagaagcccagtccgctgcttgtagggcgggagtttgtgaggcaatattatactttgctgaataaagctccggaatatttacacaggttttatggcaggaattcttcctatgttcatggtggagtagatgctagtggaaagccccaggaagctgtttatggccaaaatgatatacaccacaaagtattatctctgaacttcagtgaatgtcatactaaaattcgtcatgtggatgctcatgcaaccttgagtgatggagtagttgtccaggtcatgggtttgctgtctaacagtggacaaccagaaagaaagtttatgcaaacctttgttctggctcctgaaggatctgttccaaataaattttatgttcacaatgatatgtttcgttatgaagatgaagtgtttggtgattctgagcctgaacttgatgaagaatcagaagatgaagtagaagaggaacaagaagaaagacaaccatctcctgaacctgtgcaagaaaatgctaacagtggttactatgaagctcaccctgtgactaatggcatagaggagcctttggaagaatcctctcatgaacctgaacctgagccagaatctgaaacaaagactgaagagctgaaaccacaagtggaggagaagaacttagaagaactagaggagaaatctactactcctcctccggcagaacctgtttctctgccacaagaaccaccaaagccaagagtcgaagctaaaccagaagttcaatctcagccacctcgtgtgcgtgaacaacgacctagagaacgacctggttttcctcctagaggaccaagaccaggcagaggagatatggaacagaatgactctgacaaccgtagaataattcgctatccagatagtcatcaactttttgttggtaacttgccacatgatattgatgaaaatgagctaaaggaattcttcatgagttttggaaacgttgtggaacttcgcatcaataccaagggtgttgggggaaagcttccaaattttggttttgtggtttttgatgactctgaaccagttcagagaatcttaattgcaaaaccgattatgtttcgaggggaagtacgtttaaatgtggaagagaaaaaaacaagagctgcaagagagcgagaaaccagaggtggtggtgatgatcgcagggatattaggcgcaatgatcgaggtcccggtggtccacgtggaattgtgggtggtggaatgatgcgtgatcgtgatggaagaggacctcctccaaggggtggcatggcacagaaacttggctctggaagaggaaccgggcaaatggagggccgcttcacaggacagcgtcgctgaagctccactgttggcaaagtcttggcagtggtacattattcatcgtgtttgcattcttgttaattttttttttggctttggaatgtgacacagcctttttgatcatttctttgatgtgaaaagcatctttggttatcagttaaattgaggtggacattatttccccaatttcacaacaggattcacattgttaatttataaatctagacttggagaattaaggactgagaaatgaccatatcttaaactatctacgacaaagtgaacttaaaaggacatgcccactgaattcaggtcctttgagtaaaaaaaaaatcttctgctgcacattttgtttaagtgttactgtttctgcctgttaatgctgggaacacaaatagtgcaatttgtgcaattggagaatcttgccttttttcttggctccccccaaaaatacaaaccaacagaaacttgttatgcactcatcaaaatgtactaatgggtactctgaactcattaacattgacatctgcaacaggaggcaacagggaaaaaatctcatcttcttttccagtagaaaatagtttgtgaaatgatgagggcattttatctgcttgctgtgaccagcgtgtgtacacataaaccttaacaagactacaagtatattccagaaggaaatcattttagttatgaactaaataataaaaattagaacttcaaatgcgatggtcttgactattagaccagatttagtagctccatatctaagatttttctacctgcccctcttcagtacagggatggctggctgctcaacacactcctcctccccttttttcctttctttaagctgtgtacagtgaaaattgtctttactgtatttttgttctctggtaatgtaataagcatgatggtgccttctattaatacatcattccagtcttgctggtaattttgtacagtatagtgtatgaattgctgtgctgcaaagccaaacagctgcaaaatgttgaaaaatcatcgaaatgtataaaaattgcagtatctttaaaatcagtaaaatggactagcatattatttatcttgttcttcagttaacaactttgtgttctctgtgggagggagggagtcctgtgtgtttgtggggagagggaaggaggaagtcagttatttgagtaagcctctagttgacttttctcttagcctgaatgtggacgttgaaacatatcacttcagggcttggaaaagtcagtcaacttgacgtacatttttagtgacattttaaaagcagtcagattctataaatggcaagtaagcctgaagtgaggatactgcaattttcggagaaaagaacagcagctctttaagtgtttgcattttctatttggggggcagggaactgtcattcattttgcacaattcttgaactgatgtcagcacccgagtggctcctgaatttaagtctgggacgacatcttttatttttacatgaatctttaaacaattctgtgagcaaagtttgtagctgctggattattgtctgtctttatagcaagttccagtaaaccacaagtatggcaaagcttatccaattttatgcttggagcagtcagtacataccagtttctgatgtttcaggcaggagtggggtaaataagtgtgaccacttaaagctgctcgttagcatggaagacttctccattctatctttgtaaaacagacaagatatgcacttgacatagtagcaaattggttctgaattatgcaactgtttgctatttagtaaactagcaaatgatgcatgtatttgtttttcatgtactgggcaatatgagtaaaatctgtccctttttccccctttgaatgaggtcttccatgtttgagggaaagtcttgcactattgcatatattttggggacacagattttcatagtttccatttttggggggcttaaggattttttttttttctgtttgaaacagttttatactttctgatatagtacttgaaattcttaccagaaaattactttggagttttgaagcctttattaatactacttttaaagaagcagttgttttattgtcaatgttttttttcccccaagcatattttcttgtatttctgtttccatatatatattatatatataatttccaattcaggatattgccctgccatccatgaaaactgttctggcaccaaaagtaatgacaaatgttaagtgtaataatagaaaagtagagcaaagagccattcagcttcagtctttacataccatgaataaaacattaaaacatcatatggagaagtttacatggtgattgttcacctgcagtactgtggagttttaacattttgtcctcttttcagtgaaacagagtaaaaatattcatctaccattactgttatttgctgattttgttttattttttgatggtaatattctatccttatgacactattgcaaccaaattggctttaccatcttggctttagtaggtatagaagacaatggattaccatctttattgctgtaatgtgttaagcattatatgctagtagaatctagtttaattgtttcaggtggaaagtattctttgagtttccatattgaatgtgtttggactaaacaaacaataaactactgatgtctgcagcatttatatatgtccctaatttaatctatagtttttattgttcccaaatgttttctcccagttgcatttcatacaaactaagtgggaataataagcagttgggttttaaaacaatttatttgtgaaatttgatacgtataaaaaaagtaaaacatttaagtaacacttgaccattgtaagagatctattccgtccagttagactgctggtat

SEQ ID NO: 235644 - DNA, 3593 bp, Homo sapiens
  misc_feature (11)..(11): n is a, c, g, or t
  misc_feature (13)..(13): n is a, c, g, or t
gactgggaggnanagagagtcagcttctgctggcttcccaatcagaagatgaagtagaagaggaacaagaagaaagacaaccatctcctgaacctgtgcaagaaaatgctaacagtggttactatgaagctcaccctgtgactaatggcatagaggagcctttggaagaatcctctcatgaacctgaacctgagccagaatctgaaacaaagactgaagagctgaaaccacaagtggaggagaagaacttagaagaactagaggagaaatctactactcctcctccggcagaacctgtttctctgccacaagaaccaccaaagccaagagtcgaagctaaaccagaagttcaatctcagccacctcgtgtgcgtgaacaacgacctagagaacgacctggttttcctcctagaggaccaagaccaggcagaggagatatggaacagaatgactctgacaaccgtagaataattcgctatccagatagtcatcaactttttgttggtaacttgccacatgatattgatgaaaatgagctaaaggaattcttcatgagttttggaaacgttgtggaacttcgcatcaataccaagggtgttgggggaaagcttccaaattttggttttgtggtttttgatgactctgaaccagttcagagaatcttaattgcaaaaccgattatgtttcgaggggaagtacgtttaaatgtggaagagaaaaaaacaagagctgcaagagagcgagaaaccagaggtggtggtgatgatcgcagggatattaggcgcaatgatcgaggtcccggtggtccacgtggaattgtgggtggtggaatgatgcgtgatcgtgatggaagaggacctcctccaaggggtggcatggcacagaaacttggctctggaagaggaaccgggcaaatggagggccgcttcacaggacagcgtcgctgaagctccactgttggcaaagtcttggcagtggtacattattcatcgtgtttgcattcttgttaattttttttttggctttggaatgtgacacagcctttttgatcatttctttgatgtgaaaagcatctttggttatcagttaaattgaggtggacattatttccccaatttcacaacaggattcacattgttaatttataaatctagacttggagaattaaggactgagaaatgaccatatcttaaactatctacgacaaagtgaacttaaaaggacatgcccactgaattcaggtcctttgagtaaaaaaaaaatcttctgctgcacattttgtttaagtgttactgtttctgcctgttaatgctgggaacacaaatagtgcaatttgtgcaattggagaatcttgccttttttcttggctccccccaaaaatacaaaccaacagaaacttgttatgcactcatcaaaatgtactaatgggtactctgaactcattaacattgacatctgcaacaggaggcaacagggaaaaaatctcatcttcttttccagtagaaaatagtttgtgaaatgatgagggcattttatctgcttgctgtgaccagcgtgtgtacacataaaccttaacaagactacaagtatattccagaaggaaatcattttagttatgaactaaataataaaaattagaacttcaaatgcgatggtcttgactattagaccagatttagtagctccatatctaagatttttctacctgcccctcttcagtacagggatggctggctgctcaacacactcctcctccccttttttcctttctttaagctgtgtacagtgaaaattgtctttactgtatttttgttctctggtaatgtaataagcatgatggtgccttctattaatacatcattccagtcttgctggtaattttgtacagtatagtgtatgaattgctgtgctgcaaagccaaacagctgcaaaatgttgaaaaatcatcgaaatgtataaaaattgcagtatctttaaaatcagtaaaatggactagcatattatttatcttgttcttcagttaacaactttgtgttctctgtgggagggagggagtcctgtgtgtttgtggggagagggaaggaggaagtcagttatttgagtaagcctctagttgacttttctcttagcctgaatgtggacgttgaaacatatcacttcagggcttggaaaagtcagtcaacttgacgtacatttttagtgacattttaaaagcagtcagattctataaatggcaagtaagcctgaagtgaggatactgcaattttcggagaaaagaacagcagctctttaagtgtttgcattttctatttggggggcagggaactgtcattcattttgcacaattcttgaactgatgtcagcacccgagtggctcctgaatttaagtctgggacgacatcttttatttttacatgaatctttaaacaattctgtgagcaaagtttgtagctgctggattattgtctgtctttatagcaagttccagtaaaccacaagtatggcaaagcttatccaattttatgcttggagcagtcagtacataccagtttctgatgtttcaggcaggagtggggtaaataagtgtgaccacttaaagctgctcgttagcatggaagacttctccattctatctttgtaaaacagacaagatatgcacttgacatagtagcaaattggttctgaattatgcaactgtttgctatttagtaaactagcaaatgatgcatgtatttgtttttcatgtactgggcaatatgagtaaaatctgtccctttttccccctttgaatgaggtcttccatgtttgagggaaagtcttgcactattgcatatattttggggacacagattttcatagtttccatttttggggggcttaaggattttttttttttctgtttgaaacagttttatactttctgatatagtacttgaaattcttaccagaaaattactttggagttttgaagcctttattaatactacttttaaagaagcagttgttttattgtcaatgttttttttcccccaagcatattttcttgtatttctgtttccatatatatattatatatataatttccaattcaggatattgccctgccatccatgaaaactgttctggcaccaaaagtaatgacaaatgttaagtgtaataatagaaaagtagagcaaagagccattcagcttcagtctttacataccatgaataaaacattaaaacatcatatggagaagtttacatggtgattgttcacctgcagtactgtggagttttaacattttgtcctcttttcagtgaaacagagtaaaaatattcatctaccattactgttatttgctgattttgttttattttttgatggtaatattctatccttatgacactattgcaaccaaattggctttaccatcttggctttagtaggtatagaagacaatggattaccatctttattgctgtaatgtgttaagcattatatgctagtagaatctagtttaattgtttcaggtggaaagtattctttgagtttccatattgaatgtgtttggactaaacaaacaataaactactgatgtctgcagcattta

SEQ ID NO: 235645 - DNA, 3269 bp, Homo sapiens
catggctgactctagaggatacacttcctctcctcccacctcgtgtgcgtgaacaacgacctagagaacgacctggttttcctcctagaggaccaagaccaggcagaggagatatggaacagaatgactctgacaaccgtagaataattcgctatccagatagtcatcaactttttgttggtaacttgccacatgatattgatgaaaatgagctaaaggaattcttcatgagttttggaaacgttgtggaacttcgcatcaataccaagggtgttgggggaaagcttccaaattttggttttgtggtttttgatgactctgaaccagttcagagaatcttaattgcaaaaccgattatgtttcgaggggaagtacgtttaaatgtggaagagaaaaaaacaagagctgcaagagagcgagaaaccagaggtggtggtgatgatcgcagggatattaggcgcaatgatcgaggtcccggtggtccacgtggaattgtgggtggtggaatgatgcgtgatcgtgatggaagaggacctcctccaaggggtggcatggcacagaaacttggctctggaagaggaaccgggcaaatggagggccgcttcacaggacagcgtcgctgaagctccactgttggcaaagtcttggcagtggtacattattcatcgtgtttgcattcttgttaattttttttttggctttggaatgtgacacagcctttttgatcatttctttgatgtgaaaagcatctttggttatcagttaaattgaggtggacattatttccccaatttcacaacaggattcacattgttaatttataaatctagacttggagaattaaggactgagaaatgaccatatcttaaactatctacgacaaagtgaacttaaaaggacatgcccactgaattcaggtcctttgagtaaaaaaaaaatcttctgctgcacattttgtttaagtgttactgtttctgcctgttaatgctgggaacacaaatagtgcaatttgtgcaattggagaatcttgccttttttcttggctccccccaaaaatacaaaccaacagaaacttgttatgcactcatcaaaatgtactaatgggtactctgaactcattaacattgacatctgcaacaggaggcaacagggaaaaaatctcatcttcttttccagtagaaaatagtttgtgaaatgatgagggcattttatctgcttgctgtgaccagcgtgtgtacacataaaccttaacaagactacaagtatattccagaaggaaatcattttagttatgaactaaataataaaaattagaacttcaaatgcgatggtcttgactattagaccagatttagtagctccatatctaagatttttctacctgcccctcttcagtacagggatggctggctgctcaacacactcctcctccccttttttcctttctttaagctgtgtacagtgaaaattgtctttactgtatttttgttctctggtaatgtaataagcatgatggtgccttctattaatacatcattccagtcttgctggtaattttgtacagtatagtgtatgaattgctgtgctgcaaagccaaacagctgcaaaatgttgaaaaatcatcgaaatgtataaaaattgcagtatctttaaaatcagtaaaatggactagcatattatttatcttgttcttcagttaacaactttgtgttctctgtgggagggagggagtcctgtgtgtttgtggggagagggaaggaggaagtcagttatttgagtaagcctctagttgacttttctcttagcctgaatgtggacgttgaaacatatcacttcagggcttggaaaagtcagtcaacttgacgtacatttttagtgacattttaaaagcagtcagattctataaatggcaagtaagcctgaagtgaggatactgcaattttcggagaaaagaacagcagctctttaagtgtttgcattttctatttggggggcagggaactgtcattcattttgcacaattcttgaactgatgtcagcacccgagtggctcctgaatttaagtctgggacgacatcttttatttttacatgaatctttaaacaattctgtgagcaaagtttgtagctgctggattattgtctgtctttatagcaagttccagtaaaccacaagtatggcaaagcttatccaattttatgcttggagcagtcagtacataccagtttctgatgtttcaggcaggagtggggtaaataagtgtgaccacttaaagctgctcgttagcatggaagacttctccattctatctttgtaaaacagacaagatatgcacttgacatagtagcaaattggttctgaattatgcaactgtttgctatttagtaaactagcaaatgatgcatgtatttgtttttcatgtactgggcaatatgagtaaaatctgtccctttttccccctttgaatgaggtcttccatgtttgagggaaagtcttgcactattgcatatattttggggacacagattttcatagtttccatttttggggggcttaaggattttttttttttctgtttgaaacagttttatactttctgatatagtacttgaaattcttaccagaaaattactttggagttttgaagcctttattaatactacttttaaagaagcagttgttttattgtcaatgttttttttcccccaagcatattttcttgtatttctgtttccatatatatattatatatataatttccaattcaggatattgccctgccatccatgaaaactgttctggcaccaaaagtaatgacaaatgttaagtgtaataatagaaaagtagagcaaagagccattcagcttcagtctttacataccatgaataaaacattaaaacatcatatggagaagtttacatggtgattgttcacctgcagtactgtggagttttaacattttgtcctcttttcagtgaaacagagtaaaaatattcatctaccattactgttatttgctgattttgttttattttttgatggtaatattctatccttatgacactattgcaaccaaattggctttaccatcttggctttagtaggtatagaagacaatggattaccatctttattgctgtaatgtgttaagcattatatgctagtagaatctagtttaattgtttcaggtggaaagtattctttgagtttccatattgaatgtgtttggactaaacaaacaataaactactgatgtctgcagcattta

SEQ ID NO: 235646 - DNA, 3203 bp, Homo sapiens
aggctgtctagaggatccctcgggccaccaagacaggcagaggagatatggaacagaatgactctgacaaccgtagaataattcgctatccagatagtcatcaactttttgttggtaacttgccacatgatattgatgaaaatgagctaaaggaattcttcatgagttttggaaacgttgtggaacttcgcatcaataccaagggtgttgggggaaagcttccaaattttggttttgtggtttttgatgactctgaaccagttcagagaatcttaattgcaaaaccgattatgtttcgaggggaagtacgtttaaatgtggaagagaaaaaaacaagagctgcaagagagcgagaaaccagaggtggtggtgatgatcgcagggatattaggcgcaatgatcgaggtcccggtggtccacgtggaattgtgggtggtggaatgatgcgtgatcgtgatggaagaggacctcctccaaggggtggcatggcacagaaacttggctctggaagaggaaccgggcaaatggagggccgcttcacaggacagcgtcgctgaagctccactgttggcaaagtcttggcagtggtacattattcatcgtgtttgcattcttgttaattttttttttggctttggaatgtgacacagcctttttgatcatttctttgatgtgaaaagcatctttggttatcagttaaattgaggtggacattatttccccaatttcacaacaggattcacattgttaatttataaatctagacttggagaattaaggactgagaaatgaccatatcttaaactatctacgacaaagtgaacttaaaaggacatgcccactgaattcaggtcctttgagtaaaaaaaaaatcttctgctgcacattttgtttaagtgttactgtttctgcctgttaatgctgggaacacaaatagtgcaatttgtgcaattggagaatcttgccttttttcttggctccccccaaaaatacaaaccaacagaaacttgttatgcactcatcaaaatgtactaatgggtactctgaactcattaacattgacatctgcaacaggaggcaacagggaaaaaatctcatcttcttttccagtagaaaatagtttgtgaaatgatgagggcattttatctgcttgctgtgaccagcgtgtgtacacataaaccttaacaagactacaagtatattccagaaggaaatcattttagttatgaactaaataataaaaattagaacttcaaatgcgatggtcttgactattagaccagatttagtagctccatatctaagatttttctacctgcccctcttcagtacagggatggctggctgctcaacacactcctcctccccttttttcctttctttaagctgtgtacagtgaaaattgtctttactgtatttttgttctctggtaatgtaataagcatgatggtgccttctattaatacatcattccagtcttgctggtaattttgtacagtatagtgtatgaattgctgtgctgcaaagccaaacagctgcaaaatgttgaaaaatcatcgaaatgtataaaaattgcagtatctttaaaatcagtaaaatggactagcatattatttatcttgttcttcagttaacaactttgtgttctctgtgggagggagggagtcctgtgtgtttgtggggagagggaaggaggaagtcagttatttgagtaagcctctagttgacttttctcttagcctgaatgtggacgttgaaacatatcacttcagggcttggaaaagtcagtcaacttgacgtacatttttagtgacattttaaaagcagtcagattctataaatggcaagtaagcctgaagtgaggatactgcaattttcggagaaaagaacagcagctctttaagtgtttgcattttctatttggggggcagggaactgtcattcattttgcacaattcttgaactgatgtcagcacccgagtggctcctgaatttaagtctgggacgacatcttttatttttacatgaatctttaaacaattctgtgagcaaagtttgtagctgctggattattgtctgtctttatagcaagttccagtaaaccacaagtatggcaaagcttatccaattttatgcttggagcagtcagtacataccagtttctgatgtttcaggcaggagtggggtaaataagtgtgaccacttaaagctgctcgttagcatggaagacttctccattctatctttgtaaaacagacaagatatgcacttgacatagtagcaaattggttctgaattatgcaactgtttgctatttagtaaactagcaaatgatgcatgtatttgtttttcatgtactgggcaatatgagtaaaatctgtccctttttccccctttgaatgaggtcttccatgtttgagggaaagtcttgcactattgcatatattttggggacacagattttcatagtttccatttttggggggcttaaggattttttttttttctgtttgaaacagttttatactttctgatatagtacttgaaattcttaccagaaaattactttggagttttgaagcctttattaatactacttttaaagaagcagttgttttattgtcaatgttttttttcccccaagcatattttcttgtatttctgtttccatatatatattatatatataatttccaattcaggatattgccctgccatccatgaaaactgttctggcaccaaaagtaatgacaaatgttaagtgtaataatagaaaagtagagcaaagagccattcagcttcagtctttacataccatgaataaaacattaaaacatcatatggagaagtttacatggtgattgttcacctgcagtactgtggagttttaacattttgtcctcttttcagtgaaacagagtaaaaatattcatctaccattactgttatttgctgattttgttttattttttgatggtaatattctatccttatgacactattgcaaccaaattggctttaccatcttggctttagtaggtatagaagacaatggattaccatctttattgctgtaatgtgttaagcattatatgctagtagaatctagtttaattgtttcaggtggaaagtattctttgagtttccatattgaatgtgtttggactaaacaaacaataaactactgatgtctgcagcattta

SEQ ID NO: 235647 - DNA, 2070 bp, Homo sapiens
gacccacgcgtccgcggacgcgtgggtcagcgtgtgtacacataaaccttaacaagactacaagtatattccagaaggaaatcattttagttatgaactaaataataaaaattagaacttcaaatgcgatggtcttgactattagaccagatttagtagctccatatctaagatttttctacctgcccctcttcagtacagggatggctggctgctcaacacactcctcctccccttttttcctttctttaagctgtgtacagtgaaaattgtctttactgtatttttgttctctggtaatgtaataagcatgatggtgccttctattaatacatcattccagtcttgctggtaattttgtacagtatagtgtatgaattgctgtgctgcaaagccaaacagctgcaaaatgttgaaaaatcatcgaaatgtataaaaattgcagtatctttaaaatcagtaaaatggactagcatattatttatcttgttcttcagttaacaactttgtgttctctgtgggagggagggagtcctgtgtgtttgtggggagagggaaggaggaagtcagttatttgagtaagcctctagttgacttttctcttagcctgaatgtggacgttgaaacatatcacttcagggcttggaaaagtcagtcaacttgacgtacatttttagtgacattttaaaagcagtcagattctataaatggcaagtaagcctgaagtgaggatactgcaattttcggagaaaagaacagcagctctttaagtgtttgcattttctatttggggggcagggaactgtcattcattttgcacaattcttgaactgatgtcagcacccgagtggctcctgaatttaagtctgggacgacatcttttatttttacatgaatctttaaacaattctgtgagcaaagtttgtagctgctggattattgtctgtctttatagcaagttccagtaaaccacaagtatggcaaagcttatccaattttatgcttggagcagtcagtacataccagtttctgatgtttcaggcaggagtggggtaaataagtgtgaccacttaaagctgctcgttagcatggaagacttctccattctatctttgtaaaacagacaagatatgcacttgacatagtagcaaattggttctgaattatgcaactgtttgctatttagtaaactagcaaatgatgcatgtatttgtttttcatgtactgggcaatatgagtaaaatctgtccctttttccccctttgaatgaggtcttccatgtttgagggaaagtcttgcactattgcatatattttggggacacagattttcatagtttccatttttggggggcttaaggattttttttttttctgtttgaaacagttttatactttctgatatagtacttgaaattcttaccagaaaattactttggagttttgaagcctttattaatactacttttaaagaagcagttgttttattgtcaatgttttttttcccccaagcatattttcttgtatttctgtttccatatatatattatatatataatttccaattcaggatattgccctgccatccatgaaaactgttctggcaccaaaagtaatgacaaatgttaagtgtaataatagaaaagtagagcaaagagccattcagcttcagtctttacataccatgaataaaacattaaaacatcatatggagaagtttacatggtgattgttcacctgcagtactgtggagttttaacattttgtcctcttttcagtgaaacagagtaaaaatattcatctaccattactgttatttgctgattttgttttattttttgatggtaatattctatccttatgacactattgcaaccaaattggctttaccatcttggctttagtaggtatagaagacaatggattaccatctttattgctgtaatgtgttaagcattatatgctagtagaatctagtttaattgtttcaggtggaaagtattctttgagtttccatattgaatgtgtttggactaaacaaacaataaactactgatgtctgcagcattta

SEQ ID NO: 235648 - DNA, 2721 bp, Homo sapiens
agcggaagagggggcggtggcaaagggggcgggacgtccgtggtccttgtcgcacgtcgcagcgcctggcgcccgggaagaggtggttgtgaggcagacgaactcgcggctctccggcttccgaggcttccgagttgtcggaggaagggggcggcgagcaataagaacccgccgcacccggtcctcagcgactcttctgacctccgcgcgacgtacccgccgccgccgttggctggagcatttgacattgtgcagcaaagaaatggttatggagaagcccagtccgctgcttgtagggcgggagtttgtgaggcaatattatactttgctgaataaagctccggaatatttacacaggttttatggcaggaattcttcctatgttcatggtggagtagatgctagtggaaagccccaggaagctgtttatggccaaaatgatatacaccacaaagtattatctctgaacttcagtgaatgtcatactaaaattcgtcatgtggatgctcatgcaaccttgagtgatggagtagttgtccaggtcatgggtttgctgtctaacagtggacaaccagaaagaaagtttatgcaaacctttgttctggctcctgaaggatctgttccaaataaattttatgttcacaatgatatgtttcgttatgaagatgaagtgtttggtgattctgagcctgaacttgatgaagaatcagaagatgaagtagaagaggaacaagaagaaagacaaccatctcctgaacctgtgcaagaaaatgctaacagtggttactatgaagctcaccctgtgactaatggcatagaggagcctttggaagaatcctctcatgaacctgaacctgagccagaatctgaaacaaagactgaagagctgaaaccacaagtggaggagaagaacttagaagaactagaggagaaatctactactcctcctccggcagaacctgtttctctgccacaagaaccaccaaagccaagagtcgaagctaaaccagaagttcaatctcagccacctcgtgtgcgtgaacaacgacctagagaacgacctggttttcctcctagaggaccaagaccaggcagaggagatatggaacagaatgactctgacaaccgtagaataattcgctatccagatagtcatcaactttttgttggtaacttgccacatgatattgatgaaaatgagctaaaggaattcttcatgagttttggaaacgttgtggaacttcgcatcaataccaagggtgttgggggaaagcttccaaattttggttttgtggtttttgatgactctgaaccagttcagagaatcttaattgcaaaaccgattatgtttcgaggggaagtacgtttaaatgtggaagagaaaaaaacaagagctgcaagagagcgagaaaccagaggtggtggtgatgatcgcagggatattaggcgcaatgatcgaggtcccggtggtccacgtggaattgtgggtggtggaatgatgcgtgatcgtgatggaagaggacctcctccaaggggtggcatggcacagaaacttggctctggaagaggaaccgggcaaatggagggccgcttcacaggacagcgtcgctgaagctccactgttggcaaagtcttggcagtggtacattattcatcgtgtttgcattcttgttaattttttttttggctttggaatgtgacacagcctttttgatcatttctttgatgtgaaaagcatctttggttatcagttaaattgaggtggacattatttccccaatttcacaacaggattcacattgttaatttataaatctagacttggagaattaaggactgagaaatgaccatatcttaaactatctacgacaaagtgaacttaaaaggacatgcccactgaattcaggtcctttgagtaaaaaaaaaatcttctgctgcacattttgtttaagtgttactgtttctgcctgttaatgctgggaacacaaatagtgcaatttgtgcaattggagaatcttgccttttttcttggctccccccaaaaatacaaaccaacagaaacttgttatgcactcatcaaaatgtactaatgggtactctgaactcattaacattgacatctgcaacaggaggcaacagggaaaaaatctcatcttcttttccagtagaaaatagtttgtgaaatgatgagggcattttatctgcttgctgtgaccagcgtgtgtacacataaaccttaacaagactacaagtatattccagaaggaaatcattttagttatgaactaaataataaaaattagaacttcaaatgcgatggtcttgactattagaccagatttagtagctccatatctaagatttttctacctgcccctcttcagtacagggatggctggctgctcaacacactcctcctccccttttttcctttctttaagctgtgtacagtgaaaattgtctttactgtatttttgttctctggtaatgtaataagcatgatggtgccttctattaatacatcattccagtcttgctggtaattttgtacagtatagtgtatgaattgctgtgctgcaaagccaaacagctgcaaaatgttgaaaaatcatcgaaatgtataaaaattgcagtatctttaaaatcagtaaaatggactagcatattaaaaaaaaaacaaaacaccgggactatgcgggggggagaaaaagatgaacgacg

SEQ ID NO: 235649 - DNA, 1678 bp, Homo sapiens
agcggaagagggggcggtggcaaagggggcgggacgtccgtggtccttgtcgcacgtcgcagcgcctggcgcccgggaagaggtggttgtgaggcagacgaactcgcggctctccggcttccgaggcttccgagttgtcggaggaagggggcggcgagcaataagaacccgccgcacccggtcctcagcgactcttctgacctccgcgcgacgtacccgccgccgccgttggctggagcatttgacattgtgcagcaaagaaatggttatggagaagcccagtccgctgcttgtagggcgggagtttgtgaggcaatattatactttgctgaataaagctccggaatatttacacaggttttatggcaggaattcttcctatgttcatggtggagtagatgctagtggaaagccccaggaagctgtttatggccaaaatgatatacaccacaaagtattatctctgaacttcagtgaatgtcatactaaaattcgtcatgtggatgctcatgcaaccttgagtgatggagtagttgtccaggtcatgggtttgctgtctaacagtggacaaccagaaagaaagtttatgcaaacctttgttctggctcctgaaggatctgttccaaataaattttatgttcacaatgatatgtttcgttatgaagatgaagtgtttggtgattctgagcctgaacttgatgaagaatcagaagatgaagtagaagaggaacaagaagaaagacaaccatctcctgaacctgtgcaagaaaatgctaacagtggttactatgaagctcaccctgtgactaatggcatagaggagcctttggaagaatcctctcatgaacctgaacctgagccagaatctgaaacaaagactgaagagctgaaaccacaagtggaggagaagaacttagaagaactagaggagaaatctactactcctcctccggcagaacctgtttctctgccacaagaaccaccaaaggttagatcaaagaactctttagacttacaacatcacatgttcaaatttggtgctgttaatgaagtatgacctttttctattatgttaaattgtttagtaaattattttatgtatatgaaagaagctgtggggttgttgttacctgagaaaatgttattgtttccctgccccgcaaaatacccctctaagagtgaaacttataacttaagatgaatccttgtctgtatgcattgtttagtaacttatatgaaattatttggatccatgtatagagctgtcagttgttctttcattctgtattaaattctctgagcacagatgcaccaggaatcatgcagtttcccaacttaaacaagttggtctataattaaaagaagagatacctgttgtttgtggtttaaatgggatcagtttcctttctacaccaattaaactatcttggaaagatgagtgacatccttagtgtatcatgtaagcctacctgaaacttcttttatctttcttcaaagtcaaaggttaaagtatatttgagtggtgataggaggagattctttgttcaatttgtgaatgtcagagtttccagctaatactctcttctttcctatccttccctctcccgttaacaccatcacacaccctatcttacccccaaaggggaaataaattgtttctattaggttcaggtttttc

SEQ ID NO: 235650 - DNA, 405 bp, Homo sapiens
gcggccgcctactactactactgctcgaattcaagcttctaacgatgtacggggacatggtgattgttcacctgcagtactgtggagttttaacattttgtcctcttttcagtgaaacagagtaaaaatattcatctaccattactgttatttgctgattttgttttattttttgatggtaatattctatccttatgacactattgcaaccaaattggctttaccatcttggctttagtaggtatagaagacaatggattaccatctttattgctgtaatgtgttaagcattatatgctagtagaatctagtttaattgtttcaggtggaaagtattctttgagtttccatattgaatgtgtttggactaaacaaacaataaactactgatgtctgcagcattta

SEQ ID NO: 235651 - DNA, 798 bp, Homo sapiens
agcggaagagggggcggtggcaaagggggcgggacgtccgtggtccttgtcgcacgtcgcagcgcctggcgcccgggaagaggtggttgtgaggcagacgaactcgcggctctccggcttccgaggcttccgagttgtcggaggaagggggcggcgagcaataagaacccgccgcacccggtcctcagcgactcttctgacctccgcgcgacgtacccgccgccgccgttggctggagcatttgacattgtgcagcaaagaaatggttatggagaagcccagtccgctgcttgtagggcgggagtttgtgaggcaatattatactttgctgaataaagctccggaatatttacacaggtaaattttaaacaaataatttggtatttttatctactttttttcttgggtatgactatatatattttgcatttcctgtctcctcattatctgacagtatctttgtaaacatgtctaaactgtattcaatattttattcatttgatggcaaaaagtgtttttaactgcaactcacagtaataaaaacattttatgtcatattctggtacataacacattcatatctatatatgcacacgcttattcttatatgtactctagtattttatttttagagtcatggtctcctctgtcactcaggctggagtgcagtgatatgatcatagcccactgtggcctcaaacttttggcctcaagcgatctcccagcttgcagcttgcattcccaaagtactgggattacaggcatgagccaccaagcccgacctttatttcattaaaa

SEQ ID NO: 235652 - DNA, 524 bp, Homo sapiens
gttatcagaacttattaacattagtgtcactaaaattggtatacaactccccactgctaaatttggctaaaaagaaaatttatttcatggtggttgatgacaaagatgactttttaatagttattcttgtgtttgctccctcagcatttgacattgtgcagcaaagaaatggttatggagaagcccagtccgctgcttgtagggcgggagtttgtgaggcaatattatactttgctgaataaagctccggaatatttacacaggtaaattttaaacaaataatttggtatttttatctactttttttcttgggtatgactatatatattttgcatttcctgtctcctcattatctgacagtatctttgtaaacatgtctaaactgtattcaatattttattcatttgatggcaaaaagtgtttttaactgcaactcacagtaataaaaacattttatgtcatattctggtacataacacattcatatctatatatgcacacgcttattcttatatgtactctag

SEQ ID NO: 235653 - DNA, 3993 bp, Homo sapiens
agcggaagagggggcggtggcaaagggggcgggacgtccgtggtccttgtcgcacgtcgcagcgcctggcgcccgggaagaggtggttgtgaggcagacgaactcgcggctctccggcttccgaggcttccgagttgtcggaggaagggggcggcgagcaataagaacccgccgcacccggtcctcagcgactcttctgacctccgcgcgacgtacccgccgccgccgttggctggagcatttgacattgtgcagcaaagaaatggttatggagaagcccagtccgctgcttgtagggcgggagtttgtgaggcaatattatactttgctgaataaagctccggaatatttacacaggttttatggcaggaattcttcctatgttcatggtggagtagatgctagtggaaagccccaggaagctgtttatggccaaaataatcagaagatgaagtagaagaggaacaagaagaaagacaaccatctcctgaacctgtgcaagaaaatgctaacagtggttactatgaagctcaccctgtgactaatggcatagaggagcctttggaagaatcctctcatgaacctgaacctgagccagaatctgaaacaaagactgaagagctgaaaccacaagtggaggagaagaacttagaagaactagaggagaaatctactactcctcctccggcagaacctgtttctctgccacaagaaccaccaaagccaagagtcgaagctaaaccagaagttcaatctcagccacctcgtgtgcgtgaacaacgacctagagaacgacctggttttcctcctagaggaccaagaccaggcagaggagatatggaacagaatgactctgacaaccgtagaataattcgctatccagatagtcatcaactttttgttggtaacttgccacatgatattgatgaaaatgagctaaaggaattcttcatgagttttggaaacgttgtggaacttcgcatcaataccaagggtgttgggggaaagcttccaaattttggttttgtggtttttgatgactctgaaccagttcagagaatcttaattgcaaaaccgattatgtttcgaggggaagtacgtttaaatgtggaagagaaaaaaacaagagctgcaagagagcgagaaaccagaggtggtggtgatgatcgcagggatattaggcgcaatgatcgaggtcccggtggtccacgtggaattgtgggtggtggaatgatgcgtgatcgtgatggaagaggacctcctccaaggggtggcatggcacagaaacttggctctggaagaggaaccgggcaaatggagggccgcttcacaggacagcgtcgctgaagctccactgttggcaaagtcttggcagtggtacattattcatcgtgtttgcattcttgttaattttttttttggctttggaatgtgacacagcctttttgatcatttctttgatgtgaaaagcatctttggttatcagttaaattgaggtggacattatttccccaatttcacaacaggattcacattgttaatttataaatctagacttggagaattaaggactgagaaatgaccatatcttaaactatctacgacaaagtgaacttaaaaggacatgcccactgaattcaggtcctttgagtaaaaaaaaaatcttctgctgcacattttgtttaagtgttactgtttctgcctgttaatgctgggaacacaaatagtgcaatttgtgcaattggagaatcttgccttttttcttggctccccccaaaaatacaaaccaacagaaacttgttatgcactcatcaaaatgtactaatgggtactctgaactcattaacattgacatctgcaacaggaggcaacagggaaaaaatctcatcttcttttccagtagaaaatagtttgtgaaatgatgagggcattttatctgcttgctgtgaccagcgtgtgtacacataaaccttaacaagactacaagtatattccagaaggaaatcattttagttatgaactaaataataaaaattagaacttcaaatgcgatggtcttgactattagaccagatttagtagctccatatctaagatttttctacctgcccctcttcagtacagggatggctggctgctcaacacactcctcctccccttttttcctttctttaagctgtgtacagtgaaaattgtctttactgtatttttgttctctggtaatgtaataagcatgatggtgccttctattaatacatcattccagtcttgctggtaattttgtacagtatagtgtatgaattgctgtgctgcaaagccaaacagctgcaaaatgttgaaaaatcatcgaaatgtataaaaattgcagtatctttaaaatcagtaaaatggactagcatattatttatcttgttcttcagttaacaactttgtgttctctgtgggagggagggagtcctgtgtgtttgtggggagagggaaggaggaagtcagttatttgagtaagcctctagttgacttttctcttagcctgaatgtggacgttgaaacatatcacttcagggcttggaaaagtcagtcaacttgacgtacatttttagtgacattttaaaagcagtcagattctataaatggcaagtaagcctgaagtgaggatactgcaattttcggagaaaagaacagcagctctttaagtgtttgcattttctatttggggggcagggaactgtcattcattttgcacaattcttgaactgatgtcagcacccgagtggctcctgaatttaagtctgggacgacatcttttatttttacatgaatctttaaacaattctgtgagcaaagtttgtagctgctggattattgtctgtctttatagcaagttccagtaaaccacaagtatggcaaagcttatccaattttatgcttggagcagtcagtacataccagtttctgatgtttcaggcaggagtggggtaaataagtgtgaccacttaaagctgctcgttagcatggaagacttctccattctatctttgtaaaacagacaagatatgcacttgacatagtagcaaattggttctgaattatgcaactgtttgctatttagtaaactagcaaatgatgcatgtatttgtttttcatgtactgggcaatatgagtaaaatctgtccctttttccccctttgaatgaggtcttccatgtttgagggaaagtcttgcactattgcatatattttggggacacagattttcatagtttccatttttggggggcttaaggattttttttttttctgtttgaaacagttttatactttctgatatagtacttgaaattcttaccagaaaattactttggagttttgaagcctttattaatactacttttaaagaagcagttgttttattgtcaatgttttttttcccccaagcatattttcttgtatttctgtttccatatatatattatatatataatttccaattcaggatattgccctgccatccatgaaaactgttctggcaccaaaagtaatgacaaatgttaagtgtaataatagaaaagtagagcaaagagccattcagcttcagtctttacataccatgaataaaacattaaaacatcatatggagaagtttacatggtgattgttcacctgcagtactgtggagttttaacattttgtcctcttttcagtgaaacagagtaaaaatattcatctaccattactgttatttgctgattttgttttattttttgatggtaatattctatccttatgacactattgcaaccaaattggctttaccatcttggctttagtaggtatagaagacaatggattaccatctttattgctgtaatgtgttaagcattatatgctagtagaatctagtttaattgtttcaggtggaaagtattctttgagtttccatattgaatgtgtttggactaaacaaacaataaactactgatgtctgcagcattta

SEQ ID NO: 235654 - DNA, 3516 bp, Homo sapiens
agcggaagagggggcggtggcaaagggggcgggacgtccgtggtccttgtcgcacgtcgcagcgcctggcgcccgggaagaggtggttgtgaggcagacgaactcgcggctctccggcttccgaggcttccgagttgtcggaggaagggggcggcgagcaataagaacccgccgcacccggtcctcagcgactcttctgacctccgcgcgacgtacccgccgccgccgttggctggagcatttgacattgtgcagcaaagaaatggttatggagaagcccagtccgctgcttgtagggcgggagtttgtgaggcaatattatactttgctgaataaagctccggaatatttacacaggttttatggcaggaattcttcctatgttcatggtggagtagatgctagtggaaagccccaggaagctgtttatggccaaaatgatatacaccacaaagtattatctctgaacttcagtgaatgtcatactaaaattcgtcatgtggatgctcatgcaaccttgagtgatggagtagttgtccaggtcatgggtttgctgtctaacagtggacaaccagaaagaaagtttatgcaaacctttgttctggctcctgaaggatctgttccaaataaattttatgttcacaatgatatgtttcgttatgaagatgaagtgtttggtgattctgagcctgaacttgatgaagaatcagaagatgaagtagaagaggaacaagaagaaagacaaccatctcctgaacctgtgcaagaaaatgctaacagtggttactatgaagctcaccctgtgactaatggcatagaggagcctttggaagaatcctctcatgaacctgaacctgagccagaatctgaaacaaagactgaagagctgaaaccacaagtggaggagaagaacttagaagaactagaggagaaatctactactcctcctccggcagaacctgtttctctgccacaagaaccaccaaagccaagagtcgaagctaaaccagaagttcaatctcagccacctcgtgtgcgtgaacaacgacctagagaacgacctggttttcctcctagaggaccaagaccaggcagaggagatatggaacagaatgactctgacaaccgtagaataattcgctatccagatagtcatcaactttttgttggtaacttgccacatgatattgatgaaaatgagctaaaggaattcttcatgagttttggaaacgttgtggaacttcgcatcaataccaagggtgttgggggaaagcttccaaattttggttttgtggtttttgatgactctgaaccagttcagagaatcttaattgcaaaaccgattatgtttcgaggggaagtacgtttaaatgtggaagagaaaaaaacaagagctgcaagagagcgagaaaccagaggtggtggtgatgatcgcagggatattaggcgcaatgatcgaggtcccggtggtccacgtggaattgtgggtggtggaatgatgcgtgatcgtgatggaagaggacctcctccaaggggtggcatggcacagaaacttggctctggaagaggaaccgggcaaatggagggccgcttcacaggacagcgtcgctgaagctccactgttggcaaagtcttggcagtggtacattattcatcgtgtttgcattcttgttaattttttttttggctttggaatgtgacacagcctttttgatcatttctttgatgtgaaaagcatctttggttatcagttaaattgaggtggacattatttccccaatttcacaacaggattcacattgttaatttataaatctagacttggagaattaaggactgagaaatgaccatatcttaaactatctacgacaaagtgaacttaaaaggacatgcccactgaattcaggtcctttgagtaaaaaaaaaatcttctgctgcacattttgtttaagtgttactgtttctgcctgttaatgctgggaacacaaatagtgcaatttgtgcaattggagaatcttgccttttttcttggctccccccaaaaatacaaaccaacagaaacttgttatgcactcatcaaaatgtactaatgggtactctgaactcattaacattgacatctgcaacaggaggcaacagggaaaaaatctcatcttcttttccagtagaaaatagtttgtgaaatgatgagggcattttatctgcttgctgtgaccagcgtgtgtacacataaaccttaacaagactacaagtatattccagaaggaaatcattttagttatgaactaaataataaaaattagaacttcaaatgcgatggtcttgactattagaccagatttagtagctccatatctaagatttttctacctgcccctcttcagtacagggatggctggctgctcaacacactcctcctccccttttttcctttctttaagctgtgtacagtgaaaattgtctttactgtatttttgttctctggtaatgtaataagcatgatggtgccttctattaatacatcattccagtcttgctggtaattttgtacagtatagtgtatgaattgctgtgctgcaaagccaaacagctgcaaaatgttgaaaaatcatcgaaatgtataaaaattgcagtatctttaaaatcagtaaaatggactagcatattatttatcttgttcttcagttaacaactttgtgttctctgtgggagggagggagtcctgtgtgtttgtggggagagggaaggaggaagtcagttatttgagtaagcctctagttgacttttctcttagcctgaatgtggacgttgaaacatatcacttcagggcttggaaaagtcagtcaacttgacgtacatttttagtgacattttaaaagcagtcagattctataaatggcaagtaagcctgaagtgaggatactgcaattttcggagaaaagaacagcagctctttaagtgtttgcattttctatttggggggcagggaactgtcattcattttgcacaattcttgaactgatgtcagcacccgagtggctcctgaatttaagtctgggacgacatcttttatttttacatgaatctttaaacaattctgtgagcaaagtttgtagctgctggattattgtctgtctttatagcaagttccagtaaaccacaagtatggcaaagcttatccaattttatgcttggagcagtcagtacataccagtttctgatgtttcaggcaggagtggggtaaataagtgtgaccacttaaagctgctcgttagcatggaagacttctccattctatctttgtaaaacagacaagatatgcacttgacatagtagcaaattggttctgaattatgcaactgtttgctatttagtaaactagcaaatgatgcatgtatttgtttttcatgtactgggcaatatgagtaaaatctgtccctttttccccctttgaatgaggtcttccatgtttgagggagaatctcggggatctctaaagtcgactggagcatgcag

SEQ ID NO: 235655 - DNA, 1338 bp, Homo sapiens
agcggaagagggggcggtggcaaagggggcgggacgtccgtggtccttgtcgcacgtcgcagcgcctggcgcccgggaagaggtggttgtgaggcagacgaactcgcggctctccggcttccgaggcttccgagttgtcggaggaagggggcggcgagcaataagaacccgccgcacccggtcctcagcgactcttctgacctccgcgcgacgtacccgccgccgccgttggctggagcatttgacattgtgcagcaaagaaatggttatggagaagcccagtccgctgcttgtagggcgggagtttgtgaggcaatattatactttgctgaataaagctccggaatatttacacaggttttatggcaggaattcttcctatgttcatggtggagtagatgctagtggaaagccccaggaagctgtttatggccaaaatgatatacaccacaaagtattatctctgaacttcagtgaatgtcatactaaaattcgtcatgtggatgctcatgcaaccttgagtgatggagtagttgtccaggtcatgggtttgctgtctaacagtggacaaccagaaagaaagtttatgcaaacctttgttctggctcctgaaggatctgttccaaataaattttatgttcacaatgatatgtttcgttatgaagatgaagtgtttggtgattctgagcctgaacttgatgaagaatcagaagatgaagtagaagaggaacaagaagaaagacaaccatctcctgaacctgtgcaagaaaatgctaacagtggttactatgaagctcaccctgtgactaatggcatagaggagcctttggaagaatcctctcatgaacctgaacctgagccagaatctgaaacaaagactgaagagctgaaaccacaagtggaggagaagaacttagaagaactagaggagaaatctactactcctcctccggcagaacctgtttctctgccacaagaaccaccaaagccaagagtcgaagctaaaccagaagttcaatctcagccacctcgtgtgcgtgaacaacgacctagagaacgacctggttttcctcctagaggaccaagaccaggcagaggagatatggaacagaatgactctgacaagggattaataaccagaatatacgaggagcttagaaaattctataggaaaaaaaaatcgaataatcatttaaaaatgggtaaaagattagacatttctcaagacaaacatggcaagaccagtgtatatggaagtgttcaacatcattgatcatcagaaatgcgaatcacaactacaatgaaatatcatctcacctcagttaaaatgacttttat

SEQ ID NO: 235656 - DNA, 839 bp, Homo sapiens
agcggaagagggggcggtggcaaagggggcgggacgtccgtggtccttgtcgcacgtcgcagcgcctggcgcccgggaagaggtggttgtgaggcagacgaactcgcggctctccggcttccgaggcttccgagttgtcggaggaagggggcggcgagcaataagaacccgccgcacccggtcctcagcgactcttctgacctccgcgcgacgtacccgccgccgccgttggctggagcatttgacattgtgcagcaaagaaatggttatggagaagcccagtccgctgcttgtagggcgggagtttgtgaggcaatattatactttgctgaataaagctccggaatatttacacaggttttatggcaggaattcttcctatgttcatggtggagtagatgctagtggaaagccccaggaagctgtttatggccaaaatgatatacaccacaaagtattatctctgaacttcagtgaatgtcatactaaaattcgtcatgtggatgctcatgcaaccttgagtgatggagtagttgtccaggtcatgggtttgctgtctaacagtggacaaccagaaagaaagtttatgcaaacctttgttctggctcctgaaggatctgttccaaataaattttatgttcacaatgatatgtttcgttatgaagatgaagtgtttggtgattctgagcctgaacttgatgaagaatcagaagatgaagtataaagcgttgaggaagtataaagcgttgagaaagtataaagcgttgaggaagtataaagcgttgagaaagtataaagcgttgaggaagtataaagcttgagaaagtataaagcgttga

SEQ ID NO: 235657 - DNA, 370 bp, Homo sapiens
cctggtgtaggaaagataagccacgtcagatggaaggaactttgtggggaatggcatggaggtaggagtaatgtggtggatgaggaaaaaccaagcacagttcagcatcatcagaatgatgtgtgcatgtggcatgtgcatgtgtgcacaggtctgtgcgtgtgtgcatgcatgtgtgcatgtgtgtgtgtgcatatgtgtataattgtggggaggggctatcaagaaaagaagccaggctaggggagggatagcattaggagagatacctaatgtagatcatgggtcgatgggtgtggcaaactaccatggcacatgcatacctgtgtaacaaacctacacattctgcacatgtatcctagaacttaaa

SEQ ID NO: 235658 - DNA, 398 bp, Homo sapiens
ctgagccccgggggccgttggctgccagtggcccactctgatctgcggccccccagttgccgccagccccccacggcccgcacggaaatttttctaccgtttttcagcttccaggctctcctgaaagtgctcacaaggcaaatcgccatggaaagcgagttcaagtggccttttaaagtagaccaactaagcgaatggctttgtctccgaagacacagagaccttgggcagccagtcagggacacacccagaagtgtttacactgctctgggtctgcttttttaggggtttttgttttgcagattctgtgttatgcctggttaggtatgagcttcagaccttctgaaccggagcaggaagaaaaataaaagctttcctccaaaccccaagaccaaact

SEQ ID NO: 235659 - DNA, 285 bp, Homo sapiens
aactgatccatccttgaagtgtggtttgtggcagcttcagtgagtacaaagatgactaaagtcaggtctttccttcaaatttctcacaattcagaggggagatgatgatacaccttgacgaatgatttctttggaaattaattactctctttaatacaggttttgtgtgtctttggggaagaaatctgaattattattttttttgcctttcatgtttattaagagcagttcaaactatttcttttttatcaagcaggctaatgagtaatttaaagtaaggagtag

SEQ ID NO: 235660 - DNA, 230 bp, Homo sapiens
atagataagcatgagtcgcaagacatgttttcccaagatgtaagctgagtcctaagaatgtcacctgataattaactgctttgttctcgcttttgtaaaccagcttcctgcatcatataattcccacctcaaagtgcataaaagacattcattttctttgtttgctgctcagactttcaagatgcatgtccgctgagctagtgtacacttaaaatattccctcctgaact

SEQ ID NO: 235661 - DNA, 1026 bp, Homo sapiens
ggaatgggagagccgcctccaaccccagccccatggagcagggcagaaacgctgcccactgccctgctcctgccaccaggaagggcgtgtggggggccactttctgtaaagaagaaaccgcctgaacaacaagtggctcaaggcacccttgtctaacgaccagggacactgagcgccagggcccaagtcaccagcaagagaaaacccaggcggagcccagggtgtcccccactgcccaccagccactgcggtcaacgtgaagggcaagggtgcaagcgggatcgcgtcacagggagccgagtgagcccagaaagtaggagaaggacgtttccacccacctggagcgcagtccgtttgcagccggcggcagaatgctgctgtctccatcaataaagtccatgttagccacctagaggataaaataccacgaggaggagtagcaaggtgcccctgttgacagatcttgaagcacaagctcactcccagaagcacagctgcctagtcaacaaacagctgacaatacatgtctgaaggagctcagctgggaacagaagaatggccccactgagcctagcctaaatggcggaccatctcaattatgagctaataagttttggatgatttgttatgctgccatacctaactaatacatgcacccagtgcagattgggtgtcaagatttaaagacagtttgattattagtcaccttctaacaatgggcacctaaaggtactgacatttttcccgatttaaagttaaatgtcttgtaaggcaatgttgactgatgcaggaatacttgtagacatgtatgcatgtgattggtgcttatatgcacacagtcccccacaccacaggaaaaaaccgatgaccagagcctgaccattatggccaaggccaaatagccaaagtttgcctttaatctattttcttcatatctaaaaattggaggtcaatactgtggacaggtctgaagacatagagttttgttctcctgtggccccatcattcttcagtggtctacctgtg

SEQ ID NO: 235662 - DNA, 547 bp, Homo sapiens
ccacttcctcaatctgtctgtttcttttgctgtttccttcatcttgcattccttctgcattggaactttctgttggataccttactttttttttcagggtcccatctcaaataccactccacttaagacatttttgcatagaaataatctttggtgtatttacttttgtcatctgaatgagataaatggaaaaatttggcagcataaattgttcaaagtcaatttggtaattcacattgaagaaacatccatatgtaagagattattagaaataaagccttttaaagaatgtattgttaataactattagtagatttgttcttggtaaatagaagaacattgttccccagaggtttatgtgtatattccatatctgaaaatcaatgtgcacaaacacggggctgttattagcaaagtcattaattacagtcctgcttgctcttctattatgaagaatattcattcgtttgctttctctgactgacaggcagtaatgacttcaataagctaatgagacatctagttaaataaatatgattttaagtta

SEQ ID NO: 235663 - DNA, 519 bp, Homo sapiens
gaccacatgacaccagtcccattcttgaagcagaatgttcaaagagtgtgtacaaaatgcagaagccacccatttccaagaaaaacggctatgcttcaaccagcctaagtctactgcaagcaagggcacccataagagatggaccttgagggattcaacctaactaactaggccccctgcatgtgagctcatcacatggctgcccggcaagatactacattttccagtcttccatgaggatagatgtggtcacgtgactgagtctgggccaatgggatgtgtgtagatgtgatgtatatttatctccataaagatgaagctggttgccctgaatattctgtccatcagttgggaagtggcaatgaatggaacaatgccttgggccccaagacggatcctgagtatggcagagctgcccaccagcctaggttcctatatgtcatcatgggacagagctgccttgtagaccctggactgttatattaatataaaaaagaaataaacttctatcttatataa

SEQ ID NO: 235664 - DNA, 2554 bp, Homo sapiens
tttaaattaatgtgtatttctcttctctctctctcacatacacacacacagccatttaatccaagctttcattcaaaccaaggatctttccacaaaatccctgagagtcaacttttactgtttactaaaactgtcttcactgtgtggagcttacttctttgtgaagcttggtgtttcatttggacaggccaatttatggaaagctgtccttcatactgaactgaaattgatcttttcatctgtgcctatcattcctggaatcaaatgagataccatatcctgaaattttttgaaatggcaaagcactgaataaatataaaatatattaatgtcagttctactgtatagagtttgaaaatttgacaagcacactgtcctctccaagtcattggaatagatgaatatgagaacagaacaagagagatactctgcacaggttttggaagtgctcctttcaatttgatattaatccattaatcagtattctttaaactactctatttaagcagtgagaggcagggaccaggttaagccaagacctagagaataaaaacaaagccaaagtagaaagaaaaccaggacccaccaccaccccaggcctgcagcaaatacatcagtgttcactcaaggcccaaggacccttcagtcagcttgtgatgaatactgttgagcctgggactctcccttcaggacagtgctcccctctagcccaggaaaagtccagtaataccatccatgtgccaaggcctcgaatcatggaccccaagagcccacttggttctctatccctctgtggccaatatggtacctaagcttcaagacaaagtcggctttactcttccccctccttttctcaagcagaaggagtctctcatcatagccagcatagctggggatgtgctgagtcacacttgaagccagcatgtctctgaatctcacccaaggcccatagcaagtactgtctagctaccactgctaactatgcagggccaaagggctttttagtcagtagttaatgaattgtggcaggactgagtccttctctttaaggcagctggttctcttctggcccagggtgtgtctagaaataacattaggagctagggcctggaatgggagcctcaagtctccggctagtgctctatcctactgtggttgagctggtatccaagttacaagacaaagtcctctttattcttccttctcctcattttaagcagaaagaagtctctcccagagctgtgagctgtgctacctggggttttgggagtggtggtgcaagcacaccctcggctgtcctagccagtgtctcgctgggtcacgtgttccccaagtctactttctcgagtccagcacagcaccaggacttgccaaggaattgcagtcctcttggcctagactgtctttcaagtttacttaggaccccatagcatcttagcccatggtggtggggcttgctagaagaaagggtccaacaactgggatgggtgagtccactctggctagggctggtgtatatgctccctccataggcattgactaagttctatacagtgttgcttttctgacagggcagcaatgagttccaatgctaagtcccacaatcactgcactctccccaccaagagcacagatcttctctcagcaccacatggcagctgctgggagttgagggtagggtggtgtcagcaattcaaggctgtcttttctatcttcttaagtgcctctttcagtgatctgaggttaaaaccaggtaccgtggtcactcacctgatttttggatattatgaaggtgcttttttgtgtgggcaattattcaatttagcgttctatggggaggacaatcagtagaggtttccatttggccatctcgctcctcctcctctgttccaattctgagtccagcaaacaaaaatagcgccctttggaaagaagctactataggacaagcttagcagggagctatgcttcacctccatgagagcagactacctacctaactatttactttggaaaagagctccagatgaaggcctgatgagattcccatgcttactctgaaatcatcattttggaatcagtcattaaagcttcgtaaatatccaagatatttattgtacacactactgttcaatgtaattaataaaatattaatttataacatgctcttagcccaaccaaaagatcatgctaattagttttcttcaaaaaatattaataagtagtaaaaatcctaccttgagtattcagccaatattaagagttatgcctggtggggtgtggtggctcatgcctgtaatcctagcactttgggggaccaagtcaggcagatcactttaggtcaggagttcaacgccagcctggccaacatggtgaaacccgctgtctactaaaaatacaaaaaagttagctgagtatggtggcggtcacctgtaacccaagctacttgggagtctgaagcagtagaatcgcttaaacccaggaggtggaggttgcagtgagctgagtcacgccactgcactccagcctgggtgacagagcaagactccatctc

SEQ ID NO: 235665 - DNA, 342 bp, Homo sapiens
atatgcttataaagatggaaagaagctttgcatttagcattttccatttaggctttgtgaaaattgttcttattttaaaaatagccctaacatgtgtgtgtctgtgtgtgtgtgtgtttcctgagtattctagatggtacatggtattctgaaaactgaaagtcacacctccaggaataaaattaggaaaagcagaaattggagggaggtctctagaaatgatgtagtattatctgaatacctcaaatctaatccaggtcatctgggtagaaattctgggagggatttatttaaatataaataaaaatttgtatacctaaataaagattgtattctacattt

SEQ ID NO: 235666 - DNA, 88 bp, Homo sapiens
attcaattagagttatttgtttttgcatggtcatccaatggctttatcagtgaatcaacagcatgattctttatccgtattcaatagc

SEQ ID NO: 235667 - DNA, 384 bp, Homo sapiens
gtaaagtctgagcatcagttattcaccacattttacacttctttaccaaaattatgtgagtctagattttttgcatttccatataaattttagagtatacttttttacgtctacaaaagaaatgacatctttactatgttgagtctcccaatccatgaacatggtacatcttgctacttagttaagtttcctttgatttctttcatcaatactttgtaattttcagcatacatattctatatatactttgctagatttgtactaaggcatttcattctttgaataatttgtaagtagcattgtgtttttaattttggtttccacatgtgcattgtcaatatatggaactgtgattgatttttgtagcctgcaaccttgctgagc

SEQ ID NO: 235668 - DNA, 2142 bp, Homo sapiens
  misc_feature (1070)..(1070): n is a, c, g, or t
  misc_feature (2092)..(2092): n is a, c, g, or t
cttagatgcctacctggtgttctgttgtattgtggctgagctggcactcaaattacaagacacagtcctttccactcttccctcccctttccttctagttctttcactcactgactttataaaaaggagaatatgtccaacacattgtttcattacctagtatagttcctttaatgacacataacaaacatcttttaacataaccgttacgtgtttcttctgtaaccgtaattttaaacatctacacaggatttcattgaacagtaactttagtccctgcttcctgaacaccgaggtgctcaataacttacatacattacctccctgaggtctcttggaggtaggtatggttgctgccatcttgtagatggggaagctgaggctgagacatgcaaagccacagcctgggttcacacagctggtcagagacaggatcaggattcaagcccaggtgtgtttaccaccaaagccaaaggacttccattgcggaggaaggctggctgccccagaggaggctacagcatgtaataggaggtcttctcctgtagctctgtgaacactgtgagccagctcaggcaagaatctgccccccaaaaagatacccaaatggccaataggacatatgaaaaggcagtcagccacactagcagtctagacaatgcaaattagaaccacaaggtgatggataccactacccacccacaagaatggctaaaaggaaaaagacaggtaatatgaagtattggagatgctcacataccactggtgcaagtgtcaattggcacaaccactttggaaaactgcttggcagtatctattaaagttgcacatgtgtataacttaccaccccagaaatgcacatttatgtactccaaaatgcatgtttgtggcattaaaatgttcatggcagcaccatttgtcataaccccaaattggaaactactcagatgtccattagcaataggattgggtaaatcctcattgcatgaatatactaggcagcagtgagaatgaactattgttgaatgcaacaatatgaatgaatctcaaaatatattgagtgagagaanctagacttaaaagacacatagtgtatgattttattatatggagtctaagaacaggcaaaagtcgtatgtggtgctagaagtcaggatggttggctcttgttccttgatctggatgctggttacatgggtgcattcatttcatggcaattcatcaagctgtaggttcgtatgtttttgattgaagcattacctacacttttttgagtggggctctgcaattagcaggtagcaaaaccagccaggcctgtgtccttccctgcagggtggtgtacacttttttgagtgtaggtaatgcttcaatcaaaatttacattaggccagttgcggtggctcacgcctgtaagcccagcactttgggaggccaagacaggcagatcacttgagcccaggtgtttgagaccaacctggccaccatagtgaaaccccatccctactaaaaatacaaaaattagctgggcacagtgatgcacacctatagtcccagctacttgggaggctgaggcatgagaatcacttgaacccaggaggcacaggttgcagtgagccaagatcaagccagtgcactccagcctgggtgacaaagcgagactctgtctcaaaaaaaaaaaaattacattagaagttgggtatggtagtgtgcacctgtagttccagctacttggcaggctgaagccggagggtcacttgagtccaggaattcaaggccagcctggaatagcaagaccttgccactttaaaaaaatcacagaggggctgggcgcaatggctcatgcctgtaacccagcactttgggaggccgaggcgggtggatcacctgaggtcaggagttcaagaccagcctgtccaacatggaacagttggcccaacatgggccaataaatatcccatgtatatttttagtctctactaaaaatacaaacaattagctaggcgtggtggcagacgcctgtgatcccagctactcggggggctgaggcaggagaattgcttgaacccaggaggcggaggttgcagtgagccangattgtgccattgcactccagcatgggctacaagagcgaaactccgcctc

SEQ ID NO: 235669 - DNA, 390 bp, Homo sapiens
tgggaaagactggacttcaggctccctgcaggaaggaagagaataaagagaaagaaaagaatattttcttcccagagaacggtgatatgagcacaaagaagccagacaagaagcagatggtgcacaggcattaacctacaccattgcacaaatgcagtctttctgtgtggcttttaactgcagtcaagttggacagactgaacgacatagtttagatgtctgtcccctccaaatctcatgtggaaaggcagtccccagtgttggatgtgagggctagtgtgaggtatctgagtcatgaggacatatccctcatgaatggctggtgccctccttgtggtaaggagtgagttcttgctccgagttcaggcatgatctggttgtttaaaagag

SEQ ID NO: 235670 - DNA, 503 bp, Homo sapiens
aggctgcagtgatctgtgattgcaccactgcactctggcctgagcgacagtgagaccttgtctgaaaaaaggtagggaggaggggcgggtgggtgcctcatgcctgtaatcccatcacttcagtaatttgggaggcagaggctagaggatcacttaagcaggagtttgagaccagcctgagcaacatagtgaaaccctatctttttttttttgagacagagcctcactttgccgcccacgctggagtatagtggcatgatctcagctcactgcaacccccacttcccgggttcaagctattctgcctcagcctccccagcagctggggctacaggcgcgcgtcaccacgcccgctaatttttctgtttttagtagaggcggggctttaccatactggccaggttggccttgaactcctgacttcgtgatcagcccaccttggcctcccaaagtgctaggattacaggcgtgagccaccatgcctggccgagaccccatctctt

SEQ ID NO: 235671 - DNA, 478 bp, Homo sapiens
gcgcgagccgcagcctctcctcccgtctcgcttcctccgacaggcgcccgactcggacacacggcgcccctgtggttaccacatccactgctttttggtctcctcacccaaccccttaacataaactcgacaccagggaaggcatcttggacgattttggtccctgagggtcctagtgcgaagggcagggagagagggagcggtgtggtgcagggggatacagaacgcggaggacatctaggggctgaggatgcggggacgaggagcgcgcggaagagccgaggttccggggttggggggtgcggatttcagaggaaccgccggggatgtggacggactcggaaggaaggggtcccagagaggacgcgggcggctgcaggacacaagaggtgcgggacgcaggaggccgtggggtcgtgcgggagcccagggcacctcgacatggacccgccagacctgtggctcctccagcggccgc

SEQ ID NO: 235672 - DNA, 676 bp, Homo sapiens
ggaaaatatagatataggttatatggtttcaatagatagaataaaatgaggatacagacacagctgactataccagtttaattatcaaatgctgagatatagctctgtgaaggtccactgggtctgtttttacatcatgctcatcatgtttagctatacctaattttcactgaattttaaaaattctgctgggcttgatttgtaactgattaatccagctcattaatatttaagaatctaacattagtaatataaatttggcatattaaaaatgataccaactaccttttattatgtgcttagactgtttcaggctctgtgctaagagatactagtcagacatcacaagaaacctgagataggtgttgtgatggtcaccactgttgagtggaaagtactaataagactcagacagtgaaagtgacttggccaaggactgtcagtaagtagggagtgaacagggggccaaaccccagatatctgactggaattgaagcttgtttttaaacttctagatataatatctcatcccatgcctcatggacaaagttcagaaggtgtaagtgaggactacattgcaagtaaggatctgtgagtgtgagagaatagagatgagttataggtaaacagattgtgagttatctcttcgttgttgggaatacacaggggaagggta

SEQ ID NO: 235673 - DNA, 406 bp, Homo sapiens
ctctttaacccagatggtcaactgtgactattacatcccaggctctcttcttaggtgtggggaactcaacaaggtatgctccctgtcttcaaagagctatggtctagtgggagagacagacaggaaaatagacttccatagagtattgagagctttgtcaggtgtaagcagtgggggaatggagaaatggggagttactgcttgataagtatgaagtttctttttgcagtggtggaaatgttttggaactagttagaggtgaaggtttaggaccctaaacccagtatcgccggtcagagaaagtttcataggagagatggcttctgaagacatggaggaattaatcagatgaagaggaaaggggacattcagagatagagggagtaacctctaggcaaaggtctgg

SEQ ID NO: 235674 - DNA, 569 bp, Homo sapiens
aacccttgtgtgtatgtgttagtttttttcccctaaggttttgtcctctagttttaactagagagacacatttgggatattaataaccgaattctagcaagcattatgatctcttcagatttcatgtagtttgatgtcagaagctgcatagcaaagttaagcctgatctgaattggcttcaagtggatagagctgtatgaccctcagtcttctcatgtatagaatgacttatatactctaaacttccttgtagttttcatatttcatgactatgaaacctgtgaaaacttaccagtgttttttctattcatacttcctttgagtctgcagctgctgttcttctgatttgatttttttgttgtttatttttattagccactattcattcagtaccttttatatgtcaaaacgtttgatatttaacctacgttatttaagggcttttgtactgctgctgtactttataggtgcatagatatggtaaaatcacaccatgcctcctgctctgactctggataacatattcctacagcaggatctcatttcaataaaaattaaaagaaacacta

SEQ ID NO: 235675 - DNA, 565 bp, Homo sapiens
gtgactgagagagtacatgatcatgtactaaatcagagacaggaggtaccgaggggtttggagggtatcagtttgaactaaggtcatccgagaaagtttctcagaggaagaacagcttgggttagccagtggaggctggtagtttgggcagagaaagtgatagatgagcagaagctcaaaggcaggggaaggaaatcagactcaataggggtaacatcttctccagctcacagaggtgaaacataaggcaccaacctggatacaaatacaaagaaaggggccaggtgcagtggctcacacctgtaatcccagtatgttgggaggcgtaggcgggaggattgcttaaggggttcaagaccagcctgggcaatatagtgagaccctgtctctaaaaaaaatatttttaaaaatttagccaagtgtgctggtgtatgcctgtagtcccagctactcaggaggctgaggtaggaggattgcttgtgcccacggtttcgaggctgcagtgagctaggctcacaccactgcgctttagtctgggcaacagagagagactctgtctctgaga

SEQ ID NO: 235676 - DNA, 689 bp, Homo sapiens
  misc_feature (664)..(664): n is a, c, g, or t
tagtcgtaccgaaattctccttcaggaaggatgagggtagcctggattgactggaatctgggtcttggggtcaggcaggtattgatgtaggtcttttatggcaataggactaaaagtactcaatgcaagctgggccaccagagccagggtcactgtttgaaaaaagaggctggaggtaggcctccccaccctcttttcattctttcaggtgaaaggaacctgaaaagaatcccctgtgtctgatgcctgggccatggcttacagtagtagttctgctcttagaaggcaactgtaaaacctagagattggtgtgaggagtcagggagtggaggtggagaaaaaaaagcagcaacagtgacaataacaacaaagcctcccactcaaaaacgaccccgcaaatctaacattaatgaagacagccaaggtatcaacagtcagaatgtaaatctactgccgaagaaaataactttgtagacagacctgattaaaatagtatattcgggctgctcagagggaaaagtaaaggaataatgttcattttaaaagaatgagaaattaggaaccaaaaaagaaacaagaacagaggatttgaaaaagaaccagtttgaaattcagggactgaatcattgaaatgaaatctaagtggatcagataaactattgtngtgtttctttttccctcagttgctg

SEQ ID NO: 235677 - DNA, 518 bp, Homo sapiens
ccctactcccatcagatctatttggaatagttcttgtgatgcctcctgttgattactcagttgattgaagtgaatttttcttggaccagcaattttcagaagtttcatgttggggaggaactagggctatgttctgggctagctggaatttccctcatgacccaggattcttgtgtcaggttaattagcctttacttcttcccagcccttagagatagctcccataaacttttcaccgagttctatctctgctattctctcattgctaaagggacaaggtgcttcttttaaatatgctgtctatgtgatttctcatgcagtccaacactctctgcttcctagttctggggaagctcttgatgctagtttgtgcactcatcctactgctgcaaatgaatgatttttattttgcccttgtctctcactgccaagaaatatactttgctggctcatgcatgatccagggtcacagtctttttccccccttcactttctgccacgtatatctccacttgatc

SEQ ID NO: 235678 - DNA, 440 bp, Homo sapiens
acaccatcacctcagcctcaaatggggatgcctcagcttatcaccatgcagcggacagaccagaggcgtgaccaaccctcgcttttccaatggcatgcaaaaattttgctcatggttgctagaactgtcattatttttattattattttttctgcagtacaggcataaagaagtataagagttttaattatgtccacttgattttttttaactttctggctaaaaaatcctttgaagtaaaacccagcaagaaatgggtcacagctctgtgaatggaactacaaaatgtgagcgaaagccattttgataggaaccttgagaaatggacagccgcctcacattccttcacaggaagaattaaaggttataaagcgtccagtccccctaactcaaacacagaaacataacaattttacaaaataaacctttttctaacttga

SEQ ID NO: 235679 - DNA, 223 bp, Homo sapiens
tgtgacatccaaaaaaaattaaaaagtgatggggtgaataacaggaagaaaaggctgaagaacgaacttgtgcctggaacacacagtcaaggaattctccactttgtgatgtcagctttcctcaaatatctggggatgctttattgcttcctttgctttgtacttgaaaatgcccaagtttttttgtacacagcagagcgagatagagggaaagtatgaaaaa

SEQ ID NO: 235680 - DNA, 547 bp, Homo sapiens
ctaacttctccagaagcaccttgatggcacaggccatcccgaatcttgccagtattcatgcagtgttgtcttcaggttttatttgttgcctagtttttaaagttcactgtctgtggccacgctgatggtgcccatgcagagtgctgaccgcaaggagctctattccgtgctgagctggacacttggagctcccatgacgtttcacggtgaggaagcagggattctgaatcgcaaaggagcagcgcgaatgagggctgtttggcctccgcctgttgctgggttgtgacctcccttcacagaatctcttgagatggatgccactcctgaagtgacttggctctgttttaggggcctgctcgtggggtggtgtgtgcagctctcccggcgctcaggaaaagtggagtacagggacacctgagggatgatctgccatcggccagggccctgcctgccttagcccccgctgagagctcagcatagtcgtagcttccacctgcagctgtcttcctgagcattttcttaagtgaaaataaagattcagccatga

SEQ ID NO: 235681 - DNA, 1686 bp, Homo sapiens
agggagggttgggtgggggaagaggagatgttgattatgttagaaggaaaacattgctcgtgtgtgtgtttgttttttcttatatctgtcttgccaaaggaaacttgattttccctgtgattggctttggcctctgtggtctggtctgcagcagtgtgtggtggcatgcaggtaacatatggggtgtccagtaggttcagggaccctgagggtgcatttacatcccttcctatggttgcccatgccccccagaccctgccaacctctcctaatgattcattacctctgtacatagcaaaagcataggcaaaggatgaatgcgtgaatgcctggatgtgcagttgagaaacagaggcagacatagacatgcaccaattaatttggagccaagaggtgagtgattgatgtatcttaaatctaggaaagttaaagtgaaacaggttctttgtgttgccctctgtcaagttactgaatgttgtgctaataacacaacactttaaaaccttacttacttttctcataccaaggctagttctttctagaccaaaaacacaaacaggataaaaagcaaaccaagaagttgaaagctaacctgcccacctcacccctgtgatacaaagtgtgaaccttaaggattagttggtgggattgaggagagaattattcttggtgggaacatgaatgagaaatgatgctggcttaggaaaaatcacaagccctttctgcccatactctgggacaaactttcttggctccctgagtttggatatagactgtatctctagaaaggctatttttttaaataaatgatcccacagaacttaagtgggatttggtttagataccaaagacactgctaatgtcattgcttatccttaagttttcaaaacaggcagagggaataggagcaaaaagccaaaatttggaaaagctttactttatctctttccttcccttttccccttttcccagtcccctgctttttgaaggaagtcttcttggttatcctggctttggaaaagagatttattttgttttgctctgctggctctttaaagatggatagttgctcaatgtagcagtgatgttcttggaattgctgagaaatttggggagggcaaaagataggggcagaattttttcattatttccctttatctaatacttttaaatagaaccaacacagcctatatgagttcaggcaatatttagatgtggtatctccatctgtctcctgtaaaagataagaattttcaagaacaggattacgtggaaaaccaaaagatcttcccttactctcctataaatgttttgttccaaatgtttttatatatgggctctagggagtcaggtagttcattgtttcggtgtactattgataggacacagaaagggagagagggtaaagaaatgtatcgctctctgaatattgcatcaaaaatgattaggttgcagaacttcatgaaagctttactaataatcttattgttctgacattatgtaaaggtggtattaatattgtatgacttgtcaaagtgctagataggtttataagtaggtaatagggatgttgaagattagagcacttgaaacagaagttctgggaaaacaaggtgtgtgtaatggaacaccactttgagcacagaaacaaaggtcccttggacctggtagggaagatgtgattta

SEQ ID NO: 235682 - DNA, 1196 bp, Homo sapiens
tcaggcgcgtggctcctgcctgtatcctgcactttgagaggccgagggagtcggatcacaaggtcagaggataaaaagcaaaccaagaagttgaaagctaacctgcccacctcacccctgtgatacaaagtgtgaaccttaaggattagttggtgggattgaggagagaattattcttggtgggaacatgaatgagaaatgatgctggcttaggaaaaatcacaagccctttctgcccatactctgggacaaactttcttggctccctgagtttggatatagactgtatctctagaaaggctatttttttaaataaatgatcccacagaacttaagtgggatttggtttagataccaaagacactgctaatgtcattgcttatccttaagttttcaaaacaggcagagggaataggagcaaaaagccaaaatttggaaaagctttactttatctctttccttcccttttccccttttcccagtcccctgctttttgaaggaagtcttcttggttatcctggctttggaaaagagatttattttgttttgctctgctggctctttaaagatggatagttgctcaatgtagcagtgatgttcttggaattgctgagaaatttggggagggcaaaagataggggcagaattttttcattatttccctttatctaatacttttaaatagaaccaacacagcctatatgagttcaggcaatatttagatgtggtatctccatctgtctcctgtaaaagataagaattttcaagaacaggattacgtggaaaaccaaaagatcttcccttactctcctataaatgttttgttccaaatgtttttatatatgggctctagggagtcaggtagttcattgtttcggtgtactattgataggacacagaaagggagagagggtaaagaaatgtatcgctctctgaatattgcatcaaaaatgattaggttgcagaacttcatgaaagctttactaataatcttattgttctgacattatgtaaaggtggtattaatattgtatgacttgtcaaagtgctagataggtttataagtaggtaatagggatgttgaagattagagcacttgaaacagaagttctgggaaaacaaggtgtgtgtaatggaacaccactttgagcacagaaacaaaggtcccttggacctggtagggaagatgtgattta

SEQ ID NO: 235683 - DNA, 548 bp, Homo sapiens
catgttacaagcactggagatacaaagacgagtaaatcccagccctcaagaagagtataatctcaggaaaaaggcaggcaaatcaatgaagtattacaagacactgataagtgctaagatctttcttcaagggaatgggtgagtcctgccagtgactacaagaggtttatctccagccacacagattcagcataaactggaaccaagatccccacaaaggcttcaccatacaggagacagtgttatttatctgctcataaatgctgatagtcaagaacaaaatgaacgagtcacaagatattgaaaacaaaaatccttaggagcagctgatcctggtgggccaggaagctcagaatcaaaatggatgctcagttggaacatccgcactagcctgccacattagcacgtttgctaccacctctttctgcagatcccatttgcaatttctgggtttacaccatcagactgattttctatgtaatcttcgttataagcctcttcagatgtttttaaaatgaaatgaggaatacattaatgaataatcaaat

SEQ ID NO: 235684 - DNA, 1239 bp, Homo sapiens
tttttaatgagatggggtctccctatattggcctgtctggtcttgaactcctgacctcaggtgatccgcctgccttggccttccagagtgctgggattacagcatgagccaccatgcctggcctgtatgtgtgtgttttaaagcactagatagggatggacattaaatctgtgttgcagggaaactaaacagaggtttccaaactgaaggcaacctaattgtaaatgcctgtgttaaagaggcagcttgactgttcatgtttcattttgcaaccattggttttgagattatcttttatgcacatttggagtcccttttcaacagtgacagtttcttacacgaagaatggatatggttattgggctcctctaagaatcagagtagggtaacaatgtaccaggcaaattgtaagttgaaattctagataagcatgcagatgacttacaatataaatgaagaataggaaacattttatcttcttaccaagtaccttactataagtaaacctaagataagaaaacccagatttacctataagattgttgggagttaatggtgtcaataaaaggattgatggtccctctaatgaaacccagtagatgtttgttgaattgaactgaaaatttatgtggccagacacagtggctcatgcctgtaatctcagcatttggggaggcaaaggtggaagtatccctcgaggccaagagttcatgaccagcctggtcttttgtagagaccctgtctctacaaaaatataaaaatcagccaggcgtcgtgcacacctgtagtatcagctacttgtaaggctgtggcagaagtgctttagcccaggaggttgaggctgcagtgagccatgtccacaccattgcactgcagcctgagtaacaaaatgagaccctatctcaaaaacaaaaaggaaaagaaaatatacatgatgggattcctattgtgaagtcatttaaaataatgacttgaatttctcagaaatttcaggagcatataaactatttaaatcaaaatattcttacatatagaaaccaagtaagaataaatgagagatatttcagtggacatctggacatatttatggactttgagtatctagcaagtagaaaggaaaaaaatattcatcatactctaatcatttttttatatctattgagcttgtttcttgtaaacttttctttatcttataaaggcatatctcgcttttgtatcgacctgttccttaaaaaaaaa

SEQ ID NO: 235685 - DNA, 686 bp, Homo sapiens
tagccatgtggagaggctacatggagtgaaagatgctctgacagtccccagggtcttctgccaactccacccaggtgccagcatttgagagaaaatgccatcttggacactgtagccacagcaaatgccacatggagaagtgcagaaaccaggtgatagacagaaacaaggcctcagacattcagtcccagcacaggaatgtggacatcaacctccaaggtccctaaggatccctgcctcctggtctgcacacctccgtatagtcccttcccacactgcaccatgattaggctgtgcgaccaacagcatgtggcagtgatggtatgtcacttcaaggatcagaatacagaagacactatgacatctgtcttggatgctttctctcttattcactcaagggaaaactagctgccgtgtgaggacactcaggcagtggatggtgaggcccatgttgtgaggaactgatgtctctgaccaacaggcagtgaggacctgggacctgtccacatccacatgagtgagtttccaagtggaccatccagtcccaatgactgcagcccaggctgacagctggacagcaacctctacagaactctgagccagaaacaaccagctaagccattcctggattcctgatctatgtattgtataagaatagataactaataaaaattatcacaatcatc

SEQ ID NO: 235686 - DNA, 283 bp, Homo sapiens
gtaagtgaacctctggaaatagtggtctgaaatcttcatccttagtttctcagttctgttcttttttgttttgtttttgtagtttaaagttgtaccctgaatgaacactgttttgtttttataaaccatttatgtgtataagtcataaccttcttaaaaagccaagttatctggtttctcaagtctgcagatttgaaatagcaaactagaaagagtgggtgtatcgtaggaaaggaatgcactcacatctaatagcaataaaaattgacatctgtctcagatt

SEQ ID NO: 235687 - DNA, 551 bp, Homo sapiens
attactagtatggttgaacgtcttgtaaattatgcatatgcctgtttacattttgggttcacaatgtctttctgattcatttgtgggaactcttctcctttaatattgttaataatggtttttgacaggcattggttttaaatatatataatcaaatctccccctttcccacttttttaattgcttataaaaacttggaaagtaattatccatcctgtgtttaccctggctctttcatgaagtctatagaattactttatacacatttgcttatttgataaacattctctctgttttgtatgtgcttaaagaagctgttttggggctcatacctgtaatcccagcacttcgggaggcgaatggatcacttgaggccaggagtttgagaccagcgtggccaacctggcaaaaccctgtctctactaaaaacacaaaaaattagccggctgtggtggtgcacacctgtaatcccagctactcgggaggctgaggcacgagaatcgcttgaacccaggaggcagaggttacagtgagccgagatcatgccagtg

SEQ ID NO: 235688 - DNA, 411 bp, Homo sapiens
tattctctttgtgacccgaaagttgagagtaggggcaataatgtcacaaaagacatagttaccctctgaccaataaccactgttgttgctttctgtcttttcacagaagtagtgggtttgttaattttcagcttggacacctataattatggacttttgcctctggaagttggccctttctctctgtgtttcattttgcttatgcagaattgagccgacttccagacaccagagccctcccaagctgggtggcaccattgggagagcctcatgggaagaggcattgctctgcacctggctttttctgtcaggtcttcaaaagagacttccatagttttgggaactggagtcatagagcaaaatttcagttggttaatactttctgattaaaggaatctaattcagttaaca

SEQ ID NO: 235689 - DNA, 397 bp, Homo sapiens
gagctatgattatgcatcactgcactgcagcctgggtgacagagcaaaccatgtttctaaatacataaataagtaaataaaatgaagtaatgaaacacctacaaggtaaatgcaccttgaagacttgtaaaattaaagacgccaattgcaaaaggtttcatattgcatgatttgatctgtatgaaatgtccagaataggcaaatctgtttgagagagagaaagtagatgagtgcttgcctaggaccgggaggaggtttgcgaggaaatagagattcactgctaataagtacagggtttcttttgggtgcacttatgaggatgctctgaaattgattgtgatggttgtacacctctgaatacatgaaacagcattaaatcatcactttaagtcaactg

SEQ ID NO: 235690 - DNA, 1066 bp, Homo sapiens
tacaagtgtaatgaatgtggcaaggtttttaatcaacaagcacaccttgcacagcatcagagagttcatactggagagaaaccttacaagtgtaatgagtgtggcaagaccttcagtcagatgtcaaaccttgtataccatcatagacttcatagtggagagaaaccttgaaagtgtaatgagtgtggcaagaccttcagtcagatgtcaaaccttgtataccatcatagacttcatagtggagagaaaccttaaaagtgtaatgagtgtggcaacaccttccatcacaattcaacccttgtaagtcacaaagccattcatactggagagaaactttacaagtgtaatgaatgtggcaaggtttttaatcaaaagacaacccttgcacgtcatcatagaattcatactgcagagaaactttacaaataggaagaatgtgacaaagttttcggttgcaaatcaaaccttgaaacacataagaaaatgcatactgaagagaaaccacacagatgtaaggtttatgacaagatttttgaatataattcatacctggcaaaacatattagaattcaaactggagagaaaccttacaaatgtgatgagtgtggcaacacctttggtcaaaattcataccttgtaattcaaaaggcaattcgtattggagagaaaccctacaagtgtaatgaatgtggcatagtttttaatcaacagtcacaccttgcaagtcatcatagtcttcatactgcagagaaatcttacaaatgtgaagactgtgacaaagttgtcagtcacaaatcacagcttgaaagacaggagaattcatactggagaaaaaacatacaaatgtaaggtttgtaacaaggcttttgggagtgattcacacctggcacaccatactagaattcacactggagagaaaccttacaagtgcaatgagtgtggcaaagcctttagtgggcagtcaccacttattcaccatcaagcaatccatagtatagggaaacttgactaatataatgattgtcacaaagttttcagtaatgctacaaccattgcaaatcattgg

SEQ ID NO: 235691 - DNA, 623 bp, Homo sapiens
caactttctaacataaaagtgattggaaagagtcctttcttctgcagtgtttcaggtaatttatggattgaccaaaaaaataccatccccaccctaacatgtagcactggattcaatccccattacttagcctagagttctaagcctgtcagaagggaggggccctcgcagaggagtggggcagttctctgcagcgcagcttctctgggcctgccgagttaatgttgcctcatgtctgccaatgatgttgttgagcaggatagggttctcgttgaaccttgaagctcagtgctgaccatatcacctccttctgctctggggccttacttcaccatttaggaagaacttataccagctctgttcactgtttgtataaatccatttttgtactgctataaagaaatacctgacagcctggccaacatggtgaaatcttgtctctacaaaaaatacaaaaattagctgggcgtggtgatctgtgcctggagtcccagctactgaggaggctgaggtgggaggatcacttgaatccgggaggtggaggttgcagtgagccaagatcgcaccactgcatgatcacacctctgtcactgcctgggtgacagagtgagaccttgtctcca

SEQ ID NO: 235692 - DNA, 1077 bp, Homo sapiens
agagaatagtatatatttcaaacatagttatgttttctctaacttgatgaggtcatgtcacagaccattttatcccttcagtggaaaccatgttatgtcgactattagtgataacaaatgggtcactatctggtgaaaaaatatggtatttcatgatctaagactaccagtctttttctgtttttgctccatcttgaccataacatattcatcaaaccattttcttcaagcaaagtacatgactgttggacctgctataataatatttcactaaaatctggcattaaaaattttaagtatttggagctccatgtactgattacagtttttaaatttgaaataaatgaccagcatcctttgaatattaaaagctgtttccttttgacatttaatttactctctttaaaatgtgagttgtaaagtgatggtttgtcagtgaactagactttttgttttagagtgtgaggacttggaagagtataatgaaagccctctttttggtgaagagagtcaacttaaaaaataaattgccatgttccaaaataatattgtggtaattgtaagtagtgcatattttatcttaaaaactcaggattgatgtaagcactggaatattttatttgtagaaatgtgtatcgcaattacttaaatttatttttttgaaacagctgcagcaagagttggcacttattcagatgtatcttcaacctctgttattctggtgactgacaaaagaacttgaacctatgttatatgatacatgcataacttgagctacactaaaccacatgacagtgtttagttaattcttgtataaattagtatatctcttctattattagtctgtttgttaaatgccagaccacgtttctatgatctgttgaatgaaccctagacagttctgtgagaaagcagcaattgcacagttacatacacagtcaattaaattttaacattaaagataatttagttttaggtttggcctctgtggatctgtatcagttccaaaatgtggaaagcacgggcatggaaaagtacatttttctctaataaaagaagacaaacccttattttatc

SEQ ID NO: 235693 - DNA, 456 bp, Homo sapiens
atattctgtatgtggagttattcaacttagtttttaaatgtctatatatttgcctagagacaactaactgtcattttattttatttatttttattattattatttgtgcgtgtggcatgaggtctccctctgtagcccatgctggagtgcagtagcgtaatcttggctcactgtaacctcaacctcccgggtacaagcgattctcctgcctcagcctccttagtagctgggactacaggtgtgcgtcaccacacccagctgatttttttggatttttagtagagatggggtttcaccatgttggccaggctggtctcgaactcctgaccaggagtgtggtggtgcatgcctgtagtcccagctacgtgggaggctgaggtgggaggatcacttaagcccaggaagctgcaccactgcactccaacctgggcaatagagtgagactgtgtctcaaaa

SEQ ID NO: 235694 - DNA, 486 bp, Homo sapiens
agaaatcaatgtaaaatatgtatacttgcatatattttacattgaaacaaagattttggcaaccatgcttatttggattaaaaaaaaaccccacaaactgactaaaattgtcaaaacgtagcatcagtttattttaagcatcctgttcacaacatttacaaatgatatgctccatatgtttttcttcaacctccaggcatctattcaggtgaaatccatctgaatttaaaacacatgccctttgctgggactctcacagactcacttctgccccttccggtggctctggtgattgcaggcagggctgcccagatctcgtgggaagaagaccacaggaggactcggctcaatgcgcaaggcccgtgtaaccaccgtaatggtttatgagagtaagcagggagtctagctcttttaatcacaaccacatccttagtgcccagcactctgccttacaaaagtcaacaactttcttgaatagataaccga

SEQ ID NO: 235695 - DNA, 294 bp, Homo sapiens
ctgaaaaactctcctccctttacctctttgtgaatctacagcagtcttttaagattgttttgcaaatgctatattcaaaaagaggttttttttttttcaagtaaagtgcatggatttctcagaagttgctgtattttaagaagtgcctctttaaccccataatgagcaatccttatgttggtcagaagcaaagcagttttgtttgcaattgtaaatcttggctctcctagcccaaatctcacagccatcacccaggatctctgccccatatttccctggaaaatgtcctaagtc

SEQ ID NO: 235696 - DNA, 511 bp, Homo sapiens
caggttcttcatacagcatgttaaatctgctaatgcttgtcctttatctataatggcctataggacttttgggaggccaaggcaggaggatcagttaaggttaggaattacgggcaacatagcaagaccccattctttaagaaaggatatgaaaattagcaaggcatggtggtatacgcccatggtctcagctactcaggaggttatatggctaatgtttgtccttctttttgtctagtcgatagtcatgggacaccaggatatcctgccttcccagccttggctccataggaaagcagtggagagagggaagatgttgctatgccattctgccattctttctccagtggcacaaggatggatcagaaactttgggcctcagaataacctatggtgatatgaggaaatgagaatccagtatctgcatcttatagagatctccaaacataaaatgggaaaggtgaaaacaacaacagtctttccacaagtcctctttttttaaccttttatc

SEQ ID NO: 235697 - DNA, 2957 bp, Homo sapiens
  misc_feature (1058)..(1058): n is a, c, g, or t
  misc_feature (1291)..(1291): n is a, c, g, or t
  misc_feature (1632)..(1633): n is a, c, g, or t
  misc_feature (1654)..(1654): n is a, c, g, or t
  misc_feature (2007)..(2007): n is a, c, g, or t
  misc_feature (2193)..(2193): n is a, c, g, or t
  misc_feature (2324)..(2324): n is a, c, g, or t
ttatttataaaatcagtagagagtactagcaatgcgtcattctattatagagaagcttgtactgtagtgagatgataatctcttagagaaaaggggaaggcaggagaggaagcggaatctgccagcttaaagtcacagcatccaaatacctcaagtcctcactccaggtgaaaggagtctatgcaaaactgtcccaaaaacctcacgattcctgcttctttcttcctccatgtgtcaaggttgaaaggaattctgccacttccacgtgcttctgttgttatatgtaccgtcattattttcctaccttatcccagcccccagctgcaaaacaaactgtcatttatcaaatacttgcctgaccccaaatgctgagatctagtataattttaagcatatacaaaaaagacaaaaacatccctactcaaatgtaatctgtttttgtgtctgacatcaacttttaaaatttattttttaattaattaattaattttttttaagagacagggtctcactgtattgctgggctggagtgcagtggcacaatcacggctcactgcagcctcaagcgcctgggctgaggcaatccttccatttcagccttccaagtagctgggactacaggagcacaccaccatgcccagctaatttttttaattttttgcagagacggggtctccctttgttgcccaggctggtctcaaactcctggtgtcaagcaatcctgctttcatcttccaaagtgctgggattacagtcatgagccaccatgcccagcctggcaccaacttttgagaatctaacatcccaactattggaagaaagctagaagattgctaaaggtcacatttagttaagagtttcttttctttttttttttttggtatcagaaatatgtcccacactcaagaaaaccctgtgaatctgtgccaggccagtgggtcgggattgattggcagggcagagcctctgcccagaagtggctggctgcatttctgcagtcttgcagcctgagcgccatgctcctggtcaaacatttagcacttgctgtggccatgttnccaccagacagaaacagagaagacaagctgtaaagaataatggccagccggagcatggtggctcacgcctgcaaccccaacactttgggaaggcaaggcgggtggatcacttgaggtcaggagtttgagatcagcctggccaacatggtgaaactaaaaacacaaaaattagctgggcatggtggaggggcacctgtaatcctagctattcaggaggctgaggcacaagaatngcttgagccagggaggcagaggttgcagtgagctgagatcgtgccactgcactccagcctgggcgacagagcaatattccatcccaaaaaaaagaaaaaagaacaatggccttaaaatgaaatacactaaaattgccaaaatgataccgtatcctcctatataaaagcaatgtaaagcgtggtttagattactttagacaatactatgacacttacagtataagtctaaagacttaccttaaggataaaatgagataggtataggatgtgtattaattgtttcataagccatatagatatgtacagttattacagattcaattttttttaaaaaaatacgnntgtagctcacccttagaaatnagttaattatgaaaatgtgtgaaaatatagtcacaaattagcagatgattgtttatcttcttctttgtaaattgttaatcattgctatcgtgagttttagatggggctctaattttttcttagtaaacaggaagctatttagagcttggtttgtatggtatcttgaaaaaagtcattctgtatatgatagtatacagaaaaatgcatgaacaaactcctagccatctggaattagaggaaattctctgtttattattctggttaacaatttttagttttccatagatcactttataatttatagaggatgagaatacattgcatatgaaagtgcttttaattttaaaagattnaattgtgagtttctggattttgtattacctcaaagtaattattaggcaattaatcaccattctgcactgttacagactattttaactgatttgaatgtggttaggattctggataaatgagaggtatctataacataattggtatatctgtttttatgtctgttattagcatcctattttgggggnttggcgtagtctaagcaatgtgtctgctaactttttctgtttcatttcctcatggagccttggattaccttttatgcagttaagtcaacattaaaaagtttcagtaggctgggtgcggtggctcacgcctntgatcccagcactttggggtgaattgtggggtgattcaccatgaggagggtgaatcacttgaggccaggagttcaagaccagcctttccaacatggtgaaaccccatttctactcaaaatacaaaaattagccgagtgtggtggtgggtgcctgtaatcccagctacttgggaggctgaggcaggagaatcgcttgaacctgagaggtggaggttgcagtgagttgagatagatggcgccactgcactccagcctgggtgacatagtgaaactgtgtttcaaacaaaaaaaaaaaaaaaaaaaaagaagcagcagcttcagtaagcaccggagagccattgcctcctttccacggggaccagctggttccataacagctgcttttaggggcatctacatgatgctctgctgggaggtcacaaggtacatgagctatgctagggcaggggcctgctgtgagttctcttctgtcctccttgggaaggagaagaaggttggttactttgtgtatttcagtttttttgtccttctgtcattctcctgtagcagctgtcgtcacccctttgtcaaacatactagcccaaaatatggactgttagctgataagacaataagtcaaactcttaatcatta

SEQ ID NO: 235698 - DNA, 985 bp, Homo sapiens
gagggtgctgtagagccaagcatggagtacataattttgggtagggccagccctaccttcaaggattcacctgggacgaccgcctggtttgctgccaactccgaagggtgccccaccagcaaattcttttttaaaattatgaagtgcctgatatgtcattgttaaactaatgaagcaaagttatgaataataataatgccttatatctatatataccatttttacagtgctttcacatagattatatgatttcattatattttacaggctgagataaaacttaaaacgtaattattcttacaattttagacagtaggttcactgatctgcttgattgttttattttataaaaatgtactctgtgcttctaaatgagtaataagccattcagactgtgacgtcatcagcatttcagcaggacacttattttgccgaacccattgtaacatggtcaaaactctgttgtgcctaaacgggcttgaatgaaatcttgagattttcccccaaacggatggaaacaaatggaaaacaaaaacagctttgttttctaaagaaaccttgacaaggtcccattaaaacatgtatatttttcctcagtctccctcgagacctccccgatgatcctgctgtctcagcagggctctccaacagccgctttgctctgttcccaagatgacagctcttgctcagcactgggagggaccctcttgtgatgtcaggtgtccctggggccccggaggccattgccccaatagtgtagtctgaggttcagcagagagtgctacctccttccttccttcacctctgccaacgtaagcgtagatataaaaaagcagaaagccagccttcgtctcctctggtaagggcaaaaacactttaatggcaccaatgaattgagcacaataaacttctaatctacattaaatttttaaactggacttttttcaaatttgcttatgagaaaggaataagctgagatttagta

SEQ ID NO: 235699 - DNA, 450 bp, Homo sapiens
ctccttgtttctctgatcctctttctagaagcacctggagggactggactgactctctggaattttcttatctaacaaagcttctttccaaaaaaaaaaaggcaattgtcttaagaccaccccccccatctttaggaatctcatcaaatgaccaggaaagaagcaaagagacggagttgtcactatacccagatagactactcatctattctcgagggcaggtctgacaacctttgtgcaaggtgacgtttcactcctcaccttcccaacacctcccccagagctcagaggaacttttgtcatttactcctacacacctcatccccgccttccctaagaagagagggtagacaggcatctggaccctgctgggttattaggccattactcttctgcaattccccatggtatgcacgttaaaataaacgcatgccttttctcctgttgctc

SEQ ID NO: 235700 - DNA, 446 bp, Homo sapiens
gaaaatgtcatgtcccagtctcccccatgttcctttcccttcatcccactttgtccccggggtctagcatgactgtgtgtttggattggggaagtgaaggcaggaaagtcgcttccccaaatccgcatccacacagggtcttatgttagagttgatgttatctctaggcgaggttatgcaatgtagttacagagacattgtgattagattcaaagaaaatgattttcatcattgaagtttacgcatgtgcccatttcctatttattacattccctggcccagaggacattaggctttcatttttaaaaaatgatctcattatctaatgaataattatatttcatatattttattaatttattaaatgtatgcatttaaaatggcatataatgttaaaactctatgttggctactatttaaaagtatatttactggtaatcttaaaa

SEQ ID NO: 235701 - DNA, 566 bp, Homo sapiens
ctgggattacaggcatgcaccaccacacctgcctaatttttgtaattttagtagagactgggtttcaccatattgcccaggctggtcttgaactcctgacctcaggtgatccacctgccttggcctcccaaagtgctgagattacaggcgtgaaccaccacgcccggctgagactaacattattgaagtgtatcattgctgtttaatcgtgtatcattgctgtttaatctcaaatttgtcccaccttggcctcccaaagtgttgtggttacagacttgtgccaccatgcctggcctccgatttgtctttttgaaacagaattgcttaagaaattgggccctggcatctgtttttgatatgtatctgtgtttttagaaactgtcttacctcaggattatgtagtaagtatatttatgaataaatattttaactttatcagatgagggccaatggcaattccctacctttcataaatttctcaattcagtgccactccttcagccaaaaaaaaaaaaaaataaaaggaaaaacaaattaggatgcaaaatgttgactctggactgaaa

SEQ ID NO: 235702 - DNA, 297 bp, Homo sapiens
caataggtattcatttatttccagtgttggtgtgaaggaacacccacgttttcaacacaaagggaagcagcagaagctcatcgaatctgtggccatgcgtttccccctcacaaagaccgtgctatttgtaaaacggccccatctgtggttcaaatgccttcataaaggaacacgtttgtatggtgcagcagcgtaacttttctttttcttttcttttttttttttttttgagacagagtcttgctctgtcgcccaggctggaacgcagtggcgcgatctcggctcactgcaacctcc

SEQ ID NO: 235703 - DNA, 2659 bp, Homo sapiens
  misc_feature (1271)..(1272): n is a, c, g, or t
  misc_feature (1441)..(1441): n is a, c, g, or t
aaaaatacatgattaggaagtgcatttggtgcattcgagccactgggctgcttctaaagtggttgctctggggaccagagagacttgttatgcctcatttgggtatcacatgaatcagcacacctcaaaaattattccacagtttggatgttagtattaggtattatataagaatttcccataatcaaataatattgagaaatgctgatttttgggaaggcacaacttttcccaaacttctactgtgctcctgtgcactgtgaatctgcagaattggcccttcccaaaccctttcaaccacagcatcctcctctggaggccagcatcttgcaagactacttattccttgaaatacactgtggaaaaaacactgatgtcaggggatattgaaataaactcactgcatgcggcatacccttcaaagacatttttcctccctttggaacagttgaaattcaaatgacatatcctagcatgatttgccacatgggttgtgttttgaaacccaaatctaacacaacaaatttcagatagagctttgtttagcccccaggccagtttttggtcccgtggataagggttggtatccagacctcttagagcttttctgcatcagctttccagggcttattcaaaccctccatgtgctggaagtccctcaccctttatgaggcacaggaggcgatacgcttgcatctcgatctctcagcctcggctcatgctgttctctcctttctcatcctgtgttccagccataggaattctgttcattgtgtggaaggctacgcacccccacatccccaaccttttgtacatgtgtttcctctatcgagaatattctctcctccaccttttactctcaacctgatgaccccatacttaatctttcaggacttggctccagggccacgtgcttccacagtattttctcacttgtttgctttatgcagtttatttattgagacataatttacatagggggaaatgctcagatactgtctactgtccagtcagttttgtgggaagaatatcaaggcacagagcactctgtcaccctagaaagttcccatatgcccctttccagtcaacccctccccttcaaagcagcgactcctctgcaatccatcaccatgggtgaatttcgctgattctagaatggaatggaatggaacactttgtgccttttggggcctagcttttttcactcagcatattatttttgagaggcaaccatgttgttgcatgagcccatagttggttcccttgtattnngtttcattgatgaatattccaaagtttacttatcccttccttgttgatggacatctggcttatttctaatttttggccagtctgaataaagctgctataaacattcttgtacaggattttgtgaattatgtttatatttctcttggattaatacttaggagaattgctnctaggataggtgtctgtttaactttcaagaaactgtgcaacagtttatactgtgaaatagtgattgtcctgactacaaacctccatggtgctgagaccaggttttgttcaacgtgattttcctggtgtccagcccagggcagggcacatgctagacattcagtgtttattgaagaatgaatgaataagaagttcaaatcagttttcattctgacatctctactactaactgagaaaaaatgaatgctctgtccatcaaggagatggaaattttattggctaaatgtgggctgattataggcaggcaaaaacaagagagacatagcttccttcttactgtgctcttggacttgcctctctcgtttcagggtggcagcatgtgcaggtaaaatcaggtgtgcaagttgacacaggccatagaagggtcctgatcaccagtatagctgagctcacctcctgcagttaaatctcccaacactcccattcaagaccctcccaaacctcctttttcatccccccctaccctttggttcacctgcacaaatacatgtttcagccaaacttgacaactctccctactttgtgacatcttgcattctctcccctttgcaatggccacagactccacccagaaggcctgccacatgcagccacagccatctctttctgtggacaccctgggcagctttcaaggctcagttcatgtgctttctcctctctgaagtgttccttggccaccacatctggaagcttgctctctttggagagtctttgagatggtgtccacctgtggacaatgttcattagccacttagcaggatattctgcttttattctacttgtctgtgtatttctgctctgtgaggtaataggcttcttaagggacacgtatgtagtggccctcagcagtctgataggagctgaggctgctggccactaagtagctgatgctagtcttcatgatccttgctcttgatggccgattccattaaagaggagttaattacatggtaatgccatagctccttcttaagaggaggctttagtacaaacttgggaattcatgtcacctggtggacaattgaaaggcagctgctttcttggccaggtgcagtggctcatgcctataacctcaacactttgggaggctgatgtggaaggattgcttgagcccaggagttcaagaccagcttgggcaacatagcgagagcccatcact

SEQ ID NO: 235704 - DNA, 614 bp, Homo sapiens
  misc_feature (614)..(614): n is a, c, g, or t
agccttcatataatttattatcaaacaattacacatttgttagtaaattacacttattacaactgttattatttgaattatatttatcacaattacatgtctgttcttaaatatacttatcacaatttaattccacggcttacaatgatcataactataattattaaagacaattttgattaaatgttatgtcataagtagtaactgttacaaataagctgtgaaaagaaccactcctagcattagtcactctattctctcattaacgttttacatatcaattaattggaagttaaaaggaccaggaaactcagacatacagtatacattttaaaatttcaattatttaaatataatatatagaatgtatggcttataatgaattagttaactcaatgcaaattattctattttgattacaaatagtaaaataagcaagataaaataacagatgtttaaaatccaaaaagcacatacaaaaatccatgaatgatgtctaagtactcacttataaagtagaagacattcattattatatcaaatttttaaatgctcagtactatttgaccatttattttgtatttctacccagtgctaatagtgagtgtaccccn

SEQ ID NO: 235705 - DNA, 198 bp, Homo sapiens
aggctagattaagtacatcattattcatccaggcaagtatacttctgttctacctaatgctgtatctatgtcacctagcaaagtatagtaatccaataataagtgattgctggctcattcaatgatgatcataaagatataggagactactggagttcaagaccagcctgggcgatgtagtgagaccctgcctctcca

SEQ ID NO: 235706 - DNA, 1035 bp, Homo sapiens
tctcccgtacaggtagggctccccgggacacagggacacggagggacatgggggacacggagggacatgggggacacggagggcgcgtgctgccctctctgggggctctggccttcctttgcttgtggtctcaggaaagcacaccccgggcagatgtccgcctgctgcccatggggcccagggcaggaatggcccagctgcttatggccttattcttttgtgtgcaggacattaaattgcctccaattaggtccttcaacctctttggtgcttggatttcctgatctggtggggtctgtcggcttctcttcagtgcgatatatttaaatggataaaaatatgttagttcccaaagaattgtattatgtctattacgtcaagataccgttgttgaaatattttcaaaaaatacattagtgatgtggaaatgttatttctttactaatggaccaaataaaatctggtataatgggcacctttaaagaaagcaccttcacacttgaagtgcgtaaatgatgtttgaagttgttcagatgatgacgtggagatgtctggtttctgtcaatgttggccccgcctaccccacacgagcatcattttgggtgtcagggccccacgcaccccacacgagcatcattttgttgcctgggctcatcatggaaggaaatgctaaattccaaaaagaggtgggtgcagataaagacaaatcagtttcccacctatctctgcggaccgtacattctccctgagcccaggttaaatactccgttccagagcgaggtttgtaggtttgttggttttcttttttttttttttctttttttttttgaggcagagtctcgctccattgccaggctggagtgcatctgagcgacagcaagaccctgtctctcgaagaaaaaaagaaattagaagaaaaagaactcatcttgatgatgaagcacaaatatgcatctgttgtgtggcactttcctggcgtgggctccgaggggtccgtccaccaaggagcccgcgtcccagtctccaccgtccagc

SEQ ID NO: 235707 - DNA, 370 bp, Homo sapiens
ctcctgataccaaaatttattgccttaacctctaccctgagttcatgacatatatttggaaccactttcttattctcctcaaaatcagttccttcctcaacccaatgaaatgacaccaccatccagccagctgcttagactaaaaacccagaggtcattcttgcttctctccacccacctatccaatccagtccatctgagggatactggctccacctccaaactatatcccagatttgcccatctctccaactccagtgaaaccaggtcttctaatattctaataaaagctgaaaattcagaatactcccatttgacatggagacttatcagctactgtcatttagtaagtgttcttactttcagaaac

SEQ ID NO: 235708 - DNA, 343 bp, Homo sapiens
ctaagttagatagatacactaagaggaaaatgacctttaaatataaataattgtattttcccttacctccaggctattctgcacctaaatttgtttcaatctgttctaaatattactatagatgacaatattataatctttattggtcatatgtacccacagtacaggggaacatttactatcatgttctctcttttctcagttattttctttttctaaatccagtctctttcttgtagttatacaggtgtttgttttataattattttcttaaaactctacatatatgtttttatacttttgtctattattgcatattcttaataaaaaagttaaaaactcg

SEQ ID NO: 235709 - DNA, 135 bp, Homo sapiens
tgaaggcaaaggagaagccacaatagaaaaataatgcaggggtaagatgagctcagctctgtaggctcgctcctaacactgatcctctgctggagtcactctggctggcctgctattctgtgaaaatgccgggca

SEQ ID NO: 235710 - DNA, 399 bp, Homo sapiens
tgtatgctttcacttatatgtagaatttaaaagagttgatctcacagagacagactgtagaatggtggttcatagaggctctgggttgaggaggtatgggaaaaggggagaggctggtcagagggtacaaagtttcagatagacaggaagaataagttttagagagatctactgtacagcatggtgaccatgtttataataattatatatttcaaaatcggtaatagatgttaaatgttctcaccacaagaaaatgataaagtgtcatggtgatagatatgttcaatagttttgatttaatctttctataattttatatatatcaaaacatcacattataccccataaatatatacaattataatttgtcaatttaattaattaattaattttaaaaag

SEQ ID NO: 235711 - DNA, 1432 bp, Homo sapiens
catttcacttaccatttcaggcaaagttggctaagaacatgaggctgtttctgatatttccttttatttttatgtattaatgagaataataggtataggccatatacttattagagactctcaatgacttatacttattattctcaattcatattatatcatattatactcattgaaaataagccatatacttattagagacttatttagagtcttattagagacttattaagagtctctaataagtatatgggttgtcaagctagacacaaaatagtaccatctctctccacctctctaaagaggaccacatcatctccaaatgtaaatagacaagaacaaaaaaaattgtgcatttactaggcaattgaatgttctccaaaccaatattcctttgaacaaaatgagtttgtttgatttgagaacaatgaagtatttggctattttataatcataagtgattcatacccccacacacttagccctctagaaatggtgccagaagatgaaacacatttaattttgccatatagaagcattgcaaataactactggtttctaataatgtaccttataatgcaaataatgttttaatttttaaaaatatcagaaaaagtacaaccttttaaattatgtagttgcttcttcttcataatcatttttcttgaactggtgaaaaattttgtcagaagttaccacttgggacatattgtactacagcttctcgcttggctggagaaactggttttccagaagcagaccttatacaagaggtaaatgaaccattagacttctcccatgaaatcaacccagaaaaataaattaggactattttgtagaggaacagacagaatgctagaggctcagttgcctttatcatttatgtctggctctgcagcagcaggggtgtgaggtgctcctcattcagagtttcgaatgcaccaaaagggtgtttccaaaacatgatatgggaaggaggctgtgcacagagtatgaccactggattgcctaaattgacattgggtaggagtggagtatgggtgatcttcagatgaagcaagagtaatgctcaatgtgacctggttaaacaagtctcctgaatccaggggttaaagatggagaggaggaagagagggagtcaagaaggtcaaagggagcgtctgtctccctgacctgaatgacaactaacatagcccttgtttccttcttggtccccaggagggagagagaggcagctgtgtgggatcaaggcattttgtgagattgcagctgtgattcattttcctttggaagaacatccctagctccaggggatatggtgggaattggttagctaaaatatcaattccctgggtaaaagaggaaaaccatgagaccctctaatcttaacttttctccttcaaaagagtggaaaaagattacatagttcctc

SEQ ID NO: 235712 - DNA, 456 bp, Homo sapiens
agtgtagtgctttggattttatatgctattttgttttttcctcatgaaaagttcaagttttatgggattagtcttatctccatccaaaagatgaagaaactgagatgtgggaagttattctaaagcctcagccctttcccagtacctcgaaggcttgcaaattaatggtacaaaaggtataaaaaggtttatagaatttatgagactcaattatttttaagaaccataagcagcattcatttgttgaaaagtaaagtgatcttcgcaactagttttttttttctttttgaaaataagagccaaggaagagaatattcaaattggctagtgtgcaagtaatttcattatccagcttgatgtgtatgtagggagccagggcattcaggtgagtcagatattctgatttaacagtgggtggccctgtggaacacacacagattgtatactttccataaa

SEQ ID NO: 235713 - DNA, 603 bp, Homo sapiens
gtgcaaattaaactgaacaattatccttagttcattaggaaagtaaagggggcattacaaatagcagtgttaggacgtttgttattttcataagacagtcattaaaaatcttttctaatgaacatgttagccatccacgggagaaaaaaaaatcagtaagagaaataatggaaggcacctagtggaactacattcactgctaaaaccccagtggcaggaaggcccggcagaccttctgtaccacactcatgctgaaacatgggtgcagtgagcctgttgcagctctctgagcagactcatttcctgtgtccggccgttcttcatgcacactcggatgtaggggactcggggagctgttcgggctgttagattttcgtgaggcttccctcacctgcggacttcgtgcatcttagtgtcagatgaactaccgactaggtggtctgcttaagcagagtatacttttctcctggttttctggaagagaagagcatgtgttctagtgctgacggcgcggccttcacgtccgcttctccccaagtggtggcagtacctggccataggaaggtggcttctagcagcctgcacctttaaaattgatgctga

SEQ ID NO: 235714 - DNA, 1598 bp, Homo sapiens
atggacatgcttcatccatcatcggtgtccacgacctcagaacctgagaatgcctcctcggcctggcccccagatgccaccctgggcaacgtgtcggcgggcccaagcccggcagggctggccgtcagtggcgttctgatccccctggtctacctggtggtgtgcgtggtgggcctgctgggtaactcgctggtcatctatgtggtcctgcggcacacggccagcccttcagtcaccaacgtctacatcctcaacctggcgctggccgacgagctcttcatgctggggctgcccttcctggccgcccagaacgccctgtcctactggcccttcggctccctcatgtgccgcctggtcatggcggtggatggcatcaaccagttcaccagcatattctgcctgactgtcatgagcgtggaccgctacctggccgtggtacatcccacccgctcggcccgctggcgcacagctccggtggcccgcacggtcagcgcggctgtgtgggtggcctcagccgtggtggtgctgcccgtggtggtcttctcgggagtgccccgcggcatgagcacctgccacatgcagtggcccgagccggcggcggcctggcgagccggcttcatcatctacacggccgcactgggcttcttcgggccgctgctggtcatctgcctctgctacctgctcatcgtggtgaaggtgcgctcagctgggcgccgggtgtgggcaccctcgtgccagcggcggcggcgctccgaacgcagggtcacgcgcatggtggtggccgtggtggcgctcttcgtgctctgctggatgcccttctacgtgctcaacatcgtcaacgtggtgtgcccactgcccgaggagcctgccttctttgggctctacttcctggtggtggcgctgccctatgccaacagctgtgccaaccccatcctttatggcttcctctcctaccgcttcaagcagggcttccgcagggtcctgctgcggccctcccgccgtgtgcgcagccaggagcccactgtggggcccccggagaagactgaggaggaggatgaggaggaggaggatggggaggagagcagggaggggggcaaggggaaggagatgaacggccgggtcagccagatcacgcagcctggcaccagcgggcaggagcggccgcccagcagagtggccagcaaggagcagcagctcctaccccaagaggcttccactggggagaagtccagcacgatgcgcatcagctacctgtagggcctggggaaagccaggatggcccgaggaagaggcagaagccgtgggtgtgcctagggcctacttcccaaggtgccacaggcccatgatgggatgttgaggggcctggactttgatgctattgctgccaggtcttgctgtgtgaccttgggtaggttgcttctactctctgggccttgttttctcctctgtgactcagggataggagtcatcagcctggatgagctatgtcagatgagaggtttggagggcactgttgctgggctgacctggctgagcaggcaaaaggtgggtgcagactggcctccccccagggatggagtgtcttggggcatcaacta

SEQ ID NO: 235715 - DNA, 158 bp, Homo sapiens
ttctcaggtacattcttagcagcaggagaggctaattcgttagaagaatgagacactttaacaaggacttcaggagctgaaataattaatggagttcactaaattcctgtattcacaccaagcctcctccttctggaggaaacatctttagaagtagt

SEQ ID NO: 235716 - DNA, 503 bp, Homo sapiens
agttacaaaagtgaagatggtgaaatttatactttatattactgctgagacagtctgaattagtcacagggcaattttttcctaagtcagttccatttgcttccacagaaaataagaattttagctttatcagagaaatgggcagtgaaactacagactcagaagccagtcacaaaagaccatatactagatgattcttttcatatgagatgtctacagtaggctaatttatggagacaaaaagcagttttggggttgctagggtaagggggattggagggagatgaggagtgactgtttaatgggtatggggtaatttttggaattgagtaataaaaatgttctaaaattgactgtggttatgcttacacaactctgtatatactataatcaattgaattatacacttcaaatggatgacttgtatggcatattcattatgtttcagtatagctgttaaaaaataagatgcatgagcctttgtagaacatgtcaatagtatt

SEQ ID NO: 235717 - DNA, 202 bp, Homo sapiens
gctttttaaatgtgttttgaatgagtatctcaatattttaatatcattgaataatcagttttatctttattaagaaggccattatggcccattcccatttttaaacacatagttttatatactcacttaaaaaaactgcggtttccacatctgtggattcaaacaactgagaatcgtaagtatccaaaaaagtaagtattaa

SEQ ID NO: 235718 - DNA, 426 bp, Homo sapiens
gccccaaaaacaaagacagaaaaaataacaaaaaaagaaggaagatgtgaaactcatgtggtggtgtttcagagagagagagaggccttaggaattaagccatatcgtgctagatgctttccagaatctcttctttaggccgggcacggtggctcacgcttgtaatcccagcacttttgggaggccaaggtgggtggatcacttgaagtcaagagttcgagaccatgctggccaacatggcgaaaccccacctctactaaaaatacaaagattagccaggtgtggtggcgggcacctgtaatcccagctactcgggaggctgaggcatgagaatcgcttgaacccgggaggtggaggtcacagtgatctgagatcacgcgactgcactccagcctgggtgacagagtgagactcagtctcaaaaaa

SEQ ID NO: 235719 - DNA, 415 bp, Homo sapiens
ttttaattagaaagaaaaatgtctaatgttcccagtagattataatatgtaatattccctggaaaccaagcaacaccatatatctgtaaattatccatccgaataggaaacaaaggcatcccagatcatttaaattcagcagtaatccccaaagctcaatttaggcatggttcttaatattctactccaaaacttcaatatagtttatttactatttatcttctaacagagtgaatagcataaaataagcaacttgaagaagggaactctaaaggaattaaaaatgtaaaatgtaggccaggcacagtggctcatgcctgtaatcccagcactttgagaagccgagacaggcagatcacttgagtccaggagctggagaccatcctggacaacatggtgagaccctgtctctaca

SEQ ID NO: 235720 - DNA, 449 bp, Homo sapiens
aggctcacttgagcccaggagtttgaggttgcagtgagctatgattatgccactgcactccagcaagaccctgtctcaaaaaaaaaaaaaaagagaaagaaaacatattcataatgtccaaaagcttccctgtgctctttgtactccctcttctttccttcccatctcccccacaccagggaaccattgatctgctttctatgattatagaattctagaattttatataaatgaaatgtatagtatgtgctccttttgggagagggcggtatctggcttctttcactcagcttaattattttgagattcattcatgatgttgcagtaacagtagttcattttcattgctgagtgaatatacagatacactataatttgtttagcctgttgatggacatttgtgttgtttcaaatttttggttattgcaaatatagctgctttgaacgtt

SEQ ID NO: 235721 - DNA, 894 bp, Homo sapiens
ggagatcctgactaggcagagacagaaacagaaactttttgtgggatcctagaaaggggcacatttccattttgagtaatctatttccaagtcccctcgtgggggaaagggaacctcctgtcaccactgccggcctggctctctctctccatcctccccatggagcgccaaggtcctctgcagagctctccctgcctgccaccttctcaccagcactttctccacctacaggacagtgacatgctataaaatgccacaactttaactaccatatttccctgtgtcttctatgagtaaaaacatgtccttacccttggaaccatgttcctcaaagtggagacaaattttcacagggcctatcttttctctcccactcaggcaactgagtagggtgaagggctggtgtttgtggctaaagaacaaagtacctgggcccaagggtctcaaagccacggcctctagtccatcaacaccatgagctaaattgcactacacaccccagttcccctagaccttagaaaacacacactgaactggtaggttcaacctggacaagcttacagtgtaaagagccgacagggagttgcaagctgatgactagcttcaattattgccaacgtgatctgctggggcaagctggccttcgggatgcattccgttagctccttctcaaaacaattttgttccctgaagtattactttacatcatacagtcaatgttctgctcttatggtgattctagaaccacggctggctgctcttaaatccttgtaagaacttgggcacggtagctcctgcctgtaatcccagcactttgggagggtgaggcaagaggatcacttgagcccaggagttagagaccagctgggcaaaataatgacatgccatctctac

SEQ ID NO: 235722 - DNA, 840 bp, Homo sapiens
ggagatcctgactaggcagagacagaaacagaaactttttgtgggatcctagaaaggggcacatttccattttgagtaatctatttccaagtcccctcgtgggggaaagggaacctcctgtcaccactgccggcctggctctctctctccatcctccccatggagcgccaaggtcctctgcagagctctccctgcctgccaccttctcaccagcactttctccacctacaggacagtgacatgctataaaatgccacaactttaactaccatatttccctgtgtcttctatgagtaaaaacatgtccttacccttggaaccatgttcctcaaagtggagacaaattttcacagggcctatcttttctctcccactcaggcaactgagtagggtgaagggctggtgtttgtggctaaagaacaaagtacctgggcccaagggtctcaaagccacggcctctagtccatcaacaccatgagctaaattgcactacacaccccagttcccctagaccttagccgacagggagttgcaagctgatgactagcttcaattattgccaacgtgatctgctggggcaagctggccttcgggatgcattccgttagctccttctcaaaacaattttgttccctgaagtattactttacatcatacagtcaatgttctgctcttatggtgattctagaaccacggctggctgctcttaaatccttgtaagaacttgggcacggtagctcctgcctgtaatcccagcactttgggagggtgaggcaagaggatcacttgagcccaggagttagagaccagctgggcaaaataatgacatgccatctctac

SEQ ID NO: 235723 - DNA, 450 bp, Homo sapiens
ctatttttaagtgggattttaaagaagtaatatcattttgacttttacaggtcataaccactaggcatgtgttcttcaaccagtgttgttttataaatatatgaataaaacaattggcatatcaaagaatttctttttgctcagaatactagttcactttaaatagctaaagtctcttacattctttttattctgctaaaagttttaatgatctctctatatatgatttttaataaaatagatgatgacatttaaagcagttaatttcagcagcaattctatgagcagtttttgagtattccccagggacccggtcttgtgatagattctggggctgtatagccaggtgaaaagatgtgggtccttactctcaagttgctgccagtcttctggagagacaagcttggaaacacaatgtgtgatgaagggaacaagagaaccgtgttccag

SEQ ID NO: 235724 - DNA, 416 bp, Homo sapiens
aagggaaagggccacaaaactgtcagacaagatgaaaaatttagatctgagcttcctggcaaccaaggaaaaatattaagcaacacagttacataattctcatttttagaaaagacaaaaaaagatttagttaaaaaattagaattatggccaggcgtggtagctcacacctataatcctagcactttgggaggctgaggcaggcagattgccttagctcaggagttcaagaccagtctcggcaacatggcaaaaccccatctctattaaaaatacaaaaaattagcccaacatggtggcacatgctggtaatctcagctactcaggaggctgaggcataagaatcgcttgaacccaggagggggaggttgcagtgagccaagatcgcacctctacactccagcctgggcaacaga

SEQ ID NO: 235725 - DNA, 384 bp, Homo sapiens
agcctaattcagccttaagagatgagaaggctgcttggaaagaaagaaaagtctgagaaagcagaccgtgcatgctagtaagggaacttgacattccttgctttagtggggaaaaaattaatttgagaaaactctgctattaagaaaatttcttcagagtgaatcttattttcctactagcaatcatcataaaatcacaaattacattgctatgaagctgctagagccttgcctaaagagctaagaacagataatcactttagacaaagactttacaaataaaactgtaaccccaaacgtctgaatccagtttggacaaagaaagacctaatgtatcaaactgttaaccccaaactacaataaaaaacactaagcttaaagaaa

SEQ ID NO: 235726 - DNA, 462 bp, Homo sapiens
acagataggcgcagagaggccaagtgacttgcccaaggtcttttgttaggacggctttttccgattggcaggcactttcgttgtgtgttcctcaaacatctttattttagaagtgagaaaacttgtgcctttttttgcagtttctcttttcctgtctgtctcctcaagtgagattttatgtgggaatttttaaagattggcgtcgccttgtagaagatgcggcttgtaattgaggccttgtaccatttactggatggaagcgcttgtttggtcacctgtccagcatgacttaggtcacttcagctaatcaaccaatcatttcttttcttttttctttttttttgagatggagtctcgctctgtcaccaaggcggaggttgcagtgatctgagatagtgccactgcactccagcctgggcgacagagcgagactctgccgcccctaacgccccgcccccgcca

SEQ ID NO: 235727 - DNA, 521 bp, Homo sapiens
gcagtttattaagtttcattaaaacatcacatttggataattagtgagattgcattgagtaatagattaatgtaccatctttcaatctgggaacatggtatgtcttttaattgattatatatgtttagtagatgatatttcagccaactttcagcataaaaaatcaaagtcaaacaacaaaaatgttagtgtacctaaaagcctttctgagaacatactacatgcaagtagatgaaacaaaatccagaataatttcatagaaatctttcaggatagacaatcacttggaaactacctctgccataaacaggagcaagggtaccttcgggaggggattaagttaaaagggatgatgtcaatttttagatcatacattcatattccagagagaataagaaatcgacatgtcctataaacatctgttctaaatccaggtaaaatacatttcagagaaacttgttttggtaacacaagttcctgcttttctcccaatcagaatggtggcactcataatctcacat

SEQ ID NO: 235728 - DNA, 366 bp, Homo sapiens
taaaacccacatagatgtcccattttaaggatttttggaaagggatgaaaatgatatttgattttaaatttcatgagataattcctacttcctcaccactgtctcacccatattcttcctgcagtgtttccttaggagtccactgcacaattccaaaatccctagctaattgaaaagaaatgtagaatagtgtctgcatttctgcaccttctctaaaccaataaggaagtaagagataattgacaatactccgaaaagtaggaaaagtttggcttaagggtccagagtaggggttggccagatagtaaatatttatgaggctttgcaggccataaagtctctgtcacaactactcaattctgccat

SEQ ID NO: 235729 - DNA, 422 bp, Homo sapiens
ggcacgtgcaacaacagagttaggaaactctttctgcaagtaaagttaacttgattacagagaatagggtagttctttattccttgtcatcattgctgctaccacttctgtgagttataggagaaagactagactttggtagcttagatgtatcttaagtgtaagtgggttttcatatggaccattacagtttacttggggtgttttacaaaatgataaattattgaagacatttaaaagtactgtcaatgcaaaggcagaaatgtaatgtgtgaactgtaatactgtaatcctctcatatcaaataattaagatttaggggtttagacttttaattcagtcaaaggcacacaatgtacaaatttagaattttccctcaaatcatctttaaggatagatatgtcatagtggtttgttagttt

SEQ ID NO: 235730 - DNA, 391 bp, Homo sapiens
taggactcccaggctaatccagatcttctcagagccaccctaattcaatacactcccatcttccctgaaaggccaggggtccccccaccaatcccaaatcccctcactgtctcctatcctcacgatctcacctgggtgcccctgtcccatcctctttccaagagcacagactccagcccgatggcctgggttcacatcatcactcctccacttcctaggtgggctggtcacctcgtctctgtgggcctcagtttccctatctgtaaactgggggggcggtcacagtaccatctagtcccgatgattatctgtcacaaagatgaagcaaggtggctcagggaacgtgctcagaaacctccctgctttccatcttgtccctggccctccccga

SEQ ID NO: 235731 - DNA, 360 bp, Homo sapiens
aggctggagtccccataggctactgggactcgccctgcttggaagtggacgaggcgtttctccggccctggctctcctggccttctccagcccaatgtgtgacccgctacagccacctggtgggccgcgggggaatacagcaacgatttcaataaaccccaggacataggccctgccgggaaaggagtctggggcctggcatggtctagattccctccccaaggactgcccagtccccttccccctccatcctcagttccctttagtaatagagaaagccgtcccccgtgttctctcggctgatctatagtaggcgagggtgggcatggaataaaacgaccgcttctgctgctttactcc

SEQ ID NO: 235732 - DNA, 419 bp, Homo sapiens
gaccagtgcaaaggcttttatatggaccaaccccagtcagaaagcaggcacttggaaacctcgtgtctgtgaagaacaaggggtggaacctctgaaatcctcccctttgagatttcccatgcattcacacatccttctgtgtgccttgaaaatgtaagaaacagatgtgggcaagaggcagccagaagactccggcacaggccctgcaacctatctgctcacatcctgcttgggagacatgtcagcgataaactccaggagtagtcacgagggctgacaggggttcctgcccggctctgcatccaacagcctggtggagcctaggctaagtctacaaaaatacggagctcagagctcctacctagatttctttgctttattcaggcagaattgacaaattaaaaggtatgtatttaagg

SEQ ID NO: 235733 - DNA, 169 bp, Homo sapiens
gcaatcaaattatgaatgtgccctggaaagtagtcttgagtatctgtcactggaatttgtataaatcactgttgacaacacaaagtgctttcacattatattgctgctattcttcattttcagtgtaatcaaaattcaattgcatttgtttgaccttaaacagacctta

SEQ ID NO: 235734 - DNA, 498 bp, Homo sapiens
cctatcagtatttgacttcagattgactcgtttatttattcttaaactcccttgaatctccaggcttttttcttatttgcattgagtatgttctccccattgacattcagatcactttgaattggcttttacttaggcttttcttttttggagacaatcagctcagagacaaaataggcttaaaccacaaagatgttttagtaaatagatacatttcattagttgctgagggctgtaggaacacagttgtcccaagtaatttcttctttgtatttggtgatcttaagaggaaatattagtgtcctttttcttaagccactggtctaaaatatctgtcaagcataagatttaaatccctgacaaacaacttctaagattttagaaaaagttttgagtaccttgtgattccaactcttatctctgcttttgagcctcgatttctaccccctcgtcatagtccttacccacctgtaactttaagacatcaaagttcatttt

SEQ ID NO: 235735 - DNA, 394 bp, Homo sapiens
ctagggaaagagtattccagacagagaactgccagtttaaaagcctagaagtaggataatgcttggcaccctcaaaaatcaagcaagagtggtataaaataagagggtgacaagagatgagctcagagacatagttggggcagatcatgtggggccttttgggctatgataaggactttggattttcttccccagtacagttagaagccactggggaagttttgagcataagaaagttataatctgacagggtttagacatgtgactatggctgcactatggactagtgaatagaagctgagaagttgatacagcagttaagaggctattacaatagcccaggaaagaggatggtagcttggactaagggaaggacaacgaagagagtaagaag

SEQ ID NO: 235736 - DNA, 381 bp, Homo sapiens
ttatttaattaatttggtgccctctctactggctttcttttctttatatttggtatttccttatagtatctgaatgaaactctttctatattataatatagaagaccacttctgatgtgttaccaagttggactggaactaactctgaatgtactgttttgtttggaagaagttatttaacctatttcctttatgtgaggatgtgtgggtttgggaagtttaaattaggaacaagctgctggttttcaaagcttctttctctgtaaccaaatggtgaaaaaatgccttgtaagcgtgattagcatggtatgttgtaagaaatagttcatttccatatgaaacagtttacttccagctgcagcccgaagtgtaggagccttg

SEQ ID NO: 235737 - DNA, 141 bp, Homo sapiens
tcagaaaagcaggaattaggcaggcaagttttcccttttactttaaaaaagtttggtgctatgtaataatatgtaaactttacatatatttgtaagttatgaagcatacaaataaatgagtgaacccacaatccaaattaa

SEQ ID NO: 235738 - DNA, 646 bp, Homo sapiens
attcttgttatagtgaagaagtctcacaagatctgatcatttataatgggtttccacttttgcatctggatcatttttctcttgccaccaccatgtaagaagtgcctttcacctcccaccatgaacctgaggcctcccaagtcatgtggaaatgtcttttattgggtgctggttcttaactctgaacttctctacaagttttgtcaaactatcaaatgcagagcaaattggaggcctgtcagagcacccagagggtggaatgaagcaacagagaggcatcaggaaaggagaacacagatggagacagagatgggaggcataagcaccacctactggcacaggctgtgcacttgcacggataggagagctgaaaagttggtcatggatggaaataactgctggtttcacaaatgaggaggcagaaaattccacttaatttcactattacaatgctcagaagaaaaaaaaaaacaaaacaacttggattactgagctacagaacacccagactcatagcactgggacttccaggtcttaccttacgagtgggtcacaacactgacaaaggggacaatatccattagccattatcttgctgcgtatgaataaccctctctcacaaaaattaaagataaatacggtcctg

SEQ ID NO: 235739 - DNA, 197 bp, Homo sapiens
gtggagaaagctgacttggctggtgtggtacagagaagccagcttgtttacatgcttattccatgactgcttgccctaagcagaaagtgcctttcaggatctatttttggaggtttattacgtatgtctggttctcaattccaacagtttaatgaagatctaaataaaatgctaggttctaccttaaaaaaaaaaaa

SEQ ID NO: 235740 - DNA, 1143 bp, Homo sapiens
ttggccagttggaaatgagaattggttgtctccaaccctgcaagccctagcatttctggacatttcctattgccttccatttttgttttgcaaaccacaaactcttgagctcattttttcttgtaatactttgtcaaactcagccaataacaaccagctcacactactaatgttatgtttccagcctcttctcataacatcacaagctcatgctttcattgttcatctttcaagttactgaaggcaatagtttcaccaaacagttcaccaccaaattacatgggttgccaccttgccaataagtttcttcactgcctggcctggatgccagtgtcatctatttttggctttttgttatggcagaactccactgtgagtaccagttttttaaggagtcagtataggctagttatgccatgatagcaacagcaaaccctcagagacttacaccatgaaaggttccctcttgcccatgttacgtgacagctgtggctttgcccacatcttcactcagatcatttgccatttgcaaggcagacaggaaaggacaattgcagaacccccactggctctgaaggcttttgctcacctgtagctcgtgtctttcacgttcagtttgagaaagcagatgacatcgccccacctggggcagggtgaggcagaagctcaattctttagggagggtcagtggatattttggacaaataatataacctatcaaaagaggtcactatagtagtgaatttttcatgtttgattattttggatgattttatattataaaattgttacttcagcttttctgtggaatcagtatctaaatgggatttgatttttaaatactttggtgtaaaagtaacaggaatttgtagtacttactttcacctattttgctctttagtggattgccatacaatataagctaaatgggaggtgttctaattactgagattgaaggtgacaggatagttctggccaggacctgtagaataattatgctttataatggtgacctgggatccagggtctcatgctcagctttataaacttaggaactgaataatgagtaggctttgggggaaaggatcatgctagtcaaacgcacaaaacttattgtttcatcataaagccacttgtgattta

SEQ ID NO: 235741 - DNA, 732 bp, Homo sapiens
cttggaccctgagatcatcctgcaggtattcaaacggctcttctacatgatcaacgcagtgactcttaatgacctgctcctgcggaaggacgtctgctcttggagcacaggcatgcaactcaggtacaatataagtcagcttgaggagtggctttggggaagaaaccttcaccagagtggagtagttcagaccatggaacctctgatccaagcagcccagctcctgcaattaaagaagaaaacccaggaggatgcagaggccatctgctccctgtgtgcctctctcagcacccagcagattgtccaatttttaaacctttagcctcccctgaatgaatttgaagaacaggtaacagtggcctttatacaaacgatccaggcacaactacaagagcagaatgaccctcagcaactgctgttagatgccaagcacatgtttcctgttttgtttccatttcatccatcttccctaaccatggagtcaatcccagcatgtctcaatctggagttcctcaatgaagtagatgcatgtttagtctgattcccaatgtgagcaaaaaggaagtatagacagtaaagtaaattcaaggatctgttaaatctggtaaaagtagatcaaatcagagattgacagcctgtggagggtgctgaactatacagaattaacacaactatggcgttattttttgtacgtactgctcagaataaaaacacttgaaatgtggaaaattt

SEQ ID NO: 235742 - DNA, 399 bp, Homo sapiens
tgagctccgcttccttcctctctaaaatgggaagattagaccaaaataacaagactgttttaaggttggaatcaaataaggaaaatttgtaaagctccttgtatgtgataccagatccacaattggcagataatcgcagcaggagcctcttcggggtaatcagatacgcggcgcagcaggggtctcagggccacagccaggggggcggcgggagacatgcggaatcgcagcggaaggcgggaggcagctgtgaactgtggctcggcctgcgtccgccctgcgcatgtacactcagagaagatgataatgaaaaagaaagcaaatccaattttcccacttactgttcatataatacagagtccctgagagtctagagtaatgtctcatacaaaaaagaaa

SEQ ID NO: 235743 - DNA, 306 bp, Homo sapiens
catttcaaacaaaccgtaaattcttcccctttcaactcctgtccatgtctttccctttgggctgctttatgtttcttcctatcaccttctgacatgatgtgatgatgtctgatgttacatctgactctccgggtgctgccggcagtggcagcttcagggggacagaggctttgcaagtcttttgctgcttccttccctgtgtctagaatagtgagttgtctggtgccttgtaggaactcaatcaagatttggtgaatagtggcactaagccattcactaaatattaaattattggacaacctatga

SEQ ID NO: 235744 - DNA, 711 bp, Homo sapiens
tttttttggagatggagtcttgctctgttgcccaggctggagtgcagtggcgcaatctcagctcactgcaaggtctgcctcctgggttcacgccattctcctgcctcagcttcctgagtagctgggcctacaggcgcccgccaccacacctggctaatttttttgttttgttttgtatttttagtagagacggggtttcaccatgttagccaggatagtctcaatctcctgacttcacgatctgcccgcctcggcctccgaaagtgctgggattacaggcgtgagccaccgtgcctggctgaaatccattttttagatgagaaaactgaggcttacagagatcagatggtttgtcctcagcctcattgtagctaacaaattcaaggtcaaatgtatacctaaattatttggctccacatttagttcaagtgctctttctgtacaaggctcccactggatggaaaaatctggctattattatttttctcttaactctccaatgttcaggttaaaaggacaatgttttaaaaaagtatgggcccatacttaataaatccttacccaacgtagttgaaaatgtttttagcattttgattctttaggcgaaatgtatttggcaattccctcttttaaggaatgcttcagatgtttgttacaccttatttgaatgattggcataaggatgtatataggaggggccataaactgcca

SEQ ID NO: 235745 - DNA, 278 bp, Homo sapiens
tcaggcactatgatgagcttagggataaaccagacacagtcttttccctcaaggagctcatagcctagtaagggcagtagttcccaaccagggctgcatataagaatcacctaggcatctgggctccacttctaggcagtctgtttatatggtgctgaagtctgacctgggcattggtatatattttttggaaccatcaaggttattctagtgggcaagaagattgagaatcactgagttaggcagctgggtctacaatacattgtcttataattaaa

SEQ ID NO: 235746 - DNA, 335 bp, Homo sapiens
acatgtcccgcatccatttggcttgtgatattctggaggaggatgtgtgaataccgttttttcttccctgcacctgccttcctaatttgcttagaatgtccttaccaaacacgacatatcttagaatggacttcctaattttcctcatcatatagctaaagccagactaatgccatgtaacctgtagccattgaattcctgcacatgcctaacctaaggtgtaaaaacaatttttagcaacgtaacttaacattattaatgaatggtagtatttatactatctgaaatgtggataacaaccctaagcctaattaaagacctttagctaataatga

SEQ ID NO: 235747 - DNA, 826 bp, Homo sapiens
aagaaaaagtcttgtggcacccacaccgagaagatgctaagcagagatgtgaggaaacaaagctgagaattgagggacaatccaagggaaagaagtggactgggaaatcggttctcctggcctggaaaagacacgtcaccacaggaaaaaatctggctccagagaacaatttattttaatatgcctcattttgctatttcattaattcagaaatacttggcctttttttctactgttactgtggaggcataataggaaatgtaaacatactggtacaaaataagaaataacttatttatatggcaggaagactagaaaaatcacagccattttcttcttcttactataagctctaattttccatgatactgctctacatacaggatctttatttaaaaaaacctgaagtgatgatattacattgccacatcaacatttgaaattaaatgatcaatgggtgatataaaaatggccagcacatggtacattttgtaatactttaagtcacattgttgagatccttgataaagatatgatttgcttttaatctggcaccatcatttattttgggcaaagctagaaaacaaataacataatttgcataatgaaaccattgagagaaaaatcactgtaatttgtcagaggtatctgcaccattttgacttacagtttaaattcattcaagtttatttctttccttaccccaactaaacaatgcttttgatttattcttgccatttagtgtcatataaaataaagtgttccactaggaggagaaataatttgtcaagtagaaactatattaaatgaaacattctctctgata

SEQ ID NO: 235748 - DNA, 343 bp, Homo sapiens
ccaccggtgaaggatggcagctttacagctccccgacgcatcagactaaagaacgttggccagggtctgcaccggtggttctcaaagtacagtccccagatccgcagcatcagcaccgcctgagaactacttagaaatgcacattctcggccctggataggcagctctggcagtggggcctagcagcgggtgtttaaacaagccacgggtctagacgttcctttctgtttctaaaagaggccttgctttcctaagacagttgctgtgaaccagctttttccttttgctgtcttgcccctgcaagtgtgaaatagaactttgacccgtgctcgaaattactttc

SEQ ID NO: 235749 - DNA, 817 bp, Homo sapiens
  misc_feature (97)..(97): n is a, c, g, or t
  misc_feature (99)..(99): n is a, c, g, or t
  misc_feature (133)..(133): n is a, c, g, or t
  misc_feature (138)..(140): n is a, c, g, or t
  misc_feature (152)..(152): n is a, c, g, or t
cttgcctgccggcacccagccaccatgtgggagctcgtggctctcttgctgcttaccctagcttatttgttttggcccaagagaaggtgccctgtgntngtccaagttttaccccaatgatgcccctttcccnttggnnntttccccccccntttgggcccccccgccccccattttggttggttttggggtgccaaaatgggccccccttttggtcccccaattttttccctttcccctccaaggacccgatgttggggccccaatttattttgcatttaaacaaaactttcctttcttcaagctgcagaaaaaatatggccccatctattcggttcgtatgggcaccaagactacagtgattgtcggccaccaccagctggccaaggaggtgcttattaagaagggcaaggacttctctgggcggcctcaaatggcaactctagacatcgcgtccaacaaccgtaagggtatcgccttcgctgactctggcgcacactggcagctgcatcgaaggctggcgatggccacctttgccctgttcaaggatggcgatcagaagctggagaagatcatttgtcaggaaatcagtacattgtgtgatatgctggccacccacaacggacagtccatagacatctcctttcctgtcttcgtggcggtaaccaatgtcatctccttgatctgcttcaatacctcctacaagaatggggaccctgagttgaatgtcatacagaattacaatgaaggcatcatccccaacaaaaccctggaaaaattaaagagccatgttaaaatacgaaatgatctgctgaat

SEQ ID NO: 235750 - DNA, 426 bp, Homo sapiens
ttaagacccatctggtattatctggatcccttggcctgaaatttttgagtgaggttagggttttgcatttctgaatcgaagcaactattgattagcctggaatcccgacctaaagcaaaggaaatcacaagtatgaaggcgtcgtcagtcggataaacactagtactctgcatgtgtaaagccactctcgtctcctgaaaaaaggccatgtccaacgtcagtaaaacaagaataggaggaaaaggcacaggggaaaggtacaaggaaatctctgagagctttgttcttgtttaaagatgtttggcaaagtcatgaggcgttaaagggtaaagacgagggtttgtgcattcaattcaaggcttctttacatgcctttacgtgccaatgagaagaaatagatattaaaccagacttgaacccagctct

SEQ ID NO: 235751 - DNA, 615 bp, Homo sapiens
caattatcttttctttttatttctttgacttctgcagaagttcaattcttgcttgttttcagtttttgagctttcactccatttgggagttcagccaatcagttgctgaaccagacaacttattataacttcctccgttggagcctgaaatatgtctttacttttgatttacatacaacattgtgggtgatatatcaagattattcactacaactcaaagacacaaatgtttcgagaattaattacgtcaacgctttcagaagataatgggtaagaagcaattcagataaaaattgattcatttcatgcaatcaatacctttatcacaaaatagaccagcatattagagaaagctttggagtcagaaggacttgagcttgaatctgggctctgcaacttaccagctacctgagtttgagtggcaatttaaacccctcagcctcagttttctcaaatgtcaagtagatccacacatcttacaggacagtataagaattagatgaggctgggcacggtggcttacgcctgtaatcccagcactttgggaggccgaggcaggtggatcacgaggtcaggagtttgagaccagcctgaccaatatggtgaaacctggtg

SEQ ID NO: 235752 - DNA, 162 bp, Homo sapiens
catgtggtcaaaggtttaactctctggtcactcctataaccttaagcttccatattagctaatggccagagagtaactgagtactattcctacaagcattctctcctcctactagcaggcagtcaggaagggttgtttgaggaatattatccattcaacttg

SEQ ID NO: 235753 - DNA, 1636 bp, Homo sapiens
tcggagatggggttttgctatgttgcccaggctggtcttgaactcccgggctcaagcagtcctccagtcccagtctcttgagtagctgagattacaggtacgcaccaccatgcccagcttgtgtggggtttcccttgaagatcagtctcaaggttgctgcttgaccggtgagcagcaggattcagacctagatgtgtctgactctgggatcctttcacctaaccctgacgctttcccagcaagcctggatgacctggcttccctccaccctgtgcccatgccctgccccttttccatcttggagtttctgaagccccagtgggctgtccactctgtgcttctttgggtcacttatgatgccagcctccctcccggcccacccgccaatcccaggccactgctaataggggtgtctttggcaggggaacaaagagcgttttggggctgccaggtggctgctctgagtgctccagtgttggccagagtggcttggcttccagaaacttcttgctgcctccttgcaggaggaggtcctggccatgctaggactgtgagctgctccccctgaacccctggcaggagccagacgctgctgtgctgccacgctggctcttcagcccctggacggacgccttggctggtccccagggcaggctcctcccaggcggctgtattctcttctcttcggggaagcacaaggcagatgttgtcgatttaaattgtttccttattagactctcgctctctggcctgggctgggtttcatcagccgggaactctgattgcatcactttgccgctcactcctccaggaaccaggccaagggctgggagagcaggcagggtgggagtgagcgtggctgagggaggggcagacggatggcaggcaagggacttaagtgatggacttaagtgatggggccctgttctgggggaccagcactgtcaggaacccaggagcacagctggaacctggagttccacacgcctgtcagagcgctactgtctcttagctgggtgcccagctccctgcatcagaatcacctgagagctcgtttaaaatgcccttttaagacctgcagcagtgactctcaaccagggttgatttggcgatctctggagacattttcggttgtcacacctggggctgtgctactggcagggtgctgctgaacatcccacagtgcgcaggacagcccctcacaaaaagaaaccctgtcctgcggagtctgtggttctggaagggctcactgggaatcttcgtttgtcatgagccagtggaatgttttttggtttttggtttttttttttttttttttttttgagacagtcttgctctgtcacccaggctggagtgcgatggcgcgatcttggctcactgcaacctccgcctcccgggttcaagagattctcctgcctcagcctcacaagtagctgggattacaggtgcccgccaccacatctggctaatttttgtatttttagtagaggtggggtttcatgtttcaccgtgttgtccaggctggtcccgaactcctgacctcaggtgatccacccgcctcagcctcccagctacttaggaggctgaggcaggaggatcatttgagcccaggaaacatagtgagaccccttacctc

SEQ ID NO: 235754 - DNA, 532 bp, Homo sapiens
ctgatttatctctagatagtaggataagagaaattttctgtttttactttctatatgtaatgtttcttataattaggaaaatgctgaatgtaatcatggctctcttattccagcctgactcaaagcccagtgttgtttatgtggtttgttagcttgcagttctagagacaccagaggtggaactggtgaattcattcattcgtgagggccccctttatgcctcaatttcccatctgtaaaactggatgatgatatacctcatcgggtcagtgtgagaattgcgtgagttaaaatctgttaagtgcatacaactagcactggctcgcaggaagcactaaggaagtctatgctgctgttattgtccattgagtgtcttctacatgcagaatgctgggtcaagccctgtaaggctgtaggggacgaagggaaagtgacttaaggagggacgagggaatgaagggcatgagaaaataagtggtttgctgccaaattctcttgtagaattccaacagaaatcacaccagacacacca

SEQ ID NO: 235755 - DNA, 499 bp, Homo sapiens
ttccccggataggctccttgcttccataggaaaagcaaacctgataccagctgaagtccacgcctgggggatattaggaagggaggggtctgtgttgcctactttttgtctgagctggtggctggccctttttcccccgagttggtggctggccctttttcgccttccctgtcttgttgtgatagctcatagtctgggcacactctgttcaaaatctgactttgccattttttgcctccttggtgtgtccaagcagtggcatctgtgattagttgcctcctgatgtaatattaactttacctttttctcactcaataccttcagatgcctacttcctgttttctaaaggactcaatgctaattataatgatattttcctttacttttccttacttctagatatattcttttgcattttatattatttcttcctctggaaatgaactatttctgtaatacattcttttcattaataaaggttttagtatatttgattatc

SEQ ID NO: 235756 - DNA, 423 bp, Homo sapiens
taggaatgaagaggaccagcacccagaatttctacagtgttacctggaatatccaattttcaacaaaaagttgagatatgcaaagaaatgggaaagtctaacccatatatcgggggaaaaaagcagacaaccaggcttgcctgtaagagggaacagatgtcagatttaataaaagatttcatagtagtcattataaatatgttcatagaaccaaaggaaatcatggttgaagaaataaaggacagtatggtgacaatcacatcaaatagagaatgtatgtagagatagaaattataaaaaagaaccaaatgaaaaattccactagaggggctcaacagtagatttaaactggcagaagaaagaattagtgaacttgaagattctagatcaatagagattatgcaatccaaagaagagaaaaga

SEQ ID NO: 235757 - DNA, 430 bp, Homo sapiens
tctgaggcacaggaagagagggaagtgaacagctggcctggctgggattggcttggagccgggagaaagtccccagtgtggagaacaggtaagagacagatccccagtgatctgtgttcccaccatggactcctgtaatctggcctcaggagagcttcttggccttcatgggccctgatactagaataggaaaatagggagctgcctggagcccccttgtccgagacccaatgagctgcagcagggtgccattttgacagtccagcccctattagaccacatctttctctggcgcccaattgcccttgaatctccatatccgtagtgctctgatgacatgttcctgtgtccatccagagggctgcagcatcacaatgccagctggacccagcagtgcagagcatattaattctccagaaagagtccaatg

SEQ ID NO: 235758 - DNA, 419 bp, Homo sapiens
tactaaaaatacaaaaattagccgagtgtggtggcaggtgcctgtaatcccagctactcgggaggctaagacacgagaatcacttgaactcaggaggtgaagtcgcagagagccgagatcgtgccactgcactccagcctgggtgccagagtaagactctgtctcaaaaaaaaaaaagaaaagaaaaaaaagaactaaactaaagcgtgatagaaataatgaaggaaaatgacaaacttttatacatgctaaaagaatgtgtatacttacttgataagaaaaaagtttaacatccccctccccccaaatcagtaaatgacctgagcaatttacagaaaaagaaatacaaggggtccgtaaaaatgtggaatagttcaacttcactggtaaagacatgcacatacaaagaggataccatt

SEQ ID NO: 235759 - DNA, 331 bp, Homo sapiens
agtccaggcccccgaatcacatctgatgagctgtggtgatcaccaatgccggagttgcctgcaatgactgcactgccacagcaattggcccttgtaaggccatttgtctcattttcttcccatctcccaacaggtggcgaagttgaatgcaccacattcagaatgcacagaaaacccagaatgggactgcttaggagtcaggctgtgctggctaattaaaacaggagcatttgtagacaggaatgtggctctcttgaaagtccaggaattctgggtaatcaacactcaaccatcaacaaacactctctattccaggcactgggagcaccca

SEQ ID NO: 235760 - DNA, 494 bp, Homo sapiens
acatattaaaatagaaattatcagtaaagaaatagatgatataaagcagaaccaaaggaaaatattagaactgaaaaatactataacattttaaaaattcactggatagactcaatggaatggagatgacaagagaaagacagattgataaaatcatccaatatgaatagaaaagtcactgaaaaatgaacagacttatctagaggatcctgtgggatgatactgacaggtctcacagtcatgtcacagatggataaaagagagtgcagtgctggccgggtgtggtggctcatgcctgtaatctcagcactttgggaggccgaggcgggtggatcatgaggtcaggagttcaagaccagcctggccaacatgccaaaccctgtctctactaaaaatacaaaaattagctgggcatggtggtgggcacctgtaatcccagctatgcgggaggctgagacaggagaatcgtttgaacccgggaggtggagattgca

SEQ ID NO: 235761 - DNA, 413 bp, Homo sapiens
acatattaaaatagaaattatcagtaaagaaatagatgatataaagcagaaccaaaggaaaatattagaactgaaaaatactataacattttaaaaattcactggatagactcaatggaatggagatgacaagagaaagacagattgataaaatcatccaatatgaatagaaaagtcactgaaaaatgaacagacttatctagaggatcctgtgggatgatactgacaggtctcacagtcatgtcacagatggataaaagagagtgcagtgctggccgttattatttaatagtttaatagctcaagtacattccaatagacgaagtgcacacaacacaatatgtgtgtacagtagtagtaaagtttcttttgagtagtcaaagactcacttttttattgcctttttttttttt

SEQ ID NO: 235762 - DNA, 685 bp, Homo sapiens
aggtgggtaggaagtgccagttcccagggaggatgctgttgactccttatccacggccattctcctcccgcttctttcttgctaaggaaaccccaagtttgttcaaccctcaggtagcttagggctgtagaggaagtgggccctccctaggcctgggggtgaatctcttttggtctaagccagtcctagtcattccagtcccttcctagtaatttgagtggaaatgggcatataatgctattctggccaatgagagggcaagtcagctggaaaagagggctctgagaaaatgttcatagacaagaaagcaacatttctgcatttggcaaaagggtgtaatgctccaagcaatggcagccatcttgaggccgtgaggggacaagtctgagatcaaatgtcaccatactgcatccttgaagacatgaagacctcagcgagctgctgaattaaccaacccctgaaagcgccctatcccgactccttgtctcgtgtgttagatgctatttaccatcctcaagtgtccattcttcttgtggtccttagaaaaagaacacagcgagttctaggcagacatagcacctccccttggcagctggctgtggccatgtgactaagtccaggccaatgggatgtgaacaggagtgatgcgggcaactcatggatgatcttaaagacatttgctttg

SEQ ID NO: 235763 - DNA, 809 bp, Homo sapiens
ccaacaattttacatagattttaatatgaatgaagtttgcaagcatccctttgaatgtagaaactgctaacatgctgttttatggcaaggccataatgagtatgttaagaatttcaggtgtagggcaaggttgccctttgtaacaagtggactaaaattgaaattattatctcagatattctgtattgcacctgaaaccatgacctttatttttccatttcgtttaataatttccattttgttgtctactccttcccacaaaaaaactatttgacatctgacacatttcacagtctcactatcctgcatttattagccttttcttcctttgaaaatacacacaattatgacttttaaggagtattttgagatttcagacatcttcagaaggtatctagaccctcttgaaagccactaacacctttctgcagttctgatattctagtttgagaaagagagagaactatttgagaagctgtagctaaagagtatatagcagctgattcataattgaaaaaaaattctcaattctgtttttgatgatcctttataaaacattaatgaggaaagacaagtgtttagacaaaagtattttagtttataaattcagcacatatgtaacatttatttggtccatatttctctatttttcttcacaattaaaatgattgctagcaccacacaactagaatttgaaaattcagtataatgaaagctttatatcacattaattcaactgcaaatgtatgcctgtttgtaggcattatttgtaattcatagtgctaaaaataaaagtgtctagggctcag

SEQ ID NO: 235764 - DNA, 309 bp, Homo sapiens
cgtggcagacggaaaattgaaagtacctcggattggttgctttccataactaattaaatgtttgcatagggtgtaacctttgtaacttcgcttcaggctctgattggttgctttccgctatcagactgattgtgggccactatatttgcgtggggtgtacacaagtggccaatgggaaacctctagagggtgtttataccccagaaaattctataacccggccgccccgctcttgagccccatgttccggctcttcacaccctgtggagtgtactttcattttcaataaatctctgcttttgttgcttc

SEQ ID NO: 235765 - DNA, 386 bp, Homo sapiens
aggcagtccacccgtcttggcctcccaaagtgctaggatcacaggcgtgagccatccggcccagcccaggtcttatattttcatagagaaaataagataggattttgacatgtccctgttactctttgaccactttcttgcattttggaagaagacgtttcaggctcatcttgtacttttcatgccctagctgtgggcagggcagcttttcctgttgtagccatttctccaaagagccccagttccttttagttgagaatggtatttagggccagaagtggtagctcacacctgtaatcccagcactttgggaggccaaggcaggagaatggcttgagcccaggagttcaacacccttgacaacttagagagaatgcctctctaca

SEQ ID NO: 235766 - DNA, 552 bp, Homo sapiens
aactgaaactctgttcccattaagcaatagcgtccccttcctctctcactccagccctgggtgacagagtgagaccccatctctaaaaagtaaagttagccataattggggtctttcaccacatactagtgtgactcagccagttgtttgtggctggcaactgccaattcatctgattgtcccaagagcctcagtggattggtcagtgcccatgactcccttgctaaatagtcttgaatgtcaccattattcattactattattagtattgtgggttccacgtgtcaggatcccttcctgggttgtatttcatcttacccctttgccaagtcttggttgatgtggtcctgcctcagtttccaaagggtgctggtgatggaaagcggggtgctgggcagattggggtgaaagctggctgctttggggattgtttgatgagcattatagtagattaagctacttctccccttccttccctgcccttattgaaaaggcgccaaagccaggaaaaacaaacagccacccataaataaagaggaccatgaaataaca

SEQ ID NO: 235767 - DNA, 949 bp, Homo sapiens
ggtgttcataagttctacccactagcagttgaaattgggacaaaaacatcccagatgtcccgtgactcttcctaattccttttcctgttgtcctctttctttcttaaaattatccccctttgccatggtactggtccactatttaaaggtcagtgactcatgttgtgcctcaacactctgccaatccctgtaccggatgctggggaggcaaagtgaataccacttcaggtttttgttactggagatttcatagagtgttagagcaggaagggctcacaaagaaacaatctcatctagcccttttattttacagagaaagaagccaagacccaggagagtgagtgacctgcttaagacccataggctcagaactggagccaaatcccctgacacttgcccacactacaaacccaaggacagtagaactaaggcgttctagataggtcatttgtagacagattcttcagtcgtttcacactgccaagtggagaaaacccaaactccccttctagtcaccgatcttgtgtttaggaccctggacactggtttatttatggtgaaaagaatctcactgttggagctgggctgcagatggaatgaatcaagtttaacttaggtcctcaatgcagttggatattttatggtaagctaccctttgtaagaaatgtgagcgcttgggtgggtgtggtggctcatgcctgtaatcccaacactttgggaggccgaggcaggcagatcacttgaggccaggagttcaagaccagcctggccaaaatgacaagaccccatctctactaaaaatacaaaaattagtcaggtgcggtgacacgtgcctgtaatcccagtcactcagaaggctgaggcatgagaattgcttgaacccagaggttgcagtgagcagagattgcgccactgcactccagcctgggtgacagcaagactatgtttc

SEQ ID NO: 235768 - DNA, 319 bp, Homo sapiens
cattgacaaagacaaaggaaaaacaatttcttcctagcaaatgtatatttaaaaaaaaaaatcaagtctgagaaccagaggacttttaataaagcaggggaggcacctttccacacatgagctctaggcacaggacaggagactgagcttgtaacaataaccgtatctaaatgctcagtatatgcaaaacattatggaaacacaccaaaagaaatagaagagtctttttctgcccttggggaatctgcaattcattctgaatatcaaacatatcaaaaatttagaaatttattgaaaataatttatagcttattggcaa

SEQ ID NO: 235769 - DNA, 716 bp, Homo sapiens
gtttcaccatattggccaggctgttctcaaactcctgacctcatgacccacccgcctcagcctcccaaagggctaggattacaggcgtgagccactgcacccggccaagaattttttttaacttgagtttacatttcttatctcttgccaccattacattggtagctttatagtaccagatcaggggcaagtcttgggggaaaaaagcgagatgatttcccctgcgttttggtctagatgctagatgttaggctaggcaggaatatttcagactggaacactgaagtagtaggctacttggagatttggaaccaaagctacagctaatcagtactgagttttgtgtaactttgtgtggtatatggacttactaggagtggaagtggccacagtagatgaatgactgaagatttaatattttgggattctgatcatctttctgaagatagaaattactaacacatacataaagtcaaggaaaccccaagagcttgttacttgaccaaggtcacaaagtaacatttaaaaaatcatctaagttaaacaagctcatgaatagtttaaagtgtgtttgtttttttttaatgttcaatgaagtaccttttatgttgcccctctctaaaagttgaaggcataacattaaattgaacctcagggaagatactttcactggagcatcagagagagtgattgccagatagtgaattggtttcttt

SEQ ID NO: 235770 - DNA, 415 bp, Homo sapiens
tgagatattgaaattttatgagtccaaattcccaaggtgtttgattttaaggataaattaatcccaccgtccagtattcaggactgctaaaaagtatagtagaattagaaagatattgacaataaccacagaaatagctaagctttgttgagaccttaaccatatgcaggcactgtgctgagtgcttcatgtgcagcaccttattttattttattttattttattttatttttttgcttttgctaattttttaaaattgtactttaagttctggggtacatgtgcagaacgcgcaggtttgttacataggtatacacatgccagggtgcagcacaccaacatggcacatgtatacatatgtaacaaacgtgcacattgtgcacatgtaccctaaaacttaaagtataataataat

SEQ ID NO: 235771 - DNA, 6783 bp, Homo sapiens
  misc_feature (3093)..(3093): n is a, c, g, or t
  misc_feature (3098)..(3098): n is a, c, g, or t
  misc_feature (3100)..(3100): n is a, c, g, or t
  misc_feature (3111)..(3111): n is a, c, g, or t
cagggggagcaccgagcaccacggtgtcgtgcgcttcgaggcgcggcgtgggaagaaggctggttcattctgccacccatctgcattaagacacaaggtgctgaccgcagagacctgccatgaaaccacacttgaagcaatggagacaacgaatgcttttcggaatattcgcttgggggctcctctttttgctgattttcatctacttcaccgacagcaaccccgctgagcctgtacccagctccctctccttcctggagaccaggaggctcctgccggtgcaggggaagcagcgggccatcatgggcgccgcacatgagccctccccgcctgggggcctggacgcacgccaggcgctgccccgcgcccacccagccggttcctttcatgcggggcctggagacctgcagaaatgggcccagtcccaagatgggtttgaacataaagagtttttttcatcccaggtggggagaaaatctcaaagtgctttctacccggaggatgacgactacttttttgctgctggtcagccagggtggcacagccacactcaggggacattgggattcccttcccccggggagccaggcccacgggagggggcttttccggctgcacaggtccagaggaggcgggtgaagaagaggcaccggaggcagagaaggagccacgtgttggaggagggcgacgacggcgacaggctgtactcctccatgtccagggccttcctgtaccggctctggaaggggaacgtctcttccaaaatgctgaacccgcgcctgcagaaggcgatgaaggattacctgaccgccaacaagcacggggtgcgcttccgcgggaagcgggaggccgggctgagcagggcacagctgctgtgccagctgcggagccgcgcgcgcgtgcggacgctggacggcaccgaggcgcccttttctgcgctgggctggcggcgcctggtgcccgccgtgcccctgagccagctgcacccccgcggcctgcgcagctgcgctgtcgtcatgtctgcaggcgcaatcctcaactcttccttgggcgaggaaatagattctcatgatgcggttttgagatttaactctgctcctacacgtggttatgagaaagatgttgggaataaaaccaccatacgcatcattaattcgcagattctgaccaaccccagccatcacttcattgacagttcactgtataaagacgtcattttggtggcctgggaccctgccccatattccgcaaatcttaacctgtggtacaaaaaaccggattacaacctgttcactccatatattcagcatcgtcagagaaacccaaatcagccattttacattcttcatcctaaatttatatggcagctctgggatattatccaggagaacactaaagagaagattcaaccaaacccaccatcttctggtttcattggaatcctcatcatgatgtccatgtgcagagaggtgcacgtgtatgaatatatcccatccgtgcggcagacggagctgtgccactaccacgagctgtactacgacgcagcctgcaccctcggggcgtaccacccactactctatgagaagctcctggtgcagcgcctgaacatgggcacgcagggggatttgcatcgcaagggcaaggtggttcttcctggcttccaggcggtgcactgccctgcaccaagtccagtcattccacactcttaaaaagggtttcttgggaatcaatgtgcaataaggtactactgttgtactcaaagtcacaaaagaatacttgaagatagattttagacagtgtagttttgagtctttaaacagtaatttagtggtggtcatgataatccttctctttctaagccattgagtatgtattactgctttgaacatagaaatggtttttttaaaaaaataaggctcaagaaagatgcaaaaccaaggatagctagaaagaaaacacatgtatgaccatgggtatgatacctccagaaatgttaacaacttattcttctgccatgagtacccctcatcagggttggtttcaatgacaggttttggtgatgttcctgaccatatgaagtggtttatgtttagaaacattcaaattgagggacatcatttacagcatcgagtgtgtcagttatacatgcattcatcattaaatatcctaggttttatgacagacattgaaattatcactcagatgtgtttaacagcaaaaaattcccagcacatcctggcaaaggcttttatttccaaccgttgcattcttcatctctgcctcccattgcccactgaatgctttgctttctgtgcatcaagacagagttctaaaaccagaaaacatccatcttgaaaggtccaagaaaaagccaaattccatatagcaccacagaggaggccctttgtttccctgcagtatttcaaccaggaacattagtatcacatccaccaggaggcacatcactggcaagtaacatagaatcacagggctgcaggtgcccctggacactccccggttctggcttttctgccttgtacctcctcacctgcagatctaccctgcagcttttgcatagtcagtgacacacttgacaattggcacagctgtgctggggaagacgggagacaccttgctccttccaaactagaaggaaagattttggagccatcaccctgtgcttctagggatgcacgcctgtctttattatacaggtttcttgcaggtttttatcagccagtgggaactccacagtgatgagcactgaatcttcactaaatcttcctacagacatttaggaatccagtccttgcttttgcagatatgttttatgtcagcagcatgacaaagccatataattaaataatttatgtgaaagcattgcttattaacaaggaaaatatgtagatgcttcagagggaaaggcagctagagggaaattttcatcccaatatgttagctatattcagggttgattttttctttaatctcaactgtcactgatacattgaaaaatttttgctatgaatatagtgaaacagaaacattctgtaataccttaattaaacatgctattatttcaatgtataaccnaaacntntctccatggtncagttaagacttgttgcaatgacaatagcagcttaattaaatgcgttctcccttgcaaaatgtatgaatgtcaggagagtttagtggaaaagttttctttgtttcaggattggtttcttctagactgttctcaggactactttcttgagcaagaatggcttacagagactgaaggcttctgtttggttagtctattcagcagatatggagctggaaaacaagacatctcctatagcttgctataatagtgaaggagaaattggaaagttttaatcacaataatatccaataaaagcccattttgagagttttgttattaagtcaatgagaagggataggtaactttgtcctatatattaacttatgtctaaatagacatggttaagccatgttcctttctaatttcttttcttttcttttttttttttttttttttgagacagtctctcgctctgtcgcccaggctagagtgcagtggtgcgatcttggttcactgccagctctgcctcccacgttcacaccattctcctgcctcagcctcctgagtagctggggactacaggcacctgccaccacgcccagctaattttttgtatttttagtagagacagggtttcaccgtgttagccagggtggtctcgatctcctgaccttgtgatctgcctgcctcggcctcccaaagtgatgggattataggcgtgagccaccaccgcgcccggtcattcctttctaatttcttgaaaaaactttgtcttgtccttatgtttacatgtgtgtaataatttcagcaactctggaatgtgggtgaggtggctgtggtggatgaatattactccctaccctccttggatctttctagatcttccagaccattaaatgcccctgaagctccttttatagttttgcaagtggatttacttgtagacatccttactatccagcataatcccccttggctgacatgagaacttggttagaggagaatttattggggtcagtgtaaatattcaagttcaaaagcctcagaacccaacactttaaagatttttaaatggaattttgtcgtagtcattgtacttttaaaatagtactttcagtttcattgaggttacaagaaagactgaagagtacaaaggaaatttagttacaatttttgcatttattatggccttaaagactcttgggaatcaggctctgttcaacagtcaataaatgtaatacacacattaatatagtactgactgggcgttcttctataaaagtttaagttctttggcttctaagaaaatgttgggcagttacagttaacttgatgactacttctggtattagccaaatgggtcctaagtggcagcattttgccagacattgactaaatccttacatgccacatttactgaattccaataaacatatagttcttctgtggagtagttaacagtaagtggcagctcactgaatttctcccaggttctgtctcttccaaaatcctccatcctctcttatgaagggaagctgataaaaaaaaatcctcttggtgcaagctgaagctgttaaggattccttttttcactctcaggaccaacagacattcttttgtatttcaagataatttcacctgttgttgttgttgttgttgttgttgttgttgttgttgttgttacaaagaaacaaattttgagcagcaatgacaattcaaccatatctagattctccctaccttatttctccagccagtcacaccaggcagacgggtaacctttaacagacctggtgttctcatggaataccgatgctcgtcccagggagctgacctttctcactatgtccttatagagctgctcttacagagaactttgtgctcaggaccaagggatggtcaattaaaagttgcatgtaagcatcaggcttggatgggcaagggagggcttttatacatctttgaacgaccaggtctttccttgtctgcctgaaggcagagcttcgagaaacagcacttcccatgtgtctggtcctcttggtctctcagccagacacttaatcaatcctggactctccagtagtcctcagtcattgtagccatagcatctgcaaaaaaagaaatgctaaaataatcattagcgttttcaaaattaggaaatcaaagtagctgggtcactctcttacatgtgtatgagccagttaattctgctggacagatcatacttacgctgctgattgactcttctgagcagtaacacatctcctgaattaattaggtaggtcccgtttgggtgctttaagtgggatcagtcttagatgagtgccagtatgtgattgaatttcatacgcacaaatgccatgattcaagttctctctccagtttttcttatagatcaacacacagtacatgtggtcagttacttggttgaatttctgcttagctgtggtaagagacagagaaagggagtgaggtgggaccaggggaattatcagaaagacatgagtgaacctattggccaggtagcttccaagtatgttctattgtattgtctgttttgattctgatagtttagaactctttctgatagtttagaactcttacccagtggttacatgactgatcaaggcaactccatctggaaattaattgcttgggtaaaatgtccctgagtttcaacttgtcttttatctctggatattctcttatgagattattatgcatgtttctgtcacatgggcattatttacacacttgataaatgaaaggtatttctctgtccgttcaaggaaataaaatgtaagttcttgttttattaaatgaatgaagccttttggttaaaaaaaaagtaatgtaatatgtttctgttcaaacttgagctaatgacatttaaggaattaaagacattgatctagttcttagtatgaaaagtgtacatgtagatatagttatataattgtgtatatacatatctacacacatggttggttttatattgctttttcatcaatatttttgactgaaacctttacaataaattttattttaattatgtaaccactaatattttgagagaaggaagcaaatgttatatgtccttctgttaaaagaaaaaaaattcagtcctccgccaaccgcttcccacacactcatactctgcacatcttggctacattaaaatggactgacagaattatttaaaaggcactatgaaggtagaacactaccttaatattttatcctagtcagaagcctgatttaacactgaactttgaagggaagcttagctgtagctcatggctttcaaagattagaagaaacatttactggttctatggaaaatagtcttcttgctaggtagattggaaacaaagaaattgcattggtggtgttaaaatctaacatttataacaaatcctgttttattctagatgaaatacttagacaattcttccagtggaaaccagtgaacttttttaacagctttgggaattcttttgtatgataatttttaaaatgaaatgtgtactcttcaaactaattaaagcttgaagttttccaggagtcgcattttaaaagtgtttgtacacattttaacacttggatattttctattttggttttgtatatttttatgtatacacaatgtacagacttttttcttgtaaataaaacatgttttcatttgtcta

SEQ ID NO: 235772 - DNA, 7032 bp, Homo sapiens
  misc_feature (151)..(151): n is a, c, g, or t
  misc_feature (3225)..(3225): n is a, c, g, or t
  misc_feature (3230)..(3230): n is a, c, g, or t
  misc_feature (3232)..(3232): n is a, c, g, or t
  misc_feature (3243)..(3243): n is a, c, g, or t
tcaaggtcttggagtggagttaggtgtccttctggtaactttctgatttgtctccctttcacttccgccggggcaggcgccgggactccctcctggccgcccacagcctgtgcgcattcctgcattcctgccgccgcccgggacccgagtnccccggaggtgtccaggcgcggtgccaggcgggtactgtgcaggttcattctgccacccatctgcattaagacacaaggtgctgaccgcagagacctgccatgaaaccacacttgaagcaatggagacaacgaatgcttttcggaatattcgcttgggggctcctctttttgctgattttcatctacttcaccgacagcaaccccgctgagcctgtacccagctccctctccttcctggagaccaggaggctcctgccggtgcaggggaagcagcgggccatcatgggcgccgcacatgagccctccccgcctgggggcctggacgcacgccaggcgctgccccgcgcccacccagccggttcctttcatgcggggcctggagacctgcagaaatgggcccagtcccaagatgggtttgaacataaagagtttttttcatcccaggtggggagaaaatctcaaagtgctttctacccggaggatgacgactacttttttgctgctggtcagccagggtggcacagccacactcaggggacattgggattcccttcccccggggagccaggcccacgggagggggcttttccggctgcacaggtccagaggaggcgggtgaagaagaggcaccggaggcagagaaggagccacgtgttggaggagggcgacgacggcgacaggctgtactcctccatgtccagggccttcctgtaccggctctggaaggggaacgtctcttccaaaatgctgaacccgcgcctgcagaaggcgatgaaggattacctgaccgccaacaagcacggggtgcgcttccgcgggaagcgggaggccgggctgagcagggcacagctgctgtgccagctgcggagccgcgcgcgcgtgcggacgctggacggcaccgaggcgcccttttctgcgctgggctggcggcgcctggtgcccgccgtgcccctgagccagctgcacccccgcggcctgcgcagctgcgctgtcgtcatgtctgcaggcgcaatcctcaactcttccttgggcgaggaaatagattctcatgatgcggttttgagatttaactctgctcctacacgtggttatgagaaagatgttgggaataaaaccaccatacgcatcattaattcgcagattctgaccaaccccagccatcacttcattgacagttcactgtataaagacgtcattttggtggcctgggaccctgccccatattccgcaaatcttaacctgtggtacaaaaaaccggattacaacctgttcactccatatattcagcatcgtcagagaaacccaaatcagccattttacattcttcatcctaaatttatatggcagctctgggatattatccaggagaacactaaagagaagattcaaccaaacccaccatcttctggtttcattggaatcctcatcatgatgtccatgtgcagagaggtgcacgtgtatgaatatatcccatccgtgcggcagacggagctgtgccactaccacgagctgtactacgacgcagcctgcaccctcggggcgtaccacccactactctatgagaagctcctggtgcagcgcctgaacatgggcacgcagggggatttgcatcgcaagggcaaggtggttcttcctggcttccaggcggtgcactgccctgcaccaagtccagtcattccacactcttaaaaagggtttcttgggaatcaatgtgcaataaggtactactgttgtactcaaagtcacaaaagaatacttgaagatagattttagacagtgtagttttgagtctttaaacagtaatttagtggtggtcatgataatccttctctttctaagccattgagtatgtattactgctttgaacatagaaatggtttttttaaaaaaataaggctcaagaaagatgcaaaaccaaggatagctagaaagaaaacacatgtatgaccatgggtatgatacctccagaaatgttaacaacttattcttctgccatgagtacccctcatcagggttggtttcaatgacaggttttggtgatgttcctgaccatatgaagtggtttatgtttagaaacattcaaattgagggacatcatttacagcatcgagtgtgtcagttatacatgcattcatcattaaatatcctaggttttatgacagacattgaaattatcactcagatgtgtttaacagcaaaaaattcccagcacatcctggcaaaggcttttatttccaaccgttgcattcttcatctctgcctcccattgcccactgaatgctttgctttctgtgcatcaagacagagttctaaaaccagaaaacatccatcttgaaaggtccaagaaaaagccaaattccatatagcaccacagaggaggccctttgtttccctgcagtatttcaaccaggaacattagtatcacatccaccaggaggcacatcactggcaagtaacatagaatcacagggctgcaggtgcccctggacactccccggttctggcttttctgccttgtacctcctcacctgcagatctaccctgcagcttttgcatagtcagtgacacacttgacaattggcacagctgtgctggggaagacgggagacaccttgctccttccaaactagaaggaaagattttggagccatcaccctgtgcttctagggatgcacgcctgtctttattatacaggtttcttgcaggtttttatcagccagtgggaactccacagtgatgagcactgaatcttcactaaatcttcctacagacatttaggaatccagtccttgcttttgcagatatgttttatgtcagcagcatgacaaagccatataattaaataatttatgtgaaagcattgcttattaacaaggaaaatatgtagatgcttcagagggaaaggcagctagagggaaattttcatcccaatatgttagctatattcagggttgattttttctttaatctcaactgtcactgatacattgaaaaatttttgctatgaatatagtgaaacagaaacattctgtaataccttaattaaacatgctattatttcaatgtataaccnaaacntntctccatggtncagttaagacttgttgcaatgacaatagcagcttaattaaatgcgttctcccttgcaaaatgtatgaatgtcaggagagtttagtggaaaagttttctttgtttcaggattggtttcttctagactgttctcaggactactttcttgagcaagaatggcttacagagactgaaggcttctgtttggttagtctattcagcagatatggagctggaaaacaagacatctcctatagcttgctataatagtgaaggagaaattggaaagttttaatcacaataatatccaataaaagcccattttgagagttttgttattaagtcaatgagaagggataggtaactttgtcctatatattaacttatgtctaaatagacatggttaagccatgttcctttctaatttcttttcttttcttttttttttttttttttttgagacagtctctcgctctgtcgcccaggctagagtgcagtggtgcgatcttggttcactgccagctctgcctcccacgttcacaccattctcctgcctcagcctcctgagtagctggggactacaggcacctgccaccacgcccagctaattttttgtatttttagtagagacagggtttcaccgtgttagccagggtggtctcgatctcctgaccttgtgatctgcctgcctcggcctcccaaagtgatgggattataggcgtgagccaccaccgcgcccggtcattcctttctaatttcttgaaaaaactttgtcttgtccttatgtttacatgtgtgtaataatttcagcaactctggaatgtgggtgaggtggctgtggtggatgaatattactccctaccctccttggatctttctagatcttccagaccattaaatgcccctgaagctccttttatagttttgcaagtggatttacttgtagacatccttactatccagcataatcccccttggctgacatgagaacttggttagaggagaatttattggggtcagtgtaaatattcaagttcaaaagcctcagaacccaacactttaaagatttttaaatggaattttgtcgtagtcattgtacttttaaaatagtactttcagtttcattgaggttacaagaaagactgaagagtacaaaggaaatttagttacaatttttgcatttattatggccttaaagactcttgggaatcaggctctgttcaacagtcaataaatgtaatacacacattaatatagtactgactgggcgttcttctataaaagtttaagttctttggcttctaagaaaatgttgggcagttacagttaacttgatgactacttctggtattagccaaatgggtcctaagtggcagcattttgccagacattgactaaatccttacatgccacatttactgaattccaataaacatatagttcttctgtggagtagttaacagtaagtggcagctcactgaatttctcccaggttctgtctcttccaaaatcctccatcctctcttatgaagggaagctgataaaaaaaaatcctcttggtgcaagctgaagctgttaaggattccttttttcactctcaggaccaacagacattcttttgtatttcaagataatttcacctgttgttgttgttgttgttgttgttgttgttgttgttgttgttacaaagaaacaaattttgagcagcaatgacaattcaaccatatctagattctccctaccttatttctccagccagtcacaccaggcagacgggtaacctttaacagacctggtgttctcatggaataccgatgctcgtcccagggagctgacctttctcactatgtccttatagagctgctcttacagagaactttgtgctcaggaccaagggatggtcaattaaaagttgcatgtaagcatcaggcttggatgggcaagggagggcttttatacatctttgaacgaccaggtctttccttgtctgcctgaaggcagagcttcgagaaacagcacttcccatgtgtctggtcctcttggtctctcagccagacacttaatcaatcctggactctccagtagtcctcagtcattgtagccatagcatctgcaaaaaaagaaatgctaaaataatcattagcgttttcaaaattaggaaatcaaagtagctgggtcactctcttacatgtgtatgagccagttaattctgctggacagatcatacttacgctgctgattgactcttctgagcagtaacacatctcctgaattaattaggtaggtcccgtttgggtgctttaagtgggatcagtcttagatgagtgccagtatgtgattgaatttcatacgcacaaatgccatgattcaagttctctctccagtttttcttatagatcaacacacagtacatgtggtcagttacttggttgaatttctgcttagctgtggtaagagacagagaaagggagtgaggtgggaccaggggaattatcagaaagacatgagtgaacctattggccaggtagcttccaagtatgttctattgtattgtctgttttgattctgatagtttagaactctttctgatagtttagaactcttacccagtggttacatgactgatcaaggcaactccatctggaaattaattgcttgggtaaaatgtccctgagtttcaacttgtcttttatctctggatattctcttatgagattattatgcatgtttctgtcacatgggcattatttacacacttgataaatgaaaggtatttctctgtccgttcaaggaaataaaatgtaagttcttgttttattaaatgaatgaagccttttggttaaaaaaaaagtaatgtaatatgtttctgttcaaacttgagctaatgacatttaaggaattaaagacattgatctagttcttagtatgaaaagtgtacatgtagatatagttatataattgtgtatatacatatctacacacatggttggttttatattgctttttcatcaatatttttgactgaaacctttacaataaattttattttaattatgtaaccactaatattttgagagaaggaagcaaatgttatatgtccttctgttaaaagaaaaaaaattcagtcctccgccaaccgcttcccacacactcatactctgcacatcttggctacattaaaatggactgacagaattatttaaaaggcactatgaaggtagaacactaccttaatattttatcctagtcagaagcctgatttaacactgaactttgaagggaagcttagctgtagctcatggctttcaaagattagaagaaacatttactggttctatggaaaatagtcttcttgctaggtagattggaaacaaagaaattgcattggtggtgttaaaatctaacatttataacaaatcctgttttattctagatgaaatacttagacaattcttccagtggaaaccagtgaacttttttaacagctttgggaattcttttgtatgataatttttaaaatgaaatgtgtactcttcaaactaattaaagcttgaagttttccaggagtcgcattttaaaagtgtttgtacacattttaacacttggatattttctattttggttttgtatatttttatgtatacacaatgtacagacttttttcttgtaaataaaacatgttttcatttgtctaaaaaaaaacaaacgccataacaaacacaaatatttggggggcgcacagggccccgaaaaagtttctaaacacacctttttgggcccgggccccatggtcactgcacaccggggcccc

SEQ ID NO: 235773 - DNA, 1663 bp, Homo sapiens
  misc_feature (151)..(151): n is a, c, g, or t
tcaaggtcttggagtggagttaggtgtccttctggtaactttctgatttgtctccctttcacttccgccggggcaggcgccgggactccctcctggccgcccacagcctgtgcgcattcctgcattcctgccgccgcccgggacccgagtnccccggaggtgtccaggcgcggtgccaggcgggtactgtgcaggttcattctgccacccatctgcattaagacacaaggtgctgaccgcagagacctgccatgaaaccacacttgaagcaatggagacaacgaatgcttttcggaatattcgcttgggggctcctctttttgctgattttcatctacttcaccgacagcaaccccgctgagcctgtacccagctccctctccttcctggagaccaggaggctcctgccggtgcaggggaagcagcgggccatcatgggcgccgcacatgagccctccccgcctgggggcctggacgcacgccaggcgctgccccgcgcccacccagccggttcctttcatgcggggcctggagacctgcagaaatgggcccagtcccaagatgggtttgaacataaagagtttttttcatcccaggtggggagaaaatctcaaagtgctttctacccggaggatgacgactacttttttgctgctggtcagccagggtggcacagccacactcaggggacattgggattcccttcccccggggagccaggcccacgggagggggcttttccggctgcacaggtccagaggaggcgggtgaagaagaggcaccggaggcagagaaggagccacgtgttggaggagggcgacgacggcgacaggctgtactcctccatgtccagggccttcctgtaccggctctggaaggggaacgtctcttccaaaatgctgaacccgcgcctgcagaaggcgatgaaggattacctgaccgccaacaagcacggggtgcgcttccgcgggaagcgggaggccgggctgagcagggcacagctgctgtgccagctgcggagccgcgcgcgcgtgcggacgctggacggcaccgaggcgcccttttctgcgctgggctggcggcgcctggtgcccgccgtgcccctgagccagctgcacccccgcggcctgcgcagctgcgctgtcgtcatgtctgcaggcgcaatcctcaactcttccttgggcgaggaaatagattctcatgatgcggttttgagatttaactctgctcctacacgtggttatgagaaagatgttgggaataaaaccaccatacgcatcattaattcgcagattctgaccaaccccagccatcacttcattgacagttcactgtataaagacgtcattttggtggcctgggaccctgccccatattccgcaaatcttaacctgtggtacaaaaaaccggattacaacctgttcactccatatattcagcatcgtcagagaaacccaaatcagccattttacattcttcatcctaaatttatatggcagctctgggatattatccaggagaacactaaagagaagattcaaccaaacccaccatcttctggtttcattggctcatttgtaaaaattggccatatcagagcttgcagtgagccgagatcacgcgactgcactccagcctggacgacagagtgagactccatctc

SEQ ID NO: 235774 - DNA, 1655 bp, Homo sapiens
  misc_feature (151)..(151): n is a, c, g, or t
tcaaggtcttggagtggagttaggtgtccttctggtaactttctgatttgtctccctttcacttccgccggggcaggcgccgggactccctcctggccgcccacagcctgtgcgcattcctgcattcctgccgccgcccgggacccgagtnccccggaggtgtccaggcgcggtgccaggcgggtactgtgcaggttcattctgccacccatctgcattaagacacaaggtgctgaccgcagagacctgccatgaaaccacacttgaagcaatggagacaacgaatgcttttcggaatattcgcttgggggctcctctttttgctgattttcatctacttcaccgacagcaaccccgctgagcctgtacccagctccctctccttcctggagaccaggaggctcctgccggtgcaggggaagcagcgggccatcatgggcgccgcacatgagccctccccgcctgggggcctggacgcacgccaggcgctgccccgcgcccacccagccggttcctttcatgcggggcctggagacctgcagaaatgggcccagtcccaagatgggtttgaacataaagagtttttttcatcccaggtggggagaaaatctcaaagtgctttctacccggaggatgacgactacttttttgctgctggtcagccagggtggcacagccacactcaggggacattgggattcccttcccccggggagccaggcccacgggagggggcttttccggctgcacaggtccagaggaggcgggtgaagaagaggcaccggaggcagagaaggagccacgtgttggaggagggcgacgacggcgacaggctgtactcctccatgtccagggccttcctgtaccggctctggaaggggaacgtctcttccaaaatgctgaacccgcgcctgcagaaggcgatgaaggattacctgaccgccaacaagcacggggtgcgcttccgcgggaagcgggaggccgggctgagcagggcacagctgctgtgccagctgcggagccgcgcgcgcgtgcggacgctggacggcaccgaggcgcccttttctgcgctgggctggcggcgcctggtgcccgccgtgcccctgagccagctgcacccccgcggcctgcgcagctgcgctgtcgtcatgtctgcaggcgcaatcctcaactcttccttgggcgaggaaatagattctcatgatgcggttttgagatttaactctgctcctacacgtggttatgagaaagatgttgggaataaaaccaccatacgcatcattaattcgcagattctgaccaaccccagccatcacttcattgacagttcactgtataaagacgtcattttggtggcctgggaccctgccccatattccgcaaatcttaacctgtggtacaaaaaaccggattacaacctgttcactccatatattcagcatcgtcagagaaacccaaatcagccattttacattcttcatcctaaatttatatggcagctctgggatattatccaggagaacactaaagagaagattcaaccaaacccaccatcttctggtttcattgacggagtctcgctgtgttactcaggctggagtgcagtggcacgatctcagctcactgcaacctctgcctcccaggttcaagcaatt

SEQ ID NO: 235775 - DNA, 6915 bp, Homo sapiens
  misc_feature (151)..(151): n is a, c, g, or t
  misc_feature (3225)..(3225): n is a, c, g, or t
  misc_feature (3230)..(3230): n is a, c, g, or t
  misc_feature (3232)..(3232): n is a, c, g, or t
  misc_feature (3243)..(3243): n is a, c, g, or t
tcaaggtcttggagtggagttaggtgtccttctggtaactttctgatttgtctccctttcacttccgccggggcaggcgccgggactccctcctggccgcccacagcctgtgcgcattcctgcattcctgccgccgcccgggacccgagtnccccggaggtgtccaggcgcggtgccaggcgggtactgtgcaggttcattctgccacccatctgcattaagacacaaggtgctgaccgcagagacctgccatgaaaccacacttgaagcaatggagacaacgaatgcttttcggaatattcgcttgggggctcctctttttgctgattttcatctacttcaccgacagcaaccccgctgagcctgtacccagctccctctccttcctggagaccaggaggctcctgccggtgcaggggaagcagcgggccatcatgggcgccgcacatgagccctccccgcctgggggcctggacgcacgccaggcgctgccccgcgcccacccagccggttcctttcatgcggggcctggagacctgcagaaatgggcccagtcccaagatgggtttgaacataaagagtttttttcatcccaggtggggagaaaatctcaaagtgctttctacccggaggatgacgactacttttttgctgctggtcagccagggtggcacagccacactcaggggacattgggattcccttcccccggggagccaggcccacgggagggggcttttccggctgcacaggtccagaggaggcgggtgaagaagaggcaccggaggcagagaaggagccacgtgttggaggagggcgacgacggcgacaggctgtactcctccatgtccagggccttcctgtaccggctctggaaggggaacgtctcttccaaaatgctgaacccgcgcctgcagaaggcgatgaaggattacctgaccgccaacaagcacggggtgcgcttccgcgggaagcgggaggccgggctgagcagggcacagctgctgtgccagctgcggagccgcgcgcgcgtgcggacgctggacggcaccgaggcgcccttttctgcgctgggctggcggcgcctggtgcccgccgtgcccctgagccagctgcacccccgcggcctgcgcagctgcgctgtcgtcatgtctgcaggcgcaatcctcaactcttccttgggcgaggaaatagattctcatgatgcggttttgagatttaactctgctcctacacgtggttatgagaaagatgttgggaataaaaccaccatacgcatcattaattcgcagattctgaccaaccccagccatcacttcattgacagttcactgtataaagacgtcattttggtggcctgggaccctgccccatattccgcaaatcttaacctgtggtacaaaaaaccggattacaacctgttcactccatatattcagcatcgtcagagaaacccaaatcagccattttacattcttcatcctaaatttatatggcagctctgggatattatccaggagaacactaaagagaagattcaaccaaacccaccatcttctggtttcattggaatcctcatcatgatgtccatgtgcagagaggtgcacgtgtatgaatatatcccatccgtgcggcagacggagctgtgccactaccacgagctgtactacgacgcagcctgcaccctcggggcgtaccacccactactctatgagaagctcctggtgcagcgcctgaacatgggcacgcagggggatttgcatcgcaagggcaaggtggttcttcctggcttccaggcggtgcactgccctgcaccaagtccagtcattccacactcttaaaaagggtttcttgggaatcaatgtgcaataaggtactactgttgtactcaaagtcacaaaagaatacttgaagatagattttagacagtgtagttttgagtctttaaacagtaatttagtggtggtcatgataatccttctctttctaagccattgagtatgtattactgctttgaacatagaaatggtttttttaaaaaaataaggctcaagaaagatgcaaaaccaaggatagctagaaagaaaacacatgtatgaccatgggtatgatacctccagaaatgttaacaacttattcttctgccatgagtacccctcatcagggttggtttcaatgacaggttttggtgatgttcctgaccatatgaagtggtttatgtttagaaacattcaaattgagggacatcatttacagcatcgagtgtgtcagttatacatgcattcatcattaaatatcctaggttttatgacagacattgaaattatcactcagatgtgtttaacagcaaaaaattcccagcacatcctggcaaaggcttttatttccaaccgttgcattcttcatctctgcctcccattgcccactgaatgctttgctttctgtgcatcaagacagagttctaaaaccagaaaacatccatcttgaaaggtccaagaaaaagccaaattccatatagcaccacagaggaggccctttgtttccctgcagtatttcaaccaggaacattagtatcacatccaccaggaggcacatcactggcaagtaacatagaatcacagggctgcaggtgcccctggacactccccggttctggcttttctgccttgtacctcctcacctgcagatctaccctgcagcttttgcatagtcagtgacacacttgacaattggcacagctgtgctggggaagacgggagacaccttgctccttccaaactagaaggaaagattttggagccatcaccctgtgcttctagggatgcacgcctgtctttattatacaggtttcttgcaggtttttatcagccagtgggaactccacagtgatgagcactgaatcttcactaaatcttcctacagacatttaggaatccagtccttgcttttgcagatatgttttatgtcagcagcatgacaaagccatataattaaataatttatgtgaaagcattgcttattaacaaggaaaatatgtagatgcttcagagggaaaggcagctagagggaaattttcatcccaatatgttagctatattcagggttgattttttctttaatctcaactgtcactgatacattgaaaaatttttgctatgaatatagtgaaacagaaacattctgtaataccttaattaaacatgctattatttcaatgtataaccnaaacntntctccatggtncagttaagacttgttgcaatgacaatagcagcttaattaaatgcgttctcccttgcaaaatgtatgaatgtcaggagagtttagtggaaaagttttctttgtttcaggattggtttcttctagactgttctcaggactactttcttgagcaagaatggcttacagagactgaaggcttctgtttggttagtctattcagcagatatggagctggaaaacaagacatctcctatagcttgctataatagtgaaggagaaattggaaagttttaatcacaataatatccaataaaagcccattttgagagttttgttattaagtcaatgagaagggataggtaactttgtcctatatattaacttatgtctaaatagacatggttaagccatgttcctttctaatttcttttcttttcttttttttttttttttttttgagacagtctctcgctctgtcgcccaggctagagtgcagtggtgcgatcttggttcactgccagctctgcctcccacgttcacaccattctcctgcctcagcctcctgagtagctggggactacaggcacctgccaccacgcccagctaattttttgtatttttagtagagacagggtttcaccgtgttagccagggtggtctcgatctcctgaccttgtgatctgcctgcctcggcctcccaaagtgatgggattataggcgtgagccaccaccgcgcccggtcattcctttctaatttcttgaaaaaactttgtcttgtccttatgtttacatgtgtgtaataatttcagcaactctggaatgtgggtgaggtggctgtggtggatgaatattactccctaccctccttggatctttctagatcttccagaccattaaatgcccctgaagctccttttatagttttgcaagtggatttacttgtagacatccttactatccagcataatcccccttggctgacatgagaacttggttagaggagaatttattggggtcagtgtaaatattcaagttcaaaagcctcagaacccaacactttaaagatttttaaatggaattttgtcgtagtcattgtacttttaaaatagtactttcagtttcattgaggttacaagaaagactgaagagtacaaaggaaatttagttacaatttttgcatttattatggccttaaagactcttgggaatcaggctctgttcaacagtcaataaatgtaatacacacattaatatagtactgactgggcgttcttctataaaagtttaagttctttggcttctaagaaaatgttgggcagttacagttaacttgatgactacttctggtattagccaaatgggtcctaagtggcagcattttgccagacattgactaaatccttacatgccacatttactgaattccaataaacatatagttcttctgtggagtagttaacagtaagtggcagctcactgaatttctcccaggttctgtctcttccaaaatcctccatcctctcttatgaagggaagctgataaaaaaaaatcctcttggtgcaagctgaagctgttaaggattccttttttcactctcaggaccaacagacattcttttgtatttcaagataatttcacctgttgttgttgttgttgttgttgttgttgttgttgttgttgttacaaagaaacaaattttgagcagcaatgacaattcaaccatatctagattctccctaccttatttctccagccagtcacaccaggcagacgggtaacctttaacagacctggtgttctcatggaataccgatgctcgtcccagggagctgacctttctcactatgtccttatagagctgctcttacagagaactttgtgctcaggaccaagggatggtcaattaaaagttgcatgtaagcatcaggcttggatgggcaagggagggcttttatacatctttgaacgaccaggtctttccttgtctgcctgaaggcagagcttcgagaaacagcacttcccatgtgtctggtcctcttggtctctcagccagacacttaatcaatcctggactctccagtagtcctcagtcattgtagccatagcatctgcaaaaaaagaaatgctaaaataatcattagcgttttcaaaattaggaaatcaaagtagctgggtcactctcttacatgtgtatgagccagttaattctgctggacagatcatacttacgctgctgattgactcttctgagcagtaacacatctcctgaattaattaggtaggtcccgtttgggtgctttaagtgggatcagtcttagatgagtgccagtatgtgattgaatttcatacgcacaaatgccatgattcaagttctctctccagtttttcttatagatcaacacacagtacatgtggtcagttacttggttgaatttctgcttagctgtggtaagagacagagaaagggagtgaggtgggaccaggggaattatcagaaagacatgagtgaacctattggccaggtagcttccaagtatgttctattgtattgtctgttttgattctgatagtttagaactctttctgatagtttagaactcttacccagtggttacatgactgatcaaggcaactccatctggaaattaattgcttgggtaaaatgtccctgagtttcaacttgtcttttatctctggatattctcttatgagattattatgcatgtttctgtcacatgggcattatttacacacttgataaatgaaaggtatttctctgtccgttcaaggaaataaaatgtaagttcttgttttattaaatgaatgaagccttttggttaaaaaaaaagtaatgtaatatgtttctgttcaaacttgagctaatgacatttaaggaattaaagacattgatctagttcttagtatgaaaagtgtacatgtagatatagttatataattgtgtatatacatatctacacacatggttggttttatattgctttttcatcaatatttttgactgaaacctttacaataaattttattttaattatgtaaccactaatattttgagagaaggaagcaaatgttatatgtccttctgttaaaagaaaaaaaattcagtcctccgccaaccgcttcccacacactcatactctgcacatcttggctacattaaaatggactgacagaattatttaaaaggcactatgaaggtagaacactaccttaatattttatcctagtcagaagcctgatttaacactgaactttgaagggaagcttagctgtagctcatggctttcaaagattagaagaaacatttactggttctatggaaaatagtcttcttgctaggtagattggaaacaaagaaattgcattggtggtgttaaaatctaacatttataacaaatcctgttttattctagatgaaatacttagacaattcttccagtggaaaccagtgaacttttttaacagctttgggaattcttttgtatgataatttttaaaatgaaatgtgtactcttcaaactaattaaagcttgaagttttccaggagtcgcattttaaaagtgtttgtacacattttaacacttggatattttctattttggttttgtatatttttatgtatacacaatgtacagacttttttcttgtaaataaaacatgttttcatttgtcta

SEQ ID NO: 235776 - DNA, 357 bp, Homo sapiens
atgtggtgaagtgaaatataatttttacctcatatttaggaaggaattttaaatgacctttggatttttatcaagattcattagcactatttctgaaaacttgtttgttttattaaatattaaggtttcattgcctgttaagttcttatgaagctaataacctaaaagcaaagttaaagaaataatcatctttcctcctttagtccatttctttaatagcatactatgtaaactgttgatttcttgagaataagagcatgagttgtcatagtacattctcaagagctgtttgatgaaaggattttcttttattttgatggagaaataaagacacaaaaactcacttaaaattaatgc

SEQ ID NO: 235777 - DNA, 1917 bp, Homo sapiens
atggttggtgccctttagagataaacctacagccccagtacctggcccacctgaatctagagggccacccacccagctgaagtccctgggcaagtctcctgccccagtgcaggcagtgtttcctaacctcctcctcctcctgcacccaaccaggcccagaacacttcctggtcatgtgaacagctgacagttacaatcccccacacactgagagagcatctgtgttcctgagtggactgaattgctagatgtagtaacattgatttggtggctataggtttcaaacttcaagtcagagatcatagaactttaagccatatagaatcctagaattggaagactctgagcagccatctctgcacccagcagccaaggagtggccatcctcagcacctggcagggcatcagcctcccactgggagtcccggccacctccagggcacgtgggttatgagtcacctttcctttgagctgacccacccctcactgactagactcttaaacacacactgccccgtctaatacacaccagcatgattcttaatccccacagtcattcacgctgcccatctggcagcaccttaatgatctacagcaagcttgtggcctactaaaaacgcctccattgttttttaaagtgtgcagttattttccggatcatgaatagagaaattgtatccctgttgttggtattgattcagtgttccagctcaagtttgagttcttagactttatatttggattctttggtttcaaatcacaaaaatcaactccatctggtttaatccaagaactctattggctcaggcaacagtaaaaagcaatgctaactcatttgggaccagggctcagatcatcccctgcactgtctctctctcgctccatgtctcaatcctctgcctctggtgattttttccttaggagggtttccttatgtggaggtaaaaaatgatcaccggcagcttcagatttaccttccaccagcttagcaaacaccacccactcccagcaagaaagaccctgtttcccaatgctcccagcagatgtcttaggccatcctcgggcctcactgattctgtgagccagtgcccacggccaggagaatggaatacactgacctagaggggacagggactctagacaggcaaaaactccactgtcagaagcagaatcctaaaatgtcagaactgaaaggtaggcccgcccctcgttttccagaaatatgaaagggaggcttgggataacagagaaatgctgcaggcattggccccaaatctcaggcctcctattcccagtatcaccttcaccagcctgggtggtctcaagattggattagcagccattccttctgggtagagtctgatggtcacttcagctctcaaagtccagctatccagccatagtcctagaaggcaagacatcactgtgcccgaccaacccaagggtctccacctgcccccctcaacacaaggtgccctgagtgcctccgcggggatagtccccgtccccacccctgcttcccccgcccatcgcgacagatgctcagagctcatccctggtgtcacaccacataaaggaggagggcggtggccaggctccgagctcctgccgtcctgggtgggtggcttctgtcctgcgtgccgccgggcagcccgggggtcctgcgcgcgggcgcggtcggtggagctgcaggggggcgctctgggatgtctccaggcagagtagatactgacccctccgcagccgggaccctcaccctttccttcatcactcaggaaacagaaaaggcttcagaaggagcggccatgcccccggcctaagcgctgcgttcccggcccagcaggcctaccctgcacctggcgttcctaggggcccctctgcgggacccactgcgcggctcgcagcggccgcccgcct

SEQ ID NO: 235778 - DNA, 541 bp, Homo sapiens
gtgttttcaggaagtgtgtgtgttggccacggctgcaggaggtgggggagacacaaagcaggaagcctccgggagaccagagctgggtgcagacatacacacacacatacacacagacacacagagtcacacacactcacacacactctctctctctctccctctgtctttctctctctctctctctctctgtcctttcctcctggacagatccacagttatacacagaaacaaacacacacgcacgtagagaagtgattcacaaacacttaaagacataaatcacaggtgcaaagccatacctgggctcaaaaacctccaagagaacgcagcctcagacccacccaggggccaggggccaggctgtttgcgagaccagcccaggcgggacccaggcttgcacgggcaggtacacgacattcttgggcatacgcagcccgcctggccggagctgtgggagtcctcagccccaagacccagcaggcgtctgaggcctgcccactaaggaggaggagtcattgctgccatcattatcaccccc

SEQ ID NO: 235779 - DNA, 715 bp, Homo sapiens
tgatgtctgcttttgacttttatataaatggaagttttaaaagacccaactatttttaacatgaagatgtttttccttaataaaacctggaatagttattcaaggttctttgcatatttttcaagcaaaatatcccaagtgtacttgaaaatgtaacttaaaatgtttctcacgttttcttaacttgtattttgatatgatgatgtgaggcataatttaagtgttattttaatgtatgttaggttatgctttgatctgaagtatgtataggttttgttctctattcattcacacctcaaccatccagcaaacactgagtgcccactcagtgccaggcatttgcggggagctccaagcccacagcagcacagcatggggcctgcgaaaagcaccagccctcagggagttcgtgttttgttggtgttttgttttgattatttataacataataacatgtgtttattactgaaaactgcacaaataaagataatcaaaaatcacccataatcctaccaccagaactaaccactgtttatcatcttagtgtatttcctttccaacctatataatatgtacagatagttggatgctattttaattctaagcaaaattgaaaatatttgaagctgttgtcaaagaggaagtaccctggtttgagtattttaactcatcatctttcagaaatgaaaaataaaaataatagaacttgatacta

SEQ ID NO: 235780 - DNA, 551 bp, Homo sapiens
tcctctttccagacccatgtctttgctcatgtagatcactacttcaggctgacataaaaaccgttctcttgttaagaaagctcagcaatgggagaggcaatcctccacccgtctcttgctctcctacaggtctttcctggaggtagtgggttgaatggtggcccccaaaaagataggtccaagtcctaacttctagaacctgtgaatgcgaccttatttggaaaaagggtctttgcaaatgtaattaaaacacctggagatgaaatcatcctgtatttaggatgggccctaaacccaatgatgtctttataagagaaaagagagagagacgcagagacaaagagaagaaggtcattgagatggaggcagagatggggatgaagtgtctgcaaaccaaggaatgccaaagattgccagcaaaccaccaggggccaggagagaggcctggccgattctccctcacagacagtagagggaaccaccctgctgacccgtcagtttcaggctttgggacctcagaactgtaagagaataaacatgttttgagccac

SEQ ID NO: 235781 - DNA, 481 bp, Homo sapiens
ttgctttatttgataatattgatagcaattaaaacagccaaaatactagattctttttgcgttatttgataatactggtagaaattaattaggtataagtgtattttttctaattgctattttactgaaagcatatatatgtatgtgtgtgtgtgtgtgtgtgtacacatgtatatatatatatatggcaaatgaaatcttaaatccagaatggggtagtcttaaaatagcgcaaaagacaaaaacttttaaaatgttaaacagaagtacagttgaactttgagtaatgagtgcaggggttaggagtgccatcccctgcttgcctgcaacagttgaaaatcagtgtgtaactttggactcccccaaaacttaactactgatagcctattgttgactggaagccttacctataacataaacagctgattaatacatattttgtatgttacatatagtatgtactgtatttttactataaaga

SEQ ID NO: 235782 - DNA, 362 bp, Homo sapiens
  misc_feature (296)..(296): n is a, c, g, or t
  misc_feature (317)..(317): n is a, c, g, or t
  misc_feature (332)..(332): n is a, c, g, or t
gaaagctgccaaggcagggcttttggcactttcagctttaacctttgctgggctttgctatttcaactatcacgatgtgggcatctgcaaagctgttgccatgctgtggaagctctgacctttttgacttcatactttgaagaactgatgtaagcctctttgcctctgctttgtcatgccattaagctcacaataaggggaagatatgcttgtgtcctatgaaaatataatcagacagccatgatgtcctccaaaaccaggaaaccgggaaataacccactagtcttgatgaacanatccaaagatctatgtcatgnagcataataaaaatngtgacagaaggaaataaattgccaagggga

SEQ ID NO: 235783 - DNA, 975 bp, Homo sapiens
cattattgcatatgtcctgtagacaagcctcagaataagtaggtcagaggttgctttccttctcaacttctgcagcccagatgagtttaataaaccacttagatcagcttagatggatataagtcaatcgacccaaatggcaaatgtgaatcacacaggcatacagtgagaaaggaagcagggccctgaaatgctaagctggaactagagtctaagatggctttaccaaaaacatacttcccaggccatgcacctatatgtgaagctttattgatgtttaaacataaccttgtatggctgttttccagtctgagatggtatggatccatataggtgagagtaagtttatatctgcatccgcagtgtaggctggggaatttaaaatgttgattaatatctattgtatacataaatatctacataggcaaagtcatataattctatatgttgtgtttacccatgtataatctagatacagatctagcattttttttcatatgcatacagaataaagatataggaggtcaaaggataaatgggtatttgtacttacagcaatgtaaagaaaaacgtcaataaatgcaaaatcttatttgccatttaaattttgtccacaagagcacacaaatggaggtatgctctgacctgcatcttgctgcatttaatgttttcttttttccctttttttctttttttctttttttttttttttgagatggagtttcgctccagcttgggtgacagaatgagactccatctcaaacaaaacaaaacaaacacaaatgaaagggaaggaagtggattactgatgataactaaggtatggaatcaacctgagtgttcatcagtaggtgaatggagaaagaaaatgtggtatatgtacacaatgaaatgccattcagcccttaaaaataaagtcttgttatttgcaacattcatgaatctgaaaggtatgctaagtaaacccagcacaga

SEQ ID NO: 235784 - DNA, 235 bp, Homo sapiens
aatgatttgaatgaggatttctgtccatggttgccttcttaaacatgccatatcaaccttccctaaatatgcttttctcgattttttaaagagcacactgcctaattgtgtctaacaaattctgaacactttatgtttcaccaggtgagagaggaagtatgcaaccaaattaaccatagtcttcgctcctgagtcccagttctttggtgaaactgacgtgtatatgtgtgactat

SEQ ID NO: 235785 - DNA, 311 bp, Homo sapiens
aagtccggtggtatccctaggtaaggccccgcttgcccagacccacttggctccgggccttcgggactcaccgcacgggaggagcaaccaggcggcgcagcgcgggcgaaaactatgattttcaaaactgaaggctcagccaatcctcggcaagtttgtccgggcggttgcaaaattttaagccaatcaaataacaggaagtaccagtcagccctcctattggccatatccactagcaatctgcgggactaagaggcggggaaaggaagcgaaagactttaagccccctcagcttccgggtgctgcggccg

SEQ ID NO: 235786 - DNA, 354 bp, Homo sapiens
atgagaatgtgccacctttttttgcagtaatggtgtgatcattttgttttagaagataatttgaagccgggtgcggtggctcacgcctgtaatcctagcactttgggaggccgaggcgggcggatcacgaggtcaggagatcgagactatcctggctaacatagtgaaaccccgtctctactaaaaatacaaaaaaaattagccgggcctggtggcgggcgcctctagtcccagctactcgggaggctgaggcaggagaaaggcgtgaacccaggaggcggagcttgcagtgagctgagattgcgccactgcactccagcctgggtgacagagcaagatgccgtctcaaaaaaa

SEQ ID NO: 235787 - DNA, 250 bp, Homo sapiens
cagttcattcatatgatggaatactatgcagctattataaattaaaaaacaaaacaaaacaaaacaccagacaccttagtgacaaggaaaatgttatccattcactgaagaaaaatgagaaacttaggccaggcacagtggctcatgcctgtaatgccagcactttgggaggccaaggtgggaggatcgcttgagcccaggaatttgaaaccagcctgggcaacatggtgagaccccatctctccaaaaa

SEQ ID NO: 235788 - DNA, 2131 bp, Homo sapiens
  misc_feature (1865)..(1865): n is a, c, g, or t
aaaagctgttaagaagtagtcccaataatgtgagaatttgggagacagaatagaagccaattgtaaagaaagcaacatggctctctacttttgttcctgggaggaagatgtgaatcttccatctgccaaggacatggaagggaaaatggtacataaatacataataaaggacactgtaagaattttcatgctccagagataaacagataatcactaccatatgcaagttaaaaatagtatggaaatagtttttcatgggagattaacaactgaagccccaactgtttgtggttgctcatatggaaattgctttgttagatgaatgtactgactgggcaagaagtagtcaataatttgtgtgagctgttattttcaaagtacagaattctgcataaggtggctctgatttcagataaagttgcataccttggtagaattatttctttttggcttttgaatcatttataagcataatttttcttttttaagggaaaagaataaccttccctctggcctttttatcagaatgtaatgtttctgtttgcttctttaagtgttcataacaagtttgtggattccaaaagggattgaagaattatttctggtggtctttgggtctaattgctgccagctgaggaagcaaaattccaaataagttgaagaaactttcacaaaaaaacacttaacataattataaggcataaaggctcaatatacagtttatgtaataaaatcttacctaaccacaaaacatccaaggaccagtcaagcagaggtcttcaaaaaggtatatgttaacattttgcttgacactatacttgcttagatttattaaaaaccttctggctatgcattttagattaatcctgttttaaaaacctttgcaaagtttttctgttttgttgtgagcaattcaaagagcatgtaacaattgatgtaaacatgatcttcaaaagttagaatatcattcatccttccccattgcttcctccaggaatactggaataatatggctttgagatattggccaaggattcctagtgttagttatttatgaatttaatatagtgtgttccacttaaaggaaacatgatacaaaaatccagacaacaaaacaggtatatgagtaagtgatcataatataaaatgtttctgtatttttcagaaaaaaattacatagtattcacttaagtcttttcacactacctttgctttatgattagatttagttgtgtgcactttttaggagcatttctaatattttgacaattaataaatttgtacatgatctggctgtgattcaattataatttacaaaagcaagtcttagaaatatcagggttgcccatatttttaggtcatttctgtcatcatttaatcttatttttgtttttacttatctgttgaaacttcagcaagtgttcttgatcattgattattgattattatacccttgaacaacattgggttggggcattgaacctcatgcagtcaaatgtatgtaaaacttttgactctccaaaaacttgactactaacctactgttgaccggatgccttactggtaacataattgattaatacatattttgtatgccagcaatccccaacctttttgtcaccagggaccagtttcatggaagacaatttttccatggacagaggtcggtgggaggatggtttcaggatgattcaagtgtattacatttatcattaggttctaacaggctatgggctggtagtggtctgtagcctgggggttgcagacccctgctgtatgctgtatgtattatatactgcattcttacaataaagtaagctagggaaaagatgtgaagaaaatcataaggtccgtgtgtggcgtcncacgcctgtaatcccagcactttagggggccgaggcgggcggatcacgaggtcaggggattgagaccatcctgactaacatggtgaaaccccgtctctgctaaaaatacaaaaaattagccgggcgtggtggcgggcgcctgtagtcccagctgctcgggaggctgaggcaggagaatggcgtgaacccgggaagcggagcttacagtgagccgagattgcgccactgcactccagcctgggcaacagagcgagactccatctcgg

SEQ ID NO: 235789 - DNA, 588 bp, Homo sapiens
tggtcaacttgtatgaaaggaaggaacagggcttagatttcctgcccagcaggtgtaaaggggcagaacagtgaagattcccaaagtccacagctctagggcagaaaagcctcctggacacttgagctgtaagtggggcagccacctccacagcccacacagggactctgcttgctgctctggcagctatcccttaaggacatgtggcccatgccctccctggtctctcagtttctggataagtcaagcattcagagaatagtcctctctatcctcaagacccgtgcttactctggggaggactgtgtgtgttgaggggagctcgtaaggccacaccctcaggtatgctgaaggcatgaatagactgacgagtgctagaaggaatctagacaagtctgtgacatccaaccagcttcaagtctgttggagccaactcatggagaatcccaaacctcctgaggggccagggcccatggagataatactgcaggtgggtccactctagagcattcctgggccaccttgttcttcaaggtttggcccgcaccagggcagtgcctccacagcaacataggttctcagcccaac

SEQ ID NO: 235790 - DNA, 339 bp, Homo sapiens
gagcccaggcaggctgtccccaaggccatggccctggccgaggttgcatcctggcctggccaggccctgcccccgcgtggccagacttagaagcggagagcaggtcaggcattgaggagtcccgtggggaaaaagggtgaagcagggaagatcagatgcaagtcctccctggggcccagttctgtgtccctgcctggcaagggctttggggggcttggagaacaggtagggcaaatgtaggcccagtggggaaaaggttgatactaaaaggtctaagggcaattttcaaaccaagtctagctctgcagagccttgaggctgatgccaggccctggggcc

SEQ ID NO: 235791 - DNA, 531 bp, Homo sapiens
gcgatgtggttccccagagcacctgcggggctcaggccaggcagggtggagggtggagggtggaaggccaccttccgcccgtcctggaaccacgcggcggcttcccggctgccccccacccgccaggccctgcctcccgtgggcaccaggggggcgtccacaccaagccggccgtgtgcttttcgcgcaggattactggggaaggcggctgctcggggcctggaaggtcccgggtctcgcctcgtgcccctctggcccccaaaccgaccggctccccggaactggccaacccgcgctgagagcccgcgcagctcaaagggcgcgagggcgggaccgccgcggccggcgctgggagctcggcttcccgaagacccaagcgaaagcctccgtctccccagccgtaaatgggcctgcagcgtctccactccgcagcgctgtccccagtgggagggcggcccgtggacgtgcagggagcagagcaggggcccctggcagcgtaggaccccgaggtcgcagcaaccacgcggccgc

SEQ ID NO: 235792 - DNA, 395 bp, Homo sapiens
gtcgcctacagctgaccaatagagggcttgggtccggaagtgatggactggaggcttgactaatgtgaaaggggcgtctgaaagagaagccagctgccatgccatgaactgcaatgtgaaaaggccaatgtagcaaggatatgtccagccaacagccagtgaggatctgaggccctcagaccagcagcccatgagcaactgaattttgctaataaccatgtaagtgaacacagaagtggatccttccccaggcgagccttcataagtccacagacccagtcaagactttgactgcagccttgtgagagcccctaagccagaggacccagctaagccacgttcaacttcctgacctgtcaggtaataaatgtatgttgttttaagccaaaaggttt

SEQ ID NO: 235793 - DNA, 392 bp, Homo sapiens
gaaactaaacaatttgcttctgaatgactttcgggcaaacagggaaatcatggcagaaacataaaaattctttgaaatacgtgacagcagagacacaacacatcaaaatctctgaggtacagcaaaaacagtgttgagaggaaagtatatagcactaaacacctccctgaaaaagttagatctcaaattaacgttctaacatcacagttagaagaactagaaaaacaagaacgaactaaccccaaagctagcagaaggaaagaaataacaaaaccggagctgaccagaatgaaggtaagacccccaaaccctggcaaagactcaacacaaccaaaagtttgtttattgaaaggataaagtgaatcgatagattgctagctatagtaacaaaa

SEQ ID NO: 235794 - DNA, 452 bp, Homo sapiens
ccccagcccccgaccccagaccccactaccagattcagggcaggtacttttgtatgtgctctgttgaccttggatggaggtgataaggaccttatgacagtcatccatttggagacaggcttgtgtatcacttgagcttagtacaaaacacaatcaatcatgttccctagggggacttcttgagactcttggactaatgcggttgcctggtctgaaaacacttaagctgaagaaaaacttctgagactagatgcattctcaggaagtgaaagaaaattccagggggagtgccaaggtgaaagggaatgactaaagaccttcctgcttcctcatcaaaaggactgctctatgtcttggaccgtcagcacacctgttttcctctctgctctggcttcagctcttctcacaggctttgaagatgttctcaagaatcacccacctttaaaatgaaa

SEQ ID NO: 235795 - DNA, 217 bp, Homo sapiens
acgcgccccgcggcccgaactatgcttttgcctgacactctggcctgggcctaggcagagacatgacaaattgtcccccaagtcaacgctgacagcttctgatgattaatggtctgattatgaagtggttttacacatatagaatttacatcacagagagttagaaattttgccatgtcacatacgccgaggcattttgaagagctttactatttgc

SEQ ID NO: 235796 - DNA, 444 bp, Homo sapiens
agcagccaaagggaatattttccagccaaaagccctctcatgacttccctcacacttatgcttcttatcatgccttatgtatatatgtataagcagcccacagcatacttctccaccctcatctcctactgctctcctctttgctcactgtgctctagacatactgaccttatttctcctccttaactatgctatatgtttccctcagggcctttgcggtagctagtatctgtacctagagggctccttttcatgatgaatgcttttttttcattgatgactaagtacacttgtcacctcttcagagaattcttccctgacacctaaagtagccattccatcactaagtcattcttatgttttattttttcttcaaagcatttatcaatatctgaaatattcttgattgtttattcttttactcagtaaaagcgattaccttgt

SEQ ID NO: 235797 - DNA, 499 bp, Homo sapiens
caggaaaatagaatattctaatttatgaaatattctgactaacggagtgtataggaattatttattctaaaagtatcatcaatattaaaactatacaggacatattttactttatgtttgataattcataaatcatttttgtttcatgctaaggtttgggataagaattgtgagcatctcctcaggtataataacaatagataggctgggcacaatggcttacgcctgtaatcccagcactttgggaggccaaggcaggtggatgacctgatgttaggagttcaagaccagcctggccaacatggtgaaatcctgtctctactaaaaatacaaaattggctgggtgtggtggcacatgcctgtagtctcagctactcgggaggctgagacaggagaattgcttgaacccaggaggtggaggctgcagtgagctgagattgcaccactgcactccagcctgggtaagacagagtgagactctgtctcaaaaaaaaaaaaa

SEQ ID NO: 235798 - DNA, 463 bp, Homo sapiens
caatattatgctttggtatatcctgcctacgacatgcaagagaattttataataataaaagcataaaggtgttctccagcatgaaaacattttgcttcactacttgatctgagggtcactggcattacatattttttttgctgtttgttataatgataatactatgtttctacatcatgctgtattttaatggttgaatattatgtcatattagatatattttagacatgagtcacactttaaatataaccaatgtgaacagaatgctgaaatgaaaatgagaagtattttatgtaaaactaagcagtatttatatgtgagaataataagcaaaaaaacccatcttcgttttgtgactaaacagagaaatttgtgtagatcaacttagcagctgtctaaagtaccaaaataatagatttttcactgttgataatttaaaataaaatgtccatttgtatatctt

SEQ ID NO: 235799 - DNA, 483 bp, Homo sapiens
gctgtaatctgttctgtaatcaaatctgtctgctgtagatgtataatttacttttgttaagttgtttactgcaaaatggtctcaagaaaatccttttctattcaccataattactaagatattaatcagctctcaaacataggctatatggggtctcttgtaaggcttgtttgcttttagttaaaagtaatagttcctgctttcagaatgttttaatgtggtggtgaaaaccacaagctaatgttatatggaatgattacttttgtggtattcccacatgccatgtatttccgtgtatatttacagatacagtacacatacataaaatgacttacatgtaatattaaaaaaatatatagcccaggtgtggtggctcacgcctgtaattccagtcctttgggaggccatagtggaaggatcatttgagcccaggagttccagaccagcctgagcaacgtagacttcatctctacaaaaaagttc

SEQ ID NO: 235800 - DNA, 701 bp, Homo sapiens
tagtcatcccttgatatacatgagggatgggttccaggatgcacccccataccaaaatccatacgtactaaagtcccttgactgcggacctcacatatatgaaaagtcacctctccatatacctggattttgcatcctgccatgtagttcaaactcatgttgctcaagggtcaactgtgtattgtaaaacgtcttggaatctagataggaaagtttgatttattgagtaacctgctatcaggttagagaaaaaagtgccggaactttttgctggtgtggaaaaggtggtatggaaaaatgtagaatagtcagtcagttaagagttctgtaatctggatatttggtgaggaggaccttgacaattggaataacagtgggaatggaataagggacattgaaggaataatggaaaataatggcaatttattaaattgtagaaaatgtgctagctgcttcacttttggagttggggttactggggaagttttgccagatgataaatagatggtaagcacaggttggtttggttttacccaaatttgttctagacacatttggcttggggcaggtgttgaggtttgattttttttttttttcaccctacaaacaggccccctacacagctggatgtgttggctagaagctctgatgagaagttaggacaagatctgtagcttggaattcttaataggagtgatagc

SEQ ID NO: 235801 - DNA, 329 bp, Homo sapiens
agaaatgattatgaatgacctataggggaatcaccctccttcctgaaagcatttattcagaaatatgctttgaccagagccagaaatacaaaggaaagagataagtattgcctgatttactgtaaaccagaattgatgcctccaaaatgaaagtcaccgtcttcccccaaaaactagctccttctcacttccctgtttttgtcacccagatgcaggtgtctctggctctttctactccttccatcattatgtctagcctgttatctagtttctgtgtttttaaaacttttgactgatccaggatacatgtgtgatacaaaagtttcatt

SEQ ID NO: 235802 - DNA, 319 bp, Homo sapiens
ccaaaatttctgctgtcaggtatttcattgaataattgctgtatatgtaacattctatgccagtcgctaagagtgaaaagaagtataagatttctgctcttagaacattttttttatgtagttagcaagataggatgaatatacatagaaactaaaatataagttagtgtacaaaaattgattgtctatatactagcaataaacaggaaacaaaaaaaattaaatatcctgtttaatatagcatcatgataacaaattcctaggggaaaagatctaataacagatgtgaaagacttctacatagagaactttaaaacat

SEQ ID NO: 235803 - DNA, 485 bp, Homo sapiens
gacgattccttatatttcttcctccctttctccattccttccatttttatccattttactattttgactgaagatcacaaaataacctctgtttctgattcacagctgaaaacctagagccctagctttgtttagaactttataaaataaaaaagaaaagaaaaggaaaacctagaacctagcacagtgcctggcatgttgtaggtgctgaataaatttgtcaaataaataaactttaaagaaatggccaacttgggaaggacattaggccatcagtttgtagtcttacgtcaattcttgatctccaagcaaaattagtttcagttctctgaaggagactgccctttcaaagatacattcaagtaacttatattttctgaagaaatgattccacatgtaaaatactacttagagcaaatataggaatctctggatatagctgtgtaagtccatttgtttattcttctaattaaaatttgatcatt

SEQ ID NO: 235804 - DNA, 440 bp, Homo sapiens
aaggtgaatttacaatactttatttcagatgaattagaatatttaaaaatatgaagactaaacttatacttaataagtaattagacatactttttttttttgagacagggtcttgctctgtctcccaggctagagtgcagtggttcaatcactactcactgcagcctctaccttttgggcttgaacaattctcctacctcagcctcctgagaaactgggacgacaggtgcatgccaccatgaccggctaatttttttttatttttcctgcagatgcagtctcgctatattgcacaggttggtcttgaactcctgggctcaagcgatcctcccgcatcagcctcccaaagtgctgggattacaggcatgagccactgaatatactatttatatatcatttataaataaatatataatatattaataataaatctgaacttc

SEQ ID NO: 235805 - DNA, 1167 bp, Homo sapiens
atgatctaaggcaagagaatgtaaagtagtcaaagtcacactatgtgcattttaagagacatactgcaccaaatgcaatagcgagcatggtctgcatccgggcatcttccagtgtgctcagtagcccttttttgctaagaagagctcttcctgccagggtccagaacttcacatgttttactcccactgagacaaactgggtatctgaatctggtcggaattctgccacaaaaatacgttgattgtgaccagctctgctggcaattttggcacctgacaagatacaacaaaattatctaggttattacaagaaccaagctaatcaacagcatcaaacaaatatgtaaaatacatagttcaaaaaacaaaggcttagaagagaggccaatggcccctgctctactacctagcaatacatgatttacaattatttgtgtattgagtccttttcacttatcttcgctccattaacttttctttatataacgtaaatgttttgtctaaagtgtggtaggtaatattatcctgctgatctgccattatcattagaaatatacataattttcataagaatctccaaaaccaatcaaatcattaataataaatacatagtttcttgctggaagaaaatagcagtgaatcatttataatgctaataatggtttcattaatttatctgttttgtgaggttacagttccactgggcttttaaagtgaaatatacctacagtaccactgtgtacagtatattgcataggcctccactgaatgattgtttcaaccaccaactttaagacaaatattaaatacagaattcctactaaaaaaaaaaaaacagacagaaaacaacctttgtggggcacgcgccgcgcccagaaaaaggtttcaaacaccattcggtgttgggaggacagggggcccacataaggacgtcgacactgtggccacaggcggggcccaaagggaaacctggcgacagagcaaaggtgggcgtcttcccaccaataaaaaaccccgggggacccgacgggtctgaccaatccaggaggaggtcgaggccaacggttcacaacagcgtcaaggagctgagtaataccagctcgcggtggaactcacaacgacgcggcacgaaacacagacacagccgcacacggcacaggacacacg

SEQ ID NO: 235806 - DNA, 827 bp, Homo sapiens
cagagtctcactctgttgcccaggctggagtacagtgtggctcaatcacagctcactgcagcctcaacctccccaggcctcaggtgatcctcctacctcagcctcccgagtagctgggactacagttacatgcctccacacccggctaatttttgtattttttgtagagacagggtttcaccgtgttgcccaggctggtctaaaactcctgagctcaaactatttgcccacatcagcctcccaaagtgttgggataacaggcatgagccaccatgcccagcctccagtagtatttttaagacattgatccaaatgtcttaagttcctactaagtatttagtaagctctctttagatgtttctttgtttttagtttttaaaacttcccttgataccgtgaaaattagtgcaagtattgttgttagcatttatcaagatccattttgttttgagactgtattgacttccatatcttttacattttctaaatcaacataaatgttctaataatcttgtttgttttctttctttcctattacgtaaaatttgctttggcttattcctactccccttctaacccatctcaataaatggcaccacaaaaaacctggacaccatctttcttgtccctctttttgcccactcacatccagtctgttagcagattcttatgtcacttctaccttgaaaatgtattttaaacccatccacttttttctatatccacccccgcccccgcaccatcctagtcccagccaccatgctagtcccagccaccatcatttcatacttaggctgctgcagtactttcctcagttatctaaagtt

SEQ ID NO: 235807 - DNA, 1102 bp, Homo sapiens
tgccaggattgaagtcaattctttcttctctcacaggtgcccaaatgtgatgttacacatttttaaaaataaaaagtagatgagaagaaaccgagtggtgagtagttgaagtcagtgatggggcctgttatgctttaaatcaagtatcgttggcatgccctgggagagttagttgctcttaaagtttctgcaggactttatcactcaaagcctgtgtggggggaaacaaaaaagtcaaagctccatctctcctggggtccctgcttttctacgttcgctttgctgctacccaccaggatgacagacgggtctgcctctcttttccagccccagccttgttccacagcatcccttcagtcagtcaggtccagagaaacccacctgtcactctggtgcaagggaactggctgtggcttgcagtgcgtgtgtgcatgatacagcatacgtgtgtgtggagcagccacgcagcgcagcacaagggaggcagctcagctgttgatgcccagaggagggccctctcccaaggttcctcatcagctcttcagctctccacacagctcagcatggatttcctcagaccatcccaaacataaccttacattttggtgaaaatttgtctactactttttgtatgacacaaatcgagcaaacagcacagaaaccaaaatctatttatttggaaatattctgaagcgattcactggtataatttcatagtgttaaagcgggttagaacccaggctctgttacttacttgctctaagaacttgggcgaatttctttgtgtctctgtgactttgtttccacatctgcgaggatgtacactttaatgcattttttatgcaccttagaccagtgcctggcatataaataataccttctgaatgttagctagttttagagatgtaaagcactaagccactatttccagagcggtggtcctggcactatttcaatacaccaccaacattttatattcgtatcactaatagttttggtgatttgataccacttttacctctcctcataaatcaaggcattttgtggtctctagagaagtagggttcatttgagccccagaatacagcttctggctttggat

SEQ ID NO: 235808 - DNA, 497 bp, Homo sapiens
aaagtgctgggattaaaggtgtgagccaccgcacctggcctgaagccatagttcttaacctcagttgtgcaatagaattatctggggaatttaaaaattagaaaaaacccatgccctgaagattgtgatctaactggtcttgcgtagcgcctgggcattggtattttttaaatgtttcccaactgatactaatgtggccattctgcaagccacagttgaaaggcttattcaagcatcctgttgctgaatgcatgtcgtccttaccacatgactctggaggttttcttgtattctgatgtggctgccctgttgaggcctgccccttagagtggagattatcccctgcagtaggctgcctggaatatgatccccagtgatccctgcttcctggtattcaggccctggtgtgatccctttcccttgaagcctgggctggattagtgacttgcttctaaccaacagcatatggcaaaaataaatgtttattgttttaaacc

SEQ ID NO: 235809 - DNA, 183 bp, Homo sapiens
gggtgtctgactaggcttcgaacttgggccatcagggccgggcatggtggcgcacacctgtggtcccaactatttgggaggctaaagtgggagagtggcttgagcccaggagttaaggctgcagtcagccaagatcgtgccactgcactgcagactggacagcagagcaaaaccgtgtctcag

SEQ ID NO: 235810 - DNA, 700 bp, Homo sapiens
cacattgtgttatagaggtggaaataacacaaaaaggcacaaagatgtgttttaggataaagacttccatttcaccacaggatgcttaaaaaatatttgtttcacctctacattgggtggggtacagcttcctaaatcacctgctgctttcaacagtaggcatactttcttgtcttaggataattctcaattaatagcagaaggcacaccagacttctgacataagagcaatgcctctaatctagagcagtgagccgagtattgttaaaaggatcaaacaagataattttttaaaaacctatgcaatacaaagaatgtatcacataattatcatatataatattctaactaaaatcaagatataattttatatgagtgatctcattcttgctgttttgttacctttttccactcggcaatgtatcatgaaacctcttcatgaaaatgaatacaggtcaactttactctttaatgactatgtagaatcctattcagattataccttaacgtatttagttagccaatctccttctaagttggtccaatttttcggcacgacaaaccaccccatagcaaacaactttgtacctacagccctgcatttacccaacttttttcttcaggaaagattcttaaaaatatacatttatggccgggcacggtggctcacgcctgtaatcccagcactttgggaggctga

SEQ ID NO: 235811 - DNA, 420 bp, Homo sapiens
tgagatgtatgcctgcctgtaaattcacgtttctgaggaagtatataaggtttgtttagttgaagatagaaagagaaaagacaatgatactgccattattgaatgaatgaatgaatgaatgaatgaatgaatgaatattttgagaatatgctcaggacactaagccagatggagaagatggattctttttcctaaaataggtaactaagccctctatctttatgcatcttacctttgtggagaatacattttcagtaataaatctagtgacattttctcaatcttcattcaattctatcctaaatgtaataatatatttgcctttagcctcattccatctcctgaaactgggtttttgtttgtttgtttgtttggcttctctgaaatggtacgcctatacttgcatttctgattgtccct

SEQ ID NO: 235812 - DNA, 581 bp, Homo sapiens
agcctaatgggaggtgactggatcatgggagcagagttctcttggatggtttagcattatccccttggcgctgtctttgcggtacttctagcaagatctggctgtttaaagtattggctggagttggcgatgactcagcagatcaaggctggaagactcattctcgtcaggtggttgacgttggctgtcagttggaacctcacctggggctgtttgccagaacacctacacatggcatgtccatggagctatttgacttcctcactgcaatggctgggttccaagagcagttatcccaagagaacaaggcagaagtgcatgacttttagaatcttgtctcacaagtcacacagagtcacttccaccatcccctgttggtcaaggaggacatgaaggtcttcctaggagcacggggagaagacagacttctaccacctgttggaaggagtgtcagtgttacatagcaagagaagcacatggaatgggatgtattgtgatgcccatctttggaacagacaatttggcatatctgtgaaaattaaaagtctgatttggatataacaaatgagactgattagcaa

SEQ ID NO: 235813 - DNA, 513 bp, Homo sapiens
tttctcagtctcaggtatttttttatagcagtgcaaaatcggcctaatatattgtctgtatagcattctgatgattagttcttcactgtgtattaagattgacttatgttgctgcatgtatggctaattcatccctctgactgcttcagaaatattccactttattcatatttattcaacattttacttatctattcccccgtgtactaaaagtcaaaagcattactaatttaataatgtcatatttgttcttctaattattttttgctgcataacaaagcactcctaacttagtggcttacaatgataacagtcatttattttattcaaaaatctgcaatttgggctacaattggcagaacagctcatctttgctccttacagtattggctggagttggcgatgactcagcagatcaaggctggaagactcattctcgtcaggtggttgacgttggctgtcagttggaacctcacctggggctgtttgccagaacacctacacatggcatgt

SEQ ID NO: 235814 - DNA, 1111 bp, Homo sapiens
ttccagaattatggcaaactaggtgttctgaacccctgaagcccttatatgtagaacatccaggattactgcataaaaaaatcacaagtttccttttaatgcataactgagatcaaaataaagtccctaagtttagaaactgcagaggaaactgaaactcagagaggcaaattgagactgggactctccaggggaaatctgatgacctggataatccagcaatttaagttttaatggctgcacagggacagggtcaaagcccatggcacaaggaaccagaagaatgaggagccaaagctgggaccactgaagggctacatcctcaatggatgggtggaggaggcagagaaagaccttagggaaccactctgccttgacctaggcgctcagctcccttgagaatgtatagccacaggtttactccctcggggtttgagattgaaaattgcactccttgcattgtccaagaaactacaagcagagacattccacaaggtggtccccacagccagtgttcccaggtccgctctggagggacacagctgcaactcagacccccataggatccccacttgagctcaccatcccacattacaaaatacacaaaagaacaagccaccatgagatgcagtcttcagaaagaacccatggaagagtcagacctcaagaacttcagacaatgtaattatcaactctagaaataagagaaggttcaagttgtgtgaataaatgaaaaagtgtatcaaaaataaaataaagaaataagatgctacttttagacacagaaatattaagtaaataaatggaatttctataacaaaaaaatataaaatcatggaaattaaaaactcaagcataggataaagtgcagaacagctgcatagagaattagtgaactcagacaggaaggtttgagggtaaaggtttgaggagagaggagagacctgtgtctggagctaagagccaagagatggagcacgggagggattaataaaaggattatcaagcagcaatgaagaggaagaaaactgagcataaaaaatttagaaactaggggaattttttaaatcagcatttcttaaaaccttctttactggtgcttggcagcttg

SEQ ID NO: 235815 - DNA, 422 bp, Homo sapiens
ttccagaattatggcaaactaggtgttctgaacccctgaagcccttatatgtagaacatccaggattactgcataaaaaaatcacaagtttccttttaatgcataactgagatcaaaataaagtccctaagtttagaaactgcagaggaaactgaaactcagagaggcaaattgagactgggactctccaggggaaatctgatgacctggataatccagcaatttaagttttaatggctgcacagggacagggtcaaagcccatggcacaaggaaccagaagaatgaggagccaaagctgggcatgattgctcacgcctgtaatcctagcactttgggagtccgaggtgggaggatcacaggcacaggccactacaccaggctaatttttggtatttttggtagaactggctattacatgtt

SEQ ID NO: 235816 - DNA, 682 bp, Homo sapiens
ccaggactgttgtgtagatggcaaagctgtggtcccgtcccttatcagcctgcctcgtctctcccagagccccgaggtgtgttgacctgctctgaacccttcagagcagcctgtgtgtgcaccttggaatgcaatgcaccaccccacagtctgaggctgcacccaggatcccaggccgagctgctgctcctgggatcgggcaacagacctccccccaactctgtccagactggagggtgggacattggcagctaacagatgtgggcatcgggttctcgggacagcatggaggctccaggcaggaagccgagcagggcgagcttccagtttccttttggtcctaggggtcccctccttccaaaccccaaaatgtctctccctgacactctcaggggaaaccagcctggctgtgacgccctggcccaggccctgccatgcctcacttctctcccacaacccccctgctcatggcacatctggtctctggctcctgtctactcgtgtgcatgcagcacccagcgccccctctcctcccacttgctctccggaggcctcagagctctcgggtccaggctcccagacccactctcctgagacagtgatgttcacttctgttatccacgtctcccatccatcttgcatgtgaataaagagattaaataaagctgcacctactgctgac

SEQ ID NO: 235817 - DNA, 356 bp, Homo sapiens
accagaaatggacccaatagagagtggggggagtaattatctacaggaaacatacacatgccatgcctccagctaccatgggctggatcctctgggatctactgtatagtccttattttttcattcagttcccacaaccaccctgtatggcagggtggtggtacagatgagagaactgaagccaaaagaagtcaagtgatttctttttcaggttggtcattggtggtgcagggatttaaaccctagtccagccaatggattccaaacacaaatggtcaactttacttcagcaccagtgtgatgagttttgacaagagacaaaaggaaagggtgggagaagttagaaatgtaaccca

SEQ ID NO: 235818 - DNA, 424 bp, Homo sapiens
caacctctacctcccagcttcaaatgattctcctgcctcagcctcccaagtagctgggattacaggtgtgagccgtcatgccccactaattttttgtatttttagtagagacggggtttcatcatgttggccaggctggtctcaaactcctgacctcaggtaatctacccaccttggcctcccaaagtgctgcgattataggcatgagccactgcgtctagcctctgctgctgttttgatcaaaggacatagttgcaagatagtgacctagtcaataccctcacccctttctccagctcctccctgtcctacctcactgtcctcttggggaacaggtgctcccattccagggccagccatcctgctgggagtttgcatctcaagcagcagcaggcccttcgggaggaggggagccaagatggca

SEQ ID NO: 235819 - DNA, 400 bp, Homo sapiens
agaagtaaaaaaaaaggacaagaaattaaatttttattagtacaattgtataagcttatatgaaaaacatatataaaatacctatgtactgatatattttgtgtaaatttaaagcaaaatataaaatatttaaaaggatagaaaatgttagtctagtgttgtgtttctttttagcttctttgaatttctaatcttatgctgcaaaattagatgtttagaaataaagaaattggggcatttagtttcataaacaatattcagcaaaaccaggaatttagaagaaggcatattaacatttgagattgtgactggtggaagtgatccaagttaccccatattaccagtggcctatcagtaccagtctgtagcaacttcagtccttgcttcctcaaaaagaaaa

SEQ ID NO: 235820 - DNA, 439 bp, Homo sapiens
ctggcgagcccagagatgggggaagaagggccctgagccatgagtgcacctcactgcatggccctggtcaggtccctctgcctcctggggcctcactgtgtccacagcctcctgcacgccacgaagcacctccccgatgtgccagctcccccagcaccagcctcatcccaaggaaggaggaggcgactcccactactcaaggggctgttccccatggcacccctcaggccgctgcaggagactataagcccctcacaaccgaggccattttccccactcccttccccgcaagccctaaatggcccagcaacaactctgaactctgatctcggtcagcccagcacgggtggggcaggaggttctgtcaacagcgagggaaactcgttaactgaatgtcaataggattaaaggctctgatggtccaggagaaaaatgtgac

SEQ ID NO: 235821 - DNA, 494 bp, Homo sapiens
ccattttcaaaggaagatatttttcttgacgtttttctacctttgaaaatacagcgatttgttaccctaggtttatgatgttggaacatactgaaacattagttccacaaatattctatacttaaagtttaactcttaagaagcaaatagatgatgagcagtggtcatttgagttacagctccttggagtaacatgctaggctttctataggcatgcaaacatggttggggtaaatgtgcattttttccaaaattgcttgaacaggtatgcatagataaaatagaactactaaggttcataggcagaagtacttctgtcgacctgaattagaatatttaataacatcagcactgaatttaacagctaaaatagaaagggagacttgatttttgttgttttacaaaagaaagcatacaaaaattcatctgcagaaagagctttctgaagctgaattaaagaatatttagctttttaagaatgtttgtcttcttta

SEQ ID NO: 235822 - DNA, 470 bp, Homo sapiens
ggaaaacagctacggagggaaggatgagaagcaatgcaaagtgacatataccatcctggccacagcttcccaagttgggtcctttgctgggtgcactcatgtggccatgagggacatctcagagagactgcagagatcagaaaaactcatcaaaatggagacctgcaaataagaggaggaagagggaggagagagagcacagaaatcttccaagtggcttcagtgacagaaggggaggagtcaccacctgccatttgcatggaagtgtttttgttcctctggtttattgctcctatttatgcatgcgtgtgcaggatcttcaaaatccaggtaagaaacacagtgaagaactcatctactgcaagcttggccccatccatcagtaccagtgaagagagacaaatcaggatagaaagacatcactaccatctctatggtcagtgatattatggactaatgaataaaaataa

SEQ ID NO: 235823 - DNA, 1842 bp, Homo sapiens
aaacacagagagaaattgttaagtggaagtgagagctcatccaaaaaaagacagagaaagaaaaaagaaaagaagaaatctggtaggtattcatcttcttcttcatcaagctctgattcttccagcagttcttctgattctgaagatgaggataagaaacaaggaaaacagagaaagaaaaagaagaaccgttactgaatcagacagtaaggatagtttaaaaaagaaaaagaagtcaaaagatggaactgagaaagaaaaggatattaaaggactcagcaaaaagagaaagatgtattctgaagataaacctttatcatctgagtccttgtcagaatcagagtatattgaggaggtgcaagcaaaaaaaaaaaaaaaaaaaaaaaccccacaaagtcaaaagacaagtttgaaaaatgtttacagctccacaaagatagacaaatttccttgatgtatgaaaaatgtcaacaaaccaataaaaagactaacaattcagtagaaaaatggacaaagaacaaatatggagattcatagaaatgagagataaatgtacatgatgagaaggtgaggtgctcacttgatttataagagaaatgaaaattaaaactacaccagatgccattttttaaaaacctattacattgtgaaaataaaaatttagcaaattgttagcctgaatggggagataggtacttgaattttgtgtgggaatgtaaattaggacagtctttatggaggataattttatagaatccatcagatttataaatgcacagacctatttgacccaacaatttaacatccagatttttatcttatgccaaactgaaatgaagaatggccaagttttattgaggcatcatttatagtagcaaaacactggaaacaagctaaatgttcattatagaagactggttaaataaaaatttgtccatcgaagatggagtagcatgtagttattaaaaaagaataaggaaaatactgatagaggatgatgtagatattaaatggggaaaaaagtaaaactccacaagatgtagaacagtatatgtgttttgctgccgtttgaggagaaaggagaaaatacagaaatatttatatgttgcttatgtatgcatacaacatttgtggatggattcacaagaaaatggtagccttaatttaccttgagacaaactgagggacaaggacaccctttaatacctttcagatatttttttttttttgagacagggttttgctcttgttgcccagcctggagtgcaatagcgtgatctcagctcaccacaacctccgcctcccaggttcaatcggttttcctgcctcagcctcccaagtaggtgggattacaggcatgcgccaccacgcctggctaattttgtatttttttagtagagatggggtttctcatattggtcaggctggtcttgaactcctgacctcaggtgatctgcccacctcggcctcccaaactgctgggattgcaggcgtgagccaccacacctggctaccctttcagttttaagccataataaaaattacatgaaattgggctgggcacgatggctcactcctgttatcccagtgctttaggaggctgaggcaagaggatcacttgaggccaggagttccagaccagcctgggtaatgtagcgagaccctgtctctacaagaagataaaaaaattagctgggtgtcgtggtgcgtgcctgtaatcctagctactcaggtggcggaggtgagaggattgcccgaacccaggagtcaaaagctgcagtgagctactgtgatcatgcctctctactccagcctgggcaatagggtaagatcctgtctctg

SEQ ID NO: 235824 - DNA, 410 bp, Homo sapiens
cctccatttccccattgctaaaatggggatcttgccagggggctgcgagaatcgaaggggacagcggcagagagctccaggcttgccagggcgcccaacaggtctgccttcctctgccccattcatttcctgctacctgggggcctccgggcgcctcacgtttctgagttttaggggccagacgtgccgcaagccaggtccccgcccggcccaaggccgtgcatctcccaccccctgctgaatctacccggccaggctgtcccctggggtgaggggacttggcctcggccagggcccggcccccctcggggcaccccggcggcggctccacgctcccgcccgtgcccctcttccaggccggccacaagtcccgctgcctcccaaccccggctccagcccctccgcggccg

SEQ ID NO: 235825 - DNA, 326 bp, Homo sapiens
ccatacgttatcagtttaattactctgaggcctcaataaaaaaattaaggaaactaaagtaggagagtttgcagtttacactcagctgttctgagttcactgaaagtgaaatgccaagctgccagggatctactgcatgaagctctcgtgaggctcctgagtgggccgagaagtggcagatgagcttcgtgtggatacggtaaagcatttagtgaaaaatgaaagtgaaagaagctaggctgcattcacaggctggcaggctttgccttctcagtttcaaacttgaaaaagggatctaggagtgactggtaaccattctgtgaaaa

SEQ ID NO: 235826 - DNA, 418 bp, Homo sapiens
ggcatctttttacctcttcatcaggctccttctggaagattcacctcaggagtttcttccttcaggaagcatttcctgatcactccattcagggttaagtactgttttcttggctgggagcagtggctcatgcctgtagtcttggtactttggaagacggaggcaggcggatcacttgagctcaggagttcgagaccagtctggccaacatggtgaaaccacatctttactaaaaatacaaaaattagctgggcacagtggtgcatgcctgtaatcccagctactcgggaggccgaggcaggagaatcgcttgaacacagaaggtggaggttgcagtgagccgagattgcgccaatgcattccagcctgggtgacagagtgagactccatctcaacaacaacaacaaaattaaattta

SEQ ID NO: 235827 - DNA, 657 bp, Homo sapiens
aatggaggccataagagaaaataaaatttattggaaaacaacgggatgagataaaaagggaaatggataaaatatgtaaggactgcaagtaaactacaaacataatagcagaattaaacttcactgtagagatcacattaaataaagacagtgacatagaatcccaaactgataagctttcccacaggaaaatcaaataagaaatcagaatattgtgaaagaagataatagatacagacaacagagaatggaaacccaaaataagctgtactcctgaaaaagaggacaaaataaatggaacacaaataataatcaaattaatatatggaaattttgtggagctgaaaacatacctgtatgcagatggcaagtgcctgatctaccccagtgaaagaagacatctatgcctaaataaatgttaagaaaactactaacttagttaaaagataaataaacatcttacaaatgtctagatacaactgacaaaaaagaaaacaagcaaataatgcatgaacgaaaataaggctggtgatattcttctcctattgtaaccctgaaagtcagaagacaatgaaacaatgtctgctgagtattcagagcctttcacaaatgaataagagagaaagagatcttcaggtattcacactgtaaaattta

SEQ ID NO: 235828 - DNA, 691 bp, Homo sapiens
aaatgctaaaggaaagattgttcaggctataaagtgagataacacccagatggaatcttaagtcttcaagaaggaatgaaaaaattttggaatttgtaaatataaaagactagtttttcatgataagatctttaactacacaggacctgttaaagcaaaaattataacattgtcttgtggtgtttataatgtaatatgtacagatgtaatccatatgactttatagcataaagaatggaggcagtggcaaatggatttatacagttgcaaggttttccaattttatatgagatagtataaaattaaatctaagtagactgtgaaagatcaagaatatacgttttaattcctagaaaaaccaccgaaaatccaaagataaaatagaatcctaaattaagaaaaaaatgatccaaaagttgcagagggaagaaaaagaaaaacaagaagtggaggagcaaacagaaaacatataataaacttgcagctctaaatgcaatcatatcagtaatcagactaaatgtcagtggactaatcactaattaaaatgtagcagtgtcatagcaaaattctacctgatgtacaaagaagagctggtacaattctactgaactattccaaaaaattgaagaggagcaactcctcccaaactcattctgtgcatcaccctgataccaaacctgacaaacacaca

SEQ ID NO: 235829 - DNA, 183 bp, Homo sapiens
tttttattttgctataaatgtctctacaagcagctgaactttaagaattatgacctgtcttgatctttgccaaagattggcaaaaacttagaaacagaagaaatcagcactgtaataaagttttaaccaggtggagagctcatatccaaggttacttgggtctgagtcttcccagcaaaaaaa

SEQ ID NO: 235830 - DNA, 417 bp, Homo sapiens
attctcattttttccttgtagagaaagtggggaagggatctgaataattttcaacttaagtagttctagcagctttgtcggtgaggaaaaggagaagccaaatttcctgggttctgggatttttaaaattgtgttttaagaagctactcttggcctggtgcggtggctcacgcctgtaatccacccacccgaggcaggtggatcacctgaagtcagaagttcgagaccagcctggccaacatagtgaaaccccatctctactaaaaatacaaaaatgtggtggtgctcgcctgtaatcccagctactagggaggctgaggcaggagaatcgcttgaacctgggaggcagaggtggcagtgggccgagatcgcaccactgcactccagcctgagtgacacagagtgagaccctgtctc

SEQ ID NO: 235831 - DNA, 487 bp, Homo sapiens
accatgcccactgtgtcagttctgccctgcgctcatgtctttgagcctttatttattgctccctctgctctctcatttatctgattaccatttcagtgacttcaaaactcagcccaagtgtatttggaaagccttcccaacctcctccaagatccatgtgacatgtgcgtccccaagccagataaccagggaggctctggctggccgtgtgaatgttatcttaagatgttagtgaaccttccatgcccaacaatacccaaaacaattaggtcagatatcctcaatgggaattacggcagcatcaggccactcaaggttttgctcttttcagggatgagaactcagtagaaaacaggaattccccaccagtaaacacagaccctctcttgcaaatgctggacatgtatgcaccaactgactcttaagggcatgtttgtatgtgtgtgtacatgtgttgatcatacaataaaattgactattttagtgt

SEQ ID NO: 235832 - DNA, 331 bp, Homo sapiens
tccagcctgggtggcagagcaagactccatttcaaaaaaacaaaaaaagtagaagaggaaagccaagagtcagagggacatgtgattatggaagaagtgggtgatgccgtgtgagaagccaccattgctggctatgaagatggaggaaggggtcatgagtcaaggaatgcaggcagcctatagaagctggaaaaggcaaggagatggattcttgcctagagcctccagaaaggaacacagccctgccaacaccttgattttagcctgctgagacccatgtcagaataaactagagatccgtgtgataataaatgtgtgttgttttaagtca

SEQ ID NO: 235833 - DNA, 347 bp, Homo sapiens
taggcccctttgtctgcagagtcagtcatttggggtctggccttctgcagggaaatgaagatgagcttggctcagagcccaaactcagggccgggggacagggggatgcacactcgccggggggcctttgacacagctctgtggctcctcccgacaacctgggtaggatgttatgatcagccccatttgacagatgagggatctgaggcacaaaaagggagagttggccgggcgcagtggctcatgcctgaaatcccagcactttgggaggccaaggcgggtggatcacctgcagtcaggagttcgagaccagcctggccaacatggtgaaaccccatctctgatta

SEQ ID NO: 235834 - DNA, 625 bp, Homo sapiens
agaaaaacacggcgtcaccgtccggtctataatgcatgaccttagtctaatcatgagaaacccaagctgagggacatggtacagaataactgatctgtacccttccggaaatgtctgtattatgtaagacaaagaaaaactgaggaactgttgccgattacaggaaacgaaaaagacaactgaatgcaagacatggtcctggatcggatcctgggtggggattgctataaaggacaatactgaaacagcaaaacttgactatattagataatagtattgtatcaatgttaaatttattaattttgattatggtacagggttatgtaagagactgcccttgttcttggaaaaaaatgctgaaataattagggacaaaaaggacatgatgtctgcaacctttatggttaaaagaaatatacctatacatatacatagagaaagcagagacacaaatgtggcaaaatgttaatcagttaatctggttgaagaatatgggagttctttgaacatttttgcaacttttctgtaggtgtgaatttaagcataaaaacacaaacagcgttttttttttgttttttttttttgagatggagtttcactcttgttgcccatcttggcctcccaa

SEQ ID NO: 235835 - DNA, 497 bp, Homo sapiens
gagtgaaaaaacttcagatggctttctcagtgccagaactgtgttctgatcttgtgtctcaccctagagatgacagcacttctgagagtggaggggttgggacagattttttgagatgatggggagtttgaagaatttctttgggagacttgagagtgagtctgttagaggtgaataaataagctgcttaaggtaggaaactctagcatggggtattaggaagtccaggcagcatggtaatttgacctaaccggcaatgcttagaagactgggaatagaaggaataaatttgtggattaattctttagtgggggttggaagatagacatggcagaaagccaagggaggtgctggagtcctaccaaggatactggggaagcatcgtgtggtccaggtggggtggcaagtatagctcaaggaaggattagcctcacagcctagcagtgtgcaagagggctcaggatctaggggttctcaagcctaggaagttgtggtca

SEQ ID NO: 235836 - DNA, 416 bp, Homo sapiens
gtctctttccaagaacaaagaaacttttccctaaagaccctaagcaaacttcttttaatagctttttgccataattatgtcatataaatcaatcaatggcaaggagaatggaattatcatgattgaccatcataatcagtatttactcccaaggaacactaaatgagacaatataggcagcttccttagcaccgtcccttagcacaagatgtcggcattcagtaaatgtgaaggattttctccattagtcaagaaataggcatattctgtggaattatgaaggcaaccaccaaaagaaataacactgggccagataaaatacagtttctcctgtaaactgtgtctgtattaaaagagaaagggaagatcatattttctttttaatatgtttttaattatatggttgaaattgcttt

SEQ ID NO: 235837 - DNA, 354 bp, Homo sapiens
atacgatgcaggcaaatccataaacatttgctgaaagaatgacagaaatcagtgtatgactataccaggagatatgagaaagaatgttgatagcagcaaaaatatagttttaaaatcttgcttctttttctgcactgttgccaactatctaaggagaatatgcaaagtgaaagattatcttgaaactaagatttatgagaatacaaaaaatagcatcaaatgttattcttaggtatcaaaatgtctaacaaatactacaaaagtcgatagtacaaggaattcttttaaaaccaccaggccaggcgcagtggctcatgcctgtaatcccagcacttttggaggccaaagcgggcg

SEQ ID NO: 235838 - DNA, 721 bp, Homo sapiens
ctagcatccgccacatctaccccagttctcatcagaacaacaccatggacagctgtttccatagcctccagtgtttgcacatcactcctcaccctgtgtgctgctggaatgttagtagagccatccctgtaaccaaggaatggcctgagcggaatgctattgttcaatgttgtttacagctcttaaaacacagtgaggaatgcctaagtcatagagaccaaatttgaccttgaaggcagacatgacacaccttgtccaagggggaccaaaagggtaggacattacaggctgaaaccctctgacccctcatgacaatgtaggacgtgacttttgtcttcttaagaaataggtcatggagccaagtgaagtgcactttgtcaaatgtaagggtccgcttgttactcattttctgtttgttaacctttttttccatcatttaacaaaaaccaatcttacatttcttgtcaaatgcagaaatgtttattctggcaatcagtgaagttttgcattgtgtgtcagatatatagccggacatgttctctgtccccatttttcagattctgttcagatgacatcaacccatttcattccccccaccacctcacccttacaccctttgggaaaagaaaatcaccttgtgtgctgtagctcatttgtttcaagacagaatcaacagatcatatttggcatcatgaataaattgctctattttgatactgaa

SEQ ID NO: 235839 - DNA, 478 bp, Homo sapiens
gcaacagcaagactccgtctcaaaaaaaaaaaaaaaaaatgcaagcagaaaggaagtaaaagaaaagagaagaaaagaagaaaggaaaagtaaatgagcttcttggaaagaaatacacagaaaaaaggccctggaatttaaataaggccttggaagatccatgtggcttcatttgtaaaactggtgagctactcaagaagtaatgaagaaagagcactttaaatcaccatcaggccaggcgtggtggctcatgcctgtaatcccagcactgtgggaggcagaggtgggcggatcacttgaggccagtagttcaagaccagactgcccaatacggtgaaaccccagctctactaaaaagaaaacacaaaaattagccgagtgcagtagtgcacgtctgtggcttgagcctgggaggcagaggctgcagtgagccaagactcactgcactccagcctgggcaacagagcaagactgtctg

SEQ ID NO: 235840 - DNA, 408 bp, Homo sapiens
aatacaaaaattagctgggcgcggtggtgcatgcctgtaatcccaactactcgggaggccgaggcaggaaaatttattgaacctgggaggcagaggttgtagtgagccaaggtcgcgccactgcgctccagcctggacaacacagtgagactctgtctcaaaaaaaaaaaaaagacattatgacagattttatcttttaataaaaatgtattatatccctaaagttatatctatatgtaattgagtcagaaacctagggggatgtcgattgaagtcgactgctggaaaaaaatagcagagcaacaagatccacacatttagaacctcatagaatttgacacattattcataatggtgcaattctttcttttttattccagtaagcaaatttactaaatcactaatttg

SEQ ID NO: 235841 - DNA, 417 bp, Homo sapiens
ctggggatttgtcctagaggtatgacaccacagcctggggccctgttatgggctgaattgtgtcaccccaaacccctatgttaaagccttaaaccccaatgtgactgtatttggagaaggggaccttatggaggtaattaaggttaagtaaggtcataggggtggggccctaatccagtaggactggtgtcactgtaagagaagagacacttcagaaccacctcccttgccctccacaacacacacacacacacacacacacacacacacacacgaaaggcagtgtgaggacatggtaaaaagtagctgtctgcaaaccccaagcagaggcctcatcagaaaccacccctgatggcaccttgatcttggacttccagccaccagaactataaggaaataaactcctgttgtttaagc

SEQ ID NO: 235842 - DNA, 394 bp, Homo sapiens
tggctagcacctgactgcagtggtccttgttcagctgctgagagtaggaggcccgcagggcctgcgcccggcctaagaggccttgtgcacgatggctgcccaggtctgggcaaaggaattgtttgggagatactctgtgttttgtccagacatgagaccaggagcagtggtgatcagaggctgccctctgactcctggtgctcaggagctggtgcctggagtatggagcgcacccaggagacgtttgccaaatgcatgagcttcatgtgacacctgctgtgcggaaatggacacacaggcggcagctgcgctgcggacacatattccttgtctccagcagctcagcagaagctcctgctcttcctgcttgtggccaccttcccatgagcaagca

SEQ ID NO: 235843 - DNA, 468 bp, Homo sapiens
cgaagagcatcagagaataaataagtgaaagtaaaataaaacatcactataccttgagtggtaattaggttctcaagtttttggttacatgaatccttcagtcaatgtctctgatgagaatcagcttttgccagctttagttagaacgtgaactaccttgatcaagtctcaggacttctttctttcatttaatgttagtagatagcactgagtgttttccatgtttataatgttaatatcaggctacagtattaccatgttggtatcagacggcaatcattgtaataaaaccacaggatcttgctctcttgtgggattctaggctcaggcgtttgactttagaaagttcatgaacaccctgaaattatatgtactatgtatttatgcatgtggtatgtatcacacgtttttctgagtcaaaagattattagttcatcagatttttgtaggtaactgagatcccctgta

SEQ ID NO: 235844 - DNA, 2132 bp, Homo sapiens
catgtctggagaccattttcaacctgaatttatctctgatgccagtccccaagatgagccattggttgcttattctttggggtcacccaagatggcagcactgaaggccacatggctggggttttctataccttgggattacatgttatacaaaacagctgactgacaatgcagaatgagggaagggacacctccaaattccttcagcctcccaaagtgctgggattacaggcatgacccaccgctcccggccttgttttccgtttaaagtcgtcttcttttaatgtaatcattttgaacatgtgtgaaagttgatcatacgaattggatcaatcttgaaatactcaaccaaaagacagtcgagaagccagggggagaaagaactcagggcacaaaatattggtccgagaatggaattctctgtaagcctagttgctgaaatttcctgctgtaaccagaagccagttttatctaacggctactgaaacacccactgtgttttgctcactccctcactcaccgatcaaaacctgctacctccccaagactttactagtgccgataaactttctcaaagagcaaccagtatcacttccctgtttataaaacctctaaccatctctttgttctttgaacatgctgaaaaccacctggtctgcatgtatgcccgaatttgtaattcttttctctcaaatgaaaatttaattttagggattcatttctatattttcacatatgtagtattattatttccttatatgtgtaaggtgaatttatggtatttgagtgtgcaagaaaatatatttttaaagctttcatttttcccccagtgaatgatttagaattttttatgtaaatatacagaatgttttttcttacttttataaggaagcagctgtctaaaatgcagtggggtttgttttgcaatgttttaaacagagttttagtattgctattaaaagaagttactttgcttttaaagaaacttggctgcttaaaataagcaaaaattggatgcgtaaagtaatatttacagatatggggagatgtaataaaacaatattaacttggtttcttgtttttgctgtatttagagattaaataattctaagatgatcactttgcaaaattatgcttatggctggcatggaaatagaaatactcaattatgtctttgttgtattaatggggaatattttggacaatgtttcattatcaaattgtcgacatcattaatatatattgtaatgttgggaagagatcactattttgaagcacagctttacagatgagtatctatgatacatatgtataataaattttgatcgggtattaaaagtattagaaggtggttataattgcagagtattccatgaatagtacactgacacaggggttttactttgaggaccagtgtagtcaagggaaaacatgagttaaaaagaaaagcaggcaatattgcagtcttgattctgccacttacaggatagataatgcctgaactttaatgacaagatgatccaaccataaaggtgctctgtgcttcacagtgaatcttttccccatgcaggagtgtgctcccctacaaacgttaagactgatcatttcaaaaatctattagctatatcaaaagccttacattttaatataggttgaaccaaaatttcaattccagtaacttctattgtaaccattatttttgtgtatgtcttcaagaatgttcattggatttttgtttgtaatagtaaaataccggatacatttcacgtgtccttcagtattgatttggttgaatattgggtcataatggttgagaagcatggacactagagccagaatgcttggatatgaatcctggatctgtcacttacttctgtgtgacctttgaaaggctacttatttcctctcttagctttctcattaaaatcaatgaacaatgccagcctcatggggttgttgaatgattaaattagttaatatacctaaagtacatagaacactgcctgcacatagtaaaagaattataagtgtgaggtagttggtaaaattatgtagttggatatactaccgaacaatatctaatctctttttagggaaataaagtttgtgcatatatataatcccgaaacatg

SEQ ID NO: 235845 - DNA, 406 bp, Homo sapiens
taaggactgtgaccctatctggaacttcggtgaatggaatgagtgcctaactttctggccagcccttttctgcagactgtacctacctgtcccctaggtatcccaccactggcctggctcttcctctgccttgtacatagttcagaaaaagcctgaggggccatttttaaaaaaataaataggcttgggtttgccattccctctggagactgtgctttgatgttttgatggtttgaagttcatgtttgcctctgggtcggttacgatgtcaccacagttctcaagttaggttgtggaatctggactttcgtactctgcttaatgttgctgtgtgatctatcagcattgcatccaaacacgctaagctatgactcacatgttgtatacttgtgaaattggattcttt

SEQ ID NO: 235846 - DNA, 416 bp, Homo sapiens
tctctgcttaagtggatggcctagtcaagctccaaggcctggctgaggctgaagaaaaactggccgccttctgaagctctttctaaaagcctgtcactgtcatctgcttgcatgtcaactcattggctgtgaggttgagctgagtggcctgtgtccatcttcttggggaagcatttgaagccatcaatcttgctctcccacccctaaaggttgatggtccccacctgggggtgtgctgagggtcagaaagaagccagcactcaccatctcatccttctcagccttcctcttgcactctctccaggctgtctcttcagtgctggtgggatacatcagaaagtgatggaagatgtggcactgtgcccacacccagaagctggccatgtggttggctcatccaccagaatggacgctct

SEQ ID NO: 235847 - DNA, 282 bp, Homo sapiens
agagagagactgtcgcaaaaaaaaaaaaaaaaaaaaaaaaagaagcccctgagatcaaagattcatttgcagcagcctagttgcttgttctgtggtgtttcacctgtcttgaggacagcattcttgttttcttgataataaaaacataaatacatgaaaatctgtctaagtcacccaatctcccacaaaacaatctgcctatacatcatttccaagcacgattagcatttgaggtgaagttctgttatacactcaggctgtggctctctgaaagtcagtgca

SEQ ID NO: 235848 - DNA, 512 bp, Homo sapiens
tctctacagcttctttccccatctcctaaaatccaacccttttgtgctccatgtgggcaaagttgagtgggactgtggttacaagttgagagtagttcaccagctattagcctctatcgtagagtctgcttttagtccaggacctcttttggatcgagcatctagtatattttgatgttttagcaaaacttccattttaacatcctgttgcaattatcaaatatttgcgtggggggtgtatattctttcttcttccctagagcaactgtgttgtgtcatactcagtaaaactgtattcatgccaagatgggcttgtacacagagcacatttcctgagatgccctgtggatgcttttttaaatgtcccttttaaaacagtgcctgaagttcgcagatggatttaatttttttcactggtttatagatgcacttcctttcataggcagtccctggcactttcttgccctaactcttgcataggttatatatccaaataaaaaatgcttcttaca

SEQ ID NO: 235849 - DNA, 288 bp, Homo sapiens
tattcaggaggtcaaaggcagaaggattgcttaagcccaagagttgggattcagcctgggcaacatagcaaaatcccacctctaaaattacaaaaaaaggaaaacaaagcaatcagttgtgtaaatacaacagcatctcagagcccctcaagtgtgatcctgacatagctgaagccattgtggatgctttcccaccaccatgtatagctgccttatgtagcacgcacagatgtgagcagctggttccaacaccagaaaaagaaatgaaacttctcttgaatacgagct

SEQ ID NO: 235850 - DNA, 419 bp, Homo sapiens
agcctcctctaacctccgcaggatggggcccggcctggcagctgcccccagtggccaacgtgggcctctgtggacaagacaggtgcagctaaggctgcaggtgcaaagcaatcccagggtgggcgggcagggggccacctgaacctctgtacagcaaaacagtgttttcctgggatctccctcttcctgttgttctgtgaaagcacctaccagccatgtgaaaagccacccggctaaccacccacatgcaggcgtctggcacagggtggctcactggccgttcaggggtcggcccctcctgatgtttgcatgtcccccttgtgtgaaactcagatttaatttggtgattattaaagtgcaggaacctggggctggtagaggttttttgtccacagattttgcaaagtgccgttaaaaaa

SEQ ID NO: 235851 - DNA, 275 bp, Homo sapiens
gttattctcattatccccattttacagctgagagagcaaagcttcagagaagttgagtaacttgtgtcactggttgcaaactggtatagccaggtttcaaacgtggtgagtgtgactccacagtccacaccattaaccattaggcacatgagcgtgcatgtgcattcacacacacacacatgcacaattgtgtagtcaatttcaagggatttgtggctctgaaagtcctcttttggggaccagttccaggtgagcaacacttcagaattaattaa

SEQ ID NO: 235852 - DNA, 626 bp, Homo sapiens
gggcaaggttttggcatctgcttctttgtaaaggtagatctgccgggagcacttggtgccggcctacaggaagtaagaactctgcaccaccaaccccaggcacacctctgagtcataagtcttggaagacttctgaaagtcataagtcattagaattatgcaacaggctttgggacaaatgagacgttggagagagctattctaaaatctgaaagaaaaaagctagttttaagaaaaaaatcacaaatgatagttacatctttgaatattgtatttttaggaaaatgcataccccatttgagaaggttagcgaccttggcctaaagcgttgtttatgttagacatgaggagttgactgaaatgtgctctcataagcatttctagcaccatatttacaacgttggcccacagccagaataagacgtgatcttcctattggactgggttcataggagcgtttgttccttaaataactctagtctaggctgggtgtggtagctcacgcctgtaatctcagcactttgggaggcccaggcagacagatcacctgaggccaggagttcgagaccagccgggccaacatggctaaaccccatctctactgctgtaatctcaggaggctgagg

SEQ ID NO: 235853 - DNA, 1989 bp, Homo sapiens
  misc_feature (842)..(842): n is a, c, g, or t
  misc_feature (981)..(981): n is a, c, g, or t
  misc_feature (1920)..(1920): n is a, c, g, or t
aaaaaccacataggtggtgtgccagtggctaaagtttgagaaacactgatgtaaaagctaaaagtttgaaatcagacagctctgactttgagtctcagtttgtctctatgagctttcgtttcctcacttgtaagatgcaaatgataatagtacctatgtcatacaaatgaatacaaatgaagtaaggattaagtgaaataatgatggtaaaacctccaacactggacctagtacaaaagtgcccactgaacagtgttacctctcatctatttcctccgtgctcaggagggctgaagaactaaccaggccgacgtctttatctttctatactgtccagtttgagaaagctgctaaactattgcctcaagtgcttatttaatgtttggaatctacaagagatacagtggttcttctttgaagttcaagctattcctttgaaaaacaatgtcaggacaacttgacattcatctccctaatgatagaatttcatttatttcagtctcactgtcttttgagccactatttagctttatttagtatatcattaaaaatatgaagttaaaagaaatcaaaaaccaaatcccctgtgtctctccttcttgcacccaatcagaagaaaaggctcttcgtcaaagttttacttattcaacaatattgtaattactttatttgtgctaagtactttatttgtgctaagttgttttgtgctatatagtttgtgctaaatactaggcattgaaaaagtagcagtaaacaaatgtctgccctttcctagcttatattcttgtaagaaagcttatattctagcagaaagcaaaatgaggacctttgttttcttttcnttaaattacaaagactatgattataaaatcacccttgtaaatttttgaagagttttgaaaaatgcaaagggaaattctaggaaattcttacattttcttatattttcactgataactaacctaacctctctttcttctntcatttttagttgaaaagctttcaaacatattgattttaaagtttataagcctgtagttacagacagcagaaatgaatttttcccagaacaggctatggatatgaaagtataagttgttttgatttatagtctttattgctagagtagttattattataaaataaaaaaatacctttaaggaaaccaatttcaaattatgttgtactttccaaaaacgtgtttaaaatgcagttaactggagtaaatatgccatttattgttctgagtaaattggattctcacttgctctgtgaccttacataagttatttacactatttgagtttcttttcctcatttgttgaataagaggattgggatacacagtcttgataattcttgtgtatggcaaggcttacacaacagaatcagaaaggttgagctgtgtatccctggacaaattggttgaccactcaaagaccctcctttctaatctgtaaaataaggactgtgtttttctcacagtgttgttataagaaaccaataattgtacatataaagcacctaatatatagtatgtgctcagtgaatgatgtcatcatttcttcaagtatgaacaatcagtggtcatgactaaacacccacgtgtggcttctggtgttaacaccacctaagtacaaaacaagtataaaattcatttgctagcatcaaaagatttgaaatccatttggaggaacatgatacacacacacacacacacacacgcacgcacatgtatttgtaattaataattgatatatttggaatatcttcaaaatatcccttttctgctttcctttgggggagacaaagagtggagtgggaaaataatgtgcactctgaagccacagagacattatcaaatctcagttctgacagttactgactgtttaaattttagtggagcacttaaactcttgngcctcagtttcttcagttataaaattggccaatgacatctatctttcgtgtttattgggaggatcgagt

SEQ ID NO: 235854 - DNA, 212 bp, Homo sapiens
ggcagcagggacacttccgagacactgtggagctttcagacccgaaagtaaaatgtgtgtccaagcccaagggtcacggctgcacgaggaagctgagttgccctgcgttccactgtctggacgttcaaatggtggtaaagcagcggtgttcactcgcatttgtctcacagaagcttctggggcagggggtggggggacctcagtgctacact

SEQ ID NO: 235855 - DNA, 473 bp, Homo sapiens
ttttacagaacatttccatcaccccccacaaagatctcttcatgctcatttgtagtcaatacaaatcccagcccccagtgcccactgatctgttttccattccttattgttttgcctttcccagaatctcatctagactgaatcatgtagaatgtagtcttttgagtccagtctttctcacttagcctaatgcatttgcgattcatcaatttagttgcatgaatcaatagcttgttcctttttatgggtgagtaatattccttggcatagatataccacaatttgttgatcctttcaccagtggatagatatctgggttgtttcaaatttggggcaattatgaagaatacatgcatacaagtttttaggtagacatatattttcatcgttcataggtaaatatctaaaaatgggattgctgggtcatattgtggatttatgtttacctttataagaaactgaagggcagaata

SEQ ID NO: 235856 - DNA, 628 bp, Homo sapiens
gtaaaaatgcctcatttcatcaaatcaacttttccagtaaaggccagagttcaaatactgtaagcatgagaatagaatggagctgtcactaaagagagtacaaggtcaagaaccagaaatgtctccaagctttctgcagtgtgagcaaagatagcctcgactggacaaataacacttctgaccccgtggtacccccacatgactggtatgctgcccctggactttgtgtctctctaaaatcactaccattcactgagatctgaccaggtgaggcactcaccaacgctacagaagcaacacacaggtttccaatcctctcaaacacagatacaacccccatcctccaatgtgcatggaagaactttaaatctcagagagagtaagcaaaatcacacaatttagtggtttagacctattccaaagtcttcttttcactgtaacacaaaacccaacagtatcccacccaatttatgaagtcaaatttgtttgcttaaaaaaaaaatcagctgggcatgggctcacacctgtaatcccagcactttgggcctaaacaggcagatcgcttggtctcaggagctcgagaccagcctgggtaacatgacaaaaccctgtctctacaaaaaaatac

SEQ ID NO: 235857 - DNA, 511 bp, Homo sapiens
ctagaaagtcatgctggcccttttgggtccatgggccaaaggttcatgaaggtggctctgcctgtgagacatcaagctcctgggttgaaggacttggattaagaagagtgacatcagtgcacagtttatgccaagggcttggggcctcagtccagcttcttcctggaccaccaccaacaacaaccagtgataaaaataattatactagtggctgacatttatggattcttcctacacactaggctataccacagcgagtgcctcgaaaggaaatatagtatagcactgtgccgtccaacatggcggccactagccacatgcactactgagcacttgaaatgtggctagcccacattgagatgtgctgtaaataaagaatagacaccagatttccaagacttagtaccaaaaaaagaatgtaaaatttctcattaacaagtttttttcttacatttattacatgttaacatgacgctatttggagtttaaataaatgcattattaaaattga

SEQ ID NO: 235858 - DNA, 306 bp, Homo sapiens
ggacagggccttgctgtgtcacccaggctggagtgcagtggtgtgatcatagctcactgtgaggcaggaaattaaggaaagaaagaagaataaaattttaaaaagagaaaaataagctttctatattaggctgactcatcccaaaggcagtaacagacaaagcccagacccagacgaagtcttgataacatcatcaaagaagcagaggctcaaaggagtgtgctctggagactctcccagcactccctcaacataaggataagaaaaagttccccctcgaaccccaaccccctccatgtgattgta

SEQ ID NO: 235859 - DNA, 818 bp, Homo sapiens
gtccgaatggtagcgacacgggcctaagggagggggaaagcgagggggtggggggtggggggtatgcactcttttcctcgcaacatcgctggcggagcgagggagctcacacgacacagattttggggcaaagcctttccaactggacagcaccatgtccaccaaagcggagcagtttgcttccaagatccggtacttgcaggaatatcataaccgggttctccacaacatttatcctgtaccatcaggaacagatattgcaaacaccttgaaatacttttctcagaccttgttaagcattttgtcccgcacagggaagaaggaaaaccaagatgcctccaatttgacagtgcccatgaccatgtgtctttttcctgtgccattcccactcaccccatctctaagaccgcaggtcagttccatcaaccctactgttactcgctccctcctttacagcgtcctgcgagatgctccctcagaacgcggcccgcaaagtcgtgatgctcagttgtcagactacccttctttggactaccaaggcctctacgtgactttggtgaccctcctggatctagttcctttactacagcacggccaacacgatcttggacagtcgatattttatacaactacatgtttgctaccttttctcaatgatgatattctgagtactttgccctacacgatgatatcaacgttggctacctttcctccatttctgcacaaggatatcattgaatatcttagcacatcttttctaccaatggctatattgggctcctcaaggagagaaggtgtacctgcccatgttaacctct

SEQ ID NO: 235860 - DNA, 942 bp, Homo sapiens
attccaagaaataaagacaaaaatgtctgggaaaaatcttccttgtggcagctaggatttgttttttgctttgttttgttttaactcttcctcccttttagttcttggtaacacactatttctggagagataagggagggagggtccagtgcctagtggcagggactggtgcagcttctgtggggtggagacggagatggggatggagagcgccattgcagagtgcttgtgaagagcctcccaggaactgggagctaggagcctcagctagggccagtaaggtgggctcacaccagggaccagctcatgggtcacataagccctcagggcctttgctcatcccacgtgggacatgccaggtatggaaccagcaggtggtcatatacttccaggctacgatctcattcattctttcattcaacaaatatttcttgagattctactatgtgccaggcattgtgcttagtgctagttaaacaaaggtgaggaaaatcaagacatggtgtctcccttcatgaagcctgcagtcttgtggggaagacagatgttaacaaaacatgtcttgttacaagttgtgatacatattctagagaagaatgctgagaaggaatggtgggagagggtcagaattgagaccaggggtcagaggagatctctggagaagtgacatttaaactgagacctgaaaaatgagtaggaacttggcaagggagtgtgtggtggtcaaagtgtgtgtgtgtgtgtgtgtgttgcatgtgtatgcatgtatgttgtatgtattatatgtattgtgtgtttcctgttgtgtgtgtgctgtgtgtgtagtatgtatggtgtatgtgttgtatgtgtgtatggggtatgtgttcatgctacatgtgtgttgtgtgtggatgtgtgttctgtgtgtgtgtgtggggtaggtatattgtgtgttgtgta

SEQ ID NO: 235861 - DNA, 1321 bp, Homo sapiens
  misc_feature (850)..(850): n is a, c, g, or t
ctggctggtcggaatggcatacttggctgaatgcacagccaggtggcttgggcatattggcaaacaactggcaacctgcccaatacatatggcttagattgctttgctcttcccatgaagccttcttagactcttgagcaagcattcgttttagaataaaatgtgtctgagtgttaaataaaattttttaataatatctgtctgatgtaaaatccctttaccaaaaataaaaataaaaataaaaagatgggaggggttggttgccaaatgcatgaaataaagcatttctttgtgggaggagactttgcagatcccttttcaaccatctttggactgaattatttggacctttcaggttcatgggggttaaaatgacccctgcaatccctgagaagcagggttaatgtgaagtttagggatggctgccaagaggtcaggtgactatgaattcctaataaatacataaaaatacaaagtaagtagagtaggataatggatgtggacagcagatacattttgtaaaggaatattatgaaatcttgattgacagataacactaaaaggtgttagtatggtctatcatgtaaatacatatctggagactcgttaaaacacagtctttaagtgctaactgttgaggcacatgttacttcccaggctttaccaagtggctgcttaacgtcgacagcatgaggcaaactttggtttaataaccccagctgatcactaatcttgtaatgctactactatcgtaccacattaaatattacacaaatactactttcttctaaagttgggttttcttctgttacacatgtttgttgtatgtccactgtttcattttagtttnctggatatctaaaaagtattcacaactgatacattagtgaattagattacatgcattactgtcagaatcctgttttacttatgataatttttaaatataagtttatggtcccttaaagttgcaagccattcatctaataaactatgttaaatcttctggaattattatagtctactcggtaaaaagattacagagctggtgttgtattgtgtgtgttttttaagattttaagctcagtaacagctcaaacactgaaataaattaatctctcatactaatgagggctccatacactcacaaatctaaaatctcttaggtagatgcaaacatatatattgcgatagaaaaggaatcatttgtgcttattcagcaagtactgaagatgtcaatcgtagatacgaacaagcaaacttccttttggtgatacaaaataaaatttcctgctatagttgctccatctctttcacatgc

SEQ ID NO: 235862 - DNA, 385 bp, Homo sapiens
aggtttcccggttttattcccattggcgtattcaggggtatttatgtcctcattcctttggtgacagtcttttaaaatctttgccaatctgataaaaccatgtgttaacgcttttaaatttatatttctttaatgattacgtggggttaaacacattgctatttatgaattccacaaattttgattgagcgtctgttaggtgagataccattcttactgttggtgataaaatcgttggcggacgggtgacagaacaggtggtggagagcccagctccaggcgcgtgtccctgggccttctcctctgtgtggctctgtgtgctgtccgcccggttgctggctgccctcctctgcactctccctgaaataaagaacagcttggcaga

SEQ ID NO: 235863 - DNA, 556 bp, Homo sapiens
aggtttcccggttttattcccattggcgtattcaggggtatttatgtcctcattcctttggtgacagtcttttaaaatctttgccaatctgataaaaccatgtgttaacgcttttaaatttatatttctttaatgattacgtggggttaaacacattgctatttatgaattccacaaattttgattgagcgtctgttaggtgagataccattcttactgttggtgataaaatcgttggcggacgggtgacagaacaggtggtggagagcccagctccaggcgcgtgtccctgggccttctcctctgtgtggctctgtgtgctgtccgcccggttgctggctgccctcctctgctgtgtgcaaggcctgtgtgtgtcagggaagcctttcttgtcacacatgtcatactttttccaatttgttttttgcatttgtatttttttattcagctcctatacatttaaaaaaacacctcagatttaatggttgtttttgttttatggcttctgggatgtgagctttatttatttcctaaagatcgtctcaaggaaaacaca

SEQ ID NO: 235864 - DNA, 168 bp, Homo sapiens
gacgggcagctagatttctcagaatttcttaatctgattggcggcctagctatggcttgccatgactccttcctcaaggctgtcccttcccagaagcggacctgaggaccccttgggcctagccttcaaacccacccccttttcttccaacctttctgtcatcatctc

SEQ ID NO: 235865 - DNA, 849 bp, Homo sapiens
ctttgaagaattagcctttcaagttcaaatctatttaataatgagaagtctcacaagtgaatttttaagtacaggcatacctcagacgtactttaggttccagaccatctcagtaaagcaaataccacaacaaagcgagtcaggaggaattttttggtttcccagtgcatataaaagttttgtttatactatattaagtgtgcaatagcattatgtctaaaaatatgtacataagtttaaaaatattttattgctaaaaatggtaacaaagtgagcacatgctgttggaaaaagagcaccaatagacttgcttgaagcagggttgccacaaaccttcaatttgtaaaaaacgccaatatgtacaaagcacaataaagcaaagcacaatagaacaggattgcctgtattagacatgctacaaacttcataactggaaacatctcaaagaccccatgaagctcatttgaatgggacttaacaattagacagttattttagaaattgagtgcagacctaaatacatagttttccaaaaagaaaattattgtctctgatatcttaaaacataaaaacccaaaattttatatagaagaaattgactctgtaaaacgcaatgaaatagtcctctttttaaacagtttaaaggaagcattttcaccgtttgtaaaaattatttttaaatatttagggcaaaatttttgttagataataatggaaaagcttgtgtgagtttagtggttaaaatatcttgtaattcatcattatttaagtgacttcttgggagccgtctttgtacctaaaatggagtttttttttaagcctccacagagatagtcacccaaagtattt

SEQ ID NO: 235866 - DNA, 308 bp, Homo sapiens
ccatttgctcacctcccgcagcggaggagactgggcccgaggcgcagcccctcgagttgcaggagagccgggacccaaaaggcttcccaccgtgtccggacgtcgcagggccgaggtctccctaatccggccttctccgcggcgcagtttggccagtgtctccacgtccgtccacccacccctccatccgcccttccatttgtccatccacccgaccctcggtggtcggtgcccagacgcacgggtcagacgcgggcgctgcctcgagggctcccgggccgggccctcgttcgcggcaggagcggccg

SEQ ID NO: 235867 - DNA, 491 bp, Homo sapiens
agtgggacaggtgtgtccataaatatgaagatcattctctccctataccagtcagtaaagacaggaggaggagactgcttcttcaaatgtgaaaacagcaacacaagccttcaaggaaaatgaagaatcaaggaaacttaacactactaaaagaaaaaaataaagtcccagtagctggccccaaagaggtgaatatctatgaactgcctgatagagaattcaaaatagttgtcttaaagaagctctgtaaactacaagagaacggagacaactaaatgaaatcaggaatacgatactgaacaaaatgataagttcagtagagataaaaatcatacaaagaaccaaacaaattctgaagcagaagatactgtgctaaagtgaaaattctacagagagcctcaataacagactcaatcaaacagaagaaagaatcagtgaacttgaaaacaggtcaattgaagtgattcagtaagagggagaaacaaacaaac

SEQ ID NO: 235868 - DNA, 98 bp, Homo sapiens
ctgtaaagaaattgtaaggttcaaggactttttcaagctcctcactttcaatttcttggttttattaaacagtgcccaaaagttgcagttacttaaaa

SEQ ID NO: 235869 - DNA, 458 bp, Homo sapiens
atccccacctcgccccaccgccccagtttacagatgggtagaccgaggccgggagcacctcgtaactccgcaaggccacgggctagacagtggcagagccgacgtctcctgtacgctctccacccccacccctctagagggagtttattttattccaatctaaaagttcccccctccgcccccaacctaccacccacccccagatccgccggaaaagtaaactgtggctggagaggaatctggggtgtgtggggagcggggaggcagggagcgggaaggatggatgtaatcagtgggcctgaacttcattcctgcccacgggccaagagacccttccctgcagaagttccaaactaggggttcttagaactagcttccccactcccacctcaaccttcccttaaaaaaataaaaaggctggtttcttccgggccagatcttggccacttaaaatggtc

SEQ ID NO: 235870 - DNA, 328 bp, Homo sapiens
cagtatataacattaagcaagaggctttataaagtgctgtatgcattatttattcttggtttttgttgttgctgggtgttttttttgtttgttttttgtgacagagtcttaccctgtcacccagactagggtgcagtggcatgatctcagctcactgcaacctctacctcccaggttcaagtgattctaccacctcagcctccctgtagtctcagctactcaggaggctgagacaggagaatcacttgaaccctggaggtagaagttgcagtgagccaagatcatactactgcactccagcctgggcgacaagagtgaaactccacct

SEQ ID NO: 235871 - DNA, 436 bp, Homo sapiens
tctcaggccaggaaggcagaagagaagccctggtgggacactgcaggagaccctgggctggctgggttacagcagcagggaggcccagcagcccactggcagaggcgagagctctgggatggcaaggcggctgtgaatggacagatgcagtccctcgggcaggtgttcatcgccctcatcctaggtactagccctggatgtccccatggcttcacacacagaagagcccttggttaccctaagtgggcatatcccccatgccactcagccctgccctatcccctcacccccatcccggctccatctgtagccgtccacaccctacacagacttggggcactatgctctcaaccagtttgtcagcccactcctcaggacacttcctcaggtgcagacccttggacttgtaataataataagtattttcataatcact

SEQ ID NO: 235872 - DNA, 1588 bp, Homo sapiens
  misc_feature (1177)..(1177): n is a, c, g, or t
  misc_feature (1271)..(1271): n is a, c, g, or t
agtgcggggcgggtctagaactcacctgcggactatggaggccgtgcgtgtgggctggggcagggctgtgagcacaagtcaggggtgaggccaggacggccacagagggtgtggtgtggcaagtcaagtagctccttgaggaatatcgcagggttcttctgaagactggggcctggggcctggggatgggaacttgcgtatccctcccaaaaccctacctatggggggagaatgtggtggcccatgcctgtaatcccagcactttgggagggcaaggcgggcggatcacctgacgtcagaagttcgagaccagcctggccaacatggtgaaaccccgtctgtactaaaaatacaaaaattagccggtcgtggtggcacgcgcttgtagtcctagctaccctgggaggctgaggcaggacccaggaggcggaggttgcgacctactcaggcctcttctgtgtcaccatcaacccctacaaatggctcccagtctatacggcctccgtagtggctgcttacaagggaaagcgccgctcagattccccgccccatatatatgcggtggcggacaacgcctacaacgacatgctgcgcaaccgagacaaccagtccatgctgatcacgtgagtgtggggctctgggggtggggtggaaaatgctggccatctggcagaaagagggcggtaccacagtcatttcccaggattgaatccaaagtgcttaggccaggacttttaccacctggagctagtgtcccagctgaagctaaaattggcctgagcactttccctgcccccattctgaacagatgtgttcttgatgggggatagggaggggacacccacaaacggagtgaccaccagccccacacctcctctccccggggcctggaatctcccaccttgatcctctggggttctaattctggctcaggggcagcggaaagattcctctgcttttcctcctttttaccatctacttatgtctgaatcttacctctgatctttccattgcctctgtgggaaaatggtagaataattcttacatgccaggctcatgtccagtcaggccaatatggacaatgtttagtgtgagtgtgcatgcgcgtatgcagttaagagcaagtgccttggccgggcacagtggctcatgcccgtaatttctgcactttgggagnctgaggtgggtggatcacttgacgtcaggagttcgagaccagcctggccaacatggtgaaaccccatctctactaaaaatacaaaaaattagcngggcgtggtggcaggtgcctgtaatcccagctactcaggaggctgaggcaggagaattgcttgaacccaggaggcggaggttgccgtgagccaagatcacgccactgcactccagcctgggccacagaatgagactccatctcacgaaaaaaaaaaaaaaaaaaaaaaaagcaagtacctttaacccagacgggcccggctgagtgtggtggctcacacctgtaatcccagcacttggggaggctgaggcaggaggattgcctgaggccaggggtttgagaccagcctgagcaacatagcgagaccccatctttacc

SEQ ID NO: 235873 - DNA, 1578 bp, Homo sapiens
  misc_feature (1167)..(1167): n is a, c, g, or t
  misc_feature (1261)..(1261): n is a, c, g, or t
accgtggtgccgagtgcctgctgccttgggccgccttgaacctccagggtttccagctcctcctccttcaccccagtgccactgccatgatggatgtgagtgaacttggggagtctgcccgctacctccgccagggctaccaggagatgacgaaggtgcacactatcccatgggacgggaagaagcgagtctgggtgcctgatgaacaggacgcctacgtggaggccgaggtcaagtcggaggctaccgggggcagagtcaccgtggagaccaaagaccagaaggtgctgatggtgcgtgaagccgagctgcagcccatgaacccgcctcgcttcgacttactggaggacatggccatgatgacgcacctgaacgaggcctctgtgctgcacaacctgcgccagcgctatgcccgctggatgatctatacctactcaggcctcttctgtgtcaccatcaacccctacaaatggctcccagtctatacggcctccgtagtggctgcttacaagggaaagcgccgctcagattccccgccccatatatatgcggtggcggacaacgcctacaacgacatgctgcgcaaccgagacaaccagtccatgctgatcacgtgagtgtggggctctgggggtggggtggaaaatgctggccatctggcagaaagagggcggtaccacagtcatttcccaggattgaatccaaagtgcttaggccaggacttttaccacctggagctagtgtcccagctgaagctaaaattggcctgagcactttccctgcccccattctgaacagatgtgttcttgatgggggatagggaggggacacccacaaacggagtgaccaccagccccacacctcctctccccggggcctggaatctcccaccttgatcctctggggttctaattctggctcaggggcagcggaaagattcctctgcttttcctcctttttaccatctacttatgtctgaatcttacctctgatctttccattgcctctgtgggaaaatggtagaataattcttacatgccaggctcatgtccagtcaggccaatatggacaatgtttagtgtgagtgtgcatgcgcgtatgcagttaagagcaagtgccttggccgggcacagtggctcatgcccgtaatttctgcactttgggagnctgaggtgggtggatcacttgacgtcaggagttcgagaccagcctggccaacatggtgaaaccccatctctactaaaaatacaaaaaattagcngggcgtggtggcaggtgcctgtaatcccagctactcaggaggctgaggcaggagaattgcttgaacccaggaggcggaggttgccgtgagccaagatcacgccactgcactccagcctgggccacagaatgagactccatctcacgaaaaaaaaaaaaaaaaaaaaaaaagcaagtacctttaacccagacgggcccggctgagtgtggtggctcacacctgtaatcccagcacttggggaggctgaggcaggaggattgcctgaggccaggggtttgagaccagcctgagcaacatagcgagaccccatctttacc

SEQ ID NO: 235874 - DNA, 234 bp, Homo sapiens
ccacacagtatgtaaatgaaagtagggtttaccatccagggcattaacttcattttccttgtcttcgagatccattaaatgctagtactgtatgagaagcgtggaccttaagtattaaagatggctttttcttcttcttcttcttatttagcgtagaaactagcaacagggaacaaggtaactgaattcacggtccactcgcaggcgcgcacgtccccagggctccgggacggc

SEQ ID NO: 235875 - DNA, 387 bp, Homo sapiens
ctcactaaatccctttcttcttccctatgctgtcttattccctttcatcccttactttcattcacaactttgtacaaaaagaaagctggatgactttcaaacatatgcacataagttgagaggtgctaacaatatagttggaatcattaaatactagagtatctcatggtgtttacattaagtgttataacacttggaatctgattctcctatataaatcactcttgcttagttattgttttatttgcttaacagggaaacaattacattttactttgatagtctgtgtattctgtaactatttaattgattctattagttttgtgactctgtatgtctttctgttattattttaattgtagcctttctggattaatatccaaaaaa

SEQ ID NO: 235876 - DNA, 523 bp, Homo sapiens
atcaaaatttattgagtagcttctaggtcatattcattcagctaggcacttggcagatacattactttgttaaaatagatggtctcatcaagattttacatatagtttctaagaagttgaaaaattcacatgcaactcatcaaagaaacaatttaaagataaaataccaagaaactccagctaaagataaaataccaagaaactccagctagtattaacaatggactacaataatcacttctttggaccctactgaggtgtgtgtatttgcccatctggatatacttagatgtgcttggatcctgggtgggaggcttggttagaagtcacgtggattcttctagggaatttatcaccatttttcttgtgatcttatgaccttgctgaaacttttaaaacaataataaagtcattttttttctctttgagatggaatctcactctgtcgcccgtgtcagagtgtggtgagctgagatcacaccactgaactccaatgtgggtgacagagtgagaccatgtctca

SEQ ID NO: 235877 - DNA, 513 bp, Homo sapiens
cagcccctggcaaccacccgtctgctttcagtctctatggatttatctattctggatattttatataaacgggatcctacaatatgtggtctttgtgcctggctcctttcacttagcgtaatgtttataaggcccatccacatcgtagcatgtactagtacttcattcctgttcatgaccaagtaacattctgttatctgtaaaccacaatttatttatgcattgaagtgtctaatttttcctcaggatatgtttgtgtatactagaaataccatgtgaaaggaatgtagctcattttctagcccagtgtattcccttttcgagggttgggacccttctgttttagcctttgttggggttgtttttccagtggaaatcataaactggcagaagaaatatattttttttgtttactagaaatgttatagccctcaggaccagtaaagttaagtataggtattgacaacaaaatatagaatatagtaaatacagaatttacttttcctttgcaca

SEQ ID NO: 235878 - DNA, 1465 bp, Homo sapiens
agccggccgcgcccgggtcgcgcacgcgccctgacggagtcccagcaagcgcgggcccgtcttcctcgcgtctcctcggggagcgtcgtcgccgctaccctgggcgctgagagcttgcggagccgagccgctgtcgagtcccagcggaaagaagcccaaggtgccggagaagcccggtcgtggacgttgttgctccctcatcttcgagacccgcacgccctgcggagaggaaatgacaggcacgccgcgaccgtggggcggggctcgcacgagctccgggtttccagaggcaggggccggggccgtagaaggcagagtcgcgcggggaaggcccggtaccccgccccttccgcaccgacccctcccccgcggagctggccccggccccgggcctgtggagtggacgccgagggcggcgggcggcttccgagttggacagaacgggagctgccggcgggagcagagctgcagaggaggtggcctttgacgggcagcgcggggtcgaaatcccatcccagcgctgtgacctcttggagcccacattgcctctttggtggaggggagggagtggtccagctccgagccgagcctgggagctgaatgacccagtgtgcaaggcgcacctcggagaccgaaagcaaccgctcccccggcttcaatttcacaccacctgcagatacacgtctcagaatctgcggctaggaagacctgggccgccagaagctaaacgtgtgcattttgtcatcagccccggtttctcgttttagagtgagttcccacctgccctacctaaactgacctgaaacggaaagttgtatgcccccacgaccatcctcactgcagaactgcagagggttttaagctccttattacctgtttcttataatcctgtccctttccaggcgagtatttatcggatagttctacttgttttatcaaacttccttttcttttgactttataaaaagcaatgccgggaggctgaggcgggagaatcgcttgaacccgggaggcggaggttgcagtgagctgagatctcgccattgcactccattctgggcaacaagagcgaaactccgtctcaaaaaaaaaaaacaatgttcgtccttaaaattatgtgcagaagtttactgaaaagtacaagttactatttttccttctgaagcactcctcacaggtaacccctgttagtttcacaggtaaccttaaaatgcttaacacatatttgttgaatgaataagtgccccccagtgaatttcctttgcctgtacaaacatatatgtacataccttgctttttctatttaacagtacacttttatcatttaacatctgcgtggtatggtactccatccgataaccatcggatgtactattatttaaccactccgctattaatagacattcatgctgtttatattttttggttataataaacattgttgcaggcgggatcattgaacaac

SEQ ID NO: 235879 - DNA, 491 bp, Homo sapiens
cattcaaaccatagcagtaccatctgaacactgggaatagcaatatcattaattgacatcctatgtgatattggccattcaggggtgttgtgagggttaaatttgatcatgatgcacccgtcttgggatgtacaggaactcaacagaagataatgtctttactctctaaggagtggcctgacaatgatgccactgaatggacagcctgatgggtgttctctgggacaacttaaaggaaataagatgtagttatatctggcactagtcataattctttcctctcttacaactatgtcatatgaccttttttcttgcaagagtccatattaaccattattatactagtacttatcaacaggggaagggatatgttatgaattggagaaggccatttagtcgtagcttcctcaaatgcatttgatttattcctatatgcattttctttggagataatgaatccaagataatgtctccttctaaaacaaaagaaa

SEQ ID NO: 235880 - DNA, 381 bp, Homo sapiens
gaaacagggtcttgctctgttgcccaggctagagtgcagtggcatgatcatagctcacggcagccttgacctccggccagtgatcctcccacctcagcttcctgagtagctgggactataggcatgtgccatcaagcctggctaattgaaaaaaaatttttttttatagagacggggtctcgccatgttgctcaggctggtcttgaactcataggctcaagcaatccacctgcctcagcctcccaaagtgttggaattacagacatgagccactgcacctggcctgtttcatccttaatagcctatagaaacagcctagtataatgggactcaggagtcctggattccccgcttccagcttcccccttcactaatttgctg

SEQ ID NO: 235881 - DNA, 680 bp, Homo sapiens
cactgtaaaagttttagaaaaatgtaataaaagaaagggaaaaaagcattcactatctgagtatctacagataatcatcactatcattttgatgcatttctttctaatctttattcaaaattattagaagtatatataaaaatatataaaatacatatacttatatagaattagtatttattgaataagttatgtataggatatatttctctgcatataaagtgaaatcctttaaaagcagaattttaacaactgcataatattcatgtcatgtacgtagcattattcatttcatcatttccttaccggtggccatttctttgccccatattttaagttgttcattcttttttctgtattttgtttatttacatatgtaccctaaaacttaaagtataataataacaaaataaaatatatatatatatatataatgcccacaaaataaaggaactaagtcataaatatgcatatgatttacataaaggagctaaaataagaaaaaaaaaaagaatgataaaagtcagcagggaaaagaactaccaaatcacctagtcaagtaaatgatttacaataacaaaaacaaacttaaaaactctacttgtaacaattttactggtgactaatacttctttaattaataaaacctattggctgcatatggcaatcagtggtaaaaa

SEQ ID NO: 235882 - DNA, 369 bp, Homo sapiens
aaaacctgtggcctaagaaattaaatgacccacttacctgttgtcttagtttgtgtgtccccagaccttgaaacaagcaatcaaatacaagtagtgtatttaagacaggcaagaaaaactgtcagaggagtggaaaagtgaaccaaggaagagaaggtagccagtaaaatgatttatcagtcttgctgccttggggacaactgaaagttaattccctgaggaaattctggaaatggagtacaatgcaggccttgaagttatcctgcccatggaataagggagcttgggtgtttgcatgccagtcttgcagagtccttggttgaggctgctggggcaggatgtgagcagagtggacttcatggcccttta

SEQ ID NO: 235883 - DNA, 513 bp, Homo sapiens
atctcaaaccactgcactccagtttaggctccagagtgagaccatgtctcaaaaaataaaaatctagggagaatcaataatatttttgcttgaatttccactaaatgagattgagggtagcccagcatctaatttagttttatttaaaatagtaattttaatatcaatagattgataggcaggggattattattattatagacataatgatctaagtagagaaatacacagatagaattatggttgattaacccacttgtattacttgcaattgtacagttagtatgttttagtatcttagttactaatctcactttttacatttagctctataatcaattaaatatgagttattttttgtgtatggtgtgaaataagaatagaaatttatctttatgcatgtggatattcaatgttctcagtatcatttgttgaaaaaatgattaattcctattgaactgcagtggtaccatttttgaaatcaattaccatcaatgtcagtgttaatttctg

SEQ ID NO: 235884 - DNA, 538 bp, Homo sapiens
ttttcccgggccccgctgcaagggccgggaacgtttccgccacctggccgggctcgaccgcgcggcgctctgcggggcgctgtccccgctccccgagtgcgcagcggagcgtcctggaagacaatgaccatgggaacaatttgcacaggaggctaggagcccaggaaaagccgcctgggcgccaggcagaggttttttgaaaacacaaacggcgcgttagatgcttggggactcccagcatctgtccttcctattgtttagctcggctccggagttcacgggagcctcgtgaaatgtggagacgtcctgcaaagtttcttgaacacttcatgtgcgtggtaggaagtcgaggaaaaaggtttacggttcccccgctggttgcattgtttgtcctgcacatgttcgagcgaacatggcagccgcaaccctggatgtgttcgaattgacatcgaggggggagcttcacgtcgtgaaataacttttttctgggctttcgagattctaaagcattgctgatgaaaataaagcaaatactttc

SEQ ID NO: 235885 - DNA, 375 bp, Homo sapiens
agtcaggaaactgtaggaaagtaatagcatctttattatcaaaggacgtcatgtgatcaggtttactccaagcaataaaaagtttccttttgcccccctgttttgcctagttttctggtgggctactctcctaccatagcatagaaaatgcacactgcaattggttatcaacagcctctggtcaatttagcaatcataatctgtgtatctcccacctctgtttgccttcagggacagaaaaagtgcctcctttccaggaggtagacaggctgttccagtccccatctttgtgtccttcataatgcccagcacagcccacattgtaggtggtgggaaaattcttgtttaaaataaaaaaaagaatgaaaaatgcaa

SEQ ID NO: 235886 - DNA, 441 bp, Homo sapiens
atagacaaatgagactggattaaactaaagagtttctgtgaggcaagggaaacaatcaacagagtgaagaaacaacccacagtatgggaatatggccattgtagaatggctgttattacaaagaccaaaaatgacagacgttggcaagtatgtggagagaaaagaactcttatacattcaataaacggtgctggggaaactggatgtccacatgcagaagaatgaaattagacccttttcttacaacatatacaaaaatcaactagaaatggattaaacgcttacatgtaagacctgacaccgtaaatctactagaagaaaacacatggtataactctatgatattggtctatacaattaccttttggatatgatccaaaagtataagcaacggaagaaaaactaggtaaatgaaattgcatcaaactgaaaagcttctgc

SEQ ID NO: 235887 - DNA, 401 bp, Homo sapiens
ggagacagtgtctctttctctctgtcacccaggatggagtgcagtggtgtgatctctgttcactgcaacctccgcctccccagttcaagcgattctcatgcctcagcctcctgagtagctgggattacaggcatgcagcaccacacccgactaattcttgtaattgtagtagaggcagggttttaccatgttgcccaggctggtcttgaactcctgacctcaggtgatctgcccaccttgacctccccaagtgctgggattacaggcgtgagccaccgtgcctggctaatacatagttttaaagacctcgaatttgtactgatacctctaacttcgtaacccaacaccaaagagtttgcgtcttcttcctttactccatatctcttttaaaaaacaaaaaa

SEQ ID NO: 235888 - DNA, 239 bp, Homo sapiens
ccatcacctccctcctccccctcctcactctgctccagccgcatgggcctcctcgctattctttcaatgcacgaggcgtggtcctgccccagggcctttgcacagcctgtgcctctgcccagctccctccttccctagaccttctccctcccgcccccggtctctaccttcacgccagcctcccctcctccagaactccctattaaaattgcagcccctgccacactccaaatctgact

SEQ ID NO: 235889 - DNA, 307 bp, Homo sapiens
caggattttgaaattcatgggtcaagaaaaagactccttacttctgctttctactgtcactccttttctgagacagtatgaggctttctgctggttgcatggatgacgaatctaaggacaattaggggaaaagattggctagtatttaaaaaatgttaaactattacaaggtattatcaggattttattttactaatttaaaaatgttttgtcaagtcaacttctaaaactcagctttactgaggtataaattacataaaataaagttcaccaattttaaataaacaaactattttattaatggttg

SEQ ID NO: 235890 - DNA, 476 bp, Homo sapiens
gctcccatggtagctgtgggatggaggttttcttggctaaattgattttttaatttgtgttttttaggtgctagtatgataaattcgggagcatagaagttaggacttgcatcctcattggaggcaaaaattggttattggggagcacaagcatcttagatattataatggtgtgtggccatttaaagctcaatcaacaaaagcttgtttcttaatatttgaatttctctcattgggttttcttgtgtattacactagcaacattgataatggattcatggaagatgtacagaatatattcaaggtcaatccaacaaatttataacgtagagatggctgtggttggaagactttctctctagttgcctgatcttgaagtcattttagttggttaccttcacatacttatgggctaccattgggtgccttgtggcttgcttatatttggccctcaaatataaggatttgagaattga

SEQ ID NO: 235891 - DNA, 411 bp, Homo sapiens
agcggattggagcccgggaagctcattgcgattccaaaggtcacgctgatgcaagagatgggttcccatgatcttgggcagctccactcctgtggcatttgcagggtacaggcttcctcctggctgctttcacgggctggtgatgcggaaactgaagctcagagagcccaagtcatttgcccaaggtgacccagcactgaagggagaagctagccattaagctgtccccaaacccgtgtactcaacgttgatggctactcgatggtggctgagaggcatccaacctggagcctgggaagcttccaggaaggcttggggggaatccaagaggaaggttctttgcgggagaaagagtgaggcaggggagtttaggaggccgcttcccagccctcgatcgccccacagccacca

SEQ ID NO: 235892 - DNA, 563 bp, Homo sapiens
ctacatgtcataaattataattgatatacatgtgtatgcctccacagagagctttagtgtagagctttctaaactttggaactgaaagtatatacctattagtgaaactagagtgtattgtaatcttatctttcctaaacagtgtttatattagtctgtcctgggaactgttaatattacacacacagatgcacatgtgtgcaaaatatacacacgtgtgccatggccaaatatatttagaaaaacactatatactgtacgcccctcttggagatttgtaacaacaattatattaatgggtttgagaagtgctgtaatacataaggtagtttaattgtttgtcatataatcttgtttcacagcattcttagaaacatgcagttcttagaaactgtttcatggatatggtttgttaaaagttatggtaaccaattacatatacaggcataccttagagatattgcagagtcagttctagaccaccacaataaagtaaatatagcaataaagcaagtgacatgaattttttgtttccctgtgcatataaaagttatgtttatact

SEQ ID NO: 235893 - DNA, 651 bp, Homo sapiens
tcttctctccatttggagaatctggagcttcagaatggggatgagggagggttgtgcactgatgtccaattctagggtcctgtgagatatacagcaatcagtgaaaacccaaaaaccaggtgggctaagggagtcccagtctctgagggcaaatagctctatgcagtgggcaacctgagagctaaagtcacagcgggtccttggtaagccttgcagcaagtggaccatttctcatttagctgaaaccatccttctaggtgggaatatgtagtttctgcggtttcaatgtggcagtcttactgttaagactggggtgtcacctttggatgatgtaatgtaaatgtaaatctactttaggttggtggtatctccccttgtgtaaacagatcattaactgcaatgctgacaaaagtccctgggggtctggccgtcccctccttagccagtctgttggatctggagagtgatggtgtgaggaaaaaagactggatcaaacttctttatatatagtcacatgattctgtaagcttagtcttcaaggaaagaaaaaaaattaacctgaactagaattcttttgaaaatttacatcagaagctgttttgtaactataattgcttggccagatatgtaagatttgttttcattggctgg

SEQ ID NO: 235894 - DNA, 162 bp, Homo sapiens
caagcccgagaccttctcctacgtcaccctccccaagaaggaggaggagcaggtgcctgagcgagggctggtgagtgtccccaagtaccacttctgggagcagaaggaggacttcactttcgtgtccctgctcacacggccagaggtcatcacggccctcag

SEQ ID NO: 235895 - DNA, 520 bp, Homo sapiens
cagacggattcatgtgaatgaagaaaggacattttgacttggaacagagggctgggcctctggcctagcaagaaaagacctgatttagtttaatcaagttgatcagcctcagggtaaaacaaattagaagtgtagacaacagtcccttgtgatatgttgagtcaagctggactaattaagcaagcaagctgtgtattagtaatttccctgtatgtatgtcattctcaaccctgaggttctcattggcataaagtggatggtacatcccagttggtgctgaacatataacaagcccacatggaagaggaagagcgttgtgcaggctggttatgaagttggttgaattctgtttacaaacaaatgttatctttgtcaaactgaggctagtggaaatagaaagtactgtcctcaagttttgtcaccacacttccactttatgtttagaattttttcttacttgctaatgttgagtgtatttgatagtttttttaagtaaatgaatgaatctagaccactgatt

SEQ ID NO: 235896 - DNA, 476 bp, Homo sapiens
gcaatgaatgcaaaactaggcaaatgggactataccaaactaaaaagcttctgcagagtaaacaatcaacaaaatgaaaagacaatctgtggaatggagaaaattttttgcaaatactatatctaataagggattactatctaaaatagatccttcaactcaatggcaaaataaataaataaataaataaataaataacagccaaataaaaatatgcaaatgacttgaatatacatttctccaaagaccacatatgaaaggccaacagatatatgaaatgctgcccaacatcactcatcaccaggtaaacgcaaatcaacaccacattgagatgtcaccttacacctcttaagatggtttttatcgaaaaagacgaaataagaagtattggcatagatgtgaagaaactgattatttgtgccatcctgagaatgtaaaacagtgcagctgctgtagaaaacagtatggagattcct

SEQ ID NO: 235897 - DNA, 479 bp, Homo sapiens
atgactgtgttcctggttgctaggtctgcatgctctgcactttcccccaagacccttctctttggccacttcccttcaatgttcagatttccaattaaagattatttcctaatgtgaccttggagttcatacaaatggttaaagtcctaagttctaagtggaaacaaagaacagaattctgagtaactaggactcatgaagggagaacatgagcagttatgtaggccacagattggggattagcatggaaggtttaggtaaaggaaatggatgaggctgaattatttgatcactcttgggaatcagatgagctcagcaccacctgagctgaagccacaactgtcctacaggcaagctcagcaatctttaacagctcccagatctggtgtgtgtaacattgccttctggtttctgtaggattctatggagttgcctttgcattcctgagtcttaccctgggcccagccttcaagagacca

SEQ ID NO: 235898 - DNA, 2050 bp, Homo sapiens
  misc_feature (891)..(891): n is a, c, g, or t
  misc_feature (1742)..(1742): n is a, c, g, or t
tattgctaagtggaaaaaatgcaattcgaacctagctccttttgcccatggagatagtgcttgtactcaccagtaatttctcaggatcactgtttgagtgaatgtgcaggtacctaggaggatacccaatagggccaaatcccttgggaaggatatgttgagaagagcagctttgagtacaagacaactttatgattttgcatggaagatgggccctgtccccacagagagaatttccctctgatgcaaagagcaaattataggcacccaacaaaccgtggtcatgtatgcataggtcactggtgggtggtaaatcttgtttctgggaagacttttgtaaccattacctctggaaaatctgaaatgatgataccaaacatgttgcttaccaaactgacctcttccacccttagaagcagtgagaaagttcagtgtcaaggactgagctctgcagcttctcttctgcctctgaaatttattaagtcagtaggccagaccctaaatgatttatgacacagaaagcactcacatggaatacaaatgtctcatagtgaagagcaagaccagttgtgattgtaagaaaataactattaaaatgtgagtattttaggagtatacatattgttgttaaggcatttctagtcagtaatgaattgaaggaggtaacatacccacactaaccaaacttagcatttgtaggccccatctataagatagcagagtcactgcctgggagtttctgaataattactgtctctaaatttttaaaacgttcacagaacaatctgtttaaatgccctttaacgtggttgattctggtgctgagtttagtctgaggactaccaaagcaaaataatttccctgcacatgcccaagtgagaaatttcatcntctgaatgaatggttataaaatgacttagcttcttctgtgtgggtgcttatatctagtttgattttgcctgtggtcagtgttctgatattattatatatacatgtatattattggaaaggagcataaaactttccttatataattccaagttaaaaagagacaaatgcttgccatgcattcagatgttcttacttcaagatttttcaaggtcttctaaccagagttaattgttaactttgtttcgtatcatgcattttttcaaaagctctaagtattgtagtgttctgtgcagctattactcaatatcatctctgtgtcccctttccctgtgctagccttggtgtctagaaggccttgagtatagtttgcttgtttaacagggtatacagaataggtgcattctagaaggttatctatcaaatctatttttctatagactttaacctctcatatcagaatgatgactggttctattgcctagttctggtaatagctctgagtagtccaaagatctttgacaggtatagttgggagatagtcaaggaccttgctgtttgacttttttaaagacctgattaatactctgtattctgattccttactccccgtcagaccataatctgagagaaacctcataacctggccaccaacatggaatggattgttttgtactgtaatgatggtcagatagggactaagaggaactagttttctttcatatgtaagtctttaccttctaactgtataaattgttagcaaaatgttgtataaaatattagaatttttcttttcgatctattttaatatgtgttatatatcataagggttttagcaatattaacatgacatnctacatttttcttcttaccatataattatataaagcaacaaatatttagtggacattaatatatgccaggtagcatttcaattaagaaagcgtaagaggtaaatctagaaccagaatatttcttacagaaaatatcaggatgacagctgattttatgtgtataaagtgatttatctctctgtgctataaattacacccagaggtagtggtagtcaagtataataaagaccaaaagaagaaaaatttggaaacataaaaaaaagacataataggaaagtatttttgaagaaaaaaggcaactccagatt

SEQ ID NO: 235899 - DNA, 350 bp, Homo sapiens
tgagacaaagcctaccagcccaaactcccttctccaggcaccaaaccctcgggtcccggttactcctctcgcccaacaactctctgggcgggtctcccctggccaaggctgcacgagcttctccttggcactcgcgccgctctcctgctctccacgcgccccttcggcaccccatcctcccatcctgtacgcagacccccgctctgccccgtccccgggcacccgacagcccctcgtctccagtcggccgccatccccgccccgtctggccgcagctcccaaatcttggcccccggtgctccccagtctacacccgctccccggcccctccagccccgcggctgcggccg

SEQ ID NO: 235900 - DNA, 381 bp, Homo sapiens
gctatgaatgggagcactaaataaaggcactgtggtgacgcagcagctgttggctgtgtgcactgcttgataacccttttctgcctggcctttctatagatgtttcccagaggtcagttcctggttcttcctggagtccattttgtgactaattggctctggcctgtagggatggtgtatgaaaggctctgatctgaagatgtgtaagctgggaagtagtaaccccttaccctcctgatctgggttgggctcattacagggccattgcttcattggcagccattcgtagcaatcactatcaaagtaggcctcagccttgtggcagggaggcacatgaatgagccacacagttgtacttttcttttttgagactccgtctca

SEQ ID NO: 235901 - DNA, 525 bp, Homo sapiens
cagctcaacaagtttcgttctgcaagtgatagttattattatcttaaaataaaaatattattttcaagatcggctttagcaccagggaggtaaaattcattcaccttcctgaccattatgaatttgaaatttctttttacaaaaaggtgattgttggttaaaaaaaaaaaaacaagcaatagcagatgtgagaagctgaaaatccatactacttatgtggttttggtttttgcatatcaattagaaaatattttaatgctacttttaaaaaataatcaaaggactgtacagaaaagataactcaattttatgtgctatattatactttaaattccctctcttgtgttttcctatctcttttcaaaggagctagttcattttcagccattctttcataaatgccattgctcaaaaatgtatgaaggtttcagttatgtgacatttttgtcctgagtttattcgtgttttcagtttaacatgtcaataaatttgtataaacttttggaaactacagtagcattaaaa

SEQ ID NO: 235902 - DNA, 382 bp, Homo sapiens
agtgacattccacttatcatatgataagtaaatttactggtggcactgacagtaggtacttctatcaaccaattttggattgtaggcattaagcatcctggtgcttttcccaggcaaataggaggataatgatacccaatggaaatgtttatcatcattccttcttcttcaggttgggcagggccacggtcatctgtggggcctggtacccattcactgttattaacatatactttaataggattatctatccaagtgactgcccgaattaagggtgggaaaatcacataggcccagtaagtatagttagctgtagcggctcctgaagacatagggagacttaaccaccgttgatacaatcattaaagctgcaagaagcata

SEQ ID NO: 235903 - DNA, 989 bp, Homo sapiens
acaacactaggttttgtaggtttttggaagctctttagtaacatggctgaacctgagtttttggataggtagggagcataaaataataactaatgttaattgagtgcccactgtatgttgggcatggatagttttaagtatttatcataactctctgtgatgaatactactgttatctccattttacagttgaggaaaccgagacataggttactttgctcaagatcacacagctgagaatgtgggaacacgctaggagcccttcttaactactagtctgtatgcctctaaattatgcctgattcctacttacagtcttgttaaacagttaagattagcacactcaacagagtcagaaaacagttgttcagcctataataaagcactaaattttgtgggcaaactttacataaactctttccttagctggtctagagagaaaaattaaatcatgttctatttatttcattttcacctttttatgacacaaaatataagtgataacacaaaaatcacctactgttttactgttattggaggaaatgtaatatttttcattcttaatttaaaatcaaagcatttggaatttattaatggaacacattttctttccttccacttctagcctctctgtgtgatgacctccatccccacggcttcttactagctctcattaggagactggagtcctcacccttgccccattgacacgagctttaagtgttccagctagataggccctggtcattcagaaaacaatttggtttgggaggtgttgaaagaaataacaggaaaagcaattctctgcagagagaatttggtttatttttctaaaaatacagcgaacccatccactcttaccctggcagatgcctcccctggtatagagaaatttcttctttcttcctccttcacatcattgcacacctgattaagtcaaccagggtaattaaaatacaaaagcaaaacaaaaaaactctgggcagttg

SEQ ID NO: 235904 - DNA, 318 bp, Homo sapiens
gaaaaatgtgtgtgtgtgtgtgtgtgtgtgtgtgtgtgtgtataatatatatgtatgtattatagaatcagaattaacaatgaacatttgtaatccattttgatgaaagggatcccccaactttgcaaattgttatcccctcaaaaagaaatctaaagtccgctgggcgtggtggctcacgcctgtaatcctagcactttgggagactgaggcgcttgaaccccaggggcagagattgcagtgagctgagatcacaccacttcactctatcctgggcaaaaaagcgagactccgtctcaaaaaaaaaaaaaaaaagaa

SEQ ID NO: 235905 - DNA, 1267 bp, Homo sapiens
gtctcactatgttgcccaggctggtctcaaactcctggcctcaaacaatcctctacctcaacccccctaagtgctggcattacaggcatcagctgccatgcctggctacaaatcttaatgttttccccatggcttctttttctggcgttcttttctcaggtaatggaagtgggcagagaatgatcctttccctaggctccagtgtgtaagaattaaagaaagaggaaagaaacacaatggcttgatggtcgaggacaggtttattttaaagaaaacaaacccaagagtggcttctggctgagttagatcagaggcatgctctcttacagactaagagtttttaaggattcagggtgggagagtttatcagaggcttggactgcttctgtgtctctttaggtgtgcttatctgggagggagttgtgtgtctgtttccatacatcttcctgcagctgcaggcatacccccaggtctgcttttagcttccctatcttagtgcacctgaagggaaagaatgtgcttattaaggcccactgttatactggggcccaatgtatgagggtgaagtttggcaattacccaagagactttccccccacctccctctgtgcctgagctgtctcatctatgttttactgtctgctctttctgtctgcttgttgttagaagagaagtgattttcttgaaatgcatgaggctggaaagggagctggcacttaaagtggcggtgtttgtccgagaggatggtgctcctgctctgtcacagtgggcatggggattcaggccactgccaccgaatttcaagagcccaagcacagagcccagaactaaattgtgagggtttaccaaaaaaaacgctcacatggcaggtataatcggaacttccataacctgacatatttaccggggtcacacagacacagaaaaaaccgggaaaaaagaataccccccggagaacaatactaaagaagcactgcgagatacagcccacagcacgcgaaacgaacagcgactaagaagagatgacacacaacaagacatcagaagacgcacgagagaaacaagaacacgagaaggggagagaacgcaaaaacagcaagacactaaagaacagaatggagaaagagaaaaccagggggtgaaacacaggcacccaaagaacacgggggagctcacccggacacgcagacgaggccgaacatgcgccaacggacacacaagacatgagagaaagaagcaacgaggagaacacgaaacacacgacgag

SEQ ID NO: 235906 - DNA, 855 bp, Homo sapiens
gtctcactatgttgcccaggctggtctcaaactcctggcctcaaacaatcctctacctcaacccccctaagtgctggcattacaggcatcagctgccatgcctggctacaaatcttaatgttttccccatggcttctttttctggcgttcttttctcaggtaatggaagtgggcagagaatgatcctttccctaggctccagtgtgtaagaattaaagaaagaggaaagaaacacaatggcttgatggtcgaggacaggtttattttaaagaaaacaaacccaagagtggcttctggctgagttagatcagaggcatgctctcttacagactaagagtttttaaggattcagggtgggagagtttatcagaggcttggactgcttctgtgtctctttaggtgtgcttatctgggagggagttgtgtgtctgtttccatacatcttcctgcagctgcaggcatacccccaggtctgcttttagcttccctatcttagtgcacctgaagggaaagaatgtgcttattaaggcccactgttatactggggcccaatgtatgagggtgaagtttggcaattacccaagagactttccccccacctccctctgtgcctgagctgtctcatctatgttttactgtctgctctttctgtctgcttgttgttagaagagaagtgattttcttgaaatgcatgaggctggaaagggagctggcacttaaagtggcggtgtttgtccgagaggatggtgctcctgctctgtcacagtgggcatggggattcaggccactgccaccgaatttcaagagcccaagcacagagcccagaactaaattgtgagggtttaccaaaaaaaa

SEQ ID NO: 235907 - DNA, 623 bp, Homo sapiens
ctgaaacaagaagatatgaagttcataaaatgctctccgtcttcaatgaagaaaggtacatgaacgctgaacgacaatgagaataactatttccatattttcatatagtgaagtttcattgcatagtaatccacattaaatgatatttgagacatatatactttgagaatcacaggctacgttggctgttggcagtttaaaatatgtatgttagaattatctctcttctggggttttagtctcctgttccagaataaaaaatacctgtaaggaaatattttttgctgaagatgacagatatcaagtctgtgtctcaattctacaagagaaacatatcagactccagagaatgtgtaataaagtcctagagaaaattgttaagtaagtgaaacgtttaatttcagtgtaaaactttctactttgggggaatatcctactatattgttctgagttccctctcaactcacgtgtgttggccccttgcttcctgtctaggccctaccactgtattatgaaagtaatggccctaccattgctatttatttatttgtttatttaaactttatgtaagttccagggtagctgtgcagaaagtgcaggtttgttacataggtatacgtgtg

SEQ ID NO: 235908 - DNA, 1005 bp, Homo sapiens
ctaatttttgaatttttagtagagatggactttcactatgttggccaggctggtctcgaactcctgacctcaggtgatccgcccacctcggcctcccaaagtgctgggattacaggcatgagccaccatacctggcctgggtgagactttctgagcagagctatggacttgtcctcatgccctcccctggcttatctctgagggaaggagggatggctctcgtcctctcactggacatgtcaccttgggcaagttattcaagctctgatctcagtttgctcatctataaaacgagttaacaaaagtgtctacccttcagggctgccacgaatgacgggcaggttcagaaagctgacagcacagagcctggtgcatggcaaacggggccactgctatactacaataccatcacttccacttccatcatcactgggctcctccatgtccacaaaaccatgtgtgccctgtgccagcctggctgccaagtgacaaagcagaggaggcacatacatgaggcacttggcaaagagggcattttcacccttgctgctctgcaatatttggcaaatgctctgcttcaaggaaagtacccggaggcctgcctacaacatctgatctcccaagcatgcctgctgagacttttttttttcccccgagatggagttttgctcttgttgcccaggctggagtgcaatggcgcgatctcagctcactgcaaactcctcctcctgggttcaagcgattctcccgcctcagcctcccgagtagctggaattataggcgtgtgccaccacgtctggctaatttttgtatttttagtagagacggggtttcaccatgttggtcagcctggtctcaaactcccagcctcaagtgatccacccaccttggcctcccaaagtgctgggattacaggtgtgagccaccacacccattgcttcctgagactcttaaatcctgctgcagtgatggggagcaggatgatatcctttctgaaccctgccc

SEQ ID NO: 235909 - DNA, 383 bp, Homo sapiens
ttcagggaagaaaacattttgcttctatcttggttctttaaagataattttatttctttctctgaatactttaaaaagaaaaattgtggttgagcgcgtcggctcacccctgtaatcccagcactttgggaggctgaggtgggtggattgcctgaggtcaggagttcgagaccagtctggccaacatggtgaaatcccgtctctactaaaaatacaaaaaagttagccaggtgtggtggcatgcgcctgtaatcccagctacttgggaggctgaggcaggggaattacttgaaccagggagatggaggttacagttagctgagactgcgccaccgtactctagcctgggcggcagagtgagactccgtcgcaccaaccccaca

SEQ ID NO: 235910 - DNA, 533 bp, Homo sapiens
aaattgggtgagcacttccttcacgtctaagctattgccaagtcttattgtttatcctgatgaattccagatattctttcttagggttgttgctctggtgccttgtttactgcctcattcaccaatcacctgattctatccctggtagccctacagcttcttagtgttcagtttcattctacaaatctgcatacatatcccacaatatgataagactatgatgtcccttttagtcaataaagatatgtatttaattctattttgttttgacttctaacatgtggcttctaatgtatccccagaccatccctttccaaaaagaggtagctagaagtagatgtgataatgactaaggtcaatattttggaattccattcagcattgctttcctcccaaccactcatcgttctatttgatttccaactttctctctcaatgttaatgtattctttccgagttttaagtgtttcatcatagtggcttggattttgtccaatcccatgattatctctctattaaaatcttaatacaaa

SEQ ID NO: 235911 - DNA, 445 bp, Homo sapiens
tcattaggtgactgacacaggctgtatcttgctggggatgatggcattcacctcctacatgcactagagttgtagaaatcatggacaggcacaagccacgtttttcaatgatggtctaaaccattgaattcatggtgtagtcgtagcccacattggtaagattctggtcataagcataatattcaatgactattctatcagttccagtttttggttgtagacaacgctcttaataatttaagtaattaattttaaaatttaaattaatgcaaatgtgctcatctcatggagggcccaagaaccaggcttgaagaatctgtaccactgactctggagggtcctactctgctagaacctttgttactgccacattgagagctggatatctatttatcatcacctaccaccctcagcagaataaatttttcatagacacctccttctt

SEQ ID NO: 235912 - DNA, 300 bp, Homo sapiens
tatatacagacacacagagacacacacacacagacacaaacacacacagacacagacacacaggcacaaacacaagcacactcgttcatacccaagagggtctcgtggctactgtggccactagttcatgagatgctggagtttgtcagctggctgaaggcaaattataccctgcatgagttatcaggttgataattgccattacttttaacgcaaaaacctcaaatacttttgcgccaacctaaaagctttagatttattttcaaataaagtattgttgtgattaacagattaataaaa

SEQ ID NO: 235913 - DNA, 447 bp, Homo sapiens
tttgcctttgttgtctcttagtgttctccttgtgtctttacatggccatcttctggtaaggacatctgccctaatccaccctaatccagtatgccctcgttttaacattggtgtctgaaagaaccttatttctaaataaggtcacattgtgacatactgagggttagggctttaacgtatatttctgaggggacacaattaaacccataacagagttctactttgaaaagtgcctaggagattctgatgcagcctgcatgggttcccaaagcatgattcctgacctatctgtacataattcatcaagagcactaacaaacttacaagacatatatgtataatggtatataagtatgagtgatatacagaagaaaaataaacccaaaactcatgtactcatcaccctgcttaagaagtaaaacattaccagtacctttaaaggctctg

SEQ ID NO: 235914 - DNA, 444 bp, Homo sapiens
aatcatgcaaccagagcctctaatgatggccccttctgccaggaacctttaaatttcctctgagggagctctgactgttgtttctcaacaactgcaccccctgtcagcaggaagcagttaagatcatcttcctccttaccttgaatctaccagcggttacatgtacttctttagaggggtgaatgagagccaggtgggagggggtccctggagaaattccagtcagtctgcccattgaggtggagccttgggaagttcatgccctttgcagtggggaggggcctggccccacctcttcctatgtggaacccagtattcaaatagcagcaggaagctctctagcaggggactctgaaacaggaggatgcctgtcccccctcctccttttttttcccttttcacccaataaaaccttgctttactcaccctttaaaccatctttga

SEQ ID NO: 235915 - DNA, 890 bp, Homo sapiens
atggagtcttgctctgttgtccaggctagggtgcaatggtgcgatcttggcgcactgcaacctctgcctcccaggttcaagcaattctcctgcctcagtctcccgagtagctgggattacaggtgcccgccaccacaccgagcttattacattacttctgagaatatgtctgccatatattcaaacctgaataaccacagcttgtctgtattttcaagtaaaaaatgttccatgaaaaaaagtcattcaaattgcaactcaaacaactgtagaagtgcttttcttccagacaactatcatactatgacatgcagaagtgctttgttcatacattctacttcatatcatacagaatattaaaaagacagatactcggctgggcgtggctcatgcctcagcacttcgggtggccaaggtgggcagatcacctgaggtcaggagtttaaggccccagcctggccaacatggtgaaaccccatctctactaaaaatacaaaaattagccgggcatggtagcacatgtctgtaatcccagctacttggaaggctgaggcacgagaatcacttgaacctcggaggcggaggcttcagtgagccaagattgcgcctctgcactccagcctgggtgagagagcgagacaaaaaacaaaaaacaaacaaaaaaaacccacatagatactcaagggtccagagcttcttttaaagacaaggtctcactctgtcacccaggctggagctcagtggctccaccagggctcactgcagccttgacctcttgggctcaggtaatcctcccaagtagctgggactaaaggcatgtaccaccatgcctggctaattttttgtagagaagggctcccccaggctggtctcaaactcctgggctcaag

SEQ ID NO: 235916 - DNA, 1668 bp, Homo sapiens
gattctcatccctgtgctcagagctctcaagcacccacgatggccttctcaggccgagcgcgcccctgcattatcccagagaacggagaaatcccccgagcagcccttaacactgtccacgaggccaatgggaccgaggacgagagggctgtttccaaactgcagcgcaggcacagtgacgtgaaagtctacaaggagttctgtgacttttatgcgaaattcaacatggccaacgccctggccagcgccacttgcgagcgctgcaagggcggctttgcgcccgctgagacgatcgtgaacagtaatggggagctgtaccatgagcagtgtttcgtgttatagaaggtgatgtggtctctgctcttaataaggcctggtgcgtgaactgctttgcctgttctacctgcaacactaaattaacactcaatttctagaaaatttctccacaaactgagagctccagaattgatgactcagagtgaaccgaggagatcactactgtgcacaagtttgcctccaaacaactgggtgatgcctccaaacagacctggaatcatccatttctccaaggatctctgcttcttcttgtaaaataggctatttaaggactacaatctgagcattaagggtatcaaactcttgggcttggacaatcctcttgtgtctggagttggttccttccggtgggttcctggtcttcaagaatgaagccatggaccttgctggtcttggaggaaggcatccttctattctactgatcagaaagctggacaaagtcccactgccaggctacacagttggtgccatttgcggaggtgacctttgacctttaacccacgcggccacccgcccgagctcttacccctgctgcccctcgcgcgtcccactccccgtccctgccggatccgcttccctgagctgggcccagcgcgccgccagggaaggggccggagcctgggagcccgccccgccgtcgcccgtcctccgcccgcaggcccacccgcagcggtcacgtgaaggaccgagcgccgcgcgcccaggcggggcctccggcctgcacgaggagggcagagtccgttgcggctgccgccccgacgcccgcgcatccccgctcgccgcgcccgccgccgcgatgtccggggccggcctagccgcggtggtgagctgcctgcgcccgcagcccggcgaggagccgcagacccatgaggaccttctcctggcagctgcatactttggcagactggtacattttgcaaaagtcactcctcaaatggttttctggaaggatacagaagacatctgcaccatggtaaccacagtggcgagtgttcattgtagtacctgtaagagtttatgaccgaaggcaggagccatgaagaaaaaagactcaatagatttgcttttgatggaacaacaacacttccatacagtgaacgccataagcacaactgcaagcaaaccgcaaactgaagaacaaatagggcaaaatgtggcagtgcagacatttcagcatatcaagagcacttccaaattacaggaaaaaaaagatatctcaatagataattttgctgaagataagtgaaggcaactcataaggaaaaaatatgtaaaatggccgataggaaagatgtttaacgtcactaattaaaaattatagaataaaacgac

SEQ ID NO: 235917 - DNA, 682 bp, Homo sapiens
  misc_feature (672)..(672): n is a, c, g, or t
  misc_feature (674)..(674): n is a, c, g, or t
  misc_feature (682)..(682): n is a, c, g, or t
gattctcatccctgtgctcagagctctcaagcacccacgatggccttctcaggccgagcgcgcccctgcattatcccagagaacggagaaatcccccgagcagcccttaacactgtccacgaggccaatgggaccgaggacgagagggctgtttccaaactgcagcgcaggcacagtgacgtgaaagtctacaaggagttctgtgacttttatgcgaaattcaacatggccaacgccctggccagcgccacttgcgagcgctgcaagggcggctttgcgcccgctgagacgatcgtgaacagtaatggggagctgtaccatgagcagtgtttcgtgttatagaaggtgatgtggtctctgctcttaataaggcctggtgcgtgaactgctttgcctgttctacctgcaacactaaattaacactcaatttctagaaaatttctccacaaactgagagctccagaattgatgactcagagtgaaccgaggagatcactactgtgcacaagtttgcctccaaacaactgggtgatgcctccaaacagacctggaatcatccatttctccaaggatctctgcttcttcttgtaaaataggctatttaaggactacaatctgagcattaagggtatcaaactcttgggctttgggaaccaaaaaaattttcccccngntttccccn

SEQ ID NO: 235918 - DNA, 512 bp, Homo sapiens
cctcggcctcccaaagtgctgagattacaggcatgagccaccgcgcctagcctgtgcactttcttaaaggaaaactggagaggaagagatctcatgttttctattcactccactgctgcttggtccagtgcaggaaatattgctgttatttgaagtccttcctaaaacaaaagctcagatcttttggaggttgcccttctaggcaggttttcaccagtcaattttgatttggggggcttaacagagtaggaatgatcttgcaggtttattacatctgaatttaagactactcacctaggctgggcgtggtggctcacacctgtaatctcagtgctttgggaggccaaggcgggaggataccttgagccgaggagttcaacactgcagtgagccatgatcacaccactgcatgagtgagactccatctcaaacaaaaaaaatagactactcactgtttacatagctttgtaccatataaaaacttgtttgaataaaatattgataacaatagt

SEQ ID NO: 235919 - DNA, 304 bp, Homo sapiens
gtttggcaacagccccaccagcacacacacgcaccccctgatattttctgattctcagtggggctcgaggagcctcctgctcccagctttatctgacctggggaggagtcgggtgaaaggaaaggtacagggcaccttgtagaagacctggcagaggaggctggaggagggaaacatttccgggcaggaaaacactaatagggccgttcagcggctctcaggcctagaggggtgtgatccctacaattcaaggcaggccccagacccgcctgggcttaagggctgcagggggatccttttctct

SEQ ID NO: 235920 - DNA, 1058 bp, Homo sapiens
agtcagtgaaacggcagaatcagaagaggttccacaaccagaaaatcttggctggaatttcaccatcaggaataaaacagaaaaactaaaagagtgccccagatagcctttcttaggggcctgtgacaggtcgcaggaatcttgttggtgatccatccagatgttgtgtgttctggaagtggacatcgcggctctgtgtttttgaagtcagatctcattgctgtggtttctatgcctgaccccccgaagttcttgctcctgttgccacagggagccgggagagcacagagcgctgctcccggtgccctgcagccacacaaacatgctcctgctcctggcggaggcagagctgctgggaaagacatttcggaagtttcctgtggctgcaacaaattgttcaaatctgcactggagcaccgctgtgacctgtctttctccatcttagggcaaacagctcctgaaactggaaactccccagcacctactcaccctacccctcaggctctccttgtgggggtggggcagggggagttgtctggaatgcctggcctctctgtccaagcatggcagccttgccccatgggtggtgcagactcagtttcccatgcaccttgccccagggaggaggtaggggttccttccatagagatggtgaagaataagggaggtagtgatcgtctctgggatccagttagatctgcgtttgcaggcagaaagaggctggggcacatggagagagtgatcaactggaagattctagggtcctcaattttgaaaggtgacatgataccctggaaagggcatgaacttagttgtcagttcgtccttgccttttccaatcaatgctgtgtggccacggcaaattaatgaacatctctgagtttcggtctcctgtctaaaatgaggtgataatagcttcttgaaggttgtaaggccccaaacatgctgcctggcacatagatggctaatcaatattttcctacccttcccttccttcccttctctggagttgctacctgtcttctcctggggccttgcaaataaacttctgaattaaa

SEQ ID NO: 235921 - DNA, 1513 bp, Homo sapiens
agtcagtgaaacggcagaatcagaagaggttccacaaccagaaaatcttggctggaatttcaccatcaggaataaaacagaaaaactaaaagagtgccccagatagcctttcttaggggcctgtgacaggtcgcaggaatcttgttggtgatccatccagatgttgtgtgttctggaagtggacatcgcggctctgtgtttttgaagtcagatctcattgctgtggtttctatgcctgaccccccgaagttcttgctcctgttgccacagggagccgggagagcacagagcgctgctcccggtgccctgcagccacacaaacatgctcctgctcctggcggaggcagagctgctgggaaagacatttcggaagtttcctgtggctgcaacaaattgttcaaatctgcactggagcaccgctgtgacctgtctttctccatcttagggcaaacagctcctgaaactggaaactccccagcacctactcaccctacccctcaggctctccttgtgggggtggggcagggggagttgtctggaatgcctggcctctctgtccaagcatggcagccttgccccatgggtggtgcagactcagtttcccatgcaccttgccccagggaggaggtaggggttccttccatagagatggtgaagaataagggaggtagtgatcgtctctgggatccagttagatctgcgtttgcaggcagaaagaggctggggcacatggagagagtgatcaactggaagattctagggtcctcaattttgaaaggtgacatgataccctggaaagggcatgaacttagttgtcagttcgtccttgccttttccaatcaatgctgtgtggccacggcaaattaatgaacatctctgagtttcggtctcctgtctaaaatgaggtgataatagcttcttgaaggttgtaaggccccaaacatgctgcctggcacatagatggctaatcaatattttcctacccttcccttccttcccttctctggagttgctacctgtcttctcctggggccttgcaaataaacttctgaattaaaaaaaaaaaaaaaaaaagaaaaaaacaaaaaaaaaaaaaaaaaaagaacaacaatacacataacaaagaagaaccaaaagaacaaaaacacaacaaagccaagaacaaagacgggggcagcaggcgaacaaacacgaggagggagggcgaggacactcgcacaggacacagcgtatgagcgacggagcacgaagagcgagcaaggaaaaagagaaacgacgggaggcaatcaaagaaggagagagggcacaccgccacgcgggcgggcgggacgaccacatagtgggaggcaagcgcgggcagcgcgcaggatgggagggaaaaacacaacgagggagggcaacagctcaccggcgacggtgacgagcataaaatccggcgagaaacaagcgagggcagcccgcgcagcgccccaccaggggagcacgtacaccaggaagcgagcaagcagagcag

SEQ ID NO: 235922 - DNA, 2179 bp, Homo sapiens
aacttagacgatttctcagaactggtgttctcttgtacacagtttgggaatgactgcttggtacacttgttgttatttctgaaaattgatattaaaataataatttatgtactaccacttgaattcttttatcagttaatccttcttccttcttgcagatagtggagggctaagaaaagcaggaagtcatgaatgattgagaaacaaataaatgccacttatctcattcctcccctgggaaaaaagaacagctttgaaatttactgtatctgtcaccaatggagaaattgatagtattgagtatatttaaaagaaaagctattagcaagatcagttaggactgcctgagtgaatttccaactgttttccccatactaatgctaagccattgctagaattccttctatgtggcagtgaaaacgtaaaatgatgtcttcccattacaaatcaaatgaggacaagtgagtagttattgtaggaagccagcttcgggattaatatgagggaaagtttgcaaacatagaagaacggacattgttaaaagatgtaacagagtagattaaatgctatgactgtatgatccaaaaccaggcaaccatatccatggctataaaatattccaattggaagggaacttaggataatagtggatggatttcagcttttataccaagtccaatcaattgtagaagctttctgagtgctatgttgagggaaatccatatctcagtgggaatgaatagcatgatcaattagcaaaagatcctatttttaggaattggagatttggcagcatagggatcacctacttgccattcttgatttagttcaattgtgcattttgcaagtcggctgttgtgatgcacagaagctgtgtaacttactcaaagttatagcactagctaaggttagagccaaaatttgagccaggtgtttgcatcccgagtctttttcaaaaataggctttgctcccaggcgcggcagctcacgcctgtaatcccagcacttcgggaggccgcggtgggcagatcacaaggtcaagagatcgagaccatcctggccaacatggtgaaaccccgtctctactaacaatacaaaacttacctgggcgtggtggcacttgcctgtagtcccagctacttgggaggctgaggcaggagaatcgcttgaacctgggaggtggaggttgcagtgagccaagatggtgccactgcactccggcctggtgacatagggagcctccgtctcaaaaaaaaaaaaaaaaaaaaaaggctttgctcaatatttttctcaaaacagctatcattgccctctttgccatttaaaattttaaagaagacattcaatgatacaacactaacattcactcatcacattagggctgttgagaatgtcttcttggaaccaaagcagtcagtcacacaacacatatggagctgtaggctgaataaaactgcaagagtcattctgacttgcagagcaagccagggtggaaattggacatgttattatatttgataaagaaggcaatgttgaaagacagagaaatgtccttgtgtagcaaaaaaaaatttgaaatatcatatttttgcttttgccttagtgctgtctttaaaattttagactcttgactaaacaattaaaaatgaacttgataccccttatagcagctgtgcatacacaacaggagctactcagaaatatgccttagaaagctttctttgaagtgtttctttaccactttctttttctttgggttcaaattaaatagaatatcagccgtccacttatcttaatgacaattattgtgaattagacactgagtagaatacagtgacaaagaattgtaggcttttgccaaatggagtggaaaacagtaggaaaatatgatattctggccgggcgcggtggctcacacctgtaatcccagcactttgggaggccaacgtgggcggatcacgaggtcaggagatagagaccatcctggctaacagggtgaaaccccgtctccactaaaaaatacaaaaaattagccaggcacggtggcgggggcctgtagtcctagctaatcgggaggctgaggcaggagaatgtcgtgaacccgggaggaggagcttgcagtgagccaagatctcgccactgcactccagcctgggtgacagagcgagactctgtctca

SEQ ID NO: 235923 - DNA, 343 bp, Homo sapiens
ttcaaatcatgatacatatatatgatcttatgtgtatatgtaattttattattttcttttagggcaagtggcacttaaacttgcctatcaactatgttaaaacttttttaaaaatcacagctgttctgagatctcagccagtttcatttctgacttaaactgggagcagacgtgtactttcatttttcactctagctacttcagtatttgaattctttaaactggaaaaaaaagcaagttggagaggggcaaaggagattcttagttgcctcatctgacacacgcacctcctaggaaccacagttcctcctagaaaccacagtgctagaggaagagttggcct

SEQ ID NO: 235924 - DNA, 358 bp, Homo sapiens
taaatggaaactggtggcctgcttcaatccagggccattttgaagaacatgcatgtgcctggttcacaggaaaccaagttgtctgagaaatgaaggcagaggctgagagaagaactacacctacatgtctgacccatggaggaaaagaatcattttcttctctgaaacctggggaaatgcaacactcacaaaacacagtcgtgtatgtgaccatacagggagacattgcgctcccatcaaccgaaacctgccttatgaaaccttttaactaaaattatttcatttgctttctagaaaaaggacatgcaatttattcaatgcatcagaccattcaaagacacatcaagctttcttttaa

SEQ ID NO: 235925 - DNA, 360 bp, Homo sapiens
agtgtgcttccttccttctgttgaggatgcaagatgcaagtttgtcttttactttggaggggacagccctgcatgcccctaaccactggacccataacacttcactgcagtggccactcttgaagctctgtaaggttaatcttcaccttctgtagtgcacacgttttgccaaagaattcagcgtactttcctcctcttactcatccatcccaatctatgtgatattgccaatgaaacgaagagatttagtattctgtgagatgtctgatttgtccagatctcttaaggtgatatttatagaaggttgaggagttaaagtagccctgaggcaagctatcaataaatgtattataaatccca

SEQ ID NO: 235926 - DNA, 560 bp, Homo sapiens
ggaagcatggaggtgtaggatgacatgtaatatttggaagacccattgcatttccaaggaaccttctagcaggatggccctggagtctctggcagcagtggacatggtcctgaattggagtgctgtgaatgttcactgctgacctcacggtttgaagacaattccttgagaagggcagaggggacccgaatacgggggctctggccggccctgctgccagatgccagcagccgtgggggcttgcccggccagccctggcttttcccaaccctcagagtgccccttgtgcatgcagcagacactggtgctggtcccattcccgggagcacgcggtgccactggctgtgtcttgcctggccaggtgttggtttgatagactcgaaaacctcatttggatttggcaggattttccctaacatcagtcattctggaaaaaacactttgaatttttaccatatctgggtatttttaccatatctgggtacttgccactagctctatttacttcacgtttcttaaaattgattcattttattacttaaataaatgtattttaaaag

SEQ ID NO: 235927 - DNA, 507 bp, Homo sapiens
tccctccccttcctctctctgcccgcgcgaagctcattcattctagaggcgggctgccagtcctccccggccgcccatcccggcactgcaaatccgctagacgctttgtctcgcgccggccggaaactggggcgcgcacgcgagcgcgcgctcgcgctccagctccccgcacctggggcctgaggggccgcctctccgcgccggctccccggattcgagtgcgaaagcgggagctccttctcggcagtcccaggcgcgcacttaccacgtcccagcgggtatccaaaatctagaaatgggcatcacggccccccagcgctacagctcgagccccctccgcgacccctgctccgctatgaactctagattctttctcctttccggagaccgagaccctgttccttcagaaggacgcgtgcatcctggcctctgctccctccccacggcagaacccggtgagctggtcgccgcggttgcgcccccgccctccttggcgctaacgcggcc

SEQ ID NO: 235928 - DNA, 192 bp, Homo sapiens
gtccttttttccttcgtgctttatttctctttcgttccctgtgtttccttcttttttctttcctctctgtttctttttcccttctttccttcgtttctttcctcattctttctctctttttcgtgtttctttcctttccgtctggtttcgcttccggtccacggccgccctctgtgtctctcgcagccgtat

SEQ ID NO: 235929 - DNA, 443 bp, Homo sapiens
cagataagaaaaggtaccccaaggcacaagtcatcacacaagagacaaggcacccaagagaaactttaactcaacaaaggggggtgcgctcacaaggaagttgtgtataagagccacgtgactttaagaggggaggaattatttccaactctaaatatttgattcaattcaacaaatgttccctgatgccaaaggtcaaggaaggcttgtagagagtgcttgtattttgaaagtgctttgaaaaatgtaatgaattctaaggacctcaagtctaagagaatgaagtggtgtctagcaaggtggtgcttttgtgattcacctcctccaaagcaacctctttttttgttttgagacaagatcttgctctgtcatcttgctttgaaaagtgtaatgaactgtaatgtaaggacctcaagtctaagagaatgaagtgctgtttagta

SEQ ID NO: 235930 - DNA, 455 bp, Homo sapiens
taccaagcccaaccccatgtgtcatcctacacagtagctaggacgacattagtaccccatttcattctcccgtgtctcagtctctgtatctgaacaacaggacaaataacagtgtctacttcattatgctgtcatcattattgaatgaaggttcaactctccatattccattttttaacaaaagcttcaactcacatttattggcaaatgttgatgtcatccaggtccagttccatgctgccaacagaagatccattccttatcttccagcgatgcgctgtacttctgaacagcttcgcctgcatttggtaagcaagagtcgtcagtagcctggaatcaatgagaagtttacaaagttgttgagaggtcaggcttttgtgaatgaattataagaggataatacaaaacaaaaataataataaaatgccctagggaaaaataatttatcccatgcc

SEQ ID NO: 235931 - DNA, 235 bp, Homo sapiens
tatttaaaatatatatgtgtatatttgtgtttgagatatatatgtatatttgaaatatatataagttctgaagcagtcttatttacaaaaaaagagtgttttttcctctatcagtttttgtcacaacctatacatgatcctgaacaactcagatgcagtcagctcatccttttctagatatctcatggtcctgcagagatcattaaacagttttggaaaactagcatatatgttt

SEQ ID NO: 235932 - DNA, 558 bp, Homo sapiens
acagttaggtttacttctcctgaggggggaaataacaggagtcattaagaaataatttttaggcagctagaaatggtgtaagttctcggtggaattttcctttaataaaaagcgacccccaaaccatttctttgctaacagaaagcagcttgaaaaaccagactggcaagcactgatatgcaaatgctggtggctagaagccaggtccacccaatatggtggctttcgccctcctctttttgtcaccacgtgtgccaggtgtcatggcagcctccagataaaagccacatgtgcaggacatcatggtgacctgcatttgcatattaaaaggctaaggtgggagggccagttttttttacaggctgcatgaatgtcacacctggtcaaaccaatcccctgggccctttgcaaatcagacactgcctcctccagcctcccaatataatcagctgttttccattgcatgtgggattttccattaggatccctcctccctctgtatgggggagctgttttcttctttcttgcctattaaactttctgttccttaaaaccact

SEQ ID NO: 235933 - DNA, 570 bp, Homo sapiens
agagtgagtagttagcatatcaacaataatgattagcactgttgttctgcatatcaagattatgttgtggaagaagcactgtacttattttgactacacaaaaacaaaagagtaactttttggcttaatttgtaagttggcatcaatttaattcatacttatggaatgagaagtgattacaaaatataaaatacctcctacatataataaatatataattaatgggccttggaatgtaagttgagtcccggttattaaaaaatcaatctgatttgaaacaaagtttataaatgtaagtaataaaaggttctgatgtcatttttcccctgtactctttgctgaatgctgatctaaaggagatcttacatatagctgatgtcttggttcattacaattctttagtattctcacaaggtgttaactttgaattttagaaaaaccttagaggctctttgtaaaagccaaatgttctccttacttctaagtttccaagttggtcttggagttaactgaaaatacaggctttttaatacaattggtaatacaacctgattcttaaagttcattgcc

SEQ ID NO: 235934 - DNA, 1383 bp, Homo sapiens
  misc_feature (696)..(696): n is a, c, g, or t
ttattagctctaatggactaagagactaatgggccttgtgtgcccggcgaaggtgctttgacctaccctgtgggtgatggggagcctctgaaggatttgaagcagggcagagacgtggacaaatctgccaaaagaaaacaaacaaacaaacaaaaacatcaacagcatgttatgttaatgtgcgattccatttaggcttttggaattttgaaaatagctcaaagacgccgttatgaccttgacagaggccaggttggaaatttctgaatccaatgattctttagctcccctctaagtctgacagtctaagattccataataaggaaggtacagctattgccaaaacgtataatgcatcacagtgtcagactttgggattatctgctgctgggggttttccacaccactgctccccttcattagtggggataattgagagttgactgcagtcgttactgctgttgtgatgggtatttgaagctaaattcgggcaagtaggagatgtgtgaatatttatctcagctgcagaaacttaatgcagtgtggcattaattaccctgtctgagcctgctgtcttcttctgtttttaggtgtcattttcagttggataaattagtttccaaaattagaatagagcaaattgtagggtgagatcaaggcagcctgacttcttggggcatccaaaaagaagaatgngctgagaacatctatccaggaaacattaatatgcgtgcttgaagcccagcacaggcaaaaggaaatatttttccccagtagttgtacttaactatttttgactccacctactgcacttgtagaacacaaacacacaataaagttacatgtttagccttacaacatgtatttgaaatagttcaagagactggaaaggaatagatttggtgtttaataaatcataatcttactatagattttgctacatttgattttgagagaataaagccaaattggagtgtatttaggacaaagggatcagaactgtgaggaaactagaaacagcattataatcattcagtaattcaacagactctcattgaggacctactgtgctaggttcatatttgtaaaatggcagaaggaggcctggcgcggtggctcacacctgtaatctcagcactttgggaggccgaggtgggcggatcacaaggtcaggaaattgagaccatcctggctgacacagtgaaaccctgtctgtactaaaaaatataaaaaattagccgggcgtggtggtgggcacctgtagtcccagctacacgggaggctgaggcaggagaatggtgtgaacctgggaggccaagcttgcagtgagccgacatcgcgccactgcactctagcctgggcgacagagtgagactccatctc

SEQ ID NO: 235935 - DNA, 2969 bp, Homo sapiens
  misc_feature (2541)..(2541): n is a, c, g, or t
ttagctgaattccggcagggggactgcaaaggccaatgtgcatgaaaaagactatattcctgttaagggggaagtttgtattgccaagtacactgttgatcagacctggaacagagcaatcatacaaaacgttgatgtgcagcaaaagaaggcacatgtcttatatattgattatggaaatgaagaaataattccattaaacagaatttaccacctcaacaggaacattgacttgtttcctccttgtgccataaagtgctttgtagccaatgttatcccagcagaagggaattggagcagtgattgtatcaaagctactaaaccactgttaatggagcagtactgctccataaagattgtcgacatcttggaagaggaagtggttacctttgctgtagaagttgagctgccaaattcaggaaaacttttagaccatgtgcttatagaaatgggatatggcttgaaacccagtggacaagattctaagaaggaaaatgcagatcaaagtgatcctgaagatgttggaaaaatgacaactgaaaacaacattgtcgtagacaaaagtgacctaatcccaaaagtgttaactttgaatgtaggtgatgagttttgtggtgtggttgcccacattcaaacaccagaagacttcttttgtcaacaactgcaaagtggccgaaagcttgctgaacttcaggcatcccttagcaagtactgtgatcagttgcctccacgctctgatttttatccagccattggtgatatatgttgtgctcagttctcagaggatgatcagtggtaccgtgcctctgttttggcttacgcttctgaagaatctgtactggtcggatatgtagattatggaaactttgaaatccttagtttgatgagactttgtcccataatcccaaagttgttggaattgccaatgcaagctataaagtgtgtactagcaggagtaaagccatcattaggaatttggactccagaagctatttgtctcatgaaaaaacttgtacagaacaaaataatcacagtgaaagtggtggacaagttggaaaacagttccctggtggagcttattgataaatccgagacgcctcatgtcagtgttagcaaagttctcctagatgcaggctttgctgtgggagaacagagtatggtgacagataaacccagtgacgtgaaagaaaccagtgttcccttgggtgtggaaggaaaagtaaatccattggagtggacatgggttgaacttggtgttgaccaaacagtagatgttgtggtctgtgtgatatatagtcctggagaattttattgccatgtgcttaaagaggatgctttaaagaaactcaatgatttgaacaagtcattagcagaacactgccagcagaagttacctaatggtttcaaggcagagataggacaaccttgttgtgctttttttgcaggtgatggtagttggtatcgtgctttagtcaaggaaatcttaccaaatggacatgttaaagtacattttgtggattatggaaacatcgaagaagttactgcagatgaactccgaatgatatcatcaacatttttaaaccttccctttcagggaatacggtgccagttagcagatatacagtctagaaacaaacattggtctgaagaagccataacaagattccagatgtgtgttgctgggataaaattgcaagccagagtggttgaagtcactgaaaatgggataggagttgaactcaccgatctctccacttgttatcccagaataattagtgatgttctgattgatgaacatctggttttaaaatctgcttcaccacataaagacttaccaaatgacagacttgttaataaacatgagcttcaagttcatgtacagggacttcaagctacctcttcagctgagcaatggaagacgatagaattgccagtggataaaactatacaagcaaatgtattagaaatcataagcccaaacttgttttatgctctaccaaaagggatgccagaaaatcaggaaaagctgtgcatgttgacagctgaattattagaatactgcaatgctccgaaaagtcgaccaccctatagaccaagaattggagacgcatgctgtgccaaatacacaagtgatgatttttggtatcgtgcagttgttctggggacatcagacactgatgtggaagtgctctatgcagactatggaaacattgaaaccctgcctctttgcagagtgcaaccaatcacctctagccacctggcgcttcctttccaaattattagatgttcacttgaaggattaatggaattgaatggaagctcttctcaattaataataatgctattaaaaaatttcatgttgaatcagaatgtaatgctttctgtgaaaggaattacaaagaatgtccatacagtgtcagttgagaaatgttctgagaatgggactgtcgatgtagctgataagctagtgacatttggtctggcaaaaaacatcacacctcaaaggcagagtgctttaaatacagaaaagatgtataggangaattgctgctgcacagagttacagaaacaagttgaaaaacatgaacatattcttctcttcctcttaaacaattcaaccaatcaaaataaatttattgaaatgaaaaaactggtaaaaagttaagtaagttaaatcgtatgttttcgcctcttctgtgatcaccaataggacatcttcaggcatattggcaggatagagctaatggagtgaaacctattgtaaggctgtactttcgtgatttaatgacctgaggtttggtcataatgcttctgctgtttttgtaggtttatctgatcgttttcctttgctactgctaatggaactgaacccccaggggtattccagttgtaatagcctttccttactgttgtttggttctgtgaatgcctatgttattgatatgtggagggccggaattcttttgcta

SEQ ID NO: 235936 - DNA, 2652 bp, Homo sapiens
  misc_feature (2541)..(2541): n is a, c, g, or t
ttagctgaattccggcagggggactgcaaaggccaatgtgcatgaaaaagactatattcctgttaagggggaagtttgtattgccaagtacactgttgatcagacctggaacagagcaatcatacaaaacgttgatgtgcagcaaaagaaggcacatgtcttatatattgattatggaaatgaagaaataattccattaaacagaatttaccacctcaacaggaacattgacttgtttcctccttgtgccataaagtgctttgtagccaatgttatcccagcagaagggaattggagcagtgattgtatcaaagctactaaaccactgttaatggagcagtactgctccataaagattgtcgacatcttggaagaggaagtggttacctttgctgtagaagttgagctgccaaattcaggaaaacttttagaccatgtgcttatagaaatgggatatggcttgaaacccagtggacaagattctaagaaggaaaatgcagatcaaagtgatcctgaagatgttggaaaaatgacaactgaaaacaacattgtcgtagacaaaagtgacctaatcccaaaagtgttaactttgaatgtaggtgatgagttttgtggtgtggttgcccacattcaaacaccagaagacttcttttgtcaacaactgcaaagtggccgaaagcttgctgaacttcaggcatcccttagcaagtactgtgatcagttgcctccacgctctgatttttatccagccattggtgatatatgttgtgctcagttctcagaggatgatcagtggtaccgtgcctctgttttggcttacgcttctgaagaatctgtactggtcggatatgtagattatggaaactttgaaatccttagtttgatgagactttgtcccataatcccaaagttgttggaattgccaatgcaagctataaagtgtgtactagcaggagtaaagccatcattaggaatttggactccagaagctatttgtctcatgaaaaaacttgtacagaacaaaataatcacagtgaaagtggtggacaagttggaaaacagttccctggtggagcttattgataaatccgagacgcctcatgtcagtgttagcaaagttctcctagatgcaggctttgctgtgggagaacagagtatggtgacagataaacccagtgacgtgaaagaaaccagtgttcccttgggtgtggaaggaaaagtaaatccattggagtggacatgggttgaacttggtgttgaccaaacagtagatgttgtggtctgtgtgatatatagtcctggagaattttattgccatgtgcttaaagaggatgctttaaagaaactcaatgatttgaacaagtcattagcagaacactgccagcagaagttacctaatggtttcaaggcagagataggacaaccttgttgtgctttttttgcaggtgatggtagttggtatcgtgctttagtcaaggaaatcttaccaaatggacatgttaaagtacattttgtggattatggaaacatcgaagaagttactgcagatgaactccgaatgatatcatcaacatttttaaaccttccctttcagggaatacggtgccagttagcagatatacagtctagaaacaaacattggtctgaagaagccataacaagattccagatgtgtgttgctgggataaaattgcaagccagagtggttgaagtcactgaaaatgggataggagttgaactcaccgatctctccacttgttatcccagaataattagtgatgttctgattgatgaacatctggttttaaaatctgcttcaccacataaagacttaccaaatgacagacttgttaataaacatgagcttcaagttcatgtacagggacttcaagctacctcttcagctgagcaatggaagacgatagaattgccagtggataaaactatacaagcaaatgtattagaaatcataagcccaaacttgttttatgctctaccaaaagggatgccagaaaatcaggaaaagctgtgcatgttgacagctgaattattagaatactgcaatgctccgaaaagtcgaccaccctatagaccaagaattggagacgcatgctgtgccaaatacacaagtgatgatttttggtatcgtgcagttgttctggggacatcagacactgatgtggaagtgctctatgcagactatggaaacattgaaaccctgcctctttgcagagtgcaaccaatcacctctagccacctggcgcttcctttccaaattattagatgttcacttgaaggattaatggaattgaatggaagctcttctcaattaataataatgctattaaaaaatttcatgttgaatcagaatgtaatgctttctgtgaaaggaattacaaagaatgtccatacagtgtcagttgagaaatgttctgagaatgggactgtcgatgtagctgataagctagtgacatttggtctggcaaaaaacatcacacctcaaaggcagagtgctttaaatacagaaaagatgtataggangaattgctgctgcacagagttacagaaacaagttgaaaaacatgaacatattcttctcttcctcttaaacaattcaaccaatcaaaataaatttattgaaatgaaaaaact

SEQ ID NO: 235937 - DNA, 789 bp, Homo sapiens
gttttgtctcccagcatgtgggaaagatgtcatccattgcttctgtttcctggaggcctgggagcaaggagcccaggaacagtatcacgaagcttgagataacaccagttacattatcctgactgcccaaaaggcagtttttttgttttttttttttatactttaagttctggggtacatgtgcagaacgtgcagttttgttacataggtatacgtgtgccatggtggtttgttgcacccatcaacccgtcacctatattaggtatttctcctaatgctgtccttccccaacccctccattccccatcaggccccagtgtgtgatgttcccctccctgtgtccatgtgttctcattgttcaactgtcacttatgagtgagaatatatggtgtttggttttttgttcttgtgttagtttgctgagaatgatggtttccagctttatccatgtccctgcaaaggacatgaactcatccttttttatggctgcatagtattctatggtgtatatgtgccacattttctttatccagtctatcattgatgggcatttgggttggttccaagtctttgctattgtgattttttttttttttttttttttttttaagacagagcctcactctgttgcccaggctggagtgcgatggcatgatctcagctcactgcaacctccgcctctcaggagaattgcttgaacccaggaggtggaagttgaacaatcacttgaacctgggatcacgccactgcactccaacctgcctgggtgatagaatgagactctgtctc

SEQ ID NO: 235938 - DNA, 455 bp, Homo sapiens
ctgagacacgcaaagtgactccagtttctgtgatttcttgccaaaattctatcttatcagccttctcaaaatacatgcagatgagatcgtcaaagaacaatgcacatacatttgcttcatcaacagtaagactcagtcccctccctgtctatggacctctgtgaaattcgacaggaaagtgacaaagtggaccaaatggagcacacggagaatgaaaataaagtggtaccagtagcttctggccaaagctcaacaaatttaagcaaatacatttagataagaaattctggtgtctttaatattagaataactttaaaatgaacctaataataagtcatttaataataattaaattggggtcaggagctgtggaaatcattgtgaactcgaggccacaaaaggtttatttccaattctctcaccaaaagtggtctcctcaaatactcacggtcagc

SEQ ID NO: 235939 - DNA, 350 bp, Homo sapiens
aagagagattcaagtttagaccaaaaaccaccttcaaacatatttaagtcttgttatcttttaaaaatacacaaataactaacccactcaatcttctagcctctatgaagtcttctatttgcaaagctgacaatctctgatctcctgctttcacactctatgcgacctcttccctgctgcttttataaaaaatggcaagtgcatttactgttctaataaatgtgctcattagtaataatcagagacctcactctctaaatccaggagccctttttcagttttcattttcctcaacctgtcatcacaagacccttttgatgatctattttttaaaaagatattctggcttc

SEQ ID NO: 235940 - DNA, 327 bp, Homo sapiens
agtttttttgataaacaggtgttgataaacaggagtcaaattctttttttgtatctacttataggatcatgtgatttttcttcattagcttgtggatatgatagattatactaattgatttacaaatgttgaaccagctttgcatacctgagattaatcccacttggttgtaatgtatagtcctttttatacattgtcagtcaaatttgatttgttaatattttttgaaaaattttgcatctgtatctgtgagagttgttggcctgtagtttcttttttgtaatgtcattgtctggtaggcaattaaaaagatcagaattttccctt

SEQ ID NO: 235941 - DNA, 351 bp, Homo sapiens
ggaaggatgatcagtttgattctggctcccctgattacaccttggctccaaggacataaacatccaagcctggtaaagcctatgcaagagcgtctggggctggagatagctttcctagccctggacgtggaagaaagtctactttttatccgccccagcctccttcccctcactcctcccgtctttcgctcgctccacctcttttgttcagtatgtgtaacttgaagctactttgtactggtgggtatctgactggccccccagatacagaatatgtattgttcttcctggggcacagcatggaatcccctttaaacttaaataaaacaaacctaaattaaaaatgccaaa

SEQ ID NO: 235942 - DNA, 314 bp, Homo sapiens
ggaaggatgatcagtttgattctggctcccctgattacaccttggctccaaggacataaacatccaagcctggtaaagcctatgcaagagcgtctggggctggagatagctttcctagccctggacgtggaagaaagtctacatctcatccctggcagcagcctggagcagctaagaaaatgggtttaggaagtctcagtccattttcagaagaatagaaactagtgcaagcatgttctggggtgggaactgagggacctccaatatataaaatagaaaatcaggcctgagggtaaggcaacaagaccagtaac

SEQ ID NO: 235943 - DNA, 258 bp, Homo sapiens
ccacccccaaaacacaccctcctcaccttcagccccaatgccccattcccactccttatccttatccctcttcttcagccccacgtatcccaagggcctcaactccctcagcccctgaaacccaccgtaacaactctcttcccacacaccctcctcaaatccaccatctcataaagcccctgcacttagaggtgtcagtctcctacctggctctcttccctccttaagttcccaaataaatatatcctgacacataga

SEQ ID NO: 235944 - DNA, 196 bp, Homo sapiens
gtgtggtggaagcagtatgcactgctgcagtgcaggacattgtacgtctgcactgttcagactctccttgggtaagagacttattgtcctggcttctgagaatggtggtagccccttgaggaattgcctaagttgcagagagctgtctcgcccaaggtcagcctttcctggggtgtccaatatccatcgactcatc

SEQ ID NO: 235945 - DNA, 401 bp, Homo sapiens
ggattcttaaattttttgatggtttaaaaaagataatagatatttatcaatttatttttctgtcttaaagcacatgtaacataattttttgtactgtgctataatatgttgatgtctctggaggtcgtgggatgtagctttttgctggacagagagttcagtactcatggcagctgtttatagttttttgatctccttgtcatttgttttgctcctgtttcccttgtaatgtgctggttctgccctaccctgaggaaccaagtttcttagaatagcataggtgtcattctgtgcctatggcattagttttcctacttggatttggattttcgtttttgattttttgtattcttctgattgtgttacaaatatttgtgaatatttaataaatgacttctaac

SEQ ID NO: 235946 - DNA, 383 bp, Homo sapiens
tctcttatttctctgctccgtccaagtgctataaactctttcctggatttcttagctcttttgaagataattttgtgcatggatggtttttctttttttaatttttaatttttgtgagtacatagtaggtgtatatatttttaatggtttttcttttctttttctttttcttttttttttttgagatggagtcttgctctgtcacctaggttggagtacagtggcacgatcttggctcactgcaatttccacctcccaggagaatggcgtgaacccgggaggcggagcttgcagtgagccgagatcgcgccactgcagtctggcctgggcaaaaaagcgagactccctctcaaaaaaacaaacaaacaaacaaacaaacaaac

SEQ ID NO: 235947 - DNA, 592 bp, Homo sapiens
aaggtatacagattgaaaaggaagaaataaaaactacttgcaaatgatgtatacaaataaacctgaggattctgcaaagactatttaagctaatagctaaatgtaggatgtttgcaagatggatcaatgtagaaaagtaaattgcagctgggcatggtggctcatgcctgtaatccaaacactttaggaggccagggtgggcagatcacctgaggtcaggagttcaacaccagcctggccaacatggtgaaaccccgtctctactaaaaatacaaaaattagctgggtgtggtggtacacacctgtagtcacagctactcgggaggctaaggcagaagaatggcttgaacctgggaggcagagattgcagtgagccgagattgcactccagcctgggcaacagagtgagacttgggggaaaaaaaaaaaagaagaaagaaagaaaagaaaagtaaatgcatttctacataccaacaaaaacaattagaaaatgaaatttgaaagacaatgctgtttaagacagaataaaagtctgttttagtctgttgaggctgctgtaataaaataccatagaccgggtagcttatgaaca

SEQ ID NO: 235948 - DNA, 711 bp, Homo sapiens
gcaagtaacttaaacactgtactctgatgacatgtactcaattgtagggggaaaactacaaatattcttcttaataactttgtttttcatagtgatgtggaattatttcatgtgtatgtggattgagaaaatgactaagtgtgttgatgtttgggagaaccccctgtgaagaagagggacacttacatggagtaggcatcaaggaagaagttggtgcagttgacttggaatcagcatcatctatatggactcattatttctcaaacatgcacatatgtacacacttcttccagctctagctagaactaaaaaggcctagaggcagtaataccccagtcacaaagaacacacctagttcccagtcttattttcaaaataccatgcaccactgaaaaggatcttgtgcagcttggagaaatggctgattccaggatgggggcagcaaagacacaaaaggagcctagaacaagaagaatgataagcaggatgagaaggaagaatacaaaatgagcccagaattagcagggggaagagaagccaatttttaaaatgggcaaaacattggaacaggcacttcaccaaagaatgcatataaatggaagataagcatatgaaaatatgctcaacatcttcacccttagcaaatgaaaactaaaaccacaaggagattccactacatgcttattagaatggctaaagtgaactgacagt

SEQ ID NO: 235949 - DNA, 1658 bp, Homo sapiens
taaacagggaaatgtctattgttttttccaatcgagaaaccaaataaaacgtacaaatatctcatgagctttcctcagactttcccagaaagagtttatatttgtgctgagacaaagcacagagaagttgcaacctcaaatggcttggagacagttcacattgaaatagctgaagagttaggtaaatctgtagaaataagacttccactggattaagtgtgaagaagaaaatatgactttgttttctctgtgttatagcattctacagtatcataaactccaatggagaaccacatttggggcgtggctgaggtggggctaatatggtagcatgtgctaaactctttctaggatattctattgcctctgagcttatacccagctccattatctatatcagctttttgagcttaagtcttcatggcaactgccagctaaatgctcggaaaaaaaccgtttggagtctacccccttctcctaatttatttctcctctaaatcgtggttcactggtgccagtcatggcagagggtgatcttcttaggatgcaaattagataatcttcataacataaagccctaactttttaccttagcccggaagagccccacatgatctgaactccagcctggaaggattaaaaaatctttttgatatatttgtacatatttatggagtacatgtgaagttttgttatatgcataaaatgtgtaatgatcaagccagagtattcagggtattcgtcacctgaacatttatcatttctacgtgttgggtgcattgcaagttctctcttgtagctattttgaaaaatgcaatatattgttattagctatagttaccctactctgctatcaggcattagaacttattttttctacctaacaggagaaggattttaatgtcagctgagttgagggggcgcgtcacagagggagtagaggtgtggccattagttggtagaagagcaacattcaaaatacagtcccaccatttaactgtttcctgtttttatcaccctggcagcttccatgctgctacttctgaagtcttttcattatagtataaacagctctcattcaatatatgactagtacctgtttaaaaaatatggcactttgatagtatatgcttaggggaaggaactgcttctccttctctgccaccttatgctgcttctctctagtgcctttctgtctctctacctgatctctttttcagttcctttattttgcaaaactacttttctgacctcagaaccttcacacaagctactccttcctcctggaagctttccctccctctctttgcctggccactttctactcatcctttaaaactcagtgtaactcagtcctcatcaaagagggctttctggccaggcacagtggctcacgcctgtaagcccagcactttgggaggctgaagtgggcagatcacttgaggtcatgggttcaagaccagtctggccaacttggtgaaaccctgtctctattaaaaacacaaaaattatcttggagtggtggcaggcacctgtaaccccagctactcaggaggctgaggcaggagaatcgcttaagcccaggaggtggaggttgcagtgagcccagattcgcgccactgcactccagcctgggtgatagagtgaggctccatctc

SEQ ID NO: 235950 - DNA, 457 bp, Homo sapiens
cactagtaacaaggaggctgtcttggaattaactacataattcagctgttgctattcccagtagctccagttactgtaccactcatagcttgatttcccagtcttagtcaaaacacgatctttaacccacgtgttgtaggcaaaaccatatccatcacaatgagaagtttcacaaaaaaagacaaattaagtaagcatttacttttttattattgtttattctcatcttggatgattggtaataaattggggtaactcacattatttatctggaccttcatttccatataaatgaaatgaggaaggaggactagatggcttctaagatatcttctagctcttttaaataccattcttctacaattctaatttattctccaaaattatggagttgaatttctggcacattaatgtgaactatggaacattttattgcttaaaaaaaattttatttcag

SEQ ID NO: 235951 - DNA, 516 bp, Homo sapiens
gcttgggctgaagatgttgctagtgctatggagaaggctaatggcactgagaaatgtcattctgaaagaggaggtgggtcaaagagtctgccagatgaagggtcagagtttggtaaggagtacagtgaaatggaaaccagtcttgttgaaggcactttgtagctctgtgcccttgggtaagtcactgtctctggaggttcatttcttcatctattaaatagggaagttggagtggatgacctataagggctgttctcatcctaatctcttacattttacgattctagcagaatgaaatttaatgaatcaattttagctacacttggaaattcaacaatgtttcatagtaatgttacacccactgggagagcctgaagattttaatttatattccttccaaaagagcagagaacagcatttaaaacccttaaggggtacagcaatacacaaagcattttattatggtgatctaagagaaatttacatcagaaagagactggcattttaccaggttac

SEQ ID NO: 235952 - DNA, 359 bp, Homo sapiens
aaggtctcactctgttgcctaggctggagtgcagtgttgcattcacagctcactgcagccttgacctcccaggctcaagtgatcctcctgccttagcctcccaagtagctagaactacaggcgtgtgccatgatgcccagccaattttttttttttaatttatttttagcagagatgaggtcttactatgttgcccaagctggtctcgaactcctgagctcaaacgatcttcccatcttggcctcccaaagtgctaggattataggcatgagccaccatgcccagccccaaccacttaaaaattgaagctgcttcccgtttgccattggtactttgtacacctcatcatattcttcttc

SEQ ID NO: 235953 - DNA, 130 bp, Homo sapiens
accagatagcctcaggtttcccaaatcgcctctcctgctgccctggcttctcaacaccgtcacctgtctaaaagcttttcttggtgtgggctggaagaatttggataaagtctaccatccccgctcttcc

SEQ ID NO: 235954 - DNA, 399 bp, Homo sapiens
agatgggggtttcaccatgttagccaggatggtctcgatctcctgaccttgtgatccacctgccttggcctcccaaagtgctgggattgcaggcgtgagccaccgtgcccggcctgagttgacacctaatattaaccatcacacttacctagtaccatatacagagattcaccgaaaatcaaccatagaccataaacattagacctaaagctataaaacctctaaaagacaacataggaataaatcttcatgaccttaggttaagcattggtttcttagatttgacaccagtaaagcacaagccacaaaagagaaaataggtgaattatcaaaatcaaaaagatctgtgcttcaaacaacaccatcaagacaatgaaagacagagaatagggacaaaaa

SEQ ID NO: 235955 - DNA, 296 bp, Homo sapiens
cctccataggaaaaaaataatttcccaataacagattccaacaaaagaaaatccccaaaaccccagaaaaagaattcaaagttatggactacagttcagtgaaatgcaagagaattctgaaacaaaaatgcagaaaataaaaacaattcaagatattaacaagaaaatttccaaatagattgatatcgtaaaaaatcaaacagatattctataataaagaattccttgaatgaaatacaaagtacacttcaaagcttcgacaacagactacacaaaacggaagaatttcagaacct

SEQ ID NO: 235956 - DNA, 905 bp, Homo sapiens
gcctctcccctagtggatccgggctgagccttgcggcttcggagcacagcggctggttttggtcgcaacgatccctggatccctgacctcggagcccggtggggtagggctgaatgcatctagggaggaaaggtacctcgcaggccccagaccattttgccttaccaaaagatgacccaggccagttggaaaggtggggagtcaggacggaaaggcacacctaggggagaagtggagggaaagtgccagcctgtgtggggcgtcgcctcttgagggatttggaggcatgatagaggataccctatttcggggctcctgcaggcttgtccttaggtgcatgcatctctctaattcgttttcttttctgttttctgaatcccaagggatcccaaggagggagaaaggaaatccttcccagggagaggtgggggtctgggaggcgatatttgggcggaagggaaaccgaaagcgcacgggttgtccgcaccgccgctgctctggaccagaggcagaggctgtaacatcccggagctgccagtagagtccgccttagaccaagttcacagccaggctggggcctctgaggcgtcagcgagcggccgcgcaaggtggccccgggcccccccgcatcgttgggacactgaactctccctctagccctgtgagcacagcggccccttctgctcccgaggagcccctgctccaagctctctccacccttcaccccagaaatgcccttctccaggtcagcccattctactgctcgccataggtctcctcatccggcaacctcggccccactcgggtgtcaaaaatgaagaagggtgggtggtcaaaagcccttccaggcatcccaatagaagagaccgctgaaaatgcgggaggtgggttccgcgtctttttcc

SEQ ID NO: 235957 - DNA, 421 bp, Homo sapiens
tgggtggcttttttttttttttttttttgagacagagtttcgctcttgttgcccagactagagtacagtggcgcgatctcggctcaccacaacctccacctcccgggttcaaacagttctgcctcagcctcccaagtagctgggattacaggcgtgcaccaccacgccctgctaattttgtatttttagtagagacagggtttctccatgttggtcaggctagtctcgaactcccgacctcaggtgatcctcccaccttggcctcccaaagtgctgggattacaggcgggagccaccatgcccagtcatgagtagcttttttaaaatggtgtgttgcttttatttttcttttctcttcctttctgtccctccccctccttctttccctccccttcttcccttcatcccttcatctcgtcct

SEQ ID NO: 235958 - DNA, 407 bp, Homo sapiens
ggaaggcacctgatgaccacaactctgttcccctgctctctcaagggctctaagcactaaggaggaagtcaggagtagccctgatagggtttggactccaaaaggaaggaccagccagacacagtggctcacgcctgtaatcgcagcactttgggagacagaggcaggcagatcacttgaggccaggagttcgagacaagtctggccaacatggcaaaactctgtatctactaaaaatacacacacacacacaaaatagccaagcacagtggcctgtgcctgtagtcccagctactcgggaggctgaggcaggagaatctcttgaactcaggaggcagaggttgcagtaagcctagatcacaccactgcacgctagcctgaacaacagagcgagactctgtctcaaa

SEQ ID NO: 235959 - DNA, 412 bp, Homo sapiens
atgtggggacagactggaggactggagcaagtcaaatatggtttagtgacattgctgaagtcagaaccgaagcagaaaaactgtatataattttaaagagtcctcaaagcccagcactcttgactttcaatctttttatggattctttgaagaaatgccgtataatcagtgctcgtggatgaatgcacagaggatgatagagcatggaaaaaccccaaacattgatgagtctgaattgaacagtgattcagaagaattggactcagtgtaaagtagtttgaggaataacaaccaagttatttcacttgtattttcatttttatgtatgcacaatagtaatatgtgataaaaatctgtctaattaagtctcaaagaactcttacaataagtaaaattaaaaattctaagtgat

SEQ ID NO: 235960 - DNA, 464 bp, Homo sapiens
aggtgaagcagtgaatgctgataacttcagcaagttatccagaagatctagctaaaataattgatgaaggtggctacaataaatcacagattttcaatgtagatgaaacagctttaaattgaaagaagacaccatctaaaactttcacagctagagacaagtcaatgcctggtttcaaagcttcaaaagacaggttgaccctacttttaggtgctaattttaagttgaaaccaatgaatgacctcattttaatttgattacctctggaaagttccagtttccaaagaaggtcacattcttctgggaatgaggacgtcaaaatatcttttttggtgggacacaatggaacccgtagcatcatccttctgtatattttccattttcattaattgtgttcagaattacagatgtccactaattaataaaaaattgagcttttagcttttatttcttggttatccagt

SEQ ID NO: 235961 - DNA, 453 bp, Homo sapiens
cctcacccctttgccttttccaagcctgactccatcccaaggcagggctccctggaaacagcagctctcagtgtcactggctctcagagaagcgggaaggaaccgccttcctaagggaaatgtttcctaggagaaacttctgcattagaagttgcagagtggtcacccctggggcacatctaatctgcaggcttgttttgtttgttaatatttgaaaatcaagacttctggcattctttggaaaagtcaggagacctggtaatattaagcttgcattcccacagggcagcagagggccggagcctagaggcggtggccctttgagatggagcatagcgtgtgttctccaggtctccaagacccctccagaactcccctttccctctcctttcctggagactgaagctgcccagcagttgcaatagtgaaaattaaaacggctgtaccagaata

SEQ ID NO: 235962 - DNA, 479 bp, Homo sapiens
cagacttcatatgccgaggcttctgctccaaaagtgagtgtgaacatggtcaagactgcacgatctcctgaaccgtctccacagccactctgggtcagcgccacaagattctgctgattataggcaagtttctaagccagcccagaatcaaggaggcaaattagaccccacttttgaagggaggtgtgtgaaagaatttatgaaccatgtattcaatctgccatgcagacaggtaggtcagacagagagctctgaaacagatgccagccccaagagcctaatgaatgtgtgggagctggcggggagagctgaattagtcaacatggagcactttggaagtaggtagttggactgtaaagtcaatttatatctccctatttcataaaaagttctgaatgtatataaaaagcattgataaataaatattctagaagcatgaataaattcagcctgaacatcttaccgtaatcccaagtgaa

SEQ ID NO: 235963 - DNA, 823 bp, Homo sapiens
tcagggagatgtgaggacccacttattgtaataaccaaggccaggttcggaggtggggggcaacgcaccttcatctatcagccctttctgactactgagctactgatctactgaactggaaacaccatactccctcctacatggagaagcctcaagctcttatagatctgacgcaatccgtctttctgacacacagtccaacctggccagattgcaggcagcttttcctaacgttatttaacactaaaaagcgcaggagagtaacataggcagctctcccctggctaaaaccccatgcaccagcagatgcagtgaatgctcaggcatacactcaaggtcagttctcataccaagatcccaactggaacccagaggatgcaactcagcttcagcatttgcaaaggtaccaagagacacttctgcaagggataaaagctggtggaaagaaagcaattaatatacgaaaaatttcaaaagtgcttcagagagctgacgagagcccaagtcagttttataaaaaactttgtgaagcattccggccttacaccctatttgaccctgaggctgctgaaaatcagcgcatggtaaacacagcatttgtagggcaagcccagggtgacgtcaagcggcagctgcaggcatgaatgccacccagcttataaaagtgaccaccaagatgtacatgaaccatgaccagagaacaaaacgggaaagagcgaaagcaacaagcgaggcaccaagcagctaggcacaccaagggtttagtccctctcctcagcctggctctatctggaaaaagagcggggcggggactggccccaga

SEQ ID NO: 235964 - DNA, 902 bp, Homo sapiens
taaccatcattctactctctgttggttaagttcttttgagctaaacttttaagaatgcatttagtctgtttcttgagtaatttggtgctgctcagttcaaaactttaaagagactggaaatttagtcatgttttatactccctgaggaggtttgcaggtatgtgttttgtaatctactattttgaaagccaaaaataaggatcccaataaacagaaatgtgtggtaatgaacaattttcaaggaagggtgtaggctcaatgcatttcttttatattatatctgtagtggaatggtagttaatgttttcgtttttgtttttaatcatgtgcatatatgactatatcattggttggtacaaacattggtatatctgaatcatctgaaaaaactgccccttttttcccttaaggtattctagtccaactatggtgattctcattctgcaaatctggtgatagagcccagggaatgttttttaaaaagctcctcagctgatcctgatagactccagtgtttgagaactagtttcgggcttttctatatatttacacctttcttatgttacacatctattgactaggtgtgttatttaagactggtttcttgttaactatctaatctcaatacttacactttgcagcccagaaaattgaaatcggctatgtattgcagcttcattttgttctcagtaaaatgtgtcttttatttttacccaggcgtttactgcttttctttgtgggttgtaaaagtaacctgcttgagcgtgttgtatgaatagaggcagtacctgctgtctttcgtactcttgaccgactcttatttatttggattactgactggtcctgttctgttattttgacttcctttgtgtctatttttaacctaacctctttatatttta

SEQ ID NO: 235965 - DNA, 332 bp, Homo sapiens
gcttgttgatgtgtcatcgcacatcagtgacaaacatttgtcatgtttttgcctttggtggaacttctttattatactcactttcctcccaaaccatttttctcaacttcatcatgaagcaaatgtcatgtggtcattctgtgatggggctcagggctaggttaggtgatgatttctgaaagctcagagacgtgaaggaaaaaggacatcagtgcttggatcttagctcttataagcctcacgtgcaacaataaacccgagttcaagaatcagattcttagatagattggtttggtagcaaatgacaaaaaaccaacgtaaatatgcttcgg

SEQ ID NO: 235966 - DNA, 458 bp, Homo sapiens
cagacccagaagactccaaagcaggggcaatattgcctgtttctagcaaacccataaaaatgaaacaattgggcaccaattgttttagaaaagcccactctcttcaaatgtgagatgaaaaatgagaagaaaaaggtgttaagaaggacctaattaagaattttcatgttacgtatttgaacaacttgactctgatgcaacatcatgatgtagggaatggttcagaagtcatactcgtgaagtagaaagaaaagaaaaacaaacagaaagttgcaccagaattagtgtggcactggtttatttcctacctgattgtaaaggaaaaattgagatatgctaatttatcatgcagccgcataacttcataatgcaaaatttatgagaagagatgagaggaaattggagaggaacattatgggagcaataaatacttatatatacttatatataatacttat

SEQ ID NO: 235967 - DNA, 557 bp, Homo sapiens
cagactaggaaattctcctaaatatatctccaacagagtaaacaagagattaggaaacttgtccttcattcaattacacctggcaggtgaatgggagtggagcagtaagagatgctgcttccagtagttttctacctctcaatccttgctattcaaagtatggtccacagtccagcagctttggcatcacctgggaacttgatggaaatgcagataagttcaaattcccactactgatatactgaattagaaacatctgcccttcaagaagatccactggtgataatatgcatattaaagtttgagtagcaccgccattctatatcagcttgcaaaatgaaagcaagaagaaacaaaacaaagcattagccagtttggattttctgaagtgcactaaatgtcaaactcaagaaaaggtagtagaaaataaatttctcttcaaccaagtcattagtatggaatcatctactctgttttgaggcgacaccagccaataccagccacattttcggaatcatcattttctggtgaaataaactgacttgcataatttaaaa

SEQ ID NO: 235968 - DNA, 348 bp, Homo sapiens
tgcagctggccctacgctgggtgtgatggagacactgaactgaattagacctacctctgagatcaaggagcccatcataggaagacagagacccactatcagacaactacagtagcatgtattgattgtggatgatacaagatgggtaagcactgtgcttcagcagaacaagagtagaataattaactcttcctaaggggctcaagacaggtgatattgcctgactgcagactctatgcccagagccgattcctcttcagcactttacaaagcaacagtaccctgttctgagctcctagaaatatcatccttattctctatactccctgctcaagctttggaaaattc

SEQ ID NO: 235969 - DNA, 408 bp, Homo sapiens
aaaggcacagttgatgggctcctgtgaaacgagagtgaccctgaacatcaacaaaacaatactgactggacacctactatgtgccaggcaatgttacataaatattttcatttgaacatcacatcaactttgcaaggcgggcatcatcatctttattgtacacatgaggaaacaggctcgatggataagtaacaatggaacttacacaggacagagccagaaatgtaactaaagcctgtccaatacttcctacttctacttttttttttgagatgaggtcttgttatattgcccaggctgggctcctgggctcaatcaatcctcctgcctcagcctcccaagtatctggttctacaggcacacaccactgtgctccgattcttcctgcattttttttttttgagacag

SEQ ID NO: 235970 - DNA, 479 bp, Homo sapiens
aaaggcacagttgatgggctcctgtgaaacgagagtgaccctgaacatcaacaaaacaatactgactggacacctactatgtgccaggcaatgttacataaatattttcatttgaacatcacatcaactttgcaaggcgggcatcatcatctttattgtacacatgaggaaacaggctcgatggataagtaacaatggaacttacacaggacagagccagaaatgtaactaaagcctgtccaatacttcctacttctacttttttttttgagatgaggtcttgttatattgcccagggggcaaggggaacacattctgactaaaatccgtgtgactgagaagtcaggatgaagagctgctgggatggaataaacccctccaggcagccccgagcaatgagatgggacaggcacagctgtaatctagaggccctcgggctctgctggtttaggtgtgaccacagcaggggtaccgagctc

SEQ ID NO: 235971 - DNA, 823 bp, Homo sapiens
ttcgcatcgtgcttaggcacaaccgcctctcccagtggtctcagaactccctaagggcagagcggcgtcttctcctaggctgtctcctcttggcctcccatccggcagactgtgtgctcccaagagccgcgggagtgggggtctcccaactctgcctgttccaggtctttgcatactagaggaacgggcaatctgtggcattgttgatccagtatttaccgagggcctgctatgtgaagggattcctcacccttcaggtgctcccagggctgggaatgtgtaacaccagagggtagagagtgggtgtttgaatacaggtccaggctgggtgcactcggctgggcagagccggggaagctgcccgaggggcgggtttcgggtgggaacttgaagaagccaggggtgcccaaagagggggtggagctgccccagcagagaaatgaaggtgcgaacgctggggcgtatctcgagcagagtggcctcgggagcagggggcggggtgggctgagtaagcgtaggggccggccgagctctagctgggaaacgcagccactctcctgcggccgccctccccgaccctcccagggtcagccgggcccagaagccggagcctgcgcttcccgtcgtcccgaagtgcgagaagcgcggctgcagctctgcgccgaggagccccgggagtccactcccgggcctcggtcttcccatctgtgtgacgccacaggaagtcctgagacgccacctctgcgcggccgacccctctcccgcgcgtgcaacacgtgggcctggcggggcagagctgcttgtgcgcggcgggcggggtgcg

SEQ ID NO: 235972 - DNA, 2285 bp, Homo sapiens
  misc_feature (1741)..(1741): n is a, c, g, or t
agagtagataatgtatcttggggaacaattagactccttcaaatacctttctttcaatttgatcttctcctctttgacatgctaggattacccctctgtaataagagccaaaggaggcccagaaccactgggacctttaaacaggaaaacaagttagcattcagagagagcaagcacctccagaaaaggaagccacacagatctactgtcggcctcttgctccttccccaggtgctcctcaaactctcaccttccgttgagctgccactcagtgaacaagtagaagtgataaaggctgtgaaacctgggaaagcacctcccatttttccctgcacagaggaaggcaaaatcaaggtccagaaatatggaactcgggagtgtgggttgtgtatggccagcctggacatgaactcagtgatcatctgggtcaaacagctcactgtgcaacaggaaagttgaggaccagggtcacacaaaattaaactgtattcacagatgatcccctctaaatggtctgagagatcatttggtccagcacttcccattcctggctgcacctggaataaccagcttttaaaacatccttctgcccaggctgcaccccaaggattctgatgttgtgggtctggggttggcctgggaacgggtgtttcccaaagccttctcaggtaatgttgaaggaccactagtgaaaataattactgatgtagtctgacatcctcttgttctgcagaggcccaaagggtaaacgatgttccctgcttactgagctgggtagtagctaagcatttggggaagttccggtgccccagctctgaaggacccctcttccatgctgacttcctctgttcactccaaacccctgggtgccacaggtcctgacatttcattttttccagtgccattcctgtgtggaaccatggtggtccccatctttacaggaggcacctgatgtcaaatgaatctctcggagttttggagagagaagcctctttgaacaggaaggattataagaaagggaagctcagctctaaggcattcaccattcactttgccctgggctagtcctttagaaagatgtgtgttcctattacttcaaaacccctcaccttgagatccctctgaaaccagcactggctgcaggtgtctccaatgaggagaagagaaaatctccaggtactagaggactccctctatgggcaacttgtatcttatctacctgtggctgagggctcgggaatccagtaggtatctatttctctccgcaccagctgccccttctctagaacttagttccctttccctaaggttctcctaactttcttcttactgcagtaagagctctgcttcttgccttggtgcagttactggaaatgctcaactgtgattctgacatcagcagctgagaaccgacttgtaagttccttggcttgtttgaagatctgtaagtgggaattaggaggtcagcgttcaggtcctggtttggcttcctctaagctgtgtgacctgtggtctctgacttaaccactggggcctcaggggagagggtttgggggatggttactctcaatgtccccatctcatgggctgtcatgggaccaggtgagacaatgccgggagaagccgttggctgaggtcagaccacagtgcacgggtcagcatggttaggaggagctagaaagtgagagatgtgagggattagtgcaatcaaggtcattcctggaaaggtgcttttattatnatcattcacactgtagatgataaacagtgatggagttagcaaaccttttcatgcctgtgacctcactggagttctttgatgttgggacttcataagtctgccaaatcctgccacttactgctttatgaccttgaccatttaccgcttctctctggacctcagtgttctcaggatgcaaaaggagggtcaggggtaaaatagcgactttcgaactgtcaggggtaaaatagcgactttcaaacttttcaaacttctgggacaagggtgaagggcaggactctgcctctctccttcccttcaccttattccacttaaattgtgtgattctacaagcttatgtttaaaggaatatgttcctccattacaaagagtttaaatggatatggactgacattgaggagttattgttaatcttgataggtgtgatatgatattgttgttatgtttttttaaagatcctaatttgttagaaatgcatactgaagtacttgtgggtaaaattatgttttgtctattttgtttgtttatttgtttaaaaagctcc

SEQ ID NO: 235973 - DNA, 879 bp, Homo sapiens
acctcttgcagaaaagtaaaagatcatttattcattctgtttctagatagcaaaactaagtgtcaaaagcaccttctgcacacagtctgcacacactggccggtggtcctgttcccgcaaggttgagctgtgttccagagacatgggtcctccgggtgatgaggagccgctggagggccctgagctgcacgtgctaatgattaacgccccgtccgtgctggccggtttctcaaatgcctcctgacgattgcgcacagccggacatcatttgtactgagagacaaaaggaaatcactgaggctttctgaggtgagctgggcggccgcggggggactggactcacacctgctaacggccagtccacaggacctgcccagaggctgggacacaccgctgaagtcacatcccacggggagcatcctcaccaactgacaatcagcacgggtttgtaattaagggtttctgcccagccaatgaacggcctccagaaacaacctttgtggaaccccctataaaagccttcccagcgcttgccttcaggacactgctcagggctgactcagtgtacccaaactgcagtctttgtttcccaaataagcagtcattcattctacctccgtgtcaatcttttcttcgtgaacacagctggtgtcaggagcagggctcagcaagatctctcctttgagcggctttctctggaatcgggtgaagtccccacaacacagaggcccctgtgcgcgccccttctttggggccagcacctcccttcaactgaggctgatacctttatttgggaatctgggggcagttgctgcctctgtgccggcaaaggctttcagcttggaggacgttttccctgcttactggagattttcccaa

SEQ ID NO: 235974 - DNA, 1023 bp, Homo sapiens
agagcttttcctaaactggagacggatcctgccctgggggtctcagtcaccgcgaggactcgagggtaactgccagaggtcccaggtggcccgagggctattttaaaatattttctgtttccttgatttctcctcctttggatgtattgggcttcctgactctttgaagaatctatccagtgtctttaagatagcaaaactaagtgtcaaaagcaccttctgcacacagtctgcacacactggccggtggtcctgttcccgcaaggttgagctgtgttccagagacatgggtcctccgggtgatgaggagccgctggagggccctgagctgcacgtgctaatgattaacgccccgtccgtgctggccggtttctcaaatgcctcctgacgattgcgcacagccggacatcatttgtactgagagacaaaaggaaatcactgaggctttctgaggtgagctgggcggccgcggggggactggactcacacctgctaacggccagtccacaggacctgcccagaggctgggacacaccgctgaagtcacatcccacggggagcatcctcaccaactgacaatcagcacgggtttgtaattaagggtttctgcccagccaatgaacggcctccagaaacaacctttgtggaaccccctataaaagccttcccagcgcttgccttcaggacactgctcagggctgactcagtgtacccaaactgcagtctttgtttcccaaataagcagtcattcattctacctccgtgtcaatcttttcttcgtgaacacagctggtgtcaggagcagggctcagcaagatctctcctttgagcggctttctctggaatcgggtgaagtccccacaacacagaggcccctgtgcgcgccccttctttggggccagcacctcccttcaactgaggctgatacctttatttgggaatctgggggcagttgctgcctctgtgccggcaaaggctttcagcttggaggacgttttccctgcttactggagattttcccaa

SEQ ID NO: 235975 - DNA, 466 bp, Homo sapiens
taactgccagaggtcccaggtggcccgaggtgatgccgggcgcagggaggggctggggcggagagagggctggggtttggggccgtgtcggggatgagtggtgaggggtgcccagaagggggaggcagaggttggtgtggccacggtggaaggagccacaaacgtggacatgtaaaggaggaccaaaaggtttttttttgtaaagatcaatatttaggacagaaatcacaacctttctataaaacaaaacaactgtataatttaaaaattgaattgtgagctaaacgcatatgaggggttacgggttttcaaaattcagagattaggagcaaaaccaaaaacttgtagcccgcttccctgtgagcctcttctccagcccagcccggctgcaggactctggggctgccttgaggacggggtgctatttctcaggtttcgtctgcaaaggggtaagtcaccccaaacc

SEQ ID NO: 235976 - DNA, 1807 bp, Homo sapiens
  misc_feature (29)..(29): n is a, c, g, or t
  misc_feature (656)..(656): n is a, c, g, or t
  misc_feature (670)..(670): n is a, c, g, or t
  misc_feature (917)..(917): n is a, c, g, or t
ttcaagatgcttgtaaatgatatcaaccntttatttagtccacccctgaagaactgagggtcctgggaactgaaccatatcaatgcaatcttttctacattattaactgaagaaaaatgggtactttttaaactttttttttttaagattaggaaacaaaaagaagtcagaaggagccaaatctggactgtaaggtgcatacctaatggtttcccatcaaaactcttacaaaatttctcttttttgatgagaggaatgagtagaggcattgtggtgcagaagtctctagtgaagctttcccaggcatttttctgccgaagctttggctaactttctcaaaacactcataataagcacgttatcattctttgttccttcagaaagtcaacaagcaaaatgtcttgagcatcccagaaaactgtttccatgatctttgctcttcatctgtctgcttttgctttgactgaatcacttctgcctcttggtggccattgccttaattgtgctttactatcttcaggattatactggaaagaatgctttagtatcttggtcctacttgttgaaaatttctattgaaagctctgcttttgcagctgatcgggatgcagtggttttggtacccatcgagtggaaagtttactcaactttaattnttcagtcaaaattnttcaggctgaaccagttgagaggcctatagtgttggcaattgtttctgctgttaatcattggtcctcttcagttaggttacaaacaaaatgaatttttttcctcgtaaattgatgtggaagatctgctgctgcaggcttcgtcttcaacatagtcttgtcccttcttaaaacaagttacccatttgtaaactgctgctttctttgaggcattcttctcataaacttttcaaaaagcatcagtgattncacaattcttccactcaagcttcaccatcaatttgatgtttgttcttgcttcagttttagcagaattcctgttgctctggtaaaggctgttttcaaactgatgtcttatccttcttagtgtttcaaactaggttctgttcagacatgttataacagcttagtacatgtttattttggtgcaaaaagttttgaaacctatgtatagttttttcttaatactcatttttcataaactttttaaagaccccttgtatatgagatgtccactcacaaaagtgttcagttgcctgactatagtgaggaataattactaagtcaaaagaaaatatcagtaatggtagttatcctttctgtgacatgtgattataaactaagcttcagttcatcagtaactaccaagtattgtgttttggtttgggctataatgttgtcatctacaaaaagattaaaagctattaaaagaatattggaaaacagaaaaactcattggttaccatcagagtttgctagggcatcagattcttactctgaagattgataaaggagagaatataatatttatcctgcccttcttgttatgaactgtattttaggcagccaagtaactgagggaaaattcttaggaaaatttccagctaataggtgcaaaagaaatgatagacttttaaaaaataaaagtttgaaagtcttaatgaagtagtgaatctagacagcagtatttcttggatgtgaaaaccattagatgataggttaatgggaaattttataatgtagaaatctgatcaaacccactgattgaagatgagacagtcaattattgtgtacctcctggtttgatgcaagagacagtacacaacagtagtaatagcaccaataaagaactcttgtcc

SEQ ID NO: 235977 - DNA, 381 bp, Homo sapiens
ttttacgattaaatgacataacacatgcaaggtccttggttccacatagtgggcactcaacgaatattagttctcgctaaacagtcacttaaatatttgtaggccttggctttcccgttccttccccgacctttttactggggctagggaaggtatccggtggctggaggcgcttcacactgggtcgggtgagagcgtgaagcgagccttttccctaacgtcacgggagcagctgggaagagaccgaagaacgagggtcactctcccctgtatacgtggcatgtccttcctctgagacatttattcctcccaccaacaaacattaatggaacgcctcacaagtgctagaccccagcgacacaaacaagggcgaggcacact

SEQ ID NO: 235978 - DNA, 297 bp, Homo sapiens
gctgtgccaactttatttcaaaatcaccagaggttgaaatgttggccaagggactaatctgaattatgtacctgaagcagcaccttagctgggagatgtgaaaactcaataataaacaaatggcaaacaaaaccaactctctgggggaggctgcttagattaactgaattctgaactgaatgtttatttatttctacaacagtactatgtgttcatagtacaaatatttatgagccatggcacatgtttagaccaagaattggggtaataaaaactgaatttcaagttgaatgtaaa

SEQ ID NO: 235979 - DNA, 342 bp, Homo sapiens
aaaaaagctgggaagtagtaacaggactaaagtcaatgggatggggcctggacaattagaggaaagttcatactgctactgcttcgatgtatatcgtatgatctgagcaccacaacaacattatgcaaattccaaatgtagatgcagatgagacttcagatgcacaaactgagacacacctgatgttgtttgcccaagctttcacagctatttagtgagagaagcagtgctacaggtttctgattccccactcagtgtattttcctcaagactgagatacctgtttaaatagagaggtataatatcatgtatacatgacacgtccattctttatcacagaca

SEQ ID NO: 235980 - DNA, 1193 bp, Homo sapiens
tttccttcccctttcgaggtgccatttctgcacgtcgtctccagactccacacccggtggaatgaaacttttaacattatattgataaatgaaaatatatgaggtcttcatttcatagttgcatttttttcagaagctaaaatggtgcgaatatccagaataacttcaaatataaaattcttttatttttagattttttttttttttgcattgtttagtttttggtttctgtgacctgatgaatgacaaagttttttcatttaacatagaaaggttaacttcaggctgtatgtacagtaatgtacttttcagagcatcttggtaattaatgtatttctgaaacattcattagtcattctaaatttatatgtaaaatttgataagtgtaattttcccagagttacaggagtgtctcagtttgaatttttttctgttccttagccgtatatttaagatgagatttgtatcaagcaaaagaaatgtatcttataaatttaaatacatgcctaacttatatgagagggtttattattgcttactttctctagaaaccacttttataagcttacagtttatatctctcttctaaatactccttgatagaaaatcttgtagagcagtttattatactgttaattctgcaaataaatggtaatttctccacagcatttcgtgacagcagtgtatttttttatggttttaaagtaagcattttgggccgggtgcggtgtctcatgcctgtaatcccagcactttgggaggccaaggtgggcagatcacttgaggtcaggagttcaagaccagcctggccaacatggcaaaaccctgtctctactaaaaatacaaaaattagctgggtgtggtggcgggtgcctgtaatcccagctacttaggaggctgaggcaggagaatcgcgtgaacccaggaggcagaggttgtagtaagccaagatcacgccactgcactctagcctgggccacagtgagactctgtctcaaaaaaaaaagaagaaaagcatcttacgaagaagaaaaattgtactttaagttttaattttaagtggacttgagatctttaccgctgtattccttggagtctctaaatatgactaacatttcctacctactgatgtctctgtttacattaattggcttgctcaagctccacaagtagcaactatgatgaaaaggtcc

SEQ ID NO: 235981 - DNA, 424 bp, Homo sapiens
ctagaagggactgatctacgcgattgggtctcttcttccaaacttgtgaatcaggtaggtcccttctccagccatgagatgagggaggtatcaggtggaggaatagtattaccctatggtgtcttctccatggaaacgaagaagtgagggataagtggtcctcctaaactcgttgcaaggtgtccctgaacccattctttagagagctcaatgcacaactatcttaacgttgtcctggcacaaagtccctgatacttctttgttctagagtgataatctttatatttccttattttttgaactccaacatccactaacctggattgtaagtgaggccttgaggggagtgattagaaaggaaaggggcagaatgtgttgttgtatgatgggcgatcagctagtaagatgcacatattggcattaa

SEQ ID NO: 235982 - DNA, 234 bp, Homo sapiens
gtaagttctaatctatctctggtttacttttactcctatgatgtaatctttcagggaccccagctgaaagcttgggttatcggggtccctcttcttagtcaataaaactccaacatttaggtttatagcctgtaagactgccaaaaattccaattatctgcttaactacttaattacccccctttaacttgacttcttcatatgtaagtccatgttgcttatggttggcaaatg

SEQ ID NO: 235983 - DNA, 369 bp, Homo sapiens
tagtatttcctgggttataattgagccttaactaaaaaccaaaataaaattaaaccacaatgtcattaacaaataacaattaacaataccgtctatataaaaacatttcagccagatctttccattaatgcaaaagtggttgttaataatgtataataatcagtaagtttgcaagcttgagaaatatttagttcaacaaaccatttgatttttttttaagccaaagaaaaagtattcagacctggagtgaatcacaatgcaatagagccttggttgtatttaaaagtgtaaattctgttttaagcatttccactccacttgagaaagagcaaccacaaaattcccaaatgtcaacacagatggaagtcg

SEQ ID NO: 235984 - DNA, 404 bp, Homo sapiens
ggccctcggacattcaggttccaggccattcaccccattgctgccccaacctggacaaacttccaggccgaaggggaacagcagccgcagctccctgctaggggatttccccgggtgaccgcagggctggggagcattacacggccactcaatggcagaacagatgactcctttaggagagctgcctccagaaccttccaggccaggatctgcctgccagctgtccccctccgggaggctggaggagccgggccaggccacatttgtggagcccgaaggcccgtgtggcgcttctcctattctgtagagtggtagtttgttttgttttcatttttttttagtttattttcttacttttaaggcaaaagttaaaactgcctacattaaattctggttaaaattca

SEQ ID NO: 235985 - DNA, 848 bp, Homo sapiens
tccccggaatccccgcccctagcgggctctcccggacccccggcccgcgctagtctttgccaggatcccgcgcaaaggatcaagtcccagcttccctttccccaccgagagtctccagcgccaaccgcgggccgtcgggcgggtccctgacccgcagttactcagtacctctctggtggaggaggtgtcagcgacttgagaatgagtgcgccaaagaagacagagccacgcctgagcctccttcaacaaagcctgcacttcctgttctcttctcaagcgtgctgtcagcagatcttgactgaaacctctgtgccctaccctgtccttggcaccagacgcaggggaaaggatcaggcccagtccctcctctgactgacagtgctaaaccagctacctgttctgagcaaggcccctgaagactgggaacacgaatttgcccaacagctgcctggcttaagggttaggccgttgatataaaaatacatggctaatgtaacctactaccactctcccggctctgttaagctcctgtcacactagccttcgttaagttcctaaccacgtcaaactcagccacctcacagcctttgtatctgctgttgcttctgcatgaaacactctcgcctgctcccagttcctcatgtagctggtctcttactcttccagatacagctcaatgtgtctccttagaaacttttactctgcccaccccttcaaaatcagtctgtggccaaaattggaccattacatctgtctgcccctcccccaacagatagtgattgccacttttcaggtcagagactgtgccttattcatctctgtgacactaggacccagccatagaccct

SEQ ID NO: 235986 - DNA, 1289 bp, Homo sapiens
tccccggaatccccgcccctagcgggctctcccggacccccggcccgcgctagtctttgccaggatcccgcgcaaaggatcaagtcccagcttccctttccccaccgagagtctccagcgccaaccgcgggccgtcgggcgggtccctgacccgcagttactcaggtaactcaggcctgcggcggcggcgacagcagctgccctgccccgatctccgggccttggtgctgctccactcgcctcagttctagagctgtctaaacagaggcccaggacacgacgttagcctcccaggagctgcctgaggcgacaacagcccgacccggctcggcccgggggcgagctcccagcccccaactcccggccagttcccaggctccgccctcgcgcctcgcctgacaaccaatcggcttccgcctctctgcggcttgggaacccgcgcgcttcgtcgcccatgcgcagcggcccctggtgggaaaatcagcaaactgcagacaggactcggcgctcctgggagggcctgctcttttgcagagggttgccgagtgaagctaagacccgccccgggggaggcccacgagggccactggggcctgcgagtgtttttacctctctggtggaggaggtgtcagcgacttgagaatgagtgcgccaaagaagacagagccacgcctgagcctccttcaacaaagcctgcacttcctgttctcttctcaagcgtgctgtcagcagatcttgactgaaacctctgtgccctaccctgtccttggcaccagacgcaggggaaaggatcaggcccagtccctcctctgactgacagtgctaaaccagctacctgttctgagcaaggcccctgaagactgggaacacgaatttgcccaacagctgcctggcttaagggttaggccgttgatataaaaatacatggctaatgtaacctactaccactctcccggctctgttaagctcctgtcacactagccttcgttaagttcctaaccacgtcaaactcagccacctcacagcctttgtatctgctgttgcttctgcatgaaacactctcgcctgctcccagttcctcatgtagctggtctcttactcttccagatacagctcaatgtgtctccttagaaacttttactctgcccaccccttcaaaatcagtctgtggccaaaattggaccattacatctgtctgcccctcccccaacagatagtgattgccacttttcaggtcagagactgtgccttattcatctctgtgacactaggacccagccatagaccct

SEQ ID NO: 235987 - DNA, 499 bp, Homo sapiens
cctgacacagacctggcaccctgcaggtatccagggaattgtagcaatcagctcaatgctattctccagctggctgtccagctgttagggctggaaggtccttagagtgtctcggtctcactttgcccttggggaaactgaggctcagagtggagagaactttgttagggcccagagaattcatgacattgctgggccccatcgggggatgttgaagaagatgctaactggagtttacacaatactgtttgcactgcattctgtgcttggctctgccatgtgagatttcatttaattctgacaacatcctgcgaggtgtttgctatcattttcgccattttatagggaaggaaaatgagacttggagacctcaagtggttggacatgcaattcctgcagaaggccacccgcaaatctctggctttctcttcactggacaaaacccatcagaaggtgactgagtgaggatgatgtcattagaatccacactaaatgaaat

SEQ ID NO: 235988 - DNA, 1943 bp, Homo sapiens
  misc_feature (543)..(543): n is a, c, g, or t
  misc_feature (1662)..(1662): n is a, c, g, or t
  misc_feature (1777)..(1777): n is a, c, g, or t
  misc_feature (1803)..(1803): n is a, c, g, or t
aagaatagtgttccacagacatctcagagtctacacataatcaacaaactgaccctggtcttctacatcccatgcttgataatgccacatcaactcagttgtccaggccagggacctggtaatatttgaagagttctccttgttcttcagccagttgtctcaagtgccaattctacctctcaagtgtgtatctaattgtttccttccttgctactgctactactttagccattgccactccccatgagattactgcattgatatgatggggctctcctggttactaatcttaaactccttcagtcaacttccccactactctctgagtagaaagtctaaaatacagataatcatgacctcccaccatccaccaccctgaaagtcattttatgtctccttatattattgaacacaatgtctcaattcaacgtcgtacacaaagccatccataatttgaacagcatcctttctctccattctcccacatttaggttatgtcctggcccacgctaccctttcataagtctaccaacactccacatnctttcacatccccatagtttggatgtgctatttaatttgtcttctccaagcatttgtacttcctgccaaacacacatactttcttctccagaataactcatattcattcttgaagacttgattcaagttttttctcctctgggtgccttctataaaccttctttcctctgctccaatttgggaagtgctgttccctctatactctcatcaaccatagcagcctagcctacgtctattatagatttgtcgtaccttgttgtaattaactgtatgtttattaataatgatagtaatgataattttggtatctgtaggtaattgaatataaacttctgtgttaaagttgtaccggaaagccatgcttggagtccaaagcttcaaggtggctcttcttattagagacttgggggagacttggacaggaaggatgttttttggcagagctaactggcagtccccataggctgtctctggtttggacagcacccttgcgtgggcgcttggtgcttgattagatcacaccttttggtgttggccctgtcatcagactgtgggaggatcacagatagcacctcccatactgccattcaacattgccccattgtgctcaaatacaagctcatcgcctgtacttggatatgttctttcttcaaagaccccttggtccattacgtgcgctgactgccagtgggcctaccttccttctgggcaccgtaaacaatatcatttaattcttagagcaaacccattaagtgggcagcattatcatctctattttaaatgtgaaaactggccagagttgacacaatttgcctacagttatatgcctaagaagagaggttcaaacttgactttcaactctgtgtcattagtgcctcaaacagggtctggctaataggaggcactcattaaatatttacaaagttttggttaaataggaggaataagtttttaaaatcgattgcacagcatggtgacaatagttaatgtaatgtatatttcaaaattgctatgagagtggattttaaatgttcatagcacatgtaaacaacataagtaagtgaggttatggatatgttaagtagcttgatttaatcattctataatacacacatacancgcctgggtgcagtggctcatgcctgtaatcccagcactttgggaggctgaggcaggtggatcacgagatcaggagatcaagaccatcctggctaacacggtgaaaccctgtctntactaaaaatacaaaaatttagctgngcgtggtggcgggtgcctttagtcccagctactcgggaggctgaggcaggagaatggtgtgaacccgggaggcggagcttgcagtgagctgagatagtgccactgcactccagcatgggcgacagagaagtctccgtctc

SEQ ID NO: 235989 - DNA, 725 bp, Homo sapiens
taaactaggaactagtttaaaacgtctaataaataagccttcccaaactctatttggtacagaaataaagcagggaataaaacttttatggtaggttttgttactgatattttagtaatttccttaactggcatcacctatcaccttagtggcctattcaattaatttttggaagtgggtggaatataaattatgcatgaatatataaacggatcaagtttttaactggaataaatgcttttggtgacaggttaaaagatctactttaaatcagcttataatatctatttttaaaagacttcaaaacttgaaattaaatgttctcttttcacttcaatgacgatggtgtaattattcttgggattaagaagatattgtcattattaatttctatataagtgattatcaattcagagagtctacaattagatacctgctatgtgcttatcatagcaggagacacaggatgattaagaaaggctcctttatagcagcatgatttatagtcctttgggtatatacccagtaatgggatggctgggtcaaatggtatttctagttctagatccctgaggaatcaccacactgacttccacaatggttgaactagtttacagtcccaccaacagtgtaaaagtgttcctatttctccacatcctctccagcacctgctattcacaatagcaaagacttggaaccaacccaagtgtccaacaatgatagac

SEQ ID NO: 235990 - DNA, 198 bp, Homo sapiens
taattttaaccagtgcagatttcccttacttccttaagaactcattgaggaagaagatggcattttatatagtatttttagatatttttaggttggtacgtttttcagattattaacctataagattgcctcaaatggctcttgtttgttctcatggcacagcctcatgatctgaaataattacaaatcttggcttca

SEQ ID NO: 235991 - DNA, 404 bp, Homo sapiens
atacacagcttgttgagttattattaaggtattatctttgtaataccaacaaggcaagaactagaactttgccagctactactaagccttttatgtttcccattctaattatattctcctcctgccgggcgccggtggctcacgcctgtaatcccagcactttgggaggccgaggcgggcagatcacgaggtcaagagatgaagaccatcctggccaacattgtgaaaccccgtctctatcaaaaatacaaaaattagctggccatagtggcgtgcacctgtagtcccagctactcgggaggctgaggccggagaatggcttgaacccaggagacggaggttgcagtgagccgagatcgcgcaactgcactccagcctgggcaacagggcgagactctgtctca

SEQ ID NO: 235992 - DNA, 437 bp, Homo sapiens
attgtgagcattaagtgagatgatgcattgcaaagcactttaacctagttctttaataaatgtgagatggaaagaaaaggagaagtagagaaagataaaaagttagattactctgacattgaaaaatgcaattatttgagaacagataaagtgggagaccctatttggagattttagcaaagagagcaaagatagtcatacatgttgggttgaataataatgtatctatcacactatctttcactacgtgtcatagtctatatcattctaaaattatcttgcccatttgttacttccttattgcctgtctttctccactagaatgtaaaatcctagagggatgggccgtatctgtgtcattcattactatacccccagtacctagaagaatctttggcacatagtaagtattcaataaataattgttcaatggaaga

SEQ ID NO: 235993 - DNA, 466 bp, Homo sapiens
aattttccttcttaaatattttttctttaggaatttacttgctgcaaatgtctttccagtatctcatcgttttatgttattacttttgtgcattagtctaaactgtgtacaagtatttatgtgttttccttaaaggcaattaataaagtgacaatctcttttttggttttttttttttttttctgagatcgtgccactgcactccagcctaggtgacagagcgagactcttgtctcaaaaaccaaaacaaacaaacaaacaaacaaaaaaaacagagcctgcaaacgtaaagtatgctgagatttaaataatcaataattgatacttggttatcataatccacaccaacatctctaaaccttaacctttggctctttatgcttatcatatagatataagcagaccagagcatacccattctgctaagtctagtcaaatccaataaacaaacagaacccagttaaaa

SEQ ID NO: 235994 - DNA, 426 bp, Homo sapiens
cctaagtgtgcatgtgagcagtgagcgctctctccctgaagaggaatggagggcagtaattggagatatctaccagtgcaagctctgcaactacaacactcagctcaaagccaacttccagctacactgcaagactgataaacatatgcagaaatatcaactggtggctcacattaaagaagggggcaaaagcaatgagtggaggttgaagtgtattgccattggcaaccctgttcacctaaaatgtaacgcctgtgactattacaccaacagtgtggataaattacgcttgcataccaccaatcacaggcacgaggcggccctgaagctctacaaggtaagcagtgacatccatttccgttggcacagagtagaaaagggaattaactctttcagagcttggagcacaagtctccaacttaagga

SEQ ID NO: 235995 - DNA, 493 bp, Homo sapiens
gcccagggactagctcacagtaagcactcagtaaaccatagctattgttagtctctgtctccctaaagggagtgtgagtgagcatcctggaggtgagcaccattctgtaatcacctccatttcccccaagtacctagcacagtgcttaataaataaggatgctgaataaaaatgtatgacactgaagaaaaaggaagatagaggcctggtgaatgcaatctccactgtgagggcataactgacctttaattgaatatctctggggttaagcccccaaagccacagtgcctggggcccccactgcctctgcatcctggttcccatgaggaggcagggcctcatgagaagagcacagccaggagacctaggctgcagcctcagttctgccactcagagccacatgagcctatgcaagtccctatgcctgctgtcaagtggtgacgatagtgatggtgaacactgttctaggcccacccaggtctgtcaggaagat

SEQ ID NO: 235996 - DNA, 502 bp, Homo sapiens
cagtactctctatttgatactgtcttgttctcaagaatttagaaatacaatatgaaaaatcagaacatgtaaaacttcagtcaaaatgactttgttccaggatttaggatcttgtagagatgatattagggaaaaaagtgcccagagatatttggagtatcagtgactgtgaaggtacaaatgaacactagagtgagggaggaaattgctgtgagtgcagggggaagaaagaaagaattgatctctgtccttctagacgggtagacatccatttcttgagtttagttattaaggaaggacaactataatcaatattagaggagaattaccaaggttaagtatttttatgattgtcaagtttcattacaaatcactaagcatctaaaacccaaatcatcactgtgtacagacatagtcctgtaaatactgtgacaatttctgcttaagaatattagaaaaatgatactttgacctaccagagcagactttcaattttttgaaa

SEQ ID NO: 235997 - DNA, 144 bp, Homo sapiens
gaggtaggttacgttattaccatttatctgatgaagaaatggttagagaaattaagaacactgcacaaatactagttgtatgacacaagtaatcctttctttctttctctttctttcttcttttctctcttctcttctcttctc

SEQ ID NO: 235998 - DNA, 489 bp, Homo sapiens
aatagcaaaagtaggattagatgaacacctgggatgaagcaaatccttaaaggaaaataatatgatctcaggatcttgaaaacatgtttgcaagatacatttttccttgagattaaaatcttagacttttgttatctcttccaaatgaaccatttaatcaatgagacagtttattggacaaatagatgttttccttgcactgtgccaaaaaacagatttgattgattttacaattaaattgagggaagtggctgatagtttttgcaaactcattccttgccctttattgatttttgtttaaagtttagccattgaacattacaataaagtaactaagcaagccaccttgaactgacaaaacaagggcactcactaagtgaaaacaccacacataatgataagacctgtcagagcacttatggattctgcatctgatcactggaatatgacgtctagagtactaggattaagaatctcagccttgaagtt

SEQ ID NO: 235999 - DNA, 548 bp, Homo sapiens
atggatggtgaatggatagatgaatttataagtggatacatggtaggtggtggtagaggatgtatgataggtaatggatagatggatggatggatggatggatggatgatgcacgatagatgaatggatagatggatagatgtggatgacggatggatgaatgaacgaaaggaaggaaagatagataattgatactttggatgaattcagtaaataactgctaaatgagaccacaacaagtttctgggaaagatggttttcccaggtggaagatacttcccttacagaacaattttgttatgcagtttcctttcttcttcctttctccaacaactgattgctgtgttagaataaaagtcttgggcctgaatggggcaggccttaggtggctcaaaaagttcagccaggctccttcccaggtgacttggccaaattggcagcatttgtgtctaagcaccctgcctcccagtagcctgtgtcccattccagtgggaactccgacagtccactctaatgaaggcattttcctgctgactgggatgatttcc

SEQ ID NO: 236000 - DNA, 1033 bp, Homo sapiens
tctcgttgcccaggctggagtgcagtggcacgatcttggctcattgcaacctccacctcctgggttcaagcgattctcctgcctcagcctcccaagtagctgggattacaggtgcccgccaccacatccagctaatttttgtatatttagtagagacagggtttcaccatgttggccaggctggtttcgaactcctgacctcaggtgattcgcccacctcaggctcagaaagtgctgggattacaggcgtgagccaccacatctggccccaagtccattacttttagagggattagcctaacagaagtttccagttgtctgctattgttccagctactttgaactaacttgaggggggtgtgcaggaagctgtgtgatgtgatggggcagtgtttaactggcctctgcgagggccttaagacccctttagaattaacaattgtagacagtatctcctaaatgccaggcatatgtgaagcatggtgcctggtagaaagaagaaaacagctcccccatacggcggagggggccaggggagtctgaaccaagagaaatccggtgtgcagcggaaaagtggttggttatattggggggctggaggaggtggggtctgatttgcatagggcccaggggattggtttgaccaggtgtgacattcaagtagcccgcaaaaaatctagccctcccaccttagccctttaatatgcaaacgtgagctgccatgatgtcctgaacatgtatgagttatctggaggcggtcatgacacttggcacaggtggtgacaaggagaagagggcaggaattgccatgttgggtggacctagtttctaacggttagaaaagaaatggttcaggagttgcttcttattacaggaaaatttccactgagaacctttactcctttattccttttactcctttctagttgcctaaaaagtatttctttataactcctatcttcgtaataggcagatcgtctccaacatccctaagctggtgtcaccccctttatttcacagagaaggaagagaa

SEQ ID NO: 236001 - DNA, 124 bp, Homo sapiens
tgggacttaataacgctgtgaacttttttcctccagtgaaaaccaaagcactggattaaaatcaactaattccctgatacaagatgtaaccagagtgagggtttaataaatgttcttgagatga

SEQ ID NO: 236002 - DNA, 429 bp, Homo sapiens
gagcatccgtgtaccattccggcatttggcaacaatgcaccagcattccagagtccaacagggcatgcgtgcaccattccagcatccggcaacaatgcaccagcattccagcgtccaacagagcgtgcgtgcaccattccagcatccggcaacaatgcaccagcattccagcgtccaaaagagcatccggcaacatcccggtgtccagtggcacatgtgcacctggacgttccagtgtggtgagctttcaggcacggagcaaggccaaagggataaaaagatgaaggtgacgcagtactcccccttatagtgcctacaggccttataggccagacagatctggaaataaataattcataataaaaaataattacagaataagaggcataataaccagatagaaagtattgaataaatctgtaagaaatg

SEQ ID NO: 236003 - DNA, 495 bp, Homo sapiens
  misc_feature (60)..(60): n is a, c, g, or t
  misc_feature (72)..(72): n is a, c, g, or t
agatatttaatgtaaagttttttggaatacgaaggaaattcagaaaataaatattatcancagttactattngcaaatagagaaagacaagaatagtttagtgagcccggtattttgtttttatagtttttatctcagttgtacaactcacaaaaccatgaagtctttggtattttataaatgtttaacaaaatttacatcagattaaggcatttagatgaaaattattatgttctcactatcttccaaattttatttcatcctatctccaaaatgatttcttagggtacaaaaagagcagacggggctgtaaaaatacaagcaaaaaactgtgtgcccctagtttcaggcagaacttaaactgtcagaggtactagctacatgatttgttttttaactttggattgttcacgtccaaaaatggataaattacatttgtgtttatcatcagttgcattttatgtattattttaataaatactatctgaatgaaga

SEQ ID NO: 236004 - DNA, 465 bp, Homo sapiens
gaagcaattccggcattatcaccactgttccctgtcagaaagaagcaggcatttgttccttccttcccccagaggagtatggagatggaagctcccttggggatatggtgacaaattgcgtgtagagtatagcacgcaagttgtggctgccctacttgattttcagggagtgaaagctggttgacaaacaaatgcactacaaggcctattaggtcccacgagacccccttccttcctccccagcttggatgtcgcttctatctcagcctctgttccagggagtcctgtgttgtcacctcacagtggaagcttcctagggacagggccccacctgactctaggccggacattctcaatcctgtgtacacaagaattgcctgcggagcttttaaacaaatgcagaggcttaggctcacccctggaaattctgataaaattgaactggagtggtgtccaggaaacttt

SEQ ID NO: 236005 - DNA, 413 bp, Homo sapiens
aaaaaaaaaaaaaaaaaaaaaaaaaaaaacttctaatatatttgtgcagtgtttattcatctcgaataaagcaatgacaaataatttaggaaaattttcttaatttaacagagtcagtgctgggcgctgtggctcatgcctctaatcctagcacattgggaggctgaaatgagaggattgcttaaggccagatgagaggattgttcaagaccagcctaggcaacaaagcaagaccccatctgtacagaagatgaacaacttggctgggcaccgtggcaaatgcctgtgcttgtagctactctggaggctgaggcaggaggattgcttgagcccaggagtttgaggttgcagtaagccatgatcgctataatacactccaacctgagtgacggagcaaggtcttgtcttaggga

SEQ ID NO: 236006 - DNA, 113 bp, Homo sapiens
aaggctttaggttatatccaactcccagccttaagtgtcagccacagttgctagtcaggaaaggatattttacatattttcagaccctactttccctgcttcaccttcccatt

SEQ ID NO: 236007 - DNA, 385 bp, Homo sapiens
tcaatgtcttgaaaaatcatacagaatctctacaagtcttggctttgccttaataatagtcagtacactggccaacgatggcaccaagattaaaggaggaggtgagtctggaaacacatgaacttgaccttctacaatcgatttcctgtgagggagactctggacatgggcaaagctttaagccaaagatctgtgatgctcaaggctcatccaggcattggcagtgtattcaatgtataaaaaaaattcttttatttccaatgacctgttttatgttaattttattgtgatgtagaaaaataactagtgtgtccttcaacttacttgccaaaacctactcttttaaatattttctcaggagaaaagtcattttaattttaactta

SEQ ID NO: 236008 - DNA, 635 bp, Homo sapiens
atttacatcaattttagtgagaaaaaatataattcctttccacccaacctaacctttcgaccctatttttctctattttcatggagaaaaatagaatgacaataaaaccaagctcatataaacaataaaaaacaatttgaaggaaaataaagtcagtttttcctaaatgaaataaatgtaataatgcagtgaagccttagtggactcactaggaaggaagagagtgtgagttgtgtggtgaaggaaaggcacagggagtcatttatagaaagtggagggagtacagcagttaactttcagccaagggagcagtatctcataccaagtggagtgggctgccatgaaggatggcagaacctttcattccttttccttcttcagtcctcttttatcacaacccatcttttatttcatgcttaaagtttttcccgcttttctttctataacatttactttttcactttttgagacaattgggggcttgggattatctttaattcaattcataaagttgcaacacagaatgtttaaggcacagaacacaagaacacttggaaacagtgcatgcacgtaaaatgccagtcatagaaattgctgtctttatccctcttggtcttggaaaatgtcttgggttc

SEQ ID NO: 236009 - DNA, 607 bp, Homo sapiens
gcctcacatgaggctcaacagctgaagcgatcgtgccacctcaaaactcccaagtagagtcagtagctggtactacaggcgtgcatcaccaccatacccagataatttttgtatttttagtacagataggagtttgccatattgtccaggctggtctcaaactcctaggctcaggtgatccaaccacatcagactcccaaagtgcagggattacaggaatgagccactgtgcccagcctgttaaccatcctctgtaagcagttaactttcagccaagggagcagtatctcataccaagtggagtgggctgccatgaaggatggcagaacctttcattccttttccttcttcagtcctcttttatcacaacccatcttttatttcatgcttaaagtttttcccgcttttctttctataacatttactttttcactttttgagacaattgggggcttgggattatctttaattcaattcataaagttgcaacacagaatgtttaaggcacagaacacaagaacacttggaaacagtgcatgcacgtaaaatgccagtcatagaaattgctgtctttatccctcttggtcttggaaaatgtcttgggttc

SEQ ID NO: 236010 - DNA, 1830 bp, Homo sapiens
ctagagagaggacatttcctgagtaaaatgaaaatcaaagctaggagctaatcatatttttaaagtcagatatgttgggggtataactggaagctaatttttaaaagaatcctgccatatctttgataaggaagttctatggcttaaagagtgtaaccactagttttagcagagatgtttcctttagttttgaaacattcttcaacatttcaggttcatgatgaaaaatggctgactggatttaagtcctttattttctatactcctgagcaaaattctgaaaaactggctggtctagtttagagaagaacgctgatgtgggagtattttcaccatgcattcctgctctaaatcctttgcttctactgatagactattctactttcgaaataagttcacattgctctaacacttcataagttcaatctttttctcattctgtttaaaataaccaccatgaccaccaaacgcctgaaattcactgtagttaaaattatgactgaaatagacagggaaaacctgagagtgaacgttacccagcaaatctgggttaaacaggttcgagtttttccagagcacactgtttaggatttcagcttcctgttcaaccatctcggaaacagggtgtttctctgctcctttgtgaggactaaccatgtgtccccgccactttgcaccaaagctgaatatcatcccaaactctggatccttctgacgggcatttgtgtggtacacaggaaggggtgcattatgaatatgcaattactggcatgtaatgctgtcttctgctaaaaatacaaaaagggtactctgatctcagagttgggagctgatttctgatttcagcctagacaggtctgcttaaaactataatcaagctgattgtattgccctggaattctaatttccaatttagggttttgctatataatctctagtagagtgtgtctaatctttatgaaacccagagtctttgtataaactctatggattttcttccatgcgtctaggctgagctgagctgtgtctttaggctgagctgtagagacattaaattactgagtaaatgaaggtaacgttgttatgtcactctgtttctgaaagaccaactcaaattctgtctgctgtagctttgatccttttcatttaattctaagtacacttgttattatagtaactgttgtttgtatgttattttagctttttacttaagtagctatttagcaatttaaatgaaaatgtaattaggttacatctgttttacatgcatgtaataccacgcagatgtaaacttctattaaagccatattttctttttggcaagaaaaggcagaaacaaaatcgtgccagtcgctggaatacgtcttgctctaaaaaaattaaaaaaaaggatatacagagcactgtgccattatttatatggtggttagagtacatcacttctattttttgaaaattaaaaaaaatattaacaagtgaaaaacaagcattctattccatgttccctcttacagtttatctggatacggtgtttaaaatgacaatacagccaggcgcggtggctcacgcctgtaatcccagcactttgggaggccgagacaggtggatcacctgaggtcagaagttcaagatcagcctagccaatgtggaaaaaccccatctctactaaaactacaaaaaattagctgggcatggtggcatgcgcctgtaatcccagctactcgggaggctgaggcaggaaaattgcttgaacccaggaggcggatgttacagtgaaccgagattgcgccactgcactcaagcctgggccacagagaaagactctgtctc

SEQ ID NO: 236011 - DNA, 449 bp, Homo sapiens
cactagtttcccttcaaaatacttaaaggcttcctataactttcagagtagactatctagctaaaagcctttagcaagtaaatccatgtctgatcttggcagaggtgaatgctatccaatcagacttttcaatgtataagtctcaggaaaatgataaacaatgatttgagtgtgggtcagaaacaactgcaggaaacaacctattttattggaagctataattaaatctaaatttcaaaccctggttaatcactatatcaccacattagatgggtcctgataaagaagtgatcattttcatttttcagatgactgcttgttctctgggagagaaatttctaagaataatgcacatctacctgaatgtttccattgatttatttgtgcattactgatacgtcaggaaacaatgatttttctttcgaaatgttttctcagtaaggtgtggt

SEQ ID NO: 236012 - DNA, 5041 bp, Homo sapiens
  misc_feature (936)..(936): n is a, c, g, or t
  misc_feature (1011)..(1011): n is a, c, g, or t
  misc_feature (1076)..(1076): n is a, c, g, or t
  misc_feature (1114)..(1114): n is a, c, g, or t
  misc_feature (1222)..(1222): n is a, c, g, or t
  misc_feature (1319)..(1319): n is a, c, g, or t
  misc_feature (1816)..(1816): n is a, c, g, or t
  misc_feature (2629)..(2629): n is a, c, g, or t
  misc_feature (3506)..(3506): n is a, c, g, or t
  misc_feature (3585)..(3585): n is a, c, g, or t
  misc_feature (3879)..(3879): n is a, c, g, or t
  misc_feature (4129)..(4129): n is a, c, g, or t
  misc_feature (4146)..(4146): n is a, c, g, or t
  misc_feature (4385)..(4385): n is a, c, g, or t
  misc_feature (4446)..(4446): n is a, c, g, or t
  misc_feature (4661)..(4661): n is a, c, g, or t
agataatatgcaacagcatctgtaatgactgcataaacaattcttgcattttcctgaagtgttcattttaaatgattgattcatggctcggttcaagtatacacacagattagcctttgcaaataattcacttaatactagctacaccctgtggcagttgttttaaggtttttgatctctagggggtgtacagaagtgttctacttgtgcaaattgttttcctttttatgtcatcaattctgaaaacgtaggcttattacaggaatttttccccccatatatttttgagcctcatgcaattttgtatagcagtagccagtgaagttatccatattgcttcctctgatatagtctctgagtcaatttgttttaatgtttaaaaacttattgcctacttttccttgacacttacatgttcggcgtttcagtggaagataaaatgaagaaacttgatttccactccactagaaacaggctattttccttctatttcatcaaatctcaaagcttatagagattataactgcatgttggttattttactgttcttgcctatctatctatctatctacaaatctatctttctatcttgttcattttagggataatgaagaagcatttagtgggaccccacaagcataataaaaagtgtcactgtaagatatatttacaagcataaatataaaaagcaatatagtacttagcaaaaaatataacacattctctcataaggcacattttttccacacttttattttgtttttacgatttaaagtagtcacttaaaaatcagaaagcaaaagttttttgacctagatttagttggtttataataagtcttgttggttatggtgagtaatcagttaatacctgttaagctaataatgaggtaagaaatatattgactttatttcttggtgtggaaatgacttattnattcaacagatacttattaagtgggccaggtactacttgttaatacaaatggtgaataaagtggcttacactctnatgagagagacagacagctccgagttaacaaatggataaaaatatacttacatatgtgatatgcntagtgtaagataacgagggtggtcacggtggtggtaanctactccaaatactgtactcagagcatatgtgtgataaatgaagttgttgcagtatgtttaaaacactggagccaaaattttgagtgctcatttgaaaacactttatngtaaaacagtggtgcttagaatgatgcattaaaaaatatatatgactatcttgctgaaggtaaactttttttacaacttacctgacatgatctttcnaaattacaatagattgtatatgttggaaaacatttttgtaaaatgtacaataagtctgacatgtgagtgaaaaaaaccttttttcttaactttcaaaagtgctaaaatgccctgtgtagtatcatgtaaaatagtgacactaatgcctcactcagtggggaggtagatgtggctgaggagggacagatgaatggatctagtcagtagtaacacatttgaagttctggctgatccacagagtcttttacttctagggtcaaggtggtaacagccaattaataggagagcaggttggaagaagagtaaaagatctacatgctcatgttacttgtcgtgctcacagaaaacaaaccagttttgtgtgagaaaattgtttcccgtcaacttgaaaacattgaatttgctcaccctggagctttctttgatgctcctctcttcaagtcccatgtggctgtcttccttctaagaaagctatttataaactgcagtgctctacncaactgtaagcacagtggctgcagtctagtggaaatattttggggtcacaggtagttctgtattcaaatctcagctctggctctttctagctgggagacttgagcaaattatttaacttcctgatctatagcttcctcgactctaaaatgggggtaataaaactttgtttacaggattgtgtgaggattgagactgacacaggtaaggcgtcttctaccatggctggcacttagtctgttttgcttattacttagggctcaactttgaacgaacttgaggttacaaagctcagtatcaggttatcctcgggttgtttcctctgtaatcctcatttccctcagagcatggtgagagtcttgaagacatgaaacattttatgcttttctaccttccttgtgccttgcagagtcctcagtatccagtcagcacttaatgcttatactgccacttctggactgcctttcaacaaatttctcaaagttagagaccatgaagggcatggagactggtgcttttcatgccgtgcttctgcagattttggtggggaggcggtaataggggaatgaaggtggagccatatgaaataaactcttaaaggcatgatagtgaccaggaaaataatatgtaccatattgtgtgacaatccctatgcattgccaaaattgcccagtgtatttttattatgattaaaaccacaatgacacatatgatgcccatttaacatgctccaaaaacacaacaggaattcaccttcacaaagaacaatagacatggggccaagaccttggattctgaccagttttaaacacctncttcctcctacacagtcgagaattatcttacacgattcagccttagaactgggggcatggtttaaattgtaatgtctgaggagactcaggttggctgaataagaaggatgacagtgcctttgtccagttaaatctgcagaggttgtcttccatcctatgcagctgcctaccataaaagaggaatctaggaaagattttccatatagcaggcactcagtacttatgtaaagaatgaaaggacaaaaaaattgttctctttgtatgtcttaatgtaaccctaagagttccaagccaattgttgacattattctaacatagcataaagatttggacagacctgggtagcacattgtaatgatatttggcttgttgatttctcagctctaagagaatctctgcttttgccaataggcacacataagaatgttcttaatgctttagtaataacatagttatccaaaatgttaaactttattccgcaaaattttaactcaaaaaatatttttcagcaagtttacatgtattccctgggcaacactggtcaggcattcattcaacagtagacatttaagtatatattatatactgttcttgattgtgtgggaatttcaaagataaatgagattctatctttgccacttaagacttacaattattggctcccaggcaagatggctgaataggaacagctctggtctgcagctcccagtgagaccaacacagaaggcgggtgatttttgcatttccaactgaagcacccggttcatctcactgggattggttagacagtgggtgcagcccatggagggcgagcagaagcagggtggggcattgcctcacccgggaagtgcaaggggttggggaactcccttcctanccaagggaagccaagagggaccctgccatgagggacagtgctatcaggaccagatactacgcttttcccacagtcttcncaacctacagaccaggagattccctcaggtgcctacaccacaaaggccctgggtttcaagcacaaaactgggcggctgtttgggcagacatcgaactagctgcaggagttttatttcatacctcagtggcacctggaacaccagcgagacagaaccgttcactcccctggaataggggctgaagccagggagccaagtggtcttgctcaatggatcccaccccatggaacccatcaagctgagatccactggcttgaaattcttgctgccagcacagcagtctgaaattgaccngggacactctagcttggaagggggagggacgtctaccattactgaggcttgagtaggcagttttcccctcacagtgtaaacaaagccgcctggaagttcggactgtgtggagtccactgcagtgccacaaagccactgtagccagactgcctctctagattcctcctctctgggcagggcatctctgaaagaaaggcagcagccccagtcaggggattatggataaaactcccatctccctgggacagancacctgcaggaaggggnggctgtaggcgcagcttcagcagactttaacgttcctgcctaacggctctaaagagagcaacggatctcccagcacagtgctcgagctctgctaagggacagacggcctcctcaaatgggtccctgacccttgtgccttctgacggggaaatatctcccagcaggggtcgagagacacctcatacaggggagttccggctggcatctggcaggtgcccctctgggacgaagcttccagnggaaggaatacacagcaatctttgctgttctgcagcctctgctggtgatacccaggcaaanagggtctggagtggacccccagcaaactccagcagacctgcagcaaaggggcctgactgttagaaggaaaactaataaacaaaaagcagtagcatcaacatcaacaaaaaggacgaccatgcaaaaacttcatcctaaggtcaccaacagcaaagaccaaaggtagataaatccatgaagatgaggaaaatccagcataaaaagggtgaaaattncaaaaatcagaatacctcttatcttccaaaggattacaactccttgccaggaatgggaacaaaactggatggagaatgagtttgatgaattgacagaagtaggcttcagaaggtgggtaataacaaaatcctccaagctaaacaagcatgctctaacccaatgcaaggaagctaataaccttgataaaaggttagaggaattgctaactagaataactagtttagagaagaacataaacgacctgatgaagctgaaaacacagcccaagaatttcatgaagcatacacaagtatcaatagctgaattgatcaagtgaaagaaaggatatcagagattgaagatcaacttaatgaaataaagcatgaagacaagattagag

SEQ ID NO: 236013 - DNA, 324 bp, Homo sapiens
cagactgaagagtgttactctgaaggccacgggcagctcctgaaagattgtactaagatatgtgtccaccctatatttgtccctttagtcttggcttggggcatgatctctagccaaagggtagttaccacaccaccttttcagggtaattggtagagctaatgttggttgaggatctatttgaatagcacatacttgaagacccaaaagaaatagtcttgtgagccaccacgtccagtcagcctccattcatttctttgtccagccagcagatctgtacagaaagtctgctcaatgccaggtggtgttctatagactcggaat

SEQ ID NO: 236014 - DNA, 378 bp, Homo sapiens
acttcggcctcccaaagtactgggattacaggctgagccaccacacccggctgcatttatattcattgaggtagttttcttgtgatgacagtattagcctgcttttggtattggggtaatactgacctcatacagtgaatcaggaggtgttccttagaagtggtcttctattttttggaagagttagtgaagttttggtattacttctatctgggcctgggcttttctttgtaggaaaatttaaaattactaattaagtctctttacttgttataggtgtattcagattttctgtttcttcttgagttcatttcagtagcttttattattaatccccatcacatccctttctgtttctgtaaggctggtcaacagtgt

SEQ ID NO: 236015 - DNA, 1784 bp, Homo sapiens
  misc_feature (894)..(894): n is a, c, g, or t
  misc_feature (1020)..(1020): n is a, c, g, or t
  misc_feature (1022)..(1022): n is a, c, g, or t
  misc_feature (1299)..(1299): n is a, c, g, or t
taagtagcatgaaatctaaggaagacaggtaaaccagcagcactggcctaccaagaggagggtatgggagctgtggggtgtggggagacggggtagccacacaaatgggtagaaagaactcggctaacactttaagcaaattgctaaggccaaggatgggatcctgcaacccttggaagccactgactttataaagagatttacacccacttgcaggctgttctgcacaagcctccatcagcccctcacaacgaagtctgggggcaagtgggagacttgaggaaaccaccgtcagtggtgcaggccctgagggaaaactgttaggggaagctccaagctccacccagaccttctcccctataggaaagaaacaaaacatcttaagctcctctggaaaagggcaacaagccatgttatcccagggcacaggggaagtggaagaaaacaggaaaaatcctctatgcctagaggagtagcaagaaatgatcctgagtccagatcatccgcactttcctgctactggaaaaggggcaggatatttgagaaagccccaccccaaagcagtgcctgcccaaaactgaggctagactaggacaagaatcaaacccacccaacctccactgccaggctagcaatcacccagttacgaaaactgatctacgtgtgggtgaaggcatgagcctagaaagagaccctttcagagacacaaaagcacagcagcttgaagttgaaggtagattaggaacataaacaaaaaccccagtccacttagcccacagcagattatgccaggggaatttgaacctggtagtacactgaaggttaaccacagcagcagcaaaaccagctcaactcctggctgggttaactcaaacccccacactgatggtctancagaataagagctatgcccatttctaggcataaacatttacctgtctgtactattgttttgtattcttttataatatggcccgtcaagtgtagccacaagaggagacacacagaaaggatgggggngngtgggacaagaccaaagtgaattatattcacaggacctagagacaggaggcacatcattccatgcagggtcacagtaaagacaccaggtggtcaggaggcaaaagacaggagcaagaggaacacactaggccagagcctttattggggtttccatgggaaaggcaaggcagggcagggtgaacagcttagaactggcttgtttgaataatttcagagagacttaaactataggagcggcgcctagttgcctggtacctggccctgggatgactaagncagaggaatattgtctcctgtggtgtacaggcctgctagaggcggcatggagtctctggattggtcagtttgcagatcaagggcatactcctggctgagcccttgctatgcataagacttggctaaccccaggaggggcagtcattccccagctagaaaggttctttttcatttagttttgtttttaagatgtcaaaacatcataatataccgaacattaaaaagaacactcacagctagctgggtgtggtggctcacatctataattccagcactttgggaagccaaggcaggctgatgccttgagcccaggagttcaactccatctctgcaaaaattagccagccatggtggtgtgtgcctatggtcccagctacttggaaggctgaggtgggaggattgcttgagcctgggaggtggaggttgtggtggccgagatcacggcattgcactccatcctgggcaacagactgagaccctgtctc

SEQ ID NO: 236016 - DNA, 598 bp, Homo sapiens
attttggagcattaagatttaatgactgccccgctgggtttcagacttccatgggacctgtaactcctttcttttggccaaattctcccttttggaataagaatgtttacccaatttctgtaccctcattttatcttggaagtaagtaacttgttttgattttatgggctcataggttgaaagaactgatctccagatgagactttggacttggacttcagacattttagttaatgctgaaatgagttaagactttgggtgactattgagaaggcatgattgtattttgcagtgtgagaaggacatgagatttgaggagccaggggcagagtaatatagtttggatgttgtttcctccaaatcttgtgctgaattgtagtttccagtgttggaggtaggacacggtgggagatgtttggatcatggagatgggtccttcttggcttgtggctgtccttgagatagtgagtgggtacttgcaagatctggttggttggcagtgtgtggcacatcttcaaagcttgctcctgctctcaccatgtgagacacctgctcaccctttgccttccaccatgattggaagcttcctaaggcctcc

SEQ ID NO: 236017 - DNA, 372 bp, Homo sapiens
ctcccggccttgagtaaagtttaaaaagtatacttagggtgggtatttatccctccatgaaagcgccttttactcagccagcacagagccatccctttgcccttccagatgcctgactgggaccttgcttatggatgtgtgagcttttaatctctggctgtaatcttacccacttcaacctaaacttggaatgattactcttgaccctttttttgagtgataaggcaaatctccccacacctgggcattttaaagttatatactgtatgtttaaatatcccccttaaaaagcctgagctatataacaatctagatgtgtctatcttactcttttcccacaaactaagaatccaaataatgttaaaaatcttt

SEQ ID NO: 236018 - DNA, 506 bp, Homo sapiens
ttttcatgaggatctctaaactagataaacagttgtaagaattaaagcagaataatgggaagagtctggattttggagtgagccagacctggattccaaccccaccttggccactcgctacccatgtgttctgggcctcagttccctcatctgtcaaagtggagtaatggcaatggtggtggtggtgctggtgaacaattactgcatgcttaccacatactgcaggcgccattctaaaggcttccacgtcgtaactcatctaatcctctcaataactctaaggaaggttgggtatcacctgcatttcactgctgaggaactaaggcacagagcagaagtaatttcacaaggccatagaactggtggggctgggatggggctgggatgtggcaaccacatgcaatgtttttgcttggaccccaagttctgtctaaatctttcatcacaatagtttggactaaatcactcattccaatgataaatattctcaaatgtccttatctcct

SEQ ID NO: 236019 - DNA, 696 bp, Homo sapiens
gccgagatcacatcattgcactccagcctgggcaacaagagtgacattcggtctcaaaaaaagtaaaataaaataaaaataataaaaccacaacttccttttaaaaaggtggattctgtgaaaggacgtttctcagaggatccttttctttagctgaggacctttatgagtttgaaatctgaaaagccaagcctggagtgagttgggaggagagttagagaaaatttaataggtttgcttaagagaggtgagaatctggaattcttggggtagtccaggaatgggaggctgaggaggagagatgggagagaacaaagggaaagaggagaaagcaaaatatggagaggtcaaggttctaggtgaagtaatatgcccatgatgcagtggctaaaatgattcaagaaagagaggtacattattttagttggaaccctaggttctttgcaaaatctctattccagtgttaacgtattcacttgtttttaattttcagggtcttttctttacaattgtaattagcttcaccatcatagtaactataattatttaaatctaagtataaattagatttcagtattcagcactgttctatattacatgactttgattttcttcaattctgtatgttaatttggcttagctggagtatttcctcaaatgattattatcttttcagaaaagctaaattagggtact

SEQ ID NO: 236020 - DNA, 347 bp, Homo sapiens
tcatgtgtagggtgttaaagaaagtgaatagttaaggatactgtcaaagttcttggtctgagcgtctaggaggctgtagctgcctcatgtattgaaatgagtaagactgtgagaggagcaggtttaagagtaagactgtgagaggagcaggtttaaaatggagtagatctcagagtacagttttgttctcaagtttcagatgctaatgagacatccaagtagagatatcaagtaggtatcttgaaatgagtctggagttcagatttgggagttacaggcttatagatgatgtttgaagccataagaatggctgagaagaccagggagggagtacagtacgctgggtc

SEQ ID NO: 236021 - DNA, 387 bp, Homo sapiens
agcctgtgcaacctttacgtgcccaagtgtgtgaccccagtcctgtgcctttactgggtatggctccagggcccctcttgggtgatccagggcctctgggtctctgccagatgggctccacatccttgcctgtgtctttgtgtgagcccccctcgcctttctgtggtccacgtggctctgtatcattgtctaactatattccccagcctctgtttggagttccctccctgggtccaccctgaggttaagccttgagtaatggaaacagcacttgagttagagctctgggctggtacatcttgactgcatgatcttgccacagtttattcaatctctgaggctcattttttcacctgaacaatgggtgtaataaagcatacctcccta

SEQ ID NO: 236022 - DNA, 412 bp, Homo sapiens
gaggtgcttccgcctctgcatctgaaaaccttgacacccagcaagtcctgctgtctgagctcacccacttgtgccgctgctgtggtagaaagcaggggctctggttccttcctaatgggggactggggccctgagagaggagcaaacttagatctataatgggcaaggatagggcacagtctgaatgccttgataacaggcattgtgaggcaaggaagaatgttctaatcgagctgtctgcagacaaggggcttgctccatgttgctggagttccttcaagcagaaggtgggccagacacagtggctcatgcctgtaatcccagcactttgggaggcctcggtgggtggatcacttgaggccaggagtttgccagcctggccaacatggtgaaaccccgtttctaccaaaac

SEQ ID NO: 236023 - DNA, 449 bp, Homo sapiens
ggaggcgcatctgaaaaaggagagacgcatactctattcctttcaaatttgcaaattagattaagtccccctcctttctaatagtgcagtgaaggaaggtatagagagaagctggaagagtccattttgtagatttccctcctagaaatggactgcaaatttcttttccgttgtggaaacacaagtcaagtgaaatcagtgcctcttcactctaatccacaatagccactattatgaactccattttacagataaggaagcaaggactttgacatcaaacctccacagtcagatgcataaaaagtgaaggatagagactttgaatgtaggtcatactgactccagagtctatgcttttaaggctccctagagtgcctctttgcatatttgataaaaggtgcaggtgaatgagggattttggctgacatctagacttacaagaactactt

SEQ ID NO: 236024 - DNA, 424 bp, Homo sapiens
agtagagacgaggttttgccatgttggccaggctggtcttgaactcctgaccttagatgatccacccccccctaagcctcctaaagtgctgggattagaggtgtgagccactgcgctcagccttaatttttatattatttgtagagatggggttttgccatgttggtcaggctggtcttgaactcctggactcaagggatctacctgccttggcctcccaaagtgctgagattacaggtgtgagccactgtatcctaccactcagtgcattttagctatcattatcacccctcagtaggatcgaaattgttatgtgtgtttcaggatgcgctcctggagggtacccttggccccatcttaatccttggactaggcttgaaaatatggggtgagaatcgtaataaaatgatattgaagacttatc

SEQ ID NO: 236025 - DNA, 479 bp, Homo sapiens
ccaagttaagcactcctgctttggagcaatattactaacatctgcagtagttggctattgttacaggttgaattatgccacccaaaaaggttatactgatgtcctaacccctgctatctgagaatgtgattttattttgaaatagggtttgtacagaggtaatcaaattaaaatcaagtcagtagggtgggctctaatccactactagtggtgtccccataaaaaggggaaattatggacacagagacagacatgcacagagggaagacaatctgaagacacacagggagaagactgccatgtatctacaagccaaggagtgccaacaattgctggtaaacaccaaacactagaagaggcaaggaaggactctcctttacagttgtcagaaagaacatagcccagccgacacctgattccagacttctatagtttccagaactatgtgatattaaatatctgttgttttaagccacaca

SEQ ID NO: 236026 - DNA, 366 bp, Homo sapiens
ccaaggtctctgaaaatgagttttagttactctattatctaagtatctttcttactgatatgtaacttacctggctgaacaattacattttagagctccaaataaattttcagcctattatgtcattgtccaattacaagcctcattgtaatagccatgttaaaaacaataaagccggtgaaattgatttcagtgtatttcaaattaacctaatatattcgaaatattatgtattgtgtatgtgtggatttgtactagccactggttgagagctctgtagccacacatggcaagtgggtaccatattgcttagcccaggcctagtagaagattaagactcagtcagaggaagtaaggcagatccgt

SEQ ID NO: 236027 - DNA, 478 bp, Homo sapiens
gctgggattgtcctgcagctgcattcttctgggggtcagctggggctggaagcttcctgtggtctagtcacacagctggggtctcagctagggtgatagaacactgggggcaggccggccttgctgtctctctctggcttctcatcattcagtggtctagcctgagttttttacatggcagctcaggagggtcaatgtggacgctatacagcctgtaaggcccgggtttggaagtccaagaatatgacttctaccatgttctactggtgaatataaattccaaggccagcctagattcaagggataagaacgtagatttcactccttgatgggaggatcccatgtacagacagggatccttatgagggattatgagaactcctaatccttatgagggattatcatacagagaatttatgggggattatctttggaaataatctaccatagactgaataaatgataatgtaatgtgatg

SEQ ID NO: 236028 - DNA, 1182 bp, Homo sapiens
agggccgaggcccgtcctgccccgcgcggcgggagtggttggagccggagggcggatctgtgcctggccgagggtgtccgtcggcgtcactcaccgtcctcggcccgcctctgcgtccactaggagcggcctgaaagaggcccgcacgcgggctcgagccgcgtggaatgcacctagagctgcattccatgtattccttggcttttcgtcctttcctccatcatcaagtaactggatctgtgagcatgatgaactttgttttcctgagcttgtcctgtgtctcctcttctggccacacctgactgagcagaacataaaagcgacagaacaccaggagggctgctgcttggggaaattgtgtgagaagagtcctgggggactaggggcagggcaagcactgctctccctctcctggaggctggggagagcatcaaggagactaccaggtaggaggaaccatgggcagggcctccctcatcaggatgctttccccacaacagagggatttaagcccctggtgggtgagtcctggattaaccaagacctgagccttttggggggtgcagaggacagaggacactgtgaggtgagtttctcctgggtggattccccaggggcctctgaggctggtttcaggccctgccctttggctgccccactggaagctctgagcatctacccttcagggacgctttccctggtctgaccttggcaagggcaaataagaggtactccatggagggtcaccaaggtctggggcgtaaacggtgcccatctgcacagtagcatgagggccacagagtgtggtaaatgtcagtgaccatcacatgcggtccccagtgtggctgcaggggccacttaggattcttctgttcggggtcccaggccacacttggggaaccctattggaagcaacaaggtctaggccctgagggcccagggctctgccctctccagggctctagctgagccacgtgcaagcatcctcccggccctcccagctggtgtgaggaggaaaccacagccaaagggcaaggtgctccacacagatatgtccctagtcagcctgccccattcggcctctggagtgggagccttgggtctgtctggaaccagtgtggatgaaatgcagggagaaactggaatcatagccatggacagccactcacatagctgggaaga

SEQ ID NO: 236029 - DNA, 577 bp, Homo sapiens
agggccgaggcccgtcctgccccgcgcggcgggagtggttggagccggagggcggatctgtgcctggccgagggtgtccgtcggcgtcactcaccgtcctcggcccgcctctgcgtccactaggagcggcctgaaagaggcccgcacgcgggctcgagccgcgtggaatgcacctagagctgcattccatgtattccttggcttttcgtcctttcctccatcatcaagtaactgaaagtcttgctctctcacctaggctggagtgcagcggcgcgatctcagctcattgcaacctctgcctcccaggttcaagggattcttgtgcctcagcctcccaagtagctgggattacagggaccatatgagatttatggatgtggccatagaattctctgaggagagagtggcaatgacctggacactggacagcacgaactacctcataggaactgtgaatgtgaagagaacctaacacgcaaagcctgggcacgccatggagtgcacggcatagctgaactcctacgcacagaccacactcaccctgactggacgcacggccacacgcgccccggacacc

SEQ ID NO: 236030 - DNA, 448 bp, Homo sapiens
agccattttaaagccaattaactctgttcctgttcacacccttattaaaaatataattacagcagtagtctccagggactgtcattgggtaggctttaccaaggtaaattagccaagaaataactaggctgtgtaacaccctctcagaccctggaaatcattttggttgcagaagctacttagtatcagagtaggctggggtactcataaatttggatttggaaaaagccaattccaagtcatcctaaatgtggaagaatctgtgattttgagaatgattctggaatcagttatccagggtccagccaagtctgatacaccgatcctcagaaggttgtattaataacaaaaagaaaccaggtttttgtattagatttgatggaagaggctgggggacagaaggtgatgtagcattttgttttctggggtgctgagattgtgggattag

SEQ ID NO: 236031 - DNA, 515 bp, Homo sapiens
aagctcagaagtgggaggaatacaggccttgattagtgaatttcaagctcagttctcggggtgaaggacaaggttaattctactgtaaataatcctaccattcagaaaagctggtgtgtccaaggaagaaaaaacaggctgtgactacaaacctaaaagtaaaggcaaacaactgccagacagaggcaggaaaacggggaagagcccttggtaaatattgcatgcctcctggggaccccatgggctttgactcaagggggagatgaagggaatttgttaaagaaagaagtcactgagacagacaaaagcttccggcacaggaagttagttcgactaaggataccgaaatgtaggaatttgaatgggttcctgggtgtgaggttgaagtgaaacttgattgaaaagaagctgctggtggtgagtctctccttaagctattcctggcttctgggtagttggtgtaaactctgtggtccttgaataaagtgtccttgagaaatttagaaggttaaaca

SEQ ID NO: 236032 - DNA, 245 bp, Homo sapiens
aaagagctggagataaagtgtgcatagtattgtagggagcaacacctgagtgctgctcaaaggactggaggagcctagcaggaatgctggcagtggtgacttggattggaggttggggcttagggttgaattatagtggctgaaagtgagacagtctaatgggtagatacaaattgtgttcaaagaaggaaacaggagaagtatcatattaagcagtaggtctgatagggtgagcccaaggttgt

SEQ ID NO: 236033 - DNA, 351 bp, Homo sapiens
gagacagagtttcgctcttgtcacccaggctggagtgcagtggcgtgatcccagctcactgcaacctctgccttccaggttcaagcgattttcctgcttcagcctcccaagtagctgggattacaatgcatgccaccatgcctggctaatttttgtatttttagtcgagacggggtttcgccattttggccaggctagtcttgaactcctgacctcaggagatccatccgcctcggcctcccaaagtgctgggattacaggcatgagccaccgcacctggccctaattctgtcatttcttctatattcgttagctaacatcctgtaaagaagacattttcttttttactct

SEQ ID NO: 236034 - DNA, 417 bp, Homo sapiens
gactagctatattttagagagtttgttaaatgcagtaaggtttttcatttattcaagaaaactttagaaattgaggacaatattttttatgtcttttagtatttctgtgtacagtagaattatttgaaaaaataggccaggcatggtggcttctgcctgtaatcccagcactttgggaggcccagctgggcagatcatgaggtctgagcattgagaccagcctgaccaacgtagcgaaacaccatctctagtaaagatacaaaaattagctgggcgtggtggcgtgtgcctgtaatcccagttactcaggaggctgaggcaggagaattgcttgaacccaggaggtgaggttgcagtgggctgagatcgccccattgcactccagcctgggtgacagagcgagagtctgtctccaaa

SEQ ID NO: 236035 - DNA, 236 bp, Homo sapiens
aattcagggagatgaggtctcagtcacacattgagtctcctttccagtggcccttatggctgagggagacagtgtcccctgggctgcaccagttggaagagaaggcggagttttcacagccctggttagaagtgggagggaagaggtcaggtcctcaagaggaagaggaagcaaaaaaagaaagaaggaactgacagaactgagatagggctgggcaagagggagaaaggagatga

SEQ ID NO: 236036 - DNA, 248 bp, Homo sapiens
tgccccagagaattctgggaaagtaaagtctgatatcctagctaggctgtgccgtatttgacggcagcccaactggggcagtggccaggctctgtaaccactctcaccacgcctgtgcaccagcttccaagctgggagagaagcacagacaccaccaaatgtacttgcaatgttgttgttgttgttgtttttaagcaggtgagaattatgcaatatatcacgataaagcagatgaatgaggcattctt

SEQ ID NO: 236037 - DNA, 709 bp, Homo sapiens
aaaatacatatgccgaattttgtctgttccaatttattgcacttcaaagaattcactaaccattgtttctctgagatgttcctctgggagtgatccacatctaataacgtcttggagtcagcttggaaagtttgcaaacatgaatcaaactgaagtgcttttggatagcgtttgaggaaagccagggcgactgtatgctggaaaggaatctcaggagtgagctgtccagttgttgatcttccagcgaggcttagcttgcccgtgggtctcctcttttcactttccttccttcttgggaactgacaagagttttgcaaaaagcctggttgtcatggtgctatagaattacagcattgttaaggtaaaccagattttgctgtataaaatcagcagataccataacttgcccaagtgtaattttttttcctggtcctttatctttcttccttacgttttggtataccagcaaagagaagtctgaaaccatctagacaaaataaagcatgaaatacgtagccatatgcaactgtgcatgttctgagaattattgtataaatttcaggttttcacattcagttcactttactggttacaagttaagaattgagttgttccatattgggtttgtatgattgcttttgctcacaaaaataaagctaatgtgtaagtcttaacagcttttttaaaaatgagactacccattaaatca

SEQ ID NO: 236038 - DNA, 1054 bp, Homo sapiens
gtactaactaaagaatctgtgagaccgggcacggtggctcacgcctgtaatcccagctacttgttagactaaagcaggagaactgcttgaacccgggaggcagaggttgcagtgagccaagatcgcaccattgcactctagcctgggcgacagagcaagactctgtcaaaaacaaaaaaaaaaatctgtgaggctcaaacatgggggtgaggggtgagaatagggcaccaaaaggactgacatctaaataatctgtcagtgacaaaatggcttccaactaattaaacatagaaaaacctcttttagggaagataatcctattggatctgcttgcaagatttttccagccagcttctgcctcttggagcttcaattaaaagctgtttagcagatggcaaattctgagttacaaagttagactctttggcaacgatatgtgcttttgctttcccaggggatcctggccacatatggccctggaagaggcgcgagagctctttcttggcacacagtagagagctcctctcccagcttaacacacagatgacaggcatttcaacataaccatcaagggtggtgagcaagaggggagttttcagttaattcagaaatatgggggccctggaaatcataatatatcagggctggaagggaactcaaacagcgtctactacaaccccttcttcatacagaacgagggcactgagccttggaagaggttatgcaatttatctaaagttgcccagcaagggagaagcagagtcgggatcaggcttgtgcttatttaccatagaagcacttctctattcacttggaggactgtgttcattgcctgaccctttccttataatcacgaggctcctgaagagatattttaccaatgacctgacaaatttgccagaaggccttgaaagggtcattcatcctcatgtccacctcctgctttattgcaggacaaaaccaggaccctctgaaatggaacttcatcactcttctcttcaaagctttctactacagttgaagtcacagtttctcttgggtgctgtcaaagaga

SEQ ID NO: 236039 - DNA, 125 bp, Homo sapiens
gcttcttaaatcccctaaagtcttcaacccaatttctttcttaaatggcttttatgctcttttcaaatactcctcttttgttctctctttactgtattttattatgctccacatcttgtttctgt

SEQ ID NO: 236040 - DNA, 447 bp, Homo sapiens
caattatcaaatgaactttaaaaaagtatgttaacataaaatatattaattacctaggaattaatttattgagagatacacaaaataactatacaaaaaaaataaaaaaacaaattaaagaccaaaatagatgaaaggatataccatattcatggaatataagattcaatatttttaaaatatcagtttcccctaatttgctctatagattcggtgcaattctattcaaaatttcaccagaaatttttgtgaagattgacaaactgattttaaatttttggggggaatttagaggaccaagtatagagaagacaatcttgatgaaaaataaaattaaatgacttctactactaaatatgaagacattacactactaaacattaagacattataaagcttcagtaattaaacaatgtgatattatttaaacaaataaaccattggaat

SEQ ID NO: 236041 - DNA, 320 bp, Homo sapiens
ggactaatgaacaggttccatactatccttcaaatgtgaccaaagttttctgcaaaacgtcttataaatctttttttaaacgttttattcttagatatctcatatttgggttgctagtataaatgtgtatacataagcttttccattgtttagttaggaaaattttactttgaaacttttatcaatgacaacaatatcaaggaagacttattagaaatgagaaaattttaagtcagtgcttctcaaactatattaaagggtctgtttttgtgtaaataggagtgagtttttagaaaaaagtaaaaaagggccgggcacag

SEQ ID NO: 236042 - DNA, 371 bp, Homo sapiens
aggagacatgagactcacagcagatctctctggcttaacatgggagatggcgactttataaagtgctccagttcttatggtgttttctgaccaggatctgtaccaagcagatgaacatgccaagatgtcttcgttctccctggctgcacatcctcctgtagtcttcatgccggccttcgtttgacctgtttttgggaagttctgccttttccttctattttaatctacactctgttgccaccattacatatccatgcatgtagagttgatggtagtatactaaaactttttagaagagaagatatgaaaacccaaatggagtgaatagctaaccagaagacatatattaaataagcaaaattcccaactat

SEQ ID NO: 236043 - DNA, 391 bp, Homo sapiens
gacaagagtgaaactctgtctcaaaaaaataaattaaaaaaaagactcaagtgtcatgtctgaaaataagagtttctcaccatgttttttcagtcattcaagtaacgccttctaaataagtttttggtccggtcatggtagctcacgcctgtaatcccagcactttgagaggttgaggctggcggatcacatgagttcgagaccagcctgaccaacatggtgaaaccccatctttactaaaaatacaacaaaaattaggcgggtctggtggtatacacctgtagtcccaagtactctggaagcaggagaatcatttgaacccaggaggtggaggttgcagtgagctgagatcacaccactgcactccagcctgggtaacagagcaagactt

SEQ ID NO: 236044 - DNA, 363 bp, Homo sapiens
ttagacaatgagacagcagaatgaaagtggctatttaaaggtctgtatatcagaatttgagagaattgttttgagactaacgggtgtatatattagtcctcacgctgctatgaagaaatacccgagactgggtaatttataaaggaaagaggtttaattgactcacagtttcacatggttaggaaggcctcaggaaacttaacagtcatggcagaaggggaagaaaatatgtcttccttcacaaggcagcaggcgagagaagaatgagaactgagtgaagggagaagccccttataaaaccatcagatctcagtgataacgtactatcacaaaaataggatgggggaaaccacctcccaattc

SEQ ID NO: 236045 - DNA, 449 bp, Homo sapiens
aaggtaacacctgtagagagttttttgtgagtctgagcaggcccccagggaagtcctggaggaccgtagcatcccagtttggccctcagcccactgtttgttttgcccagttctcagtctctcagctttggaaatgttaggaagagaaaggagaagcaaggcggccagagtgctgcggagctgggaggggcgtttgacagacagcgcagggtggggcgtcagggatgccgtggacagaggagcttggggaaaagagaaggggcacttaagcgaagttttcagaagccttgatgggccttgtgtggtgcaacaccctcctccatctctaaaggaaaacagcagtaaaatctatgtgattgagacactgggttctggcaatatggtggacctgaacatatatactccttatatgtatatttcataataaagaaaatactttttaaaatcca

SEQ ID NO: 236046 - DNA, 286 bp, Homo sapiens
ttcaattcaagcagtatctatggatctgcctgcactgaaggtaagcaacatggcaccatctttctaacctacccctacaacaccatatttctgttaagtgtattattattttttcattatcaagattcataaatttactctgtcctgtagccataattctcagctttgctttttctttaagccattgaatgtgtttaatgaccaaccttccacttccgggtttttaatttttcacttaacaattggcttgctgggttttgttgttggatggctttttcaaaaataa

SEQ ID NO: 236047 - DNA, 327 bp, Homo sapiens
tgactcctaacccctaactctgaccccaacccctatctccaacccctaaccctaaacttaacccctaacaccaaccttaagcctaggttcgttactacgtttgtattgactatgtcaatgttgattattatgatcgctgtcttaggactgcacggcagcgaggggattgtgcatcttatattaatgtttttgtgtcgaggcagtgcattagcactacaggtgcttgttacatgagcaaggggggtgtcatcttttgagtgccatgtctgcattaggaatgctgcatttgtcttccgaggctgcggtgtggatctcgcactgcggccg

SEQ ID NO: 236048 - DNA, 1508 bp, Homo sapiens
ggagaaggtggtgagggagggaggggtggagggaagaagggaggaaaggaggggagagagagtcatttgtatatctttagagaaatatctattcagatcctttgcccatttataaaattatttgtagagatgggatctcatcatgttgcccaggctggtatcaatcctcccctgccacagactcccaaagtgctgggattacaggtgtgagccactgtgcccagtcaacaggattaatgacaagttaatctttaaagccgtttgtactaaaggtacaggaggacagatatgatgtttgtgatgatgctgagcatctcgatgatgatgttgagtcagaaagcttgtatagggagcataaacattctatgtaattaaaagtttgaaataagttagtacagttcttccctctcctcctctgattctactttgaatgatcaaaccctagtcatttttgttttttcttataatactctttccttttccattttgtccatagttatataatacacacagtgttggagtttggagagacagactataaagttaaaatgtaattagttttaattgattagttttaatcagactttcactattttaaatctgtctatgccatcccctatactgtagtacgtgaatagtcctctccaagcagtctagcagctccaagtcatcttctctttgaaatgtctacgttgtgactgaaatgcctgctattccaggttcaactgttatctttatactttttttgttttgtcattggaaactaaaattctttcctgttttttgccttttatcttgggtccatggtataaacctttctataggtgatcctttttcttgtttttgaattaaaacttaacacaactgcttttttgtctttctgtcctattactatctgtcttaccttcagacttttacacatcctgttttacctctgcttataatttccttctgccacactccttttcctttccctagttaacccttagattctcttcatgtacctctttaaacatcgagacctccagggcctacccatgtatgtgctcccagaaaactctctattttttcattgtactttccacactagatgaaaatgatcagttttcacttctcatctctaaacataattgtcttgttcacagtcatatgtgtagtttttagtacaatgtcaggcatataatacgtttttactaaatgtttccagaatatgatgtggcttttaaaatttttatttattgtctgggtgcagtagctcatgcctgtaatcccagcactttggaaggctgtggtaggaggctcacttgagtccaggagttcaaggccagcctgggaaacagcaaggcccgtctctacaaaaaatttgaaaattagctggatgtggtagcacatgcgtatattcccagctactgtggaggccgaggtgggaggatcacttgagcccaggaggttgaggccacattgagctatgatcactcctgggtgacagagtgagaccctgtctcttc

SEQ ID NO: 236049 - DNA, 2581 bp, Homo sapiens
aaagccctcctcccgggccaaggtagaggaagttgggctcccgcctggctgggaggcgggagggatcccgctcctgttgttttccgccggcaggagtaggctggcgggcgcagggggcggggtgcgccctccctccccggccagggcgctcgggagcggggacccgagcctgcagccgagctccgctgccggccctggacactcggctcagccaagcatccttcctgggggccgaggaagtggggccactctgccgttccgaggacctgggaggagccctcggtaccccgggccccggggccctggggcacacacgtccagcccagcccgagcctgcgtttcctgagccgggatctggggcgagatggccgcaggcggcagtgcgcccgagccccgcgtcctcgtctgcctcggggcgctcctggccggctgggtcgccgtaggattggaggctgttgtcatttggagaagttatgagaatgttactctgcactgtggcaacatctcgggactgaggggccaggtgacctggtaccggaacaactcggagcctgtcttccttctctcgtccaactctagcctccggccagctgagcctcgcttctctctagtggatgccacctccctgcacattgaatcgctgagcctgggagatgagggaatctacacctgccaggagatcctgaatgtgactcagtggttccaagtgtggctgcaggtggccagcggcccctatcagattgaggtccacatcgtggccaccggcacactccccaacggcaccctctatgcagccaggggctcccaggtggacttcagctgcaacagcagctccaggccaccacccgtggttgaatggtggttccaggccctgaattccagcagcgagtcctttggccacaacctgacagtcaactttttctcactgttactgatatcgccaaacctccaagggaactacacctgtttagccttgaatcagctcagcaagagacatcgaaaggtgaccaccgagctcctggtctactatccccctccatcagctccccagtgctgggcacagatggcatcaggatcgttcatgttgcagcttacctgtcgctgggatgggggataccctgaccctgacttcctgtggatagaagagccaggaggtgtaatcgtggggaagtcaaagctgggggtggaaatgctgagcgagtcccagctgtcggatggcaagaagttcaagtgtgttacaagccacatagttgggccagagtcgggcgccagctgcatggtgcagatcaggggtccctcccttctctctgagcccatgaagacttgcttcactgggggcaatgtgacgcttacatgccaggtgtctggggcctacccccctgccaagatcctgtggctgaggaaccttacccagcccgaggtgatcatccagcctagcagccgccatctcattacccaggatggccagaactccaccctcactatccacaactgctcccaggacctggatgagggctactacatctgccgagctgacagccctgtaggggtgagggagatggaaatctggctgagtgtgaaagaacctttaaatatcggggggattgtgggaaccattgtgagcctccttctgctgggactggccattatctcagggcttctgttgtattatagccctgtgttctgctggaaagtaggaaacacttccaggggacaaaacatggatgatgtcatggttttggtggattcagaagaggaagaggaggaggaggaggaggaagatgctgcagtaggggaacaggagggagcacgtgagagagaggagttgccaaaagaaatacctaagcaggaccacattcacagagtgaccgccttggtgaatgggaacatagaacagatgggaaatggattccaggatcttcaagatgacagcagtgaggagcaaagtgacattgttcaagaagaagacaggccagtctgaagaagaggatggtccatggttgtcttgctctgaaagcttggagagctacattgaagacgagctcttcattcagctttgactccacctgcacccctggcgggggcttgcactaacaatgtttgggtctcagcaaaaaacaaaaccaagcacacacatctttccttccatgtattgaaaaacattggtttgatttgctctaagttttcccaatgatgtttaaaagctttgagaaggaaagctgctttggtgtctgaggtgccacttctgctgtgaatcctggctttatccaggttgatctactgtgatagatgctgatttagagggaacagaggtcaggaaaacacaagatggaaaattgcaataacccatgcactgagacttagaaaatcatccttactaggtaaaatgtattatgatgcaataagtgccaactgatatttctcacgttgggactggccaggaactgctgcaaagaaaaataagcagctccttctccattatttacattttaagatgtggtggggggaggttgggagaaattagttctgaggttatcatatgccttttttaaaagataatggaataaagctatttttaagt

SEQ ID NO: 236050 - DNA, 2013 bp, Homo sapiens
aaagccctcctcccgggccaaggtagaggaagttgggctcccgcctggctgggaggcgggagggatcccgctcctgttgttttccgccggcaggagtaggctggcgggcgcagggggcggggtgcgccctccctccccggccagggcgctcgggagcggggacccgagcctgcagccgagctccgctgccggccctggacactcggctcagccaagcatccttcctgggggccgaggaagtggggccactctgccgttccgaggacctgggaggagccctcggtaccccgggccccggggccctggggcacacacgtccagcccagcccgagcctgcgtttcctgagccgggatctggggcgagatggccgcaggcggcagtgcgcccgagccccgcgtcctcgtctgcctcggggcgctcctggccggctgggtcgccgtagcccaaggttgaactcgccttacacctgtaaccggtggacttccctacacacctttgcaagtcttcctgtgccgaccagcgccttcaaagcggggtcttccgcctttacttttggaaaagctttttattttgaaatacttggctgacttacaaaagacttcccctcacacttgacatgattgacaaaaggtctgaaatgcttcatctatggtctgctttgctacgaaaaaagaattggaggggtgcttacaaaaatatgtagaatgtaaaaagattgaactatttatatatatttgaatttaattcaccagcatgcctactgtgcatgcctactgtgtgctgggagtgtgacaagctgggaggaggctggggtgcagggagaggagatggagccaggaggtggtgaagtttgccaggatgcaggcagagcgctactttttgtgttcccgggtctgctccacccaacgggtctcctcttgcacgtttctggagatgggttgtaaagtatgctggagcttcttagcagcaagtgccaagagttcctaattattaggctcatacaattttattttgcttttttttttttaaccaaccatttaaaaacaataacatctctagatttccagtttatctggaaaaatctgaaggtctggcaacacggggcctgctttcccagttggaattgggcagtggtcatcctcttatctagggcatatgagcccaaatttgttccacctctccctgttgtaatatttgccccgccaccttcagtcatgggtgttacctgctggccctgcaggcatttggctgagtaatcactgtgctggggtgtgggtgatgggggaggacagttcctagttggtcatctctggacgtgaaaggtggttgtcaagtattcccatctccccagctgtttgcagtgtttcctgcacgatgaacaccaggaacctgggaagtgagaagaaccctgggatgaagtcatcctgctggaatgacctggctttcaggctgactgccacccgccccatggggaacctatctccactgctatggccagctatttttttcgagccaggctctcgctctgttgcccaggctggagtgcagtggtgcaatcactgcactgatcctcccacctcagcctacaagtagctgggactacaggcgtgcaccaccacgcctagctaatttctaaaatttttttgtagagacggtctctacaatcgcttgagcccaggctggtcttaaactcctggacccaagcgatcctcctgtctcggcctcccaaagtgttgggattatgggtgtgagccaccgtgttgggcctttgcccagctattttgatgcccagacctgcttcacctttgtgtatgatgccagggggcttcctgagcttggtgtatttttgttgtgtgtttgttttttaagttgggagtttttggggaaaaaaatttttctcctgacattcaatgccagacaacttatatgcatccactagctaccccggattgtaaatcctaggttattcttgggaaaagttgctttaaaaaaataaataaatgtttgggtat

SEQ ID NO: 236051 - DNA, 2770 bp, Homo sapiens
aaagccctcctcccgggccaaggtagaggaagttgggctcccgcctggctgggaggcgggagggatcccgctcctgttgttttccgccggcaggagtaggctggcgggcgcagggggcggggtgcgccctccctccccggccagggcgctcgggagcggggacccgagcctgcagccgagctccgctgccggccctggacactcggctcagccaagcatccttcctgggggccgaggaagtggggccactctgccgttccgaggacctgggaggagccctcggtaccccgggccccggggccctggggcacacacgtccagcccagcccgagcctgcgtttcctgagccgggatctggggcgagatggccgcaggcggcagtgcgcccgagccccgcgtcctcgtctgcctcggggcgctcctggccggctgggtcgccgtagcccaaggttgaactcgccttacacctgtaaccggtggacttccctacacacctttgcaagtcttcctgtgccgaccagcgccttcaaagcggggtcttccgcctttacttttggaaaagctttttattttgaaatacttggctgacttacaaaagacttcccctcacacttgacatgattgacaaaagggattggaggctgttgtcatttggagaagttatgagaatgttactctgcactgtggcaacatctcgggactgaggggccaggtgacctggtaccggaacaactcggagcctgtcttccttctctcgtccaactctagcctccggccagctgagcctcgcttctctctagtggatgccacctccctgcacattgaatcgctgagcctgggagatgagggaatctacacctgccaggagatcctgaatgtgactcagtggttccaagtgtggctgcaggtggccagcggcccctatcagattgaggtccacatcgtggccaccggcacactccccaacggcaccctctatgcagccaggggctcccaggtggacttcagctgcaacagcagctccaggccaccacccgtggttgaatggtggttccaggccctgaattccagcagcgagtcctttggccacaacctgacagtcaactttttctcactgttactgatatcgccaaacctccaagggaactacacctgtttagccttgaatcagctcagcaagagacatcgaaaggtgaccaccgagctcctggtctactatccccctccatcagctccccagtgctgggcacagatggcatcaggatcgttcatgttgcagcttacctgtcgctgggatgggggataccctgaccctgacttcctgtggatagaagagccaggaggtgtaatcgtggggaagtcaaagctgggggtggaaatgctgagcgagtcccagctgtcggatggcaagaagttcaagtgtgttacaagccacatagttgggccagagtcgggcgccagctgcatggtgcagatcaggggtccctcccttctctctgagcccatgaagacttgcttcactgggggcaatgtgacgcttacatgccaggtgtctggggcctacccccctgccaagatcctgtggctgaggaaccttacccagcccgaggtgatcatccagcctagcagccgccatctcattacccaggatggccagaactccaccctcactatccacaactgctcccaggacctggatgagggctactacatctgccgagctgacagccctgtaggggtgagggagatggaaatctggctgagtgtgaaagaacctttaaatatcggggggattgtgggaaccattgtgagcctccttctgctgggactggccattatctcagggcttctgttgtattatagccctgtgttctgctggaaagtaggaaacacttccaggggacaaaacatggatgatgtcatggttttggtggattcagaagaggaagaggaggaggaggaggaggaagatgctgcagtaggggaacaggagggagcacgtgagagagaggagttgccaaaagaaatacctaagcaggaccacattcacagagtgaccgccttggtgaatgggaacatagaacagatgggaaatggattccaggatcttcaagatgacagcagtgaggagcaaagtgacattgttcaagaagaagacaggccagtctgaagaagaggatggtccatggttgtcttgctctgaaagcttggagagctacattgaagacgagctcttcattcagctttgactccacctgcacccctggcgggggcttgcactaacaatgtttgggtctcagcaaaaaacaaaaccaagcacacacatctttccttccatgtattgaaaaacattggtttgatttgctctaagttttcccaatgatgtttaaaagctttgagaaggaaagctgctttggtgtctgaggtgccacttctgctgtgaatcctggctttatccaggttgatctactgtgatagatgctgatttagagggaacagaggtcaggaaaacacaagatggaaaattgcaataacccatgcactgagacttagaaaatcatccttactaggtaaaatgtattatgatgcaataagtgccaactgatatttctcacgttgggactggccaggaactgctgcaaagaaaaataagcagctccttctccattatttacattttaagatgtggtggggggaggttgggagaaattagttctgaggttatcatatgccttttttaaaagataatggaataaagctatttttaagt

SEQ ID NO: 236052 - DNA, 410 bp, Homo sapiens
caaaaaaaaaaaaaaaaaaaaaaagatttgttttttactttgaatgtaaccagtatcagcaaataacacattttctgaagaactgctaatgttttccatgctcattagaaatatagacctagtttctcccaaagccagatggtcatgtgactgataatttaagcatgtttctatgtgccaggtttttcaaatggtttgactggaatgatacagtcactttggcaagttattttaattgcactattttaaatatgtaaaacaattttcaaagcatacatttaacatgttgtttcaaaatgaatggggtttatgaaattatattgtgaaattttattacttgtattgatatgacatttgtacttgatattggtaattatcagttaagcaaataaatcctagtttaaactgac

SEQ ID NO: 236053 - DNA, 1595 bp, Homo sapiens
  misc_feature (974)..(974): n is a, c, g, or t
ccccgtcataggacttgtgacttactaccatcatacatatttgattcaattattatttattgcttaaattgttatgatcatttattataaatcatgtattacggctaattaacatacatatgctcagtcatttacttgattagttattagcctcaattatattattttttaatatatatttttatttgacaaatagaaagtatatagattggtacaatatgatgtttggaaataagcatatattgtggaatgactaaatcaagctaagtaacttatgcagtaccttacatgcttatcttttgttgtgataagaacacttgaaatctattctactgtcttagaaatttaaaaatgggcaaaggacttgaatagacatttcttcaaaaaaaaatgcaaatgaccaacaggtatatgaaaaggtgctcaacatcactaattatcagagaaatgcaaatcaaaaccacaatgatatatcacctaacacctgttaagatgtctattagaaaaacaaaatgtaacaagtgttgataaggatatggagaaatagaaatctttgtgtgccttgtacactgttgcaagagcattagtagaactactttggaaaactctttgtaattatctactaaagatgaatatatgcctactatatgacccagtgtttctactttgaagtgatacagccaacagaagtacatgcatacatgcaccaaaagacatatacagaaatgttattaggacttctggtttccagttccacatgtagggagcttagaagttgccactccaaccctaacaagtaaaaagctaagcaaactgagaaatcaattcttatcggacccaggataggggaggacacagggaaaaccactgtccccaaaagactagagagacagactggcaaataccgagagccacaagttactagagcatgcagtcacaaacagaaacccccacaggaagcagtgccatggtanaaaaacctgagctgtaattgatgattataggaggttcagtatgaacaactctgaaagttttaaactccaggaggacccactcatggggaaacaccacaattttgttagacttacctacatgagctcaattagattctccaagtaaatattgcagaaaaatccctatgtgcttctggcagggggaaggtgaaatgaaccattttgaaatatgccagagcactgtgctcttcttaacaaggtctgcccccaggagaaattagttagctaaatcctaacctgctggggtattattagagcctgacccaagggaagggaaatacctaactcttgtcagctctaaccttctgcatcagagaagggaaatactaaactccagacaactctagccatcctgtcctaccaaagaggggagaagaatactgaggaaacacttagaagtttgtacaccagaggcatatgcttactaaaagactgagacttaatcataggatgatagaatgtctcccctcccctttcccccacctaactgctacattgctaaaagctgatttataaaagttccttttacctggtacatcatgtccagctaccaagaaaaaattaccaggcataccaaaaggc

SEQ ID NO: 236054 - DNA, 400 bp, Homo sapiens
aatcctctttcaaggccgggctttggatcgctggcgtcgactggctccccactgctcctggctcaggagggaccattcaagggggcagcttcccgcctctattcccacactccaaaaaacaacaccgcagacagacaccctccaactaaattagattaaactccttctcttccacagcgtattagcctttttgctgcccaagcctccttacgcagcccctcctcatttaaagacacagatttctttttcatctctgcaactgcaacaacaacaaacacaatcatatatatatatatagtgtgtgtatatatgtgtgtgtgtgtgtatatatatgtgtgtgtatatatgtgtgtgtatatatgtgtgtgtatatatgtgtgtgtatgtgtgtgtatatgtg

SEQ ID NO: 236055 - DNA, 310 bp, Homo sapiens
cagccaatctgatgagccactcactcagccctgcagctgtgtatccattcattcaccagttcattcagccattgcccactgagcacctcttgttaattctgatgatcagagaatgttaagaaaaatacaacttctattgccagggagtttgaagtcagccacaagagacagatgtgtaaataaataattatagcacaatgagatgtgggtgcaggctgttgggagtaagagggttaagtagctggagaatctagcaccagagacgagatggcatatctatttattgcaaggtgaataagagttcaccacc

SEQ ID NO: 236056 - DNA, 475 bp, Homo sapiens
atcttcgggtagcctaagatagcagccttggaaaattcaaattaacacaaaagacattttttgtttttcatcttaattaataaaactgtgggtattatatagaagatgagatttaagaagtgattggatagaaatttcttagtaaattaaaggattgtttttaccaaataccagaagatatgtgtcatcttgcagtctagctgtgtaaaccaaggcacagttgtattagtcactatttctgtgtaataagttactctaaaactcacagacttaataactatgtgctgttcctcatgagttctgtgagtcaaaaatttggacagggtatactggggatagcttatctctgcttcataatgtctggggtctcagaaagactttgtaggccatgggtgactcaatagttagggactgtaatcacctgaaggcttatcacttacatatctgatacctggtctagggtgaccgaaggact

SEQ ID NO: 236057 - DNA, 429 bp, Homo sapiens
cgtgaaggtgccagaaactaaggtgcactgacagcttggtctatggggaacctggctgcattggttcaggtccccacttgtcccacttgcctggcctaaacacacccctggcacggagaaagaggatgagactcactgctggatccctagcacctggcccataacaggttttttgtgaaagttgtactgaatgaattgaaataattctagtccctggtctaccttctatagtttaagcagcaaaggggttgtagggacgtttaaagggagaatataagaacaaaagactagaacacactgcctctcttgccacctaaaaaatcatgcctgtaatcccagcattttgggaggctgacgtgggaggatcacttgagtccaggagtttgagaccaggctgggcaatatagatagaccttatctctactaaga

SEQ ID NO: 236058 - DNA, 349 bp, Homo sapiens
caaatgagtttagagaatactaggcactacatcccattcctggagttcccagtgctcttcaggacattgaagctatgagaatctcgcaaagcattcttagctttgtttacacacatttgaccaggtaatattttctctaaggaacgctcattgatattctatggaacttatttctcatggaacctactctgggaaatgctgctctaccaacatattaatttttataatattctctttcaaggacaatgactaacagtatcattgccagttttaattagttcataaatatgtttcagttaccagtggtagccatggcaagtaaaaataaataaatgcatatacaaaatta

SEQ ID NO: 236059 - DNA, 586 bp, Homo sapiens
  misc_feature (516)..(516): n is a, c, g, or t
  misc_feature (552)..(552): n is a, c, g, or t
  misc_feature (586)..(586): n is a, c, g, or t
gccgcaggcgtagcgctctcgccctggccatggagcggccggcgcccggcgaggtggtcatgagccaagccatccagccggcgcacgccactgcgcgcggcgagctgagcgcggggcagctgctcaagtggatcgacaccaccgcctgcctggcggctgagaaacatgctggagtttcctgcgttacagcctcagtggatgacatacagtttgaggagacagctagagttggacaagttataaccatcaaagcaaaagttactagagcattcagcacaagcatggagatcagtatcaaggtcatggtacaggatatgctcactggcattgagaagcttgttagtgtggctttctccacatttgtagccaaaccagttggaaaaggattcattttgagagaaggaaagttcgattacaacatgaagatacctttaacaatttaatgaaggaaagtagcaaatttgatgatctcatatttgatgaagaggaaggagcgggtttcacaaggggcacctncgttcagagcattgctggtcctcccaccccatgcanaccatcacggtacatatggtggccagatttggcn

SEQ ID NO: 236060 - DNA, 196 bp, Homo sapiens
ataaagaacatgacatagtcctgtcctcaaagatgacagtttagatcagagtttctcaatacaggttactggcattttgtcataaattacaggaaagaagtataaatgagcaaagtgctcttcccctagtaaatatgttgtgttaatagagcaggctcaggttggggaataaaaggagaaaacctgctgtagtttg

SEQ ID NO: 236061 - DNA, 344 bp, Homo sapiens
acccccaccagcagcagcagcgcccgctttgccccggctccggagcgctgtttacctaatctcagcggctgaccgagcccagcagaatgcgaaagggaggcagcggtggtacagcagcgtccccggcgaagaagtaaaagacgtttgctttggagcttcgggataagttaactgcgaagctggggtcctgctgtcttacctctgcggcgatgagcctcaccgtgcacgttggcaggcatagcagattctgtttctgatgccattaccgtgtcggagaagaacattatatgaaaaaatactatctaatatcctagagaccattaaagtgtcaaagtttaatgcca

SEQ ID NO: 236062 - DNA, 659 bp, Homo sapiens
caccaaaaagcctcacttccaactccatccctgataccatggatgatgtaaagaatggtcagtcatttcactgcctgatgtcactaccaatacacaagaagctagaaaggagataaacagagagcagggaactctaaaatattttccctgagaatcactggaacaaggggtctgattacttctctgttggctgttgaggatccatagtcaaccgactgtccatgctcctcctattccctgggacccttgctcgaatgacctcaccacctggctggcacatgctaccctggggtggaagcacattctcttatgacttgcaatgggaaaaagggctgaggatcgattttttttttcctgagatagctgaggaggtgagtcctgccaacatctgagctaccccctagggcaggcagaatatttctggagaccactgggccatttggtatctcctggagcgtaaagtccatggaatgagagattctccccctggttctggcgtggccccattttctaataatacccatctgcagtcttaagcctttaagctgtcccaagggtagggggtctcagggaaccagttggctccagtcaccttgaaggattcactctgagttctgactggttgagaccagaagttctcgtaagtagcagcttcgctt

SEQ ID NO: 236063 - DNA, 501 bp, Homo sapiens
ataacccattggttataaaagaaatcacaatggaagttaaaaatactctgtactgataatgatgaaaatgctataccagaatgtattgaatgtggtggttggcaaaaagttacagatttacatacatgaagaaaggctgaacattaattactaaatctttactaagaatccaatttaagttagaaaatgaaccacagaatacactttaagaaatgagaatggtgtgggcatggtggctcatgcctctaatcccagcactgtgggagggtgagatgggaggatcccttgagcccaggagtttgagaccagcctgggaaacatggcaaaaccgtgtctctacaaaaaatagaaaaatgagccaggtgtacctgtactcccagctacttgggaggccgaggtaggaggatcagttgagcctgggaggttgaggctgcagtgaaccgagatagtgccactgcactccagcctgggtgatagtgagatcctgtcttaaaatgaaga

SEQ ID NO: 236064 - DNA, 511 bp, Homo sapiens
ctatacattactgaaaagtcatcttttttcggagagtcacaaaatcctccctccctctctcccttctatttttttttggcggggggtggggagagcgagggaagaaatgaaaactagggaaaaaattattttaaaaaaaggggcacttaattaagactctaatttttaaaaaagtaccaacagttttcatctattcccctatgctactgatagcaacaaatatgaataccggccggcaatgaaaatgtttattcaggttggcttaaacattacaccaaattagatatcaaggtagtctctaagattacaatagtttgcctgtatacgactccagtagtatagaaagtgtaaaatgtgttattgtatatattgggaagtatttgcatcctgctaaacaaagactgaaaacagtttgagaaccaaaaagaccttgcaatgtgtggctgctgtaagccttcatacggaactgtaaggctccatcttaacgacttttggttattattattatttt

SEQ ID NO: 236065 - DNA, 372 bp, Homo sapiens
agtttttatttcctgggaaaaaaatatcattttaaaaatatcattttgtgttgttattttgttttataatgagtcaggtttctttccagaggtataaagccttcaaagtaactgcccctaatgtcttaatatttattttctccctttactaaccactgacaagttttgtggcattctctctatacctttgtctttgataggttttattcctttaaaaagtatttgtgaaggctgggtctatcatataatctatgtgttatctcagtaaagtattttctccatcaaatgggacctgtggtatttacattaatagtggctttactttcactcatgaagcatttgaaataaaaacatttctaagttgatccttca

SEQ ID NO: 236066 - DNA, 468 bp, Homo sapiens
cagccacaattaagttaaaatggaagcaaacaacaacaacaaacatgggattctagaagttgtcaacgcctccaaagatgctctttgccagagtattcagaggtggacattgtgccacatcaaatattctagcaatgcccgagcccttgctctcatacacaacctcctcaggaaggaaaagtagaaacaggtgatttcctctctttccaaccagcccctgctctccttactctagctcatgctgagttattctgattcccatactcacatttggaatagctgcttttcctgtatctttatagatagctgcatcatcttctctgtgattcctgcaaaaggaatgttgcactaaaatgcaacattgtcctaacattagtctgtgcatttcaaaatattttaatgtggcttttttgggtggattattgatattgtatatgaagaataaaatatttgtgcaagaacagattt

SEQ ID NO: 236067 - DNA, 328 bp, Homo sapiens
aactgcaacgcctacgcccccagtcgtgtcgcgtctgttttcctcgtggttttttggggcgctgaccgctccaagcagcgcggcagctaaagccaatgttaatttatagccaggtgtgcgtgtgtctcccgcctcgccgcccctggccgcgggacagcttctgtccaatcatgttgagttggtgatttctgccgtgatctgtttgatatttcttcgcgctaatgtgttcagatttcgtttgggtagtggggaggggctactttgtttcagggttttcaagcttttactcttaattcctaaatgagatcaataaattttataaccaaca

SEQ ID NO: 236068 - DNA, 462 bp, Homo sapiens
  misc_feature (276)..(276): n is a, c, g, or t
  misc_feature (281)..(281): n is a, c, g, or t
aaaatgaacctggattttaaatgtgcattctaattgtccctttagcacatcagaacagcactgcctaatagaaatataatgtgagctacatatataattttgaattttctaaaatgcacattttaaaaaagtaaaatgaaacagttaaaactaatttagtagggcttggtgcggtggcttacacctgtgatcccagcattttgggaggccaaatgggaggattaccttggagccaggagttccagaccagcctgggcaacaaagcaagacccccgnctctnccaaaaaaaaaaaaaaaaaaaaaaaaaaaaatcgaaaaatgagccaggtgtggtggcacgcacctgtatttccagctactcaggaggctgaggccagaggatcgcttgtgattgaggctgcaggtgagctgtaattgggccactgcactacagcctgggtgacagagaccccatctccaga

SEQ ID NO: 236069 - DNA, 397 bp, Homo sapiens
caaagtgctgggattataggcatgaaccaccatgactggcctagatgacttttaatgtttattcaggactttctgcagcatctggcactgttgttcacaccttagtttttgcagtccatcactgccttggtacccatgtcgttacctagatctcctccttcctcttttctacatatttgtcatctctgcattcattgtgtacccctcatctcctgcctgctgaaaactatatatatatatatatattttttttttttaaaaggcaggcacagtggttcatgcttataatcctaactactcatgaggccgaggagggaggattgcttgagcccgggaagtcaaggctgcagtgagctatgattgtgccatggcactccctcagaaaaaagaaaacaaa

SEQ ID NO: 236070 - DNA, 1622 bp, Homo sapiens
  misc_feature (829)..(829): n is a, c, g, or t
  misc_feature (864)..(864): n is a, c, g, or t
  misc_feature (888)..(888): n is a, c, g, or t
  misc_feature (901)..(901): n is a, c, g, or t
aacaataaatgatgacagtgatgatgatatgatccatgtgatttcttggtcatggctttatgtcaagatttcctttagaaagtgaaataagtttaggtaacacacagaacaaacacagcaagaattgatgacttagacaataccgatttctttttttattgttattatactttaagttctggggtacatgtgcagaccttgcagatttgttacacaggtatacacgtgccatggtggtttgctgcccccatgaacctgttatctacattaggtatttctcctaatgctatccctcctctagccgtgcaacctccaacaggccccagtatgtgatgttcccctccctgtgtccatgtgttctcattgttcaactcccacttacaagtgagaacatgcagtgtttggtttaggtttcctgtgttagtttgctgagaatgatggcttcaaaaaaaaaggttaggtttcttttgttttgttttgtttgagacggaattttgctcttgttgcccaggctggagtgcaacagtgtgatcttggctcactgcaacctccacctcccaggttcaagcgattctcctgcctcagcctcctgagtagctgggattacagtcatgtgccaccacgcccagctaattttgtatttttagtagagtcggggtttctccatgttggacaggctggtcctgaactcccaacctcaggtgatctgcccgcctcggcctcccaaagtgcaaaaggttagttctatacataaaatacattttcttacttagtaatgttcctaatttaaagaatacttgtagaggattaccatagacttgtgtattanttttctagggttgccataataaattatcacaaacnaaatagtattcaatactggaaaantgttctctcacanttctggaggttacatgtccaaaatcaaggtgttggcagggccatgttccccctgaaggttctagggtaggatcctcccttgcatcttcccagactcctgcagttgtcaacactccgtggtgttccttgacttgctgcctcactctaatttctgcctccatctccccatggctgtgttccttctgtgtgtgacggtctctatggtttttctttaaggatactagtgattggatttagggccaccctaatctgtataacttacatcttaattacatctgcaaagactctttttcttaagagggccacattcacaggttactggaggtaggacttcgacacaccgttttggggaacacaattcaatccgttataacgtgtatctatttttaattgaatttttgcatgattacagaataaccgtttataaagttttgaaaacccagaagcaaaaagaagaaaataaagcatccctgttaatcttaccaaatggatacttattctagtttttacattttccctatgcatatacgtagaggaacacacatacatagttgagtttctttttcttttaattagtcttttgtgggggacatgttgttgtactatggatatataggggtgactgaaaacatggcccccaccatcagagaataagaatgaaagagagagagagaatcctaatcacacaaataaacacataattccactggacaactgctatt

SEQ ID NO: 236071 - DNA, 370 bp, Homo sapiens
ccaacctgttgaatcattgtcttctgacaaaatgtatggcctagccaactagaactacttaaaactgcgtgagcaactatgttgctatgaagaatccaaaccattgcaaaaacctacatgttttggatttggcttttaaaactaccttaatttataggttttgcttcctgggattacatttcttatattgctctgcacctaatgtctatgattgttgtttaatccatttatggagatgaaatgattctaaatccctcttgaatttttttcttgttggcagtaagctcaatatctgttctgccgctcttttctatttgcccctgtacactgcagcaaggataggttaattctggtttcctatagaccccac

SEQ ID NO: 236072 - DNA, 2023 bp, Homo sapiens
aaacaaggcggtgtgattgaaggtgggtaacgtggtcaagtgacaggggtgggtctgcttagataagatggcctgggaaaccttttctgaggacatggcttttgaatggaggctagaaagatgagagagacccagccatagaatgatttcagttaagagtattctatgaagaaagagcagcaaatgctaattccctaaggtagatataaggttggcatgttggaaagacagaatgggtttgcttctaagattctttccagtggaatttcagaaattttgtgattctatttcattaactcctgaggtttggctacaagaccagaccctactcttgttttatatgtgtagctggcagaatataggtttaatagtgagacaagaccaagaactacatgccagctccattgttcaatttctgtgtggtcttaagcaatttagctaacctctccaagtcttaaaacagcatggcttcaaatacataagagtttgaatttgttgtgtttgatgctgtcatgaacttttgattaagagagtgatatgatcaaaattaagcttaggaaatattgcagctggatgtaggatggattatagcaccaggagggaaagaatctaagaagctattgcactggtccattcaaacattggttagagttgcatgtcctgctgtgaaaagagagatggcagagacctgtgcaggaagcctttgtaagacagatcagcaggaagctcctgctgccatggaggtcaaggctcaatgtgtaaagcagttaaataaacgctgactcacttggaacttccagtttcttctttgtttgatgaaagaatggtattcccagtttcacgtgttagtcagaaaccttaaaaccaatagctaagcatagactactacataggtactgtaaacttattttcaaagtcctggtttttaacaccatttttaactactaaaagatgtatttttaaatgttgaaatttttttttgacaatctggtccagcatcaatgtcaggaaaatgatcactgtaaagataactgttacagaactccatgatgccagcagaacaggcagcaggtgaggattatagtacccgacgctctgtattttctaagcaggagactgtttacttcccaagacttacgagctgtttgtatgcagccgcaggaactccactagtccctgcctaagcacgctgtcatgcatgaggctaaaataggcctggagcatacaagtcttctctcgccatttatctcagctctttctcttgtcaccacccaaagtggttttaactagagtggtgcctaataaatgtggggagcaggcagggggaggtgacagaccaaaataaatcacctgtgtggagcaactcaattcagaggcgttcacagaagaactggaggcggttaggatagggaaagacgtggttcattggcagactgcatctgttttcggtaatcctccgttacaaacagttcggttaatccaaattcctgaaatcaacatgccagcaataaatggtataacagtggcagagatgtactttaacaaagtctaaaaaaaaaaatttattttcaaaaaaattttgcttttttctttcatattgctttataaagattgtttacaaattagcagtatccaaaattctagttaagatctatttatacaaacacttcacatttacagataagtttcagcagaaatgtatcttgacaaagtatggaaaagttaatttgaggcttcaatttcattttcttcatttctttttaaagtagactctttgtgaagaaacgagccagtgactgaaacaccctggtggaaacctgttgacagaccttccactttctcttcagaataagtagctgtggtggatattattatttgaagaaagaaaaaacagattttagggtggaaaaaacagtcaactcacacaaagaatggaaaaaaatactgagttaaattaagcaaataccttttacaagtgaaaggaagaatttttcttctgccgtcaataaaaccattgtgctat

SEQ ID NO: 236073 - DNA, 472 bp, Homo sapiens
tgatccccagagaaactgcaaagaacatgaatacacgagcacccccattttatagatgtgccattaaggcctaggaggcaaagggaatttcctggtgagcagcaacgtttagatttgaactctatgggtctggttcccagtctgctacctgggcaaggatcctgggagcaagcagggatggaggagggcatcggtgtccccctgaagaagggagcccttgggctgcagggacgccaagcaaccttgttctgtcccatgcactgtctgtggagcgcctgatgtgctgcctgctgaagcctccaccttctctccagctcatcctgagcctccacgctgggcacaggagctgagctgaccattttacagacagagaaattggggcccatggaaagccaaaggcttagaactccattttctaatgcctctggactcacctcatagaccacctggcctctccatccacccacacaac

SEQ ID NO: 236074 - DNA, 705 bp, Homo sapiens
catgtgcttatttgctgtccttgtatcttctttgatgaagtgtctgtttaaatcttctgcttattttttttcaaactgtgtttttttgtcactgagtttttagtgttctttttatgtcctggattttatattctggatacaaatccttttaatacaagttcatttgggtctttttaaaaaaattatttatttttattcatcttatataaaaggggggccaaatctaagaaaataatgttatgtcaaagtttgttttttaaagcataaactttcagagtttgttttaaggttaatacatagagtgctagctttttagtcacctgagaatcaggaaattcacttggacgtaattccctgtggtaacaaagaactatggcttcctatgggtttgtcaagctcctaggcttcattcagcctgaaattatacttttcttgttatgtataaattaaataaaatctatacaactgtctgttcttctgttgcctcacatcatgtctataaaaacagcatttaaagtttgcaggaaatagaattttggcctgttacaaagcaaacactttgtttctttaactcagaattctggaaatgcaatcaagttctagtattgtgactgccaaaatattttgtcatcagatattaatttttttcaagtgtctgactccatacaagaaaataataaaagtatcagaagttaactgtgatta

SEQ ID NO: 236075 - DNA, 1017 bp, Homo sapiens
actgaaaagctttgtagtatagacctgggcctcctacctcagatggaaagaatcagaagtactggattaggcctagggatctgcattttcagaagttttccaggtgactatgatgtgtatcagtagacctacgcagatatatacacccctgcagatatacattatatatccagtttttcacatatgatgtatgcaggtattggttaagtcacctaaatcttcttcaagccaaatattcttcattcctttcatttttacctcttatagtttccagactccttaacatcatggttggcctcctcttagaatatcattaaaacttggtatctcaactatggtctgacccatacatcccctttttctagatgtaaatttaaatcatacttatcttttgacttacactgagttttctaaagaaaggaagagcactgaaaagctagaatgttaaggaaaggcaccataggacttcagctgggctttgaaagatgggtaggcagtggatagaaagatttgagagtggttgaacaatagactggacaaacctgactgaagggggtcaaagagacagtcagtgacagtggtatggaaaaacaagaaatagattgctacatttcctgaatgcaaagcacatttcatcttgtaggtggtatgtaagcattaaagatttttgagctaagatgtgatatcaagaagtgacttttagaagttaatctggtaattaaagatggaagactgttggaatcactgagttgtgaagtattagccatggaagtaaaaagaaacagtagaggagatgcttcaaagaataaggtcacaggacttgtgattggtttgaaatagaagtagaaggagctattaaattcactgttagaaagagaggaaaatagtagaaccactggcaaaaagaggggggagttaaaatggagagttatttctaaagttagggcgtgaacagaagcttgagatgttggctttatctagcaaataatagtaatgtgggactgaccctcaggaaaa

SEQ ID NO: 236076 - DNA, 569 bp, Homo sapiens
agtcttcaaattcctgtgctgtcttacgaaataagtagtttggttgagcatgtatctgaagaggaagagtgagaagtaaagtttaaaggtagataggggcttggatcacattgaggatggccttgactaccaggagattttaacttattccacaggcaaggagaaaccatttaaggtttttacaaaggagtaacataattggagttgcatttcagggcttgtctctttcaggaatgtgctcttttctcacagatatttatttgcatggcacactctctctcctatttcaggcctttacacaaataccaccttctttgtgaggctttcccagacctccagtgtaaaattataaccccatcccagcactccctgtcctccttcattattttatttaatagcacttacctcaatctaatatacatgttttgccaatttatttttattgttctcttcctacttgaacaatagaagagaattttgtctgttttacgaactgctgtatccacagcacttagaacagtgctgggcatgttgttagttctcaataaatatttcttgaataaaggact

SEQ ID NO: 236077 - DNA, 588 bp, Homo sapiens
cctgtgttagaagcttctggttgctagttgctaccttcaaggactctgatgtctgttttctctcccattctctctgtctgcctttgtttttccatcccccctctccacccaccaacagagggacctctacctgtctaccagatgggaggcgttttcccatctgggaagaaaactttgaaggacagttgccatcttggagagagaatactgatctgggaatcagggagtcctctctatcctgagctatttggctctactctcttggcttcagtttctgtataaaatgaaggtgattttgtttgtattaaaatatgaataaaaacgaatgttggccaggtgtagtggctcgcacctataatcccagcattttgggaggctgaggtagaaggatcacttgagcccaggaggtcatgaccagcctaggcaacgtagtgagatttcatctgtacaaaaaataagaaaattaggggggcttgatggtacacacctgtggtcccagctactcaagagtctgagggaggaggatcacttgaccctgggaggttgagaccagcctgggcaacataacatactctgtctctaccaaaa

SEQ ID NO: 236078 - DNA, 446 bp, Homo sapiens
aataatgactggaatataatagtatgcaattagcagcttacttcctatatttttttcttcttagtggaagagaggccatgatcaatttagtatcttgtcctagatcagagattctggggagccatcttccaatcagtttaaagcttgaggaaaaaaaaaaaaagattgactctccctctagtaggagaaaactcttcctgcctgactgctttgaagtggaacatttatcttttcttgcctttggactcaagtagaaacacaagctcttcttgggtctagaacttgctggctttcagactggaacttacacccttggctaaacagactttttctggaactaaagccacagtatgttcctggttccaaggatttcagactcaactgaagacaccagcatctcctctgggtcttttgaatacagatcttgtgattttcagcctacatta

SEQ ID NO: 236079 - DNA, 1683 bp, Homo sapiens
  misc_feature (928)..(928): n is a, c, g, or t
aataataaaattatgtctaatgaaattccaaattaaggcaaaataaacaacagaagaatgacagcaaaccaaactagtgtactggttatcactatcaataattaacagaggtctggaagtttgaaatgctacaagttttaactgtatacagttgataatattgctttctttaggaatcaactgaaaacatactaaaattaattggtatgactaagagagcagaaataagactaaaaataaaaacacaatggatttcttctatgtaaagagcactcagagactatgatgaaaatattacataccaatgacagtagaagtagaaaaaaacaccaaaataatagtgtgaaaagtttaattggaattcttaacaagaacatgtaagattttcatgactaaattttatataaataaaaacttgtataaataagttgtgacacaattttctgaatgagaaaagagagatgaaatattgtctttctatttgcatatagatttactatcaatctgaaagtcttaactgaatctttcttggatcgtcacaaaaatatacaaaaaaaactcatcttaaaataaaaatcagctaagaactagtggaacagcaagtttagtaattttcctaccaaattttaatgtacattttaaagccctactaaatattttaatattttatatattgctataatagaacaaattgtatatagcatgcttcctgaattggatagattttaatatcatgagagtagatagatatactaacagaaataaattcattttactaataagtgcttggcatataaaaacaatactttggggggatagaataggaggcatgaaaatttgggctaatacaatttccttctaaatttactgaaaaatgagaaggatcttcaactttcttgcagagtcattcactcaagatacctttgcnataaaataaacttcccaacatctgacatggcccatacttaaaaggatgcttttcataccttttaaggaatcttttctgtgatttactagagggaatgtagattttttttattatcaggtgctttctatgacatctaatcagagtattaacactgtggccatgacaagtgtttaaaatttaaaagtacttttgtaatacttaatcctcttaagttgatttttatttttaccgaagttatacttgcacatggcctaaatcatgctataaagttttgttaagaaaaacagaagttcactttattttccaagtccacagattcctttgcagttcagtggttctactgcctattcctctctccagaaatgttctagtaatattccctggggtggaagccagctttccacacttcttccagaggtactaccacctgcctccatgggagaactggctctggacaaccgctctagtcttgctttgtctactgctcctgcctatctcccttaaaagcattagcttctctcccttctcctgtgacatacatagcgtattcctcactccatgacattgtcataggactgaaagaagccaggaagggaagttgtgtacaagtaagctctgttttctgttttaaagcgcaatcatccactgaaagaaaaaatagcacagagacctgtctagctgcttagaatggggagaagaaaattaagagaaaaaaaatgataaatagcttttcttttccttattctattaaagta

SEQ ID NO: 236080 - DNA, 471 bp, Homo sapiens
cctgagtaacatgagactccattatagtaaaaatgcatggaattaatttttcttctaggtataggaaaatgttgcaccataacaggtgtgcagaaactaagactgttaggacaacagcagtttaatgttatttatattatgtccctctcctagtccttctcctctcttccctcatcccactcaccaccaccccattcactacacagacttattttttgtagagcaagtgttcatattctgttccattatgtattataatatgaaaagggatgagttgaccaagtattggtgggtgtgtcgtatacttgctttagactaccaatggaagcgtaaattagtacaaacttactgggtgggtgtggtggctcacatctgtaatcccagcactttgagaggctgaggtgagtagattgcttgagcccaggagtttgaaaccagcctaggcaacatggcaaaaccccatctctacca

SEQ ID NO: 236081 - DNA, 646 bp, Homo sapiens
gccaaaggatgccattcgagccctgaagaagcggctcaacgggaaccggaactacagagaggtgatgctggcattaacagtgctggagacatgtgtgaagaactgtggccaccgcttccacatccttgtggccaaccgagatttcatcgacagtgttctggtcaaaattatatctcccaagaacaaccctcccaccattgtacaggacaaagtgcttgctctgatccaggcatgggctgatgcctttcgaagcagtcctgatctcaccggcgttgtgcacatatatgagcagccatcagcccccgagtcagaactgcttctgtctgtccatacctccaggctctcccggagagggggacggatatttatttcctaaagtttgcacttaattgtgaggattctcaggattgttgggggctactgaaaagaggaatgtgttgaatgtcgcgtttgctgtccactcgtcctagaagtttagtgtttttgtcactgtcatgtgtttctgtgggcagagctggttctggagggtgggtcagtgcacccgaggctcagagcatccatccaccccactggccctccttccagataccctctctctaattgggttcttgcatgtaaaatactccacaataaataaataattgaa

SEQ ID NO: 236082 - DNA, 561 bp, Homo sapiens
atagcagaattattaactgaatatatttttatatatataggcattttcctctagaaatatgaattggctgccattgtgggagagaggagaattattggaaaaaggaaaagtcacattccctctcatttctcccctattgctctctcattgtttctccatgacccagaacactgtctttaaaaagtcagtattaattcataaaaagacaattcccacagcacaatataactttattatattcactttaggtttttattttgaagagagaaatgctacttccatcaaaacttgtgtttttattggttagcaagtgccacctttgtcttcaaatggtaaaagtaaacaactagctattttttaattctgatgaattaaaagtatttttctagagaaaaatttgtgaaattattcatctgtactttttgaattgtatgtagccttggcaaaattgcctactaccttgtgtttaagaccttcagacattgattccttattgtgataattctgagtttttcaacaaagtttttcaaaatttgtttttgaataaaatgttgtattgaa

SEQ ID NO: 236083 - DNA, 320 bp, Homo sapiens
actgtccagtgtggtaaccagtagccaatgtagccatcaagcacttgcatagtgtccaagctgaattgagatgaactgcaagtgtgaaataaacactgcattttgaagctttagtgccaaaaaaaaaaatgtaaaatatgtcaattattgttatgtattgattccatgctaaaattaatattttggatctctcatattaagtaaactgcattattcaaattaatttcacctgcttttaaaaacttttaaatgtgggtattaaaaagttacgattatgtgtgtggttcatttatatctctgttggaaagagaagaatttga

SEQ ID NO: 236084 - DNA, 491 bp, Homo sapiens
atggccacatctgaaggtcatgggagagttaatgctccttgtgatctacaaagcttgtgcagcctgcttcttgttggagcgtgtttacaaatccagacgttgctaagagaaacaaatccaatatatataaaattataagttcatactttccagtgccaatcaaacaccaaagggttcttcctttccttgtgccatttcatgtttgtaccacctttatgcctcagtaagagtctttttcccagcaatatcaatcaacctatctatctatctcaattctaacattctaaaattgagcaaataacttcaaaattactctatcaatacttcaatacttctactaacaagaaacctactaagtaatgtttagtatttcttcatagtacttcttgtccttggaatgtatctccctgagagtgtacatcaaagtaatatattcaaaagtctcttgtattaattttttttattctgtgtggttatgttaacatttttat

SEQ ID NO: 236085 - DNA, 362 bp, Homo sapiens
ttggaaaacaatggaaggatctcagacacttcattgtctaaacattgttagatgggactaaacagcttcaagtgaatgtgccagctacaacaggcatgttgcaacaaattctcttctttatccccataaagccatgccctcttctttacctttataacagaatccagattttgtttaggtgtctggtgtccaggactccctctccaggtccaaagaaacgttgactctttattggtcccagcaattgggttaatattctccttgctggtgatcatctaagaatagtcacgtgatgtacttgtgataagtgagacatagaggaagtgggggaggggtagttccaaggacaatttcctgcccat

SEQ ID NO: 236086 - DNA, 434 bp, Homo sapiens
catgttttggggcagggaattttctctaggagatatataaataaatatctacatatacttaacatttattacgcacttactacatcccaagtactatgttaaacactttaaaaatctgtatcttatttaaagctcaaaataacctttgtgatgtagatattgttatcccaccttagaaatgaggacattgagacactggccacacaggtagtaaacaggtagtaagcactggagttagggtttgaactcagtccctgattattgatcatagactattgtgcttggacataatactttccctaaataacttctctgcatttctacaaatgatgatgctttcagatttgttccaactacatgtatatttctgtagagcctttggacatgaatataactttactcagtaaaacaccagttactaaatgtcaacttaa

SEQ ID NO: 236087 - DNA, 167 bp, Homo sapiens
cctctcttccttcgttttataatacttttgtggtagatacttttgactggctctctgaacgccctctccaagtgccttttatgatgtgttcctataatatagaagctggaaatctagaaatgatgtttcccaggctcccttgcagttaggattctacctgtgattag

SEQ ID NO: 236088 - DNA, 402 bp, Homo sapiens
gtgctagtccaagagacatgacaggggtcaaggtggtcaagatggatctgcttcctgcccttgttgagcttccagtctagcaacattaataaaatatatacaaatgtttacttagaagatgtggtaagtgctatcaaggaaaggtgctgttgggctgtataatggagggacccgatcattagatcaggtcacagctgcgagattgactggtttttttccctcaatagggtggaaatggctttattttgtagatataaaagtaatgaaccatggaattggttcttgagagttgtgttctaaaggcaacctattggcaagaattgtctgtgatcaaaactaccatatttcattgactctaagatgccattggttgtaagaagcaccatttttaagtgcatcagt

SEQ ID NO: 236089 - DNA, 248 bp, Homo sapiens
agggagcatagctgctccacacagcggaattctccgcgcacagacagcgcagccctgacgcctccagacaccccttcttgccgatgcccttttctagcttgatcttgatggttcctagagcctgggggtcaagtgttccctggctcgcttcctgtaacatcaactggaacttttcattgtggtctaaaaataatcccagcactttgggaggccaaggcaggaggatcgcttgaggtcagaagttcgag

SEQ ID NO: 236090 - DNA, 537 bp, Homo sapiens
gtgacttggctttttaaatctgtaaaatggaggtgtttattatctcacaggctgttggggttaaataaatctgctaaaggacccaacactcattgagtccctggcagagttagtgcttaaagttctcttttacagagcaaatataccacactgagtaaggcatggtgagttttagtcagtgcagtatactgagtggtgggttcaagcatgccaggagaatgtggttgccctcacggtgtattaaccagacctcatttgctagacataggtctttttctttaaactttggatgcagagttgaattaattacatcccattggtgcccaggttccctattatccaacaatgaggactccttggttttaattttgctccttcaatcctgttttctaccattctccccacagaaggacccaatctgttgtgtttgacacacctttaaatctatagcctgagaaaatggtgtagtgctttgcatgtggtatgtttttaatttatgcttaaccaaatgtacatgatactgtgttatagttattc

SEQ ID NO: 236091 - DNA, 547 bp, Homo sapiens
aaaaagttttaagcagaggagtaatgtgttagacagattactctagctacagtgggaaaaatgcattggaagactgaaagcagggatgagctgttaggaggctcgtgcaacaacccaggtgagacatgatactaaccatggagtaggagggcagcagcgaggatagggaaaaggaacagattcaagagatattaaagagaggaggatcacgaagtcaggagatcgagactatcctggctaacacggtgaaaccccatctctattaaaaatacaaaaaattagccgggcgtggtggtgggcacctgtagtcccggctactcaggagactgaggcaggagaatcgcttgaacccaggaggcggagattgcagcaagccaagatcgcaccactgcactcccacctaggtgacagagcgagactccgtctcaagaaaaaaaaaaaaaaaagtaaccaaaaaataaagcggtaaaaacaaaacaaaaataaataaataaataaaaccaaaaaataaataaagcagcaaattaatgcaaatattttcaagaaa

SEQ ID NO: 236092 - DNA, 2049 bp, Homo sapiens
  misc_feature (1714)..(1714): n is a, c, g, or t
gatgaagcatgagccctgcccttgcggactccaaggccaaggccagttgaggacaggagagccagccccagggtccggagtggtggtgaagactctggaaccagctcacccactccaagaacttccctagcctcctcatacctcactctcctcctctgtggaatggacatggagaaggctacttcatcaggtgactggtggtgaagttaggccgatctatttaaggtagttagaacagtgcccagcctatggtgagctcttgttacctgcctggtgcaggctctagaaattcagaaaggaagccaagaagagtaggaaagtcttttgttaggaggtgggctttgcagaatggatctgcagagatgggggaaggcgactctgtcctgtaggtgggggaactgcgtgagcaaaggcacagaggccggatgcactgaacctgtttgttcccccagaggttctgaggccacaggaagtggctggcgtgggagtggctggtccaaggggagctgcactattaagtgtggagggggagggggacaggagcaggaccacagggaccttgaccgccaagctgggggaaggaagtgtgaataaagccccaatgccaccaggcatctctgtactgccctcctctccctccccactccagccaggcacctgccctgtttcctgggaccccctgaaggaggacatcccttagctccacaaagagccctgccctagtcttcacatagtaattgtcttgtgtgtctcacccagtgataaggggtgggcaaggggcaggggtgggggctcttgagcacccgttttatagatgaaatgcctgagaccaggcgggagcccctggggcctccctggcttcatggggcaggctcaagtccctcaagggcgcggcttccctccctctcagcagcccacacttgttctatgtccggtgatgggtccctgagggtccgctggggcgcccctccagcctcccgccagagcagggctggaagactgccatgtctggggccaggctgagctcagtgcatgcctctgcgtagtgcattattgatggggcttctaattgtgcgtttcccaaagtctacaggcttttgatgaaaaattcatggcacgcccgaggatgggagcagactcaatcgattggcgcacagcaggcaggggaggacagggccccttgcagggaggggtggtgaagcctggtctgggaggcttcttgccccaggatcttggggatagcagggggcacacacccatttccctggtggggaggctgaggggcaggagcaggaagatttaaggcccacatctcagtgccagccagtgactggtgccatccagggaggatggccgactccaccacgggcctccctttcatttccctggaggggtgctagaccctccagagcccctcatgagagttgcacagaggagggagtaatatttctggagccactcttatatgccagacgctgctcggacgtgtacactcgcagcctcatttaatccccaacagcgttatgagatgggcacagtgatgcactccattttacagaggagaaaacaggcttagagaggttaagtgacctgtccaaagtcacacagctgcttagtaacagagcccactatctttccacttcaccaggcccactcaaataagaactaataggagtatggggattgtcttgtgccactcccctacttgtccctnttgttcagaggaagtgtccccattaagaaaaagtggagtgggccaggtgcagtggctcatgcctgtaatcccagcattttgggaggctgaggcaggtggatcacgaggtcaggagatcgagagcatcctggctaacacggtgaaacccagtctctactaaaaaaatacaagaaattagccaggcatggtggcaggcacctgtagtcccagctactcgggaggctgaggcaggagaatggcatgaacccgggaggcggagcttgcagtgagcccagatcgcgccactgtactccagcctgggagacagagcaagagacagagccagactccatttc

SEQ ID NO: 236093 - DNA, 574 bp, Homo sapiens
aaggtttaggcatgttctttcacttactccttagaagcagttcgcattctttgtgttgcctgtgaaatcggatggtgatatagggcttaaattttgaaatatgggacatttggagaacttaaggcaaatcaaaatggcataacatgatggaggaagcatgaagaccttgtgactggtagaaacaacaagaggatgtaggaaaagactatgtattgggaaagggggtagaaactatgccaaaattccatttgcccacttcagatgtctgcttgggacgaagtctgtgcctgggaaaagggatgaaaactttaacttcctttccccccacactttcatcccaagagcctagaattagagctgatttaatggtactaactagtactgttaaactaactagtactgttaatagacctttatgacagcatcctcagagttaactatttatataattgttctctggagcaaagcattcagagttcccagaagctacagtgaatttcacaccacttataaaccaagggactacctgcaaagtgtttctgttattttaaaatctaaagtctatttgaatttg

SEQ ID NO: 236094 - DNA, 448 bp, Homo sapiens
tctctttttcttctaggctgcctatgatactcatctgacctgatttctcctgcacagtgttgcaactgacgagtagcagacttgcccttgcctgcatttggggggatggctgagactttccttacagaaagccctactttcagcatgaacactaacccagtttattggctcagggtgtagagagttgccttgtcactggcgaagtcagatgcagccagtaccagagctctgcactagctgtgaacactaaggaagaatagctgagtgaggaagcagagtgccaggcagcacatccttcttcaggtgtttcctgccctgggccagatcccaggcactgcagcaatatctctgcatgatctagggctcctggaaatagcccattaagggcaaaactcgctgcccagaaaacattagaacattaaaagagcagggtctcaaatctgattgt

SEQ ID NO: 236095 - DNA, 383 bp, Homo sapiens
cacaaagacagaaaggaacacatgctcaatataagaaagcctgagaaacaaaaactcagcttccctgacgtgtggcattttcaaagcccacacatcataacaactttgaattctgagacgcctcaacaggaaacctcagaggttccatctgtctccctgatgagaaggacagctgaggtaccaagctgctgtctagaagagggctggcaaaaatctcaggaaccttggcccaggagctagaaatgtgcagttcattctttcctccagtctaatttacagccctgacactagctgttggctggttagcaggtctatctccatacataactagaaataaaccaacaaaaaagttggctcacctctcaattttatgtgtactccta

SEQ ID NO: 236096 - DNA, 557 bp, Homo sapiens
acctaaggcttttctgggaagagctgttaagattagactgttctcccaaaaagccaataattctgagtgtctccattaatgcctaggtagcccatactctcacccagccggtgcccttcagcctggaacctttggatggaggattggaccttgtgaccttcaagttcccttccgaaccaaatatgctctaacccaggagatggtgctgttgcccaggaagccggtcaccatgacgagagtacccgctcagatgaggatgcaggcggaggcggtgaaggtgctggaggccaggatgctgaggtacctccagacaccacccaggctgcagcaaatggaatgggagaggctaacacaccataatttttcaattccatgatgcccattttttctcacattttaacgtctctaaaattggggcacatcttatgattgatggcatcttacaattacacttggcagtactttttcttggtgatacaaaaaaacaacagtgtatcttacaactgatagcttagattcagtgaaatcctagaatacaacaggtttgaaaattctct

SEQ ID NO: 236097 - DNA, 424 bp, Homo sapiens
caagatgacaccatcagagggtcagaattgaggtgcaaacccagttatttgagggcaaatccaggcctctgtccttggatcccccagagtaggctgggcctgcttctctcttacttctacgtttttaatagacatgatttcttcaaagtgccattttatctccataggtacctccagacaccacccaggctgcagcaaatggaatgggagaggctaacacaccataatttttcaattccatgatgcccattttttctcacattttaacgtctctaaaattggggcacatcttatgattgatggcatcttacaattacacttggcagtactttttcttggtgatacaaaaaaacaacagtgtatcttacaactgatagcttagattcagtgaaatcctagaatacaacaggtttgaaaattctct

SEQ ID NO: 236098 - DNA, 354 bp, Homo sapiens
ttcataattgtcagattactttcataaacaatggaaacagtttcaggctcctcagcttctcacctcctgagcgactgtttatagatttgcaggccatttggatttacaattaatcttattaatgaggctgaaatgtgaagtttatctcagcctcaaagaagtaattcagcaaggatcagtggtttcacttaacagtctggctctgaggctggctgtggccctgttatccatggtgagcaccatgggaatgcaggcaagggctgtgagaggcttggaacaaggctccacccaggagagatctgggtgggcgttggtgaccagtagaacctaggtgtcctggccagtgcccttgga

SEQ ID NO: 236099 - DNA, 523 bp, Homo sapiens
acagattgactttgaatctctgggggttgggctaaaaaaaaaaaaaaaaccctacattttaaacaagctcttcagatgacccttgtgtaagtttgagagcatctgctggaaaaccactagaatttgcaaacggccacctcaaaatactccagccagtcccactaagccaaagactttcttttggtcatggtgggaggctgttgctgaaaacataccagagcccattgtggaggtcagctgacaggccgcatgaccttggcaatggactactggtcatctgggactgcttaggactgtgcaatggaacttgggggcaaaactgatggagacagccaatgggccttaaatccagcaggcaaagacagagtaagttcttatttgtgtagcccagggcttatcaaagtgtggttcttggaccacgtgcatcagtatcagctgtaagtatttggcaaaatgcagattcccgggccctgcaccaaacagattgactttgaatctctgggggttgggctaaaaaaaaaaa

SEQ ID NO: 236100 - DNA, 479 bp, Homo sapiens
cctctccttgctatgggtcttaccctcaagtcgctctgtgattcaaagatgaactgccaatcaaatgttcctctaatgaaagatccaatcactctacagcatgtgtgtattcaaagaacctatctaagactttcttttggtcatggtgggaggctgttgctgaaaacataccagagcccattgtggaggtcagctgacaggccgcatgaccttggcaatggactactggtcatctgggactgcttaggactgtgcaatggaacttgggggcaaaactgatggagacagccaatgggccttaaatccagcaggcaaagacagagtaagttcttatttgtgtagcccagggcttatcaaagtgtggttcttggaccacgtgcatcagtatcagctgtaagtatttggcaaaatgcagattcccgggccctgcaccaaacagattgactttgaatctctgggggttgggctaaaaaaaaaaa

SEQ ID NO: 236101 - DNA, 606 bp, Homo sapiens
ccctagaaaagtagatcaatttatatccatgtggagatgtataatagggtagtcaagagcacagcttagaagtcccaactttaccatttctttgccatgttgaatatgttaactttcaaaatcttgtttcttcttcatttataagtggagctaattatagtctctaagttaaggttgttgtgaagttgtaataatgtcttactgttgttgttattttcactgaccagttttgttttcaggacggttgtgattaaatagaagcagaaaatttaaaaacctatagaaaattttattttaaaaaaattttcacaattacaatcttatttgattaaatactcaacaaatatttatttacatattcagtagatatttatgcagctcctaagtgtctagatataataaccattttaggtactggagagttgatactgggtacaacagaaagaaagacatgggccttgcattgcagtggaggagtcagacaataagtaaatacataaacaagatggtttcccaaagaaatcatttgcgtgaagacaatgaatgtgatgtaatagagagtgactggaggcccatcttagagtagatggttaaagaagagctttc

SEQ ID NO: 236102 - DNA, 362 bp, Homo sapiens
gatgggaaactggggtgaaaatgcaaagaccagctttgttgtcaatattcgttagtggtggtgggggtgctgtggctcatgcctgtaatcccaacactttgggagaccatggtgggaggattgtttgagaccaggagttcaagaccagcctgggcaacataaaaagacctcatctctactaaaaaaaaaaaaaaaaaaaaaattgccaggcatagtggcgtgcacctgtggtcccagctgctaggaaggctgaggtgggaggatcccttgaacccaggaggtagaggctgctgtgagccacgatcacgccactgcactccagtctgtgtgacagagtgagaccctgtctcaaaaaaaaaaaa

SEQ ID NO: 236103 - DNA, 741 bp, Homo sapiens
  misc_feature (2)..(2): n is a, c, g, or t
antaataaaagtttagattcagacttgctctttgacatagaaagtgaagattcatctttattttgagaaatatcttccttccctctttcaaaaccctggctatgaggacttgctggactaagagatggctgatgcaaatctttggttggcgttggataagcttcttttccttggcgctgactcatctttcctggtgtcagaagctgagattcgtcactgtttgctacaacagttgatggcccaaggacatctttgctatcaccaagaagcgaagttcgatcaggttctccatctgccaaacctccctccataatgaaagaagataggtttatgcttctctttccattaatgtgcagccattctgtaaatctgcaaatcccgtgcggagctcccagggaggcgggacgcaaggagccggttcctccgaggtcgccgcggcgccggggtccgaggccccgtaagcgtctagtcagaccccaacttctctcggccgctgtcgtcggcggcagctggggcgcgagcctggacgaagggcgctgcccagcggccgcggaggcactgccggctcagcccccgagcggggcgggaactttcggccccgaggtccaccagcccgggcggacccccaccttccctcagtcggcttgctaccggcagcggctactgcggcgtccaaagctaacactacagccgccgcctggccaggagcgcgtcgcggcctaatgttgtcatccgccgcgt

SEQ ID NO: 236104 - DNA, 695 bp, Homo sapiens
  misc_feature (2)..(2): n is a, c, g, or t
antaataaaagtttagattcagacttgctctttgacatagaaagtgaagattcatctttattttgagaaatatcttccttccctctttcaaaaccctggctatgaggacttgctggactaagagatggctgatgcaaatctttggttggcgttggataagcttcttttccttggcgctgactcatctttcctggtgtcagaagctgagattcgtcactgtttgcgaagttcgatcaggttctccatctgccaaacctccctccataatgaaagaagataggtttatgcttctctttccattaatgtgcagccattctgtaaatctgcaaatcccgtgcggagctcccagggaggcgggacgcaaggagccggttcctccgaggtcgccgcggcgccggggtccgaggccccgtaagcgtctagtcagaccccaacttctctcggccgctgtcgtcggcggcagctggggcgcgagcctggacgaagggcgctgcccagcggccgcggaggcactgccggctcagcccccgagcggggcgggaactttcggccccgaggtccaccagcccgggcggacccccaccttccctcagtcggcttgctaccggcagcggctactgcggcgtccaaagctaacactacagccgccgcctggccaggagcgcgtcgcggcctaatgttgtcatccgccgcgt

SEQ ID NO: 236105 - DNA, 712 bp, Homo sapiens
agggtctgttcaggtgtttttcttctattaccaacaattctgctggtacatgcgtgagagtattccctggctatgaggacttgctggactaagagatggctgatgcaaatctttggttggcgttggataagcttcttttccttggcgctgactcatctttcctggtgtcagaagctgagattcgtcactgtttgctacaacagttgatggcccaaggacatctttgctatcaccaagaagcgaagttcgatcaggttctccatctgccaaacctccctccataatgaaagaagataggtttatgcttctctttccattaatgtgcagccattctgtaaatctgcaaatcccgtgcggagctcccagggaggcgggacgcaaggagccggttcctccgaggtcgccgcggcgccggggtccgaggccccgtaagcgtctagtcagaccccaacttctctcggccgctgtcgtcggcggcagctggggcgcgagcctggacgaagggcgctgcccagcggccgcggaggcactgccggctcagcccccgagcggggcgggaactttcggccccgaggtccaccagcccgggcggacccccaccttccctcagtcggcttgctaccggcagcggctactgcggcgtccaaagctaacactacagccgccgcctggccaggagcgcgtcgcggcctaatgttgtcatccgccgcgt

SEQ ID NO: 236106 - DNA, 698 bp, Homo sapiens
  misc_feature (2)..(2): n is a, c, g, or t
antaataaaagtttagattcagacttgctctttgacatagaaagtgaagattcatctttattttgagaaatatcttccttccctctttcaaaaccctggctatgaggacttgctggactaagagatggctgatgcaaatctttggttggcgttggataagcttcttttccttggcgctgactcatctttcctggtgtcagaagctgagattcgtcactgtttgcgaagttcgatcaggttctccatctcccaaacctccccccatgtgaccgaagcttgccttgcgcacggctctcccttcacgccgccgtctttgccccgcctctgcacccctccgcgcccactcccctgcgcgggcgctccactggctcccggttcctccgaggtcgccgcggcgccggggtccgaggccccgtaagcgtctagtcagaccccaacttctctcggccgctgtcgtcggcggcagctggggcgcgagcctggacgaagggcgctgcccagcggccgcggaggcactgccggctcagcccccgagcggggcgggaactttcggccccgaggtccaccagcccgggcggacccccaccttccctcagtcggcttgctaccggcagcggctactgcggcgtccaaagctaacactacagccgccgcctggccaggagcgcgtcgcggcctaatgttgtcatccgccgcgt

SEQ ID NO: 236107 - DNA, 857 bp, Homo sapiens
  misc_feature (2)..(2): n is a, c, g, or t
antaataaaagtttagattcagacttgctctttgacatagaaagtgaagattcatctttattttgagaaatatcttccttccctctttcaaaaccctggctatgaggacttgctggactaagagatggctgatgcaaatctttggttggcgttggataagcttcttttccttggcgctgactcatctttcctggtgtcagaagctgagattcgtcactgtttgctacaacagttgatggcccaaggacatctttgctatcaccaagaagcgaagttcgatcaggttctccatctgccaaacctccctccataatgaaagaagataggtttatgcttctctttccattaatgtgcagccattctgtaaatctgcaaatcctcaaatgttcctgcaaaagactgcttcaggcaaggataggaatgtttaattaccagcttcagtctcttggaggttagccacagttctttaaacgcagtagcaccaatggagattgccgtgcggagctcccagggaggcgggacgcaaggagccggttcctccgaggtcgccgcggcgccggggtccgaggccccgtaagcgtctagtcagaccccaacttctctcggccgctgtcgtcggcggcagctggggcgcgagcctggacgaagggcgctgcccagcggccgcggaggcactgccggctcagcccccgagcggggcgggaactttcggccccgaggtccaccagcccgggcggacccccaccttccctcagtcggcttgctaccggcagcggctactgcggcgtccaaagctaacactacagccgccgcctggccaggagcgcgtcgcggcctaatgttgtcatccgccgcgt

SEQ ID NO: 236108 - DNA, 763 bp, Homo sapiens
  misc_feature (2)..(2): n is a, c, g, or t
antaataaaagtttagattcagacttgctctttgacatagaaagtgaagattcatctttattttgagaaatatcttccttccctctttcaaaaccctggctatgaggacttgctggactaagagatggctgatgcaaatctttggttggcgttggataagcttcttttccttggcgctgactcatctttcctggtgtcagaagctgagattcgtcactgtttgctacaacagttgatggcccaaggacatctttgctatcaccaagaagcgaagttcgatcaggttctccatctgccaaacctccctccataatgaaagaagataggtttatgcttctctttccattaatgtgcagccattctgtaaatctgcaaatcctaaaataagaaaatgatatttccgtgcggagctcccagggaggcgggacgcaaggagccggttcctccgaggtcgccgcggcgccggggtccgaggccccgtaagcgtctagtcagaccccaacttctctcggccgctgtcgtcggcggcagctggggcgcgagcctggacgaagggcgctgcccagcggccgcggaggcactgccggctcagcccccgagcggggcgggaactttcggccccgaggtccaccagcccgggcggacccccaccttccctcagtcggcttgctaccggcagcggctactgcggcgtccaaagctaacactacagccgccgcctggccaggagcgcgtcgcggcctaatgttgtcatccgccgcgt

SEQ ID NO: 236109 - DNA, 809 bp, Homo sapiens
  misc_feature (2)..(2): n is a, c, g, or t
antaataaaagtttagattcagacttgctctttgacatagaaagtgaagattcatctttattttgagaaatatcttccttccctctttcaaaaccctggctatgaggacttgctggactaagagatggctgatgcaaatctttggttggcgttggataagcttcttttccttggcgctgactcatctttcctggtgtcagaagctgagattcgtcactgtttgctacaacagttgatggcccaaggacatctttgctatcaccaagaagcgaagttcgatcaggttctccatctgccaaacctccctccataatgaaagaagataggtttatgcttctctttccattaatgtgcagccattctgtaaatctgcaaatcaattaccagcttcagtctcttggaggttagccacagttctttaaacgcagtagcaccaatggagattgccgtgcggagctcccagggaggcgggacgcaaggagccggttcctccgaggtcgccgcggcgccggggtccgaggccccgtaagcgtctagtcagaccccaacttctctcggccgctgtcgtcggcggcagctggggcgcgagcctggacgaagggcgctgcccagcggccgcggaggcactgccggctcagcccccgagcggggcgggaactttcggccccgaggtccaccagcccgggcggacccccaccttccctcagtcggcttgctaccggcagcggctactgcggcgtccaaagctaacactacagccgccgcctggccaggagcgcgtcgcggcctaatgttgtcatccgccgcgt

SEQ ID NO: 236110 - DNA, 777 bp, Homo sapiens
gcaaggaatctgaattacagaaaaataaactttaaactgaaactgctaatataataaatgcagaggagacacagggcagcaaatgcacaaataaatgtatgtctttagccagtatgtgaatgatacccaaaacggctggttttccatctcaaacagtcatggaataacaacttcacagtgtttattaattgttgaaattgtctaaaacaagagaatatattttcacaaattcatctgacacagacacagctataagcacatgagaagacaggcctaaggaaaaaggtaaaattaattcacctatgtctgtatttgtcaactaaacaaagcatcaatccatttattataaagtataataaaactaaggacaaccattgcataattaaattgcctctgaaagccaattattgattatggagaaaaccaagttttacaactgtatgtgtgtatcatataaagatttcatttcctaatatagatcattcattatttattttgaaatgttaagaatttactatgtgccagtgtatcatttgaattctcatattttaaacattttaaactataggttaattttctgaaattttcaattagtgtcagaagaagttacagaaaaaggaataacaaacatgtttaaataattaaatggtttcaatggcatctctgaatttctttgatattattatcaaaatgttttcttcaattctactcaaaaccttatttttttgccctaagtctttgtcagcttatttcagtcttatttttacatgtaatata

SEQ ID NO: 236111 - DNA, 573 bp, Homo sapiens
actttatgttcaattcttgccttcagtccttgcttgaactcttgcttgaatcaagctctcatacccaacattccactgatcctttctttttcatttaccagtgatggatccatttgaaattcaatgtttaatttcctgtcatctttccattcctatcagtagcatgtggcacagttgctcactttctcttctattttcttggcttttaggacatcccgttaagctttacacatctatttgttgtaattttcttgttgcctccctaatcacattatgctttcctcttcttgtgtctccagaactttctgttctctgaacgtgggcttagtcctccagccacttttttctctgtccgcactcattgcctttccttatcaactcagctcatggctttcaaccccacctgcacagcttcatgtcaccttgggaggccaaggtgggcagatcatgaggtcaggaggctgaggcaggagaatcacttaaacccaggaggcggaggttacggtgagccgagatcgcaaccttgcactccagcctaggtgacaagagtgagacttcatctcaaaaaaaaaa

SEQ ID NO: 236112 - DNA, 459 bp, Homo sapiens
agatactgtgctaagtgctttaaagacattttcttatttaatcttgttgagaaccccgagaggcagcataagggacactgtggattgcaactctgcatccactctgcattttcttaagaccaaacgcctgcatgtagcccatgtgactgcggggggccagccccactcccagctccagggatgggctctgattggtctgaacatggttatcccatttccctgcctgtgattggttcaagtagacagacctaagccaatcagcttcaggcatcccaccatgtgaatgggttctcagtctatgggtgggtatgagacttatattcgaccaattatattgaaaggaaggaattttatttcacgatggggaaggactgtctattgctcactggatatgaacaacaaggcatgtggcctgaattatcaccagaagccatctagcaaacacgaaaaacaaaaaca

SEQ ID NO: 236113 - DNA, 446 bp, Homo sapiens
cctcatctcaaaaaaaaaaaaaaattaaagccttagtttacaggcatatattatcattgcaaaggatgactgcaaaagagagttctcactgtgaccagtcatgggatctttaaaagttgtcattgataaaagatgacagagtgggaggaaagaaaaaggaaaggaggctgggcgcagtggctcacgcctgtaaccccagcacttttggaggccgaggtgggcggatcacttgaggtcaggaattggagaccagcctgaccaacatggtgaaaccccctctctactaaaaatacaaaaattagctgggcgtggtggctggtacctgtaatcccagctacctcggaggctgaggcagaagaatcacttgaacctgggaggcagatgttgcagtgagccgagattatgccactgcactccagcctggcgacagagcgagactctgtatc

SEQ ID NO: 236114 - DNA, 558 bp, Homo sapiens
aatctgtgaataatatcctgggcccagccctgagctgtacatatgtggaactgatgggaagcatcaaagcaaaggctttgaaaactgaactactgtgtagagtcctgtctgccaattggcactgtgtagcacatgagcagggtagagccaaatatcacttcatgggctttgaaaactaactggatattggaaccatggcccacagaaggtgagcaaggacttatgagctgaatctaactaggtagatggtttgctaaaaccaaaaatcagcattctgaagagtctcctaaaataatattcaaaatgcataggatacagtttaaaattattcagcctacaaagaaccagaaaaatctcatcaactttcaagagaaaagacaacagatgccaaccttaagatgactcaaatgttggcaatattaggcaaagactttaaagcaggtaatataaccgtactccaaaaagtaagggagaacgctattaaaataaatggacagatacaagttcttagcaaagtagacacaatgtaaaagaaacaaatggaaatattataactgg

SEQ ID NO: 236115 - DNA, 406 bp, Homo sapiens
ctttagatttcacatctaaattgtgctatttgaagtttgcaggtagtggtctttgatttggaatttgatctctgcactggtgcttattaaccatgtgaggccacatattcagcctctttgaatctcagtctcatcaaatataaaatagatacaaccttataggattgaagattaaatgagacaatgtatggtaacgtgattaactcggtatctatgcatagagtacttacttttaataactgctattatgctccgcaaaaagctatactgtcctaagttgtgctagatttaaatttaaatgtattcagtattatgtagtttattcagtggaactttttttgagggggagttatcaatgaattttgtccatttgccagtggaaattaaaagtatgcagttgatttta

SEQ ID NO: 236116 - DNA, 405 bp, Homo sapiens
ctcactgatatcccagtaaataactacaagtgagacaatatcataaaatcactgtgaactgataaaacagaagccaggtgaggtggtgctggtagcagaaccagggcaaatggagaaggagagggaggtggaatggtgaggagaaagaagctgtttcccatcatggaagcaccagcatgggtggatacagataccaggagttggaggaagggcaccaatggtgaaggctgtctgcaggaagagtccatgggctggcctcccccacccaggctgaaacaggaaatataaccactaaggatccttaacaatcttccaagaaggtgcttaaatttccagagtggggattatcaccccaaaatatgttcctctttggcttagcatgaggagcagcacaacttgcctgct

SEQ ID NO: 236117 - DNA, 459 bp, Homo sapiens
ctcactgatatcccagtaaataactacaagtgagacaatatcataaaatcactgtgaactgataaaacagaagccaggtgaggtggtgctggtagcagaaccagggcaaatggagaaggagagggaggtggaatggtgaggagaaagaagctgtttcccatcatggaagcaccagcatgggtggatacagataccaggagttggaggaagggcaccaatggtgaaggctgtctgcaggaagagtccatgggctggcctcccccagtctactcaacaatcacctctcacctcttcccccaagagcagcaaatgaattttcccaggctgaaacaggaaatataaccactaaggatccttaacaatcttccaagaaggtgcttaaatttccagagtggggattatcaccccaaaatatgttcctctttggcttagcatgaggagcagcacaacttgcctgct

SEQ ID NO: 236118 - DNA, 464 bp, Homo sapiens
ttcatgaaaggatgttttccaactgataactactgggccagaggatcccttatactgttgtacgtatttggggtctgtgaatccttgccaacatagaagctgatggagtctgaggaatgacacacactgagaaaaccaagcatcatcattacagacactgtgtgaactccctgcctgccacccacacagcacagtcacggttatgtccatgcttatgtaggcctgggctctgcctagctgcgggtgatttcatcagtggatgccgctcagtttgcccctgcctgctggctggctcgtccccagccccaggcatcagggtgccccatggtggggcctgtgtggccctggcccttctctgctgccccagggctgtgaagccacaggtcggccccctcgttccttgatgctctctgtccattgtctctacaaatacaaagagagtctctgaacaggacaaaacacat

SEQ ID NO: 236119 - DNA, 466 bp, Homo sapiens
gcattcacacaaatatccattatgcaattagtccagtatggtttatattaagggaatctgaaagagactctttttaaagctgatttaaaaaggaaattgattttccttgttaaattgccaggggtatttggtacacaggaggcagaggcctgggtggtgagaagcatggactgtgaagctatacagaattggattttgaatcctcctgatctcactaacttgagcttttcaaacttgggcagctcttacagtcttatttatatgagatagtaatactattatttattatttggggggatcccgagattgattttcctttcacagtacctactggctagttgctttaatatgcattatgcagtgttagtcccatgcgacgcaggaggaagccaggacacagagcaaagaacagccaggaaaatgcccggggtagccagggccggctttgctgccaggtgtgcccata

SEQ ID NO: 236120 - DNA, 392 bp, Homo sapiens
gaggtgattggcccctagagggtgtggggcagagtttctgggggagatgtggctcaagcctggttcctgagctgactgggctttggcctcatctggcacctgccagaagtcagtgtccccagaaagacggggaagatggggtgggctgtgagagcccaaagctcttggggccttggggaggaatctgtgtcctgaaggccatggaaagcccgactgtgtcctgaaggccgtggaaagcccgactgtgtcctgaaggccgtggaaagcccgactgtgtcctgaaggccgtgaaaagcccgactgtgtcctgaaggccgtggaaagcccgactgtgtcctgaaggccgtggaaagccctaatgtttcacataagggagtgatgggatcatatct

SEQ ID NO: 236121 - DNA, 774 bp, Homo sapiens
agaactgatgtcccgcggcacagctgatgggaagattgcataaaggaatagatgggaaggcattcagataagagatcacaggtctgcatttgatcctggctgagtgagatgttggggctggtcatttcaccttgctaagactgtttccttatctgtgaaattgagaagatcacctttctcccagggtggttgtgaggattagctaagatcctatttgagatctttgtgtcttgtggtgtgccataggcatttgaggtagcatcgtgattatttccatatattttggccactggcaaagtgaacggtttctaagtcttgattataggactggactttggtggtcctcagagccccttaaaaggcataggaagcatcaagggcctccaagcataagaaattctccggttctagaagtttaatgagactctgctgctctgagagaggctttagaacctcggccattgcctcaaaatgtcaggaagtcagtggagtgcagtagacccacatagttccttctttctccggattgagggactgagtcccccttaatgtgaatgaaaggcttaggaagcttcaaagatgttccctcgactgacaaagcagacattctcacagcctcctccagaccctgccacatggcttgtggctgtactgaatgttacttgaaataagtgagacattagctggtgttggaacatctcgttaatagattttcatcttagtagtatttaatttgttatgttgcaaagcagtaagatgttcatcaccgtgcca

SEQ ID NO: 236122 - DNA, 371 bp, Homo sapiens
gctggcttcctgtgtgtattattaacacattgggcaagccactaagctgctttggggttcagttccttgatctgtaaaatgaaataatttgactggatattattaagtccttttatatctccagagctattttattcctttattcaccagacttttcttgtgaagcaccttctctgtgctaggcacaatacaggatgttctgggtacaaacttcttgcccacaaagagtatttagaacttccatcactttattcaaatcagcttagtcttttactctggaaaaatttagtattagcaagttttgtcaatttttactatcactgtataaggtatttgttaaaattgctggtattacttagatcttcatctcc

SEQ ID NO: 236123 - DNA, 422 bp, Homo sapiens
ctgtatagatatcctctcacactctttagggccaagttcttcccttataccaaaatgtggaactgctacagcaatcaatgatgaaaacagggcagttgatgtcccgagaaggaactcacaagcttactactcatttcattctactgctcccaaaataggctgacatgcgcatacaatagtcaactaccaccaagactgtaatcacggtaaatacacaatgacatgagtagattcagggaagtgaaagaacattcattcttttcatgtgaagaaaaagattttatcaaagaggggacaggctaagtaacttcaatttcactaaatttaagttgtgtgttttaatccatattctccgcataaaagcagcagcaaaggaaatagtgggtaactactccaagcagaaaataaactaataaaacttt

SEQ ID NO: 236124 - DNA, 1925 bp, Homo sapiens
tagctgagagcagtagctcacacctgtaatcagccctttaggaggctgaggcaggtggattgcttgatcccaggagtttgagactagcctgggctacatggcaaaaccccatctccactaaaaatacaaaaattagccaagcttgatggtggtctatagtcccatcctctttggaggctgcagtgggaggattgcttgagcccaggaggtgaaggctgcagtgagctgagatcacaccactgcactccagcctgggtgacagagcgagaatctgtctcaaaaaaaaaaaaaaaaagtaattttttaatattaggaattagagtgtggtggtcatcagttcatggctgacagaaacagcacttcctgctctttgcaatttagttcttataatggacaagtcttgtttcaaatgctgcctccttggtattctgtgtacaatggaaatgggggttggattagatgctctctaaagatggtctgagctctaaaagttttcttcctggacagcagcagtttccctggataaaggacctttttcctgagcatgtggctctgtctcagaagcagcccctctccctggttccccagtagagcttccaggctcagatgagtagggccagctggctttgctctacatagaggccctaaataattttagtggcttaaaagcagaagaatggttctccagctcctgtaagaggcagaattaacagagaataacttaaagggaacagcatgaaagaggccaatggaaagatagaaataaaatgaagaatgggggcaaccaactttcagggtctctcaaaaaaaatcctgggtcaggatcccacctgtctactgcaagctcccttcttcctgctcacagtgccttcttgccttaatagtacaaagaaaaatgctttaccatgatttaggtactatgctaagctcttgaccatacatgcatcatttaaccctcagttacaatgttggctccatgagggcagggggattttgtctgatttgtttacagttgcatcccattttctagaacaataccaggaccccggtatgtgttcactgagtatttggtgaaatgatgaatgatgacttgctgaggtcactacgattactaactccattttacagatgaatacactgaagctcctagaggttaagttacctgctcaagacaacgtagctagtaggagcaaagccaggattcaagtctagctgatcttaaagcctgctttattttagactatgtcctcacaggaaatatccatctgttttagtctattctcacactgttacaatgaaatacctgagactgagtaatgtataaagaaaagaggttgaactagctcaccgttctacaggctttataggaagtatggccacatctgcttctggggaggcctcagggagtttctactcatggtggaagcaaagtgggagcatacatctgacatggtaggagcaggaccatgagagagatgggggaggtaccacacacttttagacaacaagatctcacaagaattcactatcatgatgacagtatcaagggggatgctcttaaaccatgagaaacagccaccatgatccaatcaccttccaccagacctgcatgagcctgttctcacactgctataaagaactacctggctgggcgtggtggctcacgcctgtaattccagcactttgggaggctgaggcgggcggatcacatggtcaggagattgagacaatactgactaacacggtgaaactctgtctgtactaaaaatacaaaaaattagccaggtgtggtggaggtcgcctgtagtcccagctgctccggaggctgaggcaggagaatggtgtgaacctgggaagcggagcttgcagtgagccgagattggaccactgtactccagcctgggcgaccgagcgagactccgtct

SEQ ID NO: 236125 - DNA, 362 bp, Homo sapiens
atgcaactggtgtgacttcacaagtgctgtcctcggtcccaagccgggatgtggccactgtttgccagggatcctgctgcaaaggattccaaagcttggctcccagcccagatgcccctgcactcctgaggcagaggctctgcaagtcttctcctttctcattcccgaggctggggcttcatccttacaaagtgtccttacaaactcctccttccaaacctggcttctgatgagagggtgcagagagaaattgggctttggaggtaaatgtattcttctctgtatttcattatctcctggcacctagcactagagccagcctcgctcaatgggcataaaaataaacatttacatttgacagt

SEQ ID NO: 236126 - DNA, 1406 bp, Homo sapiens
  misc_feature (91)..(91): n is a, c, g, or t
  misc_feature (93)..(93): n is a, c, g, or t
  misc_feature (99)..(99): n is a, c, g, or t
  misc_feature (477)..(477): n is a, c, g, or t
aggtagaggttgcagtgagctgagatcgtagcactgcagtccagcctgggcgacagagtgagactccttctcaaaaaaaaaaaaaaaaaanangaagangaagaaacagatgaatggttttccatttcccaagcccagcagaggagtaaatggtataaatatgtgggatatgacaccaataaggaatgctttatttacaagtatcagaatgcctgatcaaaaatggcattactgctctcctatagcaagacatctatgagaaggtagctgctgctgtttgatggcctgtgctctgggttggcatttaggtgatatgagcatttatgattaccaagtctttccataaatttgggcttcatgtccacaatcacattcaaagacaggagactaggaagagtgcaggacagaagtgttcttccctgggctgctgctgcttttttttttttgcaagaaagaatctttggaggaactccaaantccgctccaccccagaagactcccttgccaatcatttgcctcatctctcctcatcagttgcaaggagattgctgtctggctttgctcaccttcacagaggaggacagccaagggagaaagagggtgagggcagcctgtggtagacattgtggcaacaacatgtgtcccagactggttaacactaattacagaaatttacatttcacctccatgtaggcagattttgggcctcatgaagaatcacactgcttgtgaagataataaacttctccattggtattcacagacatccctactatgtggcagactctgaattatgcacagggaatgccaaatttataagatcaatgtatgtcctggagtagaatttacagtctagtgaaatatggttagagaccaatggctctaggagttagccaacaagggactcaatcatggtgcccctcccactacacaaccaggacactccatgagggagggacttcggaagattttattcacaggacctctgtgacctcgtctcatacacatacaagaggagctttactcttctctctcttacacaatgcgtgtgactcagacaaaggttactactctaatttaacccttaccctctcccatctgagctactaatgactattttgcggctgggcatggaggctcatgcctgtaatcctagcagcttgggaggccaaggtgggtgaattgcttgaggtcaggaattcaaaaccagcctggccaacatgcaaaaccccgtctccactaaaaatacaaaaattagccaggcatgatggcacatgcctgtaatctcagcgacttgggaggctgaggtggagaattgcttgaacccataaggcagaggttgcagtgagctgagatcgtgtcactacactccaggctgggtgacagattaagcaagactctgtctc

SEQ ID NO: 236127 - DNA, 437 bp, Homo sapiens
ccaagctttctttctttaggtaacaagtgagcacattgacttattttcacagaatctcaagtacctatccttctgaaaccatttgtctaaaatattatgtaagttaaagaatcccctcattttttgtatgagagtcatagatatgggaataaaggccataaagagccacataagttgtaaacagttttaaaaatatgaactagaatgttaaagaagaaaaaactttagaaaggtcatctagctagtttaatcatttttgcagatggagaaactagggtaccaagagataaaagttgcacagatagtataagacttaggacttttaatgcaaatgtctggattccagttttttttttttcaacatttaacatttttgtgttttgtttgagtgtgagaaaatgaaacattattgcatcatctgtcctttaaattgttaa

SEQ ID NO: 236128 - DNA, 649 bp, Homo sapiens
actttttttctaaggaggaagtgcctactgctcctgaaagttaccatgcagccttgcctgtgatattaggttaaatgatacaatattgctgacaaccaattgtttcaggtctacgaaacagttttgatctacttactacatatctctcggacgaccctttcctggtttgtagaaaatctcaactcaagccaggtaaagaaggtaatccatttctttctctccctttctccttttcttctctctcctttttctctatttctttccccttttccttctatgtgtttcctgggtagtgggttctctgtctctctctctctcccctttcatcttcccctctcccccactctctctcctttttcacctctccttctgtccctattttcttggactttcttacagaaccagaagatcagtcatctatagtcctctgggctccccaaagaaccttgaactgtcacaggcactcactgtgctccttctaccctcaatgctatctctatcctctttctctaagtcatagatgagttccagaagagatcagaaagaccaggtgaactcagatcagggatatccttaagctctctgggggttggggcaggagacaaggtccacagacaaactaatgtctttcttttctttttcattttac

SEQ ID NO: 236129 - DNA, 554 bp, Homo sapiens
tcttatttataagagttctttatattttaagactattgatgcttttattattatatattgcaaacattttttccattttgtcatttgtctttttggtttagttatggtgtttggtattatacacagttgtttagtttttataaagtcaatcctgtcggcttcttcttttatcactgctcttgtcatgtttagaaaaccttgtggagaagagcttctaccccctcacctccaccctccacataatgctgttaagtacttaattcagacatgtgaaattaaattgtgcactagagggtccccagccttgctttttaccctgattattgctagcaagtaggctagttttaatttaagcttattctctcagcaaggggggatcaggaagatgcttgttgggacttatgtgtaacattttggtcccttcccctaggcaatgtatctacctttatggcagataattttgtctccattgagacccaagacagacttttatcttaagaaagagctgtatggaaccttttaccttacaaagtgccactgttcttaaatgaaaa

SEQ ID NO: 236130 - DNA, 390 bp, Homo sapiens
gagcctccaccagggaaatgtgaactttgcatttcaagaggcaagtaccaatttctctccagaaaatattgacttctggttctgtaattattaaaatgctgagcaatggtcatctaaatgctcgtagtcacaatgctaggctcctaacaggtacaacaaactctgctaaatggttgtcatttagcatctctgagcaccttcacaccacccctatagtcattgtcagagtttctaggaccttgagccttgtccactgcttcttcctcccagacatccacctcattcaactcatccacctccctgcagaatcagttgcctctctgacctataagatgagtgcctgccccacttgtggcccgtttttcaccgcctggcctgtttctgccccct

SEQ ID NO: 236131 - DNA, 1882 bp, Homo sapiens
  misc_feature (1323)..(1323): n is a, c, g, or t
tttctccagcggcccggtcgtgaagggcggtcggcgccgcagcggctccgatgcccgcccggaagagagcgctctggccccggcctcgcagctgcgggacagccgggagcggagcagagggcagccgcggccagttgtctccccagcggactgggaagggaactttatctcggcctggactcccgctgtacctttgttgggggttagtggtgaggctgcggtcgtccgagctcctgggtgtcgcgggcgccgcgatcccctcttcccgtagaagggcccagggcgctgctcgaggcgcgggaacccctggccagaggcgggcactggcgcagccccgcggctgctgctggccaagccgactgcagggatgagaaattccttgtaagagtggctggaaggctccgcggagagggaagaaactcttcccagagcgagctcccactgctccttgggaatggtgcactttccagttccagttggaccctctgggattgtcacaggaagcgctgccatgtatgaggagccctctgcaaactacagaaggatggatgctcttagcttataaataagattttgacgccctggttggtttgatgacttgtgtcatgaggagtaggggtgtgcgctgattccaaattcttccacgcggcatcctgctccggagcctcccttgtctcctagagaaagggacagggaatcgaaggatggggagtctgagggagaggcccctattccgcacgctgtctcctggctggctcctgaagggctggctgcttcccccacctggaagtccaggcccctgttcggaagtcctctccgcacagcctgacagtcccttggttctcttatgattgctctcctcccgcttcaggcctaggatggcaaggacagctcccacttaccagagccaaggcactacgccgttcctgggtgtcctcttctcctccagctcctttgtaagtcccatgctcctctatttacctagtggagggtgtcatgccaggaccctggcatatgatacaccagagctgcattgcttttccgaatctgctcaagctgtacaacatttctgagcctcagtaccaccagccatctgtggtcctccatttgtcctcttctcctacaaatacctccagcccctctcttccttcatgatgcttctagcattggaaatcctccaggacaattctgccttcaagtttcctagcctgagccactgagttgatggaggaaaatgtgatagagatgactcgtcctcctttaattttcccacttctataagcatataaacgtgccctgcaactctcctaagtgtccccagangacccgctttcccagtctctgagacaaacatttcttagccttctctcctgcaagagataacatttctcaaagtttctttgagcatgtagatgctgacaggggatgatctatcccttccaccaccaaacctccacaccagttggcactccacccttgttatagtggaggaagctgcaggctagttccagcacagtgaaccccagtagtgtttcgcttctcagcctttgccatctcctcatccctgagccatctccctgtggcagacactgatgggccaccagcactgcatcagtgaaggacttgctgccccagctgctggcgtgctgtcagcacagcctcctgcagtccgcctctccacgattgcggaaagcatctaggctgaagggtgcaggtgctgtatgcattggtttatatgcttcctgtacatttcctcaggaacccaacctgcacccgtccttctctaaagtatggttaccatcagcatccagacatactcctttttttttttttttttttttgcttctcttcatagcaaaatatatgaacagtttttaccttt

SEQ ID NO: 236132 - DNA, 2057 bp, Homo sapiens
  misc_feature (650)..(650): n is a, c, g, or t
  misc_feature (1849)..(1849): n is a, c, g, or t
aaaatggaagttctgaaaataaataaaaagaaacatcaataaataaaagccccattttcatattcttatttgacctcttgcctctccatcattcttaaatttgacctccatcattcttaaatttgacctccatcattcttaaatttgacctccatcattcttaatcctcatgttcttaatggacatccctcccaccctatctgggccttctgagactgttcccccagccccagtcaggagggcttgtccacaagttgctgtctgaactgggcaagcctcctggcttccctgaaatggtgctgatgtcttcacttcctgccaccttggcaacctttgtagttgctctctttttgccaggggaacaaattaagagagagaagagtgatagtgtctacatgtggtctgctcactcagccagtattttccacagccagtctttccctagaccagcatctgagcgtgccttgtctatgggccacctatactattatttactgatgacttcctcattcactttctgttttttatctaaatgccagccttagccttgttcaaggtaacagtatacaggaaatcatgggtttcgagcatgttttgtcaatatttagtaaaatgcgttcatagctattattataaagactttaggtacnttcctgcaccacttaataactgaatcaatctcctttcatcagggggaacaaacctgtctttggctcacactgtttgaggatataaaaggaagcatacagtgggcctcattctgacaaatttttagtaaatcacaggttgcctttcctaaatccctcaatatgatggctagtctgtttcatagtgaataaaaagtgatcctggatgaatgaataaagtgaaattcagataatttttctcaaaactgaaattgtttaaatcttcctttagttctcttttttctgcctgccccttctttcatataccctgtttttcacctcttttgtctcagtcccatctgatatttgaataacaatatgtaatttcaggtttaggattgttgatctgtaaatctcagcctagtgctttcaactcctggctttctcctaagttcaccctcctcccttccctcctttctgtaaggactctaaacgattgcgcttcattaagttatttttataatgagttcctgttaccaggaatacagagttaaaaaggtgatctcactaaaagtaattagcataagacctgctggacctgtagaagtgactggatggtaatcaatagcaatatgattacacccatgcagcaattataaattatttaaaacactacccctaggttactgactagttgcctttaaattaaattctctgtcgataattgatgcaaagaattaatgtgagaacaccttcagttactgcaactttttcaaggtggcataaaatattgaactattgcccgtcattagcagctaagctgtctgtttgctctaacatccttcttttctaaattggtcaagaaagagtctcagatcttgaaagatgacaaatgatttcgaatccactgctgggtattcttctaagagcactgaaatgtcccagtgagaaatttcatatatgaaggcaaaggaaaaaaaaattaaactttaaataatgaccagttatacttcatcaactctaacaaatgaaggagcagagttggttttccggagtttgcttcagttctttgatatggtcagtgtaggtcggggaggtcttccctagcttgagaaatcataacctaggatatttaagctgtcagtaatagtgttttaaaactccaggcctataataaagtaaaaagtgtgtctgataaaatgggtttttttccttgcttagtnaatgtcttctgtttctcgctaaacattgtcacttgccaaaccatgttttctgtttcatactaattttctactggcagtgagaccagcggaatctaagaaattgcatacgaaattcaaggattggaaagaagaagaggaagtcaaccattagcaaccctagctcctctttaatctcaagaggcaagaggtactcgatgaaccacatgct

SEQ ID NO: 236133 - DNA, 807 bp, Homo sapiens
tttttttttactactattcactcacagaaaaaaaaaattctagtttcactgaaaaatgcttttggcgaagcagtaaaaattattaattttattaaatcttggcccttgagtacatttaaaaaatatattctttgtgatcaaatgggaagtatgcataaagcattttagtttggaaaccaaagtatcatagttgccttgaggaaaagtatttgtatgattgttttagttctgagctgaaccatcactttttttatggaacattatttttatctaaaataatctctgaaagacaactgtggccatacagactagtctatttaacattctctagaaaataaatcaagagacttagtcactttaaagaaatcagctattggctgggcacagtggctcactcctgtaatcccagcactttgggaggccagggcagacagatcacctgaggtcaggagttcgagaccagcctggccaacatggtgaaaacctgtctctattaaaaatagaaaatttagctgggcgtgacagcaggtgcctgtaatcccagctacttgggaggctgaggcaggagaattgcttgaatccaggcagcagaggttgcagtgagccaagaccatgccattgcaccccagcctgggcaacaaagagtgaaactccacctcaaaacaaaaaaacaaaaaaacaaaaaccagctatatcagtatttgttgccagtgattcaattcaagctttcaagcaaaaattcatcctgtgtaagacttcagtttgccatcatgagcacaatagtttcccaacacttcaagacctttc

SEQ ID NO: 236134 - DNA, 753 bp, Homo sapiens
tttttttttactactattcactcacagaaaaaaaaaattctagtttcactgaaaaatgcttttggcgaagcagtaaaaattattaattttattaaatcttggcccttgagtacatttaaaaaatatattctttgtgatcaaatgggaagtatgcataaagcattttagtttggaaaccaaagtatcatagttgcttttatggaacattatttttatctaaaataatctctgaaagacaactgtggccatacagactagtctatttaacattctctagaaaataaatcaagagacttagtcactttaaagaaatcagctattggctgggcacagtggctcactcctgtaatcccagcactttgggaggccagggcagacagatcacctgaggtcaggagttcgagaccagcctggccaacatggtgaaaacctgtctctattaaaaatagaaaatttagctgggcgtgacagcaggtgcctgtaatcccagctacttgggaggctgaggcaggagaattgcttgaatccaggcagcagaggttgcagtgagccaagaccatgccattgcaccccagcctgggcaacaaagagtgaaactccacctcaaaacaaaaaaacaaaaaaacaaaaaccagctatatcagtatttgttgccagtgattcaattcaagctttcaagcaaaaattcatcctgtgtaagacttcagtttgccatcatgagcacaatagtttcccaacacttcaagacctttc

SEQ ID NO: 236135 - DNA, 471 bp, Homo sapiens
cccagcattatcggtggacggttaccaggggatcccgagggatgtgtttccctgtgaccctttgggaaggaaaacttggttgcctcagtaaccgagtttggcttggatgcaatgatgcagtgagtgttctaggtgagcctggccgagaaagaggctgcagttgcactagggggtggattaacttttcttattaccgaaccaagacgtgaaaggaaagctggggaggaggtggagttttgctctgtgtttgtttttttactatttcagagaatacgaactaaacgtttttgcgttagggtttgtcttccaaatgcacgcccgggctgccatacatttaccaaagttttactactcaccacttagttcatacaaaggtttgaagctgatatcctagagttggaaggagcaggggacagtgacagttttgtatttgaggaaggcctgagaaacaaacgtgaaaaggcctttatt

SEQ ID NO: 236136 - DNA, 1813 bp, Homo sapiens
acttgagctcagaagatcaaagctgtagggtgcatgactgtgctctcaatagccactgcattcaaaccggggcaacacagcacaacccagtctcttaaaagagattcagcatcctggagaagccattggaaagagtagagaaaatgccacggatgaaatatccctgctgctcagactccactgacccaagtgaagttggccacagtctaacaaatgggatactgcagcggggttctggttctgaaacagatctggtgaatggtgctcgaagtgatcggctgttgaccaggtgtggcttctctgttgatgttccaaggacctcatcagcagaggaagaagcattattactaaccatctttggcaggatgaccttttgttgttgtcgttcaaccaggtctcctttattactctgcaatctctcccttttgttccctttccacctaaaactcggatgtctctgccaccgataagcacccagtggctttcccagattggaaacagcagaatcatttttcttcctcttgcttttcactggaccacaccatggataactctttaaacttgttcctatctctgaatctgcataagcaggttctgacaaagatcttcgatagcttggaggacaaggtgatgtttgtttcttaaagatgctcatcttccctgactccagtctttaacagtctctctaaactttaagattcctctactctgcagtctttgcagttgaaccacacatgtctgtgcagtccaaaacatttgactgcttaagcagctttctttgtgtggctttgaaccacagcagatgttgctgcttaagagctggtgtcatgttattacgccattttccaagatctcaaaaacttcagcagcacctaaaaacctcttgcctgaagcaaagtatcatcagagtagagacaaagtcaagatttccaaaggatcacctcacttcctgcagtaggttacatttctgtaataggctttcgggaaatgatttttttaagtgaaataaaaacaacaacaacccaccaacacctttatggaccagtagtagttaagtgttcaccatgcaaatgatagcgagttaaaaacagattgtgaagaaaatcaaattactcaagctgatattgatactttccagaagaagaaaaaaaaccttgcctagtcttggagtgacaactcttcagaagagttttgatggcctgcatttcagaagtttaatttcaagcaaatcaatgctatttatactacatctctcaaagttaatattgtttttcaaccaataggtaaaattcaaactggtactgtaagaggaggaaaaaagccaaaagaaagccaacaccatttttagtgtaaatatattacactatgaagaatttaaaaagcataaataggaagaaaaagagcagaggcagagggtatttgctataaactacagcaaaggaaaaggaaaatcttgaggcaagatcttgtggcaactggaacataggaatgtacatacttaaaaaatttctggaagaagaaagtttgctatataaatccaattgggataagttggctggaaaaatattccctatctgtttaaccaaagaaattcctttattcctctttgtgctccttacaactttaaaaaagacctgactacttaaaatttgttaaagcaagtaccttatactgaaccaagatcatgaatgccaagtttttgctggttaagttcttttcaactgcctgctcataagcccctgaaaataggggtttcaaatggaaagcctcacagacttcagactaccaataaaacagatataacagtgcaatc

SEQ ID NO: 236137 - DNA, 448 bp, Homo sapiens
aatcactctaagcacgtctgggtatatatcttctaagtcctcagaatgcagttgtgggagctgccatcttgtagcacacatcacaagggagagtagagtaataaatgtttcaagggacagtagagtaataaatgcttcgaagtggctaccttgggaagtggctttaatgagcactgcttaaaaagctgggcccttgttctgatcagaaagattcttcttcaaacctagaatactcaactatgattatctgtttactaaatgatttaccatcatggaataataattaaatgacatttatgttgtctgaaagagatagatacatgtatatttttacaagggtgttgattccctttaaagaactattatcttttctaatcctacttacctcccagagatgctgtctcttcaaacaatcataatacctaataaagacagtatgaggccgact

SEQ ID NO: 236138 - DNA, 480 bp, Homo sapiens
ccattgacttggtgtagggcattctctctaatccatcaaagagaaggaaggcatgtgctataggcatttccggctatggttttccccaccttatcagcagaagatatgttccaagatctctaacagatgcctgaatcctggaatggtactgaaccctatatatactgtgtttcagtctgacaaccaagatggctactaagttggcatggttagcttatatagtgtggatacactggacaaaggggtgattcaagtcctgggctggatggaatgggacagcacaagatttcatcactcagaagcatgaaatttaaaacttataaattatttatttctggaattttccaattaatattttcaaaccacaggtaactgaaatggtggaaagcgaaaccatgattgagagggaattaactatattgttttgtgaactttcacacttacctttagaaggttggagaaacattaaatggtgtttca

SEQ ID NO: 236139 - DNA, 561 bp, Homo sapiens
agctctccaccaccccatcgtgcagacgctggtcacttcatcaacccggaaacggtgcccaagccctgctgtgcgcccacgcagctcaatgccatctccgtcctctacttcgatgacagctccaacgtcatcctgaagaaatacagaaacatggtggtccgggcctgtggctgccactagctcctccgagaattcagaaacttacatgattcttcatcgtcccaagcaagtctgacttgggccctttattgaaactctgtttcctctcccgctgcctgtctgcctccctctcggagtgcacctactgagcaccagccctccattccctgccagccacacccagaaagcaatggggctttctgggaaggcagaaatattctgtgacctgggctattcagaggggtggcgtgagtcgtgtgtgcctagcaaacactcaggacatggccggtgagacagaagggctgagcttttgtcctagctaatatattaattaattcattcattatttattttgagacggagtctctctgtcgcccaggctggactgcagttgcgcagtct

SEQ ID NO: 236140 - DNA, 1526 bp, Homo sapiens
tggagtacagtggtgccgtttcagctcactgcaacctctatctcctgggttcaagcgattttcctgcctcagcctccctgtagctgggactacaggtgtgtgtcaccacgcccagctgatttttgtatttttagtagagacggtttcgccatgttggccaggctgctttcaaaaccctgacctcaggtgatgcgcctgcctcggcctctccgtgcccagcctatttcctttgatttcttaaaccattttgaagaaggcccttccaattaaagaacattaatttctctttcaaattgaatataccatagataaatattgaaaaatcttcttactattgtaaataaatgttttaccttcatttataacttacctatatagttaaagcagaatttatgcctaccttaatttctggtttacatttaaaattgttattctggttattaaaaataaaaacctaaagagggcagtaataaaactacagaccagtgtcactagtttttactcagaatttacatattttttttttttttttgagacgcgacagagtgcgactccgtctcaaaaaacatatatatatatataagctcaggtggggcacagtggctcacgcctgtaatcccagcactttgggaggccgagacgggtggattgcaaggtcaggagttcaagaccagcctgtccaacatggtgaaaccccgtctctactaaaaaaaaaaatacaaaaattagccgggcgtggtggcgggcgcctgtaatccagctattcgggaggctgaggcaggagaattgcttgaacctgggcagcagaggttgcagtgagctgagatcgccccactgcactccagcctcagcaacagagcaagactccgtcttaaaaaaaaaaaaaaaaaaagaaatataagctcaaatttctgtttgacttccttaagctacaatatgaaatacgagagaccaaagtatggtgatttctgttatctttgataatagttacttccaaatcagccaaatctggtaataacagaaaaagcctctccaagcactagctgcaatgaaaaaataataatatgacaacataaatgactcattaataaagattcttttgatagcttttaaagccaaactctgctattaatgcaaattgagaagaaaagagaaagaagaggcgaattaaggaaaatagaagtagtatccaaacaagaaacagatcaaccaagagaaaatggttaacagagattattttcaaagagtaatgccaacaatatcagcaaagtaatttaggggccctcagtataaatgtgagctatgacctttgaaggcattttcttagggaaaggtgaaagaaaaatgaaaacatcatcatttgtaggtttcagtaaccccttcccagaattttcctgactcttaaaacgaggtaccttctctgataggaaggctcccctagtaatgattcagaaataacattttatgtgctccaagcctacgatgacgaataagtttttgtttgtttgtttgtttgttctgaatgt

SEQ ID NO: 236141 - DNA, 1094 bp, Homo sapiens
atctacattttacagatgttgagagtaagataggattcagaccttggaatctatctcatttcagagctgatgttttgtttgcctgttttgagacaaggtgtcagtgcgacagagtgcgactccgtctcaaaaaacatatatatatatataagctcaggtggggcacagtggctcacgcctgtaatcccagcactttgggaggccgagacgggtggattgcaaggtcaggagttcaagaccagcctgtccaacatggtgaaaccccgtctctactaaaaaaaaaaatacaaaaattagccgggcgtggtggcgggcgcctgtaatccagctattcgggaggctgaggcaggagaattgcttgaacctgggcagcagaggttgcagtgagctgagatcgccccactgcactccagcctcagcaacagagcaagactccgtcttaaaaaaaaaaaaaaaaaaagaaatataagctcaaatttctgtttgacttccttaagctacaatatgaaatacgagagaccaaagtatggtgatttctgttatctttgataatagttacttccaaatcagccaaatctggtaataacagaaaaagcctctccaagcactagctgcaatgaaaaaataataatatgacaacataaatgactcattaataaagattcttttgatagcttttaaagccaaactctgctattaatgcaaattgagaagaaaagagaaagaagaggcgaattaaggaaaatagaagtagtatccaaacaagaaacagatcaaccaagagaaaatggttaacagagattattttcaaagagtaatgccaacaatatcagcaaagtaatttaggggccctcagtataaatgtgagctatgacctttgaaggcattttcttagggaaaggtgaaagaaaaatgaaaacatcatcatttgtaggtttcagtaaccccttcccagaattttcctgactcttaaaacgaggtaccttctctgataggaaggctcccctagtaatgattcagaaataacattttatgtgctccaagcctacgatgacgaataagtttttgtttgtttgtttgtttgttctgaatgt

SEQ ID NO: 236142 - DNA, 506 bp, Homo sapiens
agaacccagatgatccagacacagtggatgtcatcatgcatatgctggatcgagatcatgacagaagattggactttactgagtttcttttgatgatattcaagctgactatggcctgcaacaaggtcctcagcaaagaatactgcaaagcttcagggtcaaagaagcataggcgtggtcaccgacaccaagaagaagaaagtgaaacagaagaggatgaagaggatacaccaggacataaatcaggttacagacattcaagttggagtgagggagaggagcatggatatagttctgggcactcaaggggaactgtgaaatgtagacatgggtccaactccaggaggctaggaagacaaggtaatttatccagctctgggaaccaagagggatctcagaaaagataccacaggtccagctgtggtcattcatggagtggtggcaaagacagacatggttccagctctgtagaactgagagaaagaataaacaagtcacacattagc

SEQ ID NO: 236143 - DNA, 668 bp, Homo sapiens
ggcccaaagccttccgggagtcgtagtccttccgcccgctcctcgtttctttggaggttggcccttccagctccagttctgcccaggtcacaacgccgacgacatggtggacaccgtgctcatgaacttcctgcggggcggctggcccggggcgggggcctgggctctccgggctaggggggcgcccttccgcgctgccgcccgctgcagttcgcctcgcaggaggtggtgccgtacgggcacttccgccgcctcgactacttctcagaagagaggagcgcccgggacctgctcaagcgcctggaggcgccgcggccgtcggcggtgctggacctcgtgcactcggccgaacgcctggcgctggcctcggccgcgcggcccccgcgccccggcgcctgcccccgctgtggggcgctggccagccgcgcgctctgccaggcctgctccctcctggacggcctgaaccgcggtcggccccgcctggccatcggcaagggccgccgggggctggacgaggaggcgacgccggggacgcccggggatccggcccgggcccccacttccgagaccgtccccaccttctagcgactccgggcctcccgccgggatccgacgcgcccgggtgaggtctgcctgtaaatgacactgtgaataaacccgttacctta

SEQ ID NO: 236144 - DNA, 417 bp, Homo sapiens
ttggtcccacactgagtcccaactttgacctcagcctgagacacaacctggttattgtcctggtagagacagttccccgaatccagcctctgcccaaaccctcctcctagacatggctgagccctaattttgatacaaaatacttgaattcatcttcagattcagttctgatcctatactgaactaactgaacactaccagggatctgactccctgatattcgctggcgtctccctgcgtgttctgaacctatgctgaccagcaccagaagggttcagaggggtgatttcttgccttgggatgagagagcaatgttagggatgaccagcagagggcgtgcaacatcaggttctagaggcaagcgtccaagagcccacctgtgagctaaaaaaattaaagttctcgtttttgacacca

SEQ ID NO: 236145 - DNA, 363 bp, Homo sapiens
tctgaatacttaacaagtttaatgagctctcagatgatgccaatggttctccaccaaggaccacgccttgaggagcaaaggtctgtagatacttcctattctctttttgagcccctccaaccaggctttacctctctccattgcccccttgggttgctacaaactgctctggcccattttaatgtcagtgctcaattcttcttgactgtagaatttgactctcttgagaggctttctcctcttgtcttctaggacccctcctacctcactgattttgcctcctttgtggatcctctccatctttccggagtctacacaatggaggttccagtgtggagatatcccttctctatccacagtctc

SEQ ID NO: 236146 - DNA, 358 bp, Homo sapiens
agccgggacgtgacagaggaaaagaggctgactctgagccggaagactcctgccagggctggcaggaacagtgccagggcagcacacggtgaccctgttgcctccccagacaaggtggggttttgcccactgctctcctgaagagggtgagacctaatttcacctcctccctcttctctgcaccttgcagaagtgttgagagaaacgtccacttttcctccgacaagatccaagaggaggcgggccagggacttggggagtgatgaggaagtactgtgtattttaatataatgccacatttgggaagctaacacattatttgtttctagaagtaaagctccagagaatcttatgggct

SEQ ID NO: 236147 - DNA, 315 bp, Homo sapiens
gcgatctgttcgcctcagcctcccaacgtactgggcttataggcatgagccaccgcgctcggcccccactagtcctttaacctcctatctccctgggaaatatataatagtaatagccaccgggcgcggtggctcacgcctgtaatcccagcactttgggagggcgaggcgggtggatcacgaggtcaggagattgagaccatcctggctaacatggtgatactctatgtctactaaaaacacaaaaaattagccgggtgtggtagcgggcgcctgtggtcccagctacttgggaggctgaggcaggagaatggc

SEQ ID NO: 236148 - DNA, 352 bp, Homo sapiens
gctacctctgctctctcttctgtaagattatttgtatgttaatttacatctgttaagagcctgccttgtgaaaacaaaaaaaaaaaaaaaaaaaaaaaaaaaaaaaaaaaaaaaaaaaaaaaaaactcgagactagttctttctctcctcgtgccgaattcggcacgaggtcaaaatggataacaaaaggaacacccaatacaaattggatcctttgaatcctccaagtctgaatttcttgaggcagtctgtgagcactcattggccgtgtctttaaagtctacatttctagttgttcttcaaggcttagtcattttctatcacgatgctcttacttgggtgttcagcagcc

SEQ ID NO: 236149 - DNA, 237 bp, Homo sapiens
aatcaatgactatttattgcaccagacagcatgctggatagagatctcagtgtgactgtggccttcagtgaaaaagaaagagagggggagagagagagagatctcagaactgaagccatctcatatcccaaagccagcctgacttccacatcgtgttcttgaggggcagactgcctcttccaaatccaaggacctggggagaggaagctgctctgggtgctggaatgaagggtgaat

SEQ ID NO: 236150 - DNA, 4099 bp, Homo sapiens
  misc_feature (937)..(937): n is a, c, g, or t
  misc_feature (2383)..(2383): n is a, c, g, or t
aacccatttacaaaatggatcactggccagactcctcactagccgtgtctatgagagagtgcttgcccatccccgaggtagaagaacagcaccctgaggtgccgctgccccagccggcctggtgctgacaggctggaagaagtgagttgccctctgtagagacccccagagcagatgtgagaagacggccctagtgggagtgccatctgacaagggtcggggagctttttatggacaagggatgccactaaaaattagggatcctctgttttatcctggactgctagctccttttaaataataagtcttatcgagttctttttttttgaggcagagtttcactttatcatccatgctggagtgcagtggcgcaatctcggctcactgcaacctctgcctcctggattccagcgattctcctccctcagcctcctgagtagccgggactacaggtgcctgccaccacgcctggctaatttttgtatttttagtagagatggggtttcaccatgttggccagggtagtctcaaactcctgacctcaggtgatccgcccacctcagcctcccaaatttctgggattacaggcatgagcctctaggcccagccagagtttcattgagttttaatcaaagactgtcttgtgatctgtgattaatccagactaggattcagtaggcaaaagagcagagggccacaaggggagtaccttgtcactgtccatttctccccatcctccaaagcccaaggcacccactcatctactttgtgtccctatggatttgcctattctggacatttcctagaaatggaaccatatggtatgtggccattcgtgtctggcttctttcacttagagaatgtttgcagggttcatccctgttgcagcacacattagtactgcattccttttttagggctgcataatattctatcntcctttgatgtttatttcagcattttctacacttgtacagcaaacacaaacacacaaatgacgcccctgacttctgtatctgcagtcatccttttccctcacatagctgcccagctttgcccctggtttctttctgatattgactcgatgtcacttcaccaacaccttccctggctaccttgttaacagtggcaaaccctgtcctatccttccctggttcccatttgtgcttcaaacctgttatcttctaacttactgtatgtaccacgtagttttcttatttatttcttatttatttgcccacctctcccttcataagaatgtgcaggatacactgctgtatcctcagtgcctgacacagtgccaggtccatggtagctactcaacacgtggttgttgaatggataaaagttgccggagcagaatatctaatcatttttgcgacccactgctaatttcacagactcctccttatgtctgtggatagtggcctcattgattgatgctttaagaacataactggggccaggtgcagtagctcatgcctgtaatcccaacactttgggaggctgaggtgggcggatcgcctgaagtcaggagtttgagaccagtctggccaacatagtgaaaccccgtctctactaaaaatacaaaaattagctgggcgtgctggcgcgcacctgtagtctgagctactcaggaggctgaggcaggagaattgcttaaacccaggaggcggaggttgcagtgagccaagatcaccccactgcaccacagcctgggcgacacagcaagactctgtctcaaaaaagaatataactcatccaaggaagggttgcagagagctccacgtagagagcaagatagttgggaggagaatggaggagagggactggctttttacagcttaggtttgctgatgaaaaaatgaaaagcataaaaattgctcccatctgggctctcctttgattttatttttgtccatagcaccaaaagaacacagagtaatgaggatatcttgagtgaattgctggagtactgcagacccttgaataattctggttaatctagacttctttgctttcttctaaggatctgttcagttgggaaaccctgcttgtcgacttctggtaacctctttgtcttggccagttttaacagcttgtttctgctgaaccagccaatacttaggaagctgtgtaaggctttttttccccctccttcttcttaatgagtttgattcagaggggaagcccaggctgaactgaccttccggaaaatgtaaacctgtttaacaccaaaccttacacagccagaacatgctgtgcccaactctgcctgcccgccttgggctgtgaatcggcacctgcaagtagggctcaagggtgttacagtcggggtcctacctgcctggggtcattcttgaccacctcaagcagacagagncaatttctaggcaacatgatttgtaaagatctgacctctaggttgggagtaggcttccagtttgagaccatgagctgctggaatcgtagacttccccagttcaccttggaagagtagagttcagttctaacagagctgccagaaagaagggctacggctcctcggctgtggctcttaccattgtccctccttgagctgactctaactgccatttccctattatcgcatcccttgcagcttagaaatgtatttttaacaatatatctgggttcagccactggaggttcctcacatggtggaaatagcatggagtcgagcagacagaggagggctcaagtgtcacctcccaccatgtggcgtctgtgtgaccttgagaaagtgacttaacctctctgaacttcagttgtcataatagctaatatctcaaaaagctcttcattcattcattcactcactcaacagacaactattgagtgtctaatatgcccccaggtacatgctaggtgccaggaaaacatactcaaggaaatttgagtctggttgaggaagacattagagcataaaagccattacggcaccacatgatcattgctttggcagaggtatgtgtatgaatatctgggagaactggcccagaccagggctgggaattttgggaggcttgggatagccctggtgaaaagaaagttgtttaaggcaggctgcagagtagacacctcagcttcctcctctgcttccgcccctcctcttccccacaattcagtttccccaagtcaatctgcacactgcagaagtcctctgggggaaagagcagagctctaaataggaccagccctcctggaaagacagaaagtctagatctgaagtcctcacttctttctggaaggaaacctcgcagagcagataccaaattgctcccgcaagaggatccgtagagagaaaggccccagctgcagagaccgtggcccagccgcagccccctgcatgtctcgggtcaagcggagaagtcaggccctccaagtggaaagtccaggctggagcggggcaggcccaccgcctcctatctctgctggctgccgccacaattgcagagcagctggcgagaccgcaagcgttccttctcccagcagcagcctgacttgaaaagcaaaccacaaacccctggcctgatgcctgctcacccgcctcactccctggcaccttccaaccaggggagcctggagctcacgcgtgaagttgcagcagcaagcaatctgcctcgcttctggtgcccaccgaaaccaaggtctgccagacagcagcgctgggacctctcccctccccagcaggatgggccggctctggaagcacgaggtgttccaaagtgcaaacaagctgctgttaaataattattcccaaacgccaaagcccttgctggtttgcttgcttgcttttttctttttttgcctcgcacagatatcgctagggcagagtattgacatttcgttttctttttgttatgggtgataaagcacggtgtttcttgtgagtgtatgcctgtatttccctgcagagctggttgccagtccattttcttctatcccatccccatcttccgtacagtccgatgacctccacagaggagatcgggatgtctctatgatgccacgtctctggatagagctggagcaggcataagagaaatgccaactgccaaccccccccgccacccctgga

SEQ ID NO: 236151 - DNA, 607 bp, Homo sapiens
gtgctcaaagctcagaaggcaaaggactccttgccactcaacagtatcagctcaacacctcagccaagaagaatcagggagcacaggcacacactcaccatgctgaacagacagcgaggaccacatttttattatctgattcctatttgaccatctgatgtgcaaattttacctatcatgttgcctttgctccagatctaggtgagatcagatggaatggaggctccatctggtcttcaggaagtctcaagttttcactgatctacataaaatctcagagcaaggcaatttggattgagtgagtccaaacccagtgccttctcctttgaccctggcacagatacactggccaagagatgggtccaaagtcatcccactccatcaaagccatcactgtcaggagtgataacatagcccacatttttcatatgttttcaagatctcaaaatttctactgaatattacaggagggcaggtgcctttatccgccagtacatcatcttcaatatcagtgattttcaatttcctgcttccattcaattgaatactttgttggaaaaaattacatgtgaagtccactatagaaaataaatttgtaacaactggg

SEQ ID NO: 236152 - DNA, 2565 bp, Homo sapiens
  misc_feature (1403)..(1403): n is a, c, g, or t
ttgctcaccactgaaaaatgtcagtgtaaatgtgaccgctttaaagatgagtcaagtaattcttggaacagggaaaaaaatgaatttgccaggtcaggagttcacctgcctttgtcagagttgaacccaaccactcttgacctcgactcactcccttagggttaagaaagcccaaacacattcctgagcacagagcaaacactcccatgtcactgaaaagaaacaaaaggatgctaaaaagtgctcagacctgatcacattttttccaatattttttccttttttttttttttttttgagacagggtcttgctctatcacctaggctggagtgcatgtttttgagacagggtcttgctctatcacctaggctggagtgcatgatcatggctcactatagccttgaactcctgggctcaagccatcctcagcctcccaagttgcgaggactacaggtgtgcaccacaacgtcccagctactttttaaatttttagtagaaacgaggtctcactatggtgcccagactggtctcgaactccggagctcaagtgatcttcctgctttggcctcccaaagtgttagaattacaggcatgagccacctcgcctggctggtttttgcctttcttatagaccctgggcatgtaagcatttattagtttgcatttttgaaacagtaatttcaatattttagtgccaatgtcaggccgcttaaacactgtattacatatcttcatctgtctggtggaactattggtgtgatcctagagaactgagtcctattctgccattcatttaaagtgttttaaactctaatctctctacttaatgcacagtagtcagattattctcttaaacatttgcctagtagaggttaaaatagtttaatccttatgaagatggaataacttcaaactcacattgtggcacttagatcttccaccaagacttcatccgtgaaatccacacctccctgttgggttcccaattacattccaaatttacatttcttttgagaatctctgcatactccagctctgtcctgttgatcctattctagaagtgcttaatgcagcaagacacagaaagttaaacgcaaattgctgcaaaattcaccctcagtggaggactagaaacacaacatgtccaatttaaagctcagttcacaagcagttcaattctgctggcatcagaaaaggagattctaattaaacattcttagggaaggacatcaaatgaggttaatgggaaacgttaccagattaaaagcagttttttgacaaagtaacagatttggaaattctgactctctgaaagccttgatttgaacctcaaacttgatttcaccatgagaagtggggatcaagggcctgcgcagttcttttcctaaatcgattcggtgcnccccaccccgacgcaggcacaggtccgcaaccagatagggagatgcctgaatttcaggctacctttgacaaagctttcttcctccctccctccctttgcacgctgcatcccacgctgcctgcttaaagcgccctcatgtgtctacagatggtaaaacgtttatttctcaacagacattccagtgatagcatccaatgacctatgtaacggcacccttttttgctgtacgcgttttttgagatggagtctcgctctgtcgcccaggctggagtgcagtggcgcggtctcggctcactgcaagctccgcctcccgggttcacgccattctcctgcctcagcctcccgagtagctgggactacaggcacccgccaccacacctggctaattttttgtatttttagtagatacagggtttcaccgtgttagccaggatggttttgatctcctgacctcgtgatccacccccctcggcctcccaaagtgctgggattacaggggtgagccactgcgcccggccccagtcacttgttcttaagtttcttaagcaaactataaaatagcaaaagaccaaaaaaaaaggaaaaaaagcagttcgcctaatacattgttccagcatttccttgaaagtactgagccatctcaattgctctgattttgtgagaaaattatgaagcgttgcaaagtcccagtgattctcttgttacttagctaagaatttgaaatgtaatttaaatactattctttacaatccattataaggattttaaaatctttttgcttctttaataaattctaacaaagttttgtgtttattcttagtttcaaagaaccaggtccccagtcctgggaggctgctcagctggccaagccagtgtttaatctcattatagcagccctgcaggcaaaggcactctggtctgaatctagtctatctgagaaatacacaatgctgctctcatcattcaaggttcttacacattaatgattaattatcagaagtccctttgtctgagaactctgttttttcccacagctcagaggagcttctggggctgccactaagttccagtttcataggaagaattgccacaaacaacttttgcagaataatgagtatattccaaagcaaatttgtctgagaaattatgtagacttctggca

SEQ ID NO: 236153 - DNA, 406 bp, Homo sapiens
gagattcagaaaagtgatgtagcaataggagcaaatagcaacttaactttagggtagaaaggagaaaacgttaaagagatacagtgattttgacagccttttcaagtattcaaggcagagcaaggttaccctgagcccaggttcagaaaatctactccttgaaggatttcactacatgttattccatatgtcactgtatctgcctggcattaccccttcttaaaacacacattaaagtctcttctagagtttctacttaaagaccctaaatttcagcttatctgtgtcagttttcagataaaaagttattttggaaaagatgaatcttccatattaaaaatatatgattccaagaaaatgagtttttttcatcagcaaactagttacactcagcactatctactta

SEQ ID NO: 236154 - DNA, 3126 bp, Homo sapiens
  misc_feature (784)..(784): n is a, c, g, or t
  misc_feature (847)..(847): n is a, c, g, or t
  misc_feature (1738)..(1738): n is a, c, g, or t
  misc_feature (2939)..(2939): n is a, c, g, or t
  misc_feature (2947)..(2947): n is a, c, g, or t
  misc_feature (2954)..(2954): n is a, c, g, or t
aaccccctgtcttcattatgttctgacccaccaggatagggcactgtggattttggttttgaagcttgtccagagtcactcaagagagacaaagcggccattctactgtgtgctacccaacacccaccaggtaagctgctgtgtgccaggatgaagcccctggaagactgcttggctttggtattccagaatttgcttaaatatgttgtacacacacccctgagtttaaaacagcaaggctgagaataagatcttcagcaggcacaagggtaaaggaaagagatacctgtttccagtatatcatgatgttagtttgcttaactaagtcccatttaacatttaggggatcaagatttgggatgttttcatttttattgaagaaatacttgacaaatattttgaaggcctaatgtttgtatgggctatgaaatctgctatggtaaatgcaaagtatgggacccaagaaatgtataatctgtttgggaggacaggacatgagaattcaaacaagaatataaggctacgcatgactaagtacttaaggggtggcatggacagcagtgaggtagggttttggagaagagaaagatggattggagctaaaattattaggcaaaacttcatagaggctggcattgaagtggcaggtggataagtgggaggtaggtaaaggagaatgactcccaattatggcttaatgcttccattaaaccaattctacataacacatttattgtgctataatcaggagttggaatacgtaaatcttcaattcagaaagacngttcatatcaatattggaaactaaagtcctaaagaaggctggtgtttgtttattgtgggtaanctctggcttgtcagatttcatcccacttgacttccttctcttcccttccttagcagtctgttcaccatcagtaacttctactaaatgttcactaatttttaacaaccttgcacatagagagtgagatttaagttaactgtttttgttttagaattctgtaaatgttaaatagaagagaggcatgaaatcatttctgataaaaatagaagttaaatctgtgttaaagggttttgtggcccctttctccctagctctgtctctcagctgaataggttgtgtcagggagtgacaacgcagtggtgtgttggtgctatctgtgttgagtgaccggcaaaagaccacaaaaggaaatctttagtttcccctccaagtcttgttctttacatgagagcataggaagcctccagaagacttgcatgatcctagtattgagtcctcttctatgcatctatcaaagaaaatgagagaatttcagaggggctgggattatttatttatttatttatttattttagagatggggttttgccatgttgcccaggccattcttgaactcctagactcaggcaatcctcccacctcggcctcccaaaatgctagaattataggcatgagccaccatgctcggcctggaattcttatttataacccagtgacacaagactgtaataaaactattaatagataataatcaacctcatcatttggtcagtttctcttgatgcaaggccagcaaataaaaactttgtaaccacttaaaacaaacaaaacaaaaacaaagcttccttcactcagaaggaaagtctgcctatgaaagccttcacccatttattccccaccacccccctccatgcacaccttacctactttccatattatccactcatccantggggaatgagtatcactcatgatgaacaataatggattcagacccagccttagtggagtttattccccagcaagtctagttccgattgtcttttaaggcctgtcttcatgaattctttcctagcctttagctagaattaatcttatccttcttcataatgctaaagcaagaatcttgattttctattaatattatattatcaaccatgtcctgtgttgtatcatagctactttgtacatatctttttccaccaatagatcctgaatttcctagtgtcttcatatcatccttacacatttaagtgctcattatggttgaattggattttttttcctcacttgaaaaggcgtttttcaaccctttagctaagtgccagcacaagttagatcgtgtgacaaagaatatgtagaaagggcattgtaaacaaaagagaaagttggaaagttgcctagagagcatggcaaagtgcttggaatggttggcaccctgggtttaaatgacggagtcataggaaagaagtccagataggtaagcatggggctggtgacaaagaactgagctttacagatgaggaagatgagacacatagatgtcatttgatcagcccaaataataaaggaattagaacccctcacctgattatccacaccacaggcccagcaccctcacgtaagctcggacagtgattttatgctaccatgccaattcccagggcaattggctgggaaaagatgaagagagtgacagagagtgtctatgacactaatgtctgtgtggttcggccacattattcctctctttgtagtgatcgtgcaacttgaagaaaggcaagagcaataggaagcaaacaaccaagaagcttaggtgtgttgaagacaacattcagcactgatctgtggtgtgctgtagtggccaatctgagtccccagttagtgtgaaatagactagcctgtgaattacactctgaagcaaatgccaagagttgccaattttgccatttgcttggctctttaccttggatttcatagaaccaatattttaaatggtacctgggctaaaataatcagcaaaggtattgagcagataagttatcaaaaactacaggccaggcatggtggctcatgcttgtaatcccggcactttgggaggtggaggtgggcggatcacctgaggtcaggagtttgacaccagcctggccancatgatgnaaccccntctctactaaaaatacaaaaattagccaggcgtggtggtgggtgcctgtgatcccagctactcgggaggccgaggcaggagaatagcttcaacccgggaggcggaggttgcagtgagctgagatctcaccactgcactccagcctgagtgagacagagtgagactccatctt

SEQ ID NO: 236155 - DNA, 396 bp, Homo sapiens
gctgacagcagggtgagcttggcattggtctggcccttggttgtgggccgagtagggaggacaggactgcctcctctttccctaggcctcatgacaagggccaggcagctggacacgctggactctgaggcccccaggtttccctctaattctctaacatgtttgctttccacatcctggcctcgcttcacattccagctcattaggcaggacagggccccatttctccaggactctgccaatttggaaaccccaagggccccgggactggggttcctcctgctccgacatgacccgagcttcctgataggtgggaaccgccaccactgtgaggatttcacttcctggctcctggcctgctgggaacccctcacccgcaaccaacatccacagcag

SEQ ID NO: 236156 - DNA, 419 bp, Homo sapiens
ggtcaacatagtgaaaccccatctctaccaaaaaaaaaaaaaaaaaagttggtgcatgcctatggtcccagctactcaagaagctgagggagtttgaggctgcagtgagccattatcatgccactgcactccagcctgtgtgacagagtgagaccctttctttaaaacaaaagaacaaaagaaatgataaatactcaaggtgatgtataatttgaaaaccctgacttgatcattacacattctatgcatgtaacaaaatatcacatgtactccataaatacgtaaaatatcatgtatcaattaaaattttaaaaagaatttacagtaacacagtggagcaaaaaaagaagagcacttcacagagagaatcactggggagactggtatacctgcagtgtgtggaatggctaggaacaaaa

SEQ ID NO: 236157 - DNA, 524 bp, Homo sapiens
  misc_feature (287)..(287): n is a, c, g, or t
  misc_feature (290)..(290): n is a, c, g, or t
  misc_feature (333)..(333): n is a, c, g, or t
ggcaatagacggcgcttatttggcctggaatggttcaaggataatcacctgagcagtgaagccaagctgcttccattggtgggtcaattttgctgtcacttaataaaaaccattgagccctgggactcttaactttgagaatgcattggacaggctctaacatgttccccgtgatccccagctcctagaattcacaccttgcgtaatctcctcctattgaatatgaatgggacctgtcactggcttctaaccaacagaatatgtgaaagattttggaatgtcacttntgncattatgttacatagattgtaataccctaatttcaagagaacnttctcccttgttggctttgaggaagcaagcaaaaaggtgagaaggacccagttgtcaaggaattgagggcagcctctggctaacagccagcaagaaactgaggccctcagtctgacatcccacaaggaaatgaaggctgccaacaaccacatgatcttggaggcaggtctttctctagctgagccctgatg

SEQ ID NO: 236158 - DNA, 478 bp, Homo sapiens
ctttacttgtttataaacgaatgtaaagtcttctaatatctcacccctctgagaaaataaatagtgaatttttgatgtttctggattttgtgacatgcttttaatgtcatatgaatatttacctatgttgtaatctagaacttctatgatttcatttgtttacatttaaaattctgatggatctggaaatcatttgtttgcttcagcataaggaaagaaatgatttttcagtttgatgtttttccaatggataatcaaatatactatttgctaactaatccaattatgttcctattgttttatgttgtcgccagtaccatacactaaattccatatatcctctggtataatttttgactttatctttctattcctgagcttgtggcaaattttaaaattactatagattaataagagctttattatcaagaaatgcttgctgatttaaaaatactcaatataaaagtgaataaagctg

SEQ ID NO: 236159 - DNA, 383 bp, Homo sapiens
accgcatggcgagcgtgcgggccaacacctattgccgcctcctttcgctgagcgtggacaacttcaacgaggtgctggaggagtaccccatgatgcggcgcgccttcgagacggtggccatcgaccgcctggaccgcatcggcaagaagaattccatcctcctgcacaaggtgcagcatgaccttaactcgggcgtattcaacaaccagtagaacgccatcatccaggagatcgtcaagtacgacggcgagatggtgcagcaggccgagctgggtcagcgcctgggcctcttcccgccgccgccgccgccgcaggtcacctcggccatcgccacgctgcagcaggccgtggtcatgagcttctgcccgcaggtggcgcggccg

SEQ ID NO: 236160 - DNA, 289 bp, Homo sapiens
gtaatttgtttgtattaatctaacccttttatcatctcctccactgtttccttttctatgtccttactctaactgttaccattttacaaatgattattttttatattgcatctatttacttgctttgtttccctaatcgataatgactccatttccaattctggatactcgccttttatttactatcccccaccccatcaatctccttatagatgactttgattaatttagtaggatgcctttgtgatggtggacacattaaatttttttaaaaatgttattttcctcc

SEQ ID NO: 236161 - DNA, 1861 bp, Homo sapiens
ctacaggatcaagtccacgcatcccagtccttgctggcacagctccagtgcccctctccattttcctcggccatatccctcttcattgccgtgttgaccagtcccaccaagtatctcgccctcattccaggacaccacagcctcctcgctggtctctgggcctctggcaagctcttctctccctcttgtctccttgacagacttgactcacccttcaaggccctgatctcatgttacctccaccaaagcactctttcagattccccagcagaaagttagtcagtctctcctttgtgctgccacaacactttgatctctctctttcacttcacttatctgatttcttaaaaatttatctgaaaaagagttcatacagacagcagtaaattcaagcaatacaaaaggtaattccctgtcacccgtgacctgaaggctcctaattctctcgagaggcaattgctgtgacctgagacaatctgtgtacgtattctgcaccttctatcttgggaattatttcagattggcttctgtgtgtgtgtcttagttctttttggacctgtctcccttactagagtgtgaagtacaggttttatcttcgttgtactttcttacctacacctgacactgggcttggccttggactagggacttgagagagatataagataggtaagtgaatgaatgaatgaagcatggctggccagtgcttacccactcagggttgggtgccatcttttccacagatcccacccctggggaagcactactcccagcgctgggcccaggaggacctgctggaggagcagaaggatggggcccgggcagcggctgtggctgacaagaagaaaggcctcatggggccactgaccgaactggacactaaagatgtggatgccctgctgaagaagtctgaggcccagcatgaacagccggaagatggatgcccctttggtgccctgacgcagcgcctcctgcaggccctggtggaggaaaatattatttcccctatggaggattctcctattcctgacatgtctgggaaagaatcaggggctgacggggcaagcacctcccctcgcaatcagaacaagcccttcagtgtgccgcatactaagtccctggagagccgcatcaaggaggagctaattgcccagggccttttggagtctgaggaccgccccgcagaggactccgaggatgaggtccttgctgagcttcgcaaacggcaggctgagctgaaggcacttagtgcccacaaccgcaccaagaagcacgacctgctgaggctggcaaaggaggaggtgagccggcaggagctgaggcagcgggtgcgcatggctgacaacgaggtcatggacgcctttcgcaagatcatggctgcccggcagaagaagcggactcccaccaagaaagaaaaggaccaggcctggaagactctgaaggagcgtgagagcatcctgaagctgctggatgggtagccctcacccctgcctcaggctgattatctggcctaggggaggggaagggaggcccacttccttctttgggcacaggaaacattggcctgtggctgtccctcaaatggcggcagtctctagagggccatggcccttcccctgaggtcttttggcctagctctgtacaaccaggacacaggaagccctgctgggctagcctgaggcctagtctctgcttggtccccgagatggggttggaggggacttcgtttctgggtcttcctcttcccctctttaccatcccccactccctaatcccctacccctgtctccccttcaaggacttctcccttgtggttttgtaaagtgcaaacttaagaataaagtgactgctgtggtttttc

SEQ ID NO: 236162 - DNA, 1203 bp, Homo sapiens
acactgaactgggctcttgacgggcatcatctcttaatcctcagaacatcaccagcgaggagaagatgaggctgagcattacaagatcccacccctggggaagcactactcccagcgctgggcccaggaggacctgctggaggagcagaaggatggggcccgggcagcggctgtggctgacaagaagaaaggcctcatggggccactgaccgaactggacactaaagatgtggatgccctgctgaagaagtctgaggcccagcatgaacagccggaagatggatgcccctttggtgccctgacgcagcgcctcctgcaggccctggtggaggaaaatattatttcccctatggaggattctcctattcctgacatgtctgggaaagaatcaggggctgacggggcaagcacctcccctcgcaatcagaacaagcccttcagtgtgccgcatactaagtccctggagagccgcatcaaggaggagctaattgcccagggccttttggagtctgaggaccgccccgcagaggactccgaggatgaggtccttgctgagcttcgcaaacggcaggctgagctgaaggcacttagtgcccacaaccgcaccaagaagcacgacctgctgaggctggcaaaggaggaggtgagccggcaggagctgaggcagcgggtgcgcatggctgacaacgaggtcatggacgcctttcgcaagatcatggctgcccggcagaagaagcggactcccaccaagaaagaaaaggaccaggcctggaagactctgaaggagcgtgagagcatcctgaagctgctggatgggtagccctcacccctgcctcaggctgattatctggcctaggggaggggaagggaggcccacttccttctttgggcacaggaaacattggcctgtggctgtccctcaaatggcggcagtctctagagggccatggcccttcccctgaggtcttttggcctagctctgtacaaccaggacacaggaagccctgctgggctagcctgaggcctagtctctgcttggtccccgagatggggttggaggggacttcgtttctgggtcttcctcttcccctctttaccatcccccactccctaatcccctacccctgtctccccttcaaggacttctcccttgtggttttgtaaagtgcaaacttaagaataaagtgactgctgtggtttttc

SEQ ID NO: 236163 - DNA, 948 bp, Homo sapiens
aagagaaagtactgcatatttcatacctactatagtctaggactgaggatacagcaatgatcaacataggcagaggctctaacagatgccaggagccagctaggcatttgtccggctatcttatgataatattatagggagggaggtgctcccataccccaagtgggaagagtgcggctcagtgaggctgagaaacttgccgtgggtcacacagcagatgactattggagctggaatctgaaccagatctcattcctaccatatctgctctttccactacataaatttgttaaacaatggtgggtaaaccatgcacctttttttcttttcgtattttgatttcagtgttgtatccatgatttggaacgagcccacctgagcctaatgatgcgacgagatcattggattatatatgtatttactttaaaaacacaaggtagaaaactttactgagtccatgaaaagaaaagctggagacacgtcaaagcctgttttgatttaagtggaatagatccagcttgagtgtaaattcgagactgtgtttgcttgtgtcacactctatttttcaaattactttcatatgtcctgtttcatttatttcccccagttcggaatgggaaaactgaggcctgggacttgaaataacagatgtatgtttgtacagcaaatcatcatgagagccaaaactcaaacccatactctctcaccgaaccccactgcttctttcagcacacaataattattattatgccaagtaagtttaacaaggtgacttggatcgattcattctgatgatttgagttggctcctgggatcatctgggtaaatattaggcccacatctctttccaaacatattccatctctctctctctctttggttttttcttttttctacattttcacctctgctccctcatcatacctccctccctttctctgttgaact

SEQ ID NO: 236164 - DNA, 340 bp, Homo sapiens
atgcattctttatagtgaagtgttactatatcacatcttattgattttagcgtatcagtatattttctttaattataaaaattaatttggttttaaaaatttatttgcaaacacactttttcaatttgacactatggtttgttgcctacctagcttagtatataatgtcagcttatcctaaggctgtccaagtacttaatttacttaagtgttcattttaactaacgtgctcactgtgtataggaatttgtattttgtaggtgcttggtctatctacaaagaaaaattaggaaatgctttattataaaatgctcctagaagtcctaattgtgtttattta

SEQ ID NO: 236165 - DNA, 380 bp, Homo sapiens
taaggggcggtgagaggcgcccagattcacctccagagtaggtcatcccgggctgctgctgggctcttcggagaactttgagctctttatgaacctcctggaacttgctccgcagcttcaaagtgtgcacaggttgggcgcagtgattgccccaagacgcgcgccggtctcttaggagtatgtaacttccttgccccttggattaggagatcagaggtgctgggtcctttatatagaccaactgcagctataatgctggaagaactgaaacttaacagccttactcctgccaaacatttttcctgaatactttatgacaactgagtttgccgggtagagtggccgttttaaatgagctttgttcgaacaacgctaactca

SEQ ID NO: 236166 - DNA, 391 bp, Homo sapiens
tctctggtatgtttgtttgttgtctgtttccatgctttaggatgtaaaatccccaggaacagggatattttctgtcttgttcggtgctgcattgcagacactacaatacagcctggtacatggttttagtttctaagatagtctagggagacaaatctttcctagcaggaataacaagccttcattctaaggattaatttagatcattagactatcttcactttaagtattgtggaaaacattaggaagcaaagtccctaattatgtctacaattatgaaaaaatcatattttaaaaaatctttggtagcaagaaagactataatatactcaaaaatgggaatgtttttccatgtgtttctttacttatatcacttcttttctgtttcttt

SEQ ID NO: 236167 - DNA, 399 bp, Homo sapiens
gatttcaaagttcaggtttttagcaggttggatatttatttcaatgtcaacttctcctcaagccccatggacattctaccaagaggtagtagttattttcagaatccaaaaatacatatatacaatgcaagaagtttaagaatgagtgaacactagagttaggaaacggaggctttcatggaaacagaattcatcctcgtggctcgtggcattccgatcacaagttaaactatttgaaatgatggcttaataggcacccctcgcagtgtgggggagataatgagtgtagagtgctcgacttctcactgcctgactgcttcgtgttgaaattagtaaatgtactatcataggaaaatggatttttgaatttaattttcattctttccacattcctatgcc

SEQ ID NO: 236168 - DNA, 344 bp, Homo sapiens
cttccatttggcgtgataggttggagcctacccgtagtgaggagagaagggaggaaatattccaaagacaagagaaggaaagggaagatcttaggtctgtgccaacagggcctaatgtatctccatagggggcagccattcataaagaaagaatgcttgtgagttacaacattttgacaactatctggacaatgaatttaagttaaaatctgtttgcagattaaagagtatatattgtctcaagcccttaattctaagcgacaattatttctgtgctttgctggagaaaatgatatggaaattttaggagacttgtgaatatgtactaatttctgcataatctg

SEQ ID NO: 236169 - DNA, 2756 bp, Homo sapiens
  misc_feature (1198)..(1198): n is a, c, g, or t
  misc_feature (2042)..(2042): n is a, c, g, or t
tacaacaatgaaaacagaacaatctatttaggagaaacaaaaaacaattgttcatatttttttaacaaaaagaaggagtgggaatattttctttaaaatccctattggccaggggtgctggctcatgcctgtaatctcaacactctgagagactgaggcaggaagatcgcttgaggccaggagtttgagaccagcctgggcaacatagcaagtcctagtctctacaaaaataataataagaagaagaagaagaagaataaatccctttaaactacaataagcagagaccagttattcattggctatatttttaagattgccagcttttcaaatgcagcaaaataaatgaaaaaagaactttcaacagggatctagaagtcagttttcccgttgagtagatcttccagcccaatacatttattagtctataatgaaaatatctactttgatttcttagaggtttcttcaaataaatatattgaaacaattttaaaatgaccacatattatttaattttaaaagcacacttttagaaccccatttcttatgaaaggtttcatatcgagatcatttgttattgtgagactgtatctggtggaaaggaaagataggagtatttttcatatgtcaaatgagtagactaaaacatgggaggagagatttatgactttttttttacatcatccagctatggtttgggacgtgtttgttttacatttttcttccccagaatctctacactgtttgatctaatgaagtatttggcaaatctatagactatatgataatcacagtttactttgtgagggagtgtcaaattatagtgtcggtttgtctatattgatgactcgccataatccagacgctgtgcaagccatttaaacttccttagcttcattttacaggttaagtgtttaaaaattgccccttctgtagttgctgttaaaatgcaaacattaacaaaatgtaaattaataatataggccacaacaaatgcttgttgccagtctctcattttttgtttatcctttccttttttccctttcatagtaacctatggcttgaaagcaaagaaaagggtgaataagaagccaagttccatattagcatctggaatgggagcaggggatgaatggagcagattttataaatgtaattttataacatttagcctattatgataaaatgtcaattacanttattactgaaattatctcaacagctacatttgcttacattacaatataaagtcaccgacatttttcccaatttattgttttatagagcactaaacacaaaaataccaacaacctaatgaaaactgttgtttgcctgactttgtcttatctttggcaatgcaaactaccttgggacccccatgagaaccttagctgcattcattcctggttaaaaatacatgacattttaaaagcatttttccctcagttttcaaaatagaagatgcagtttgtttctcgttagggttggaattgtacagcaaagttgtctgggtagcttttaaagtgtgagggttagagtttaagaaatgagataaattttgcatttgaaacttgttagcaatttcttcagtcatcattattttaactagctgtatcagtaatcccctcgggagtgattatgctatacaaactaggaacatgccagaaaattttcctgggtctgtaagccactgagtttttaattacttggtatctatcctgatagaaagagaagctattttttccctccatttgtatcagaacacgtatgttccattgcttgttcatcttctctagtttcttcatagcttattccccagagaccagtgagaaagaatgtggcagcatcggtaattgtcagaatggaggcatctgtgatcttctgactgggcactgccagagccccccaggggttcatgggaaaacttgtgaagatagaaggaatgtctggtgccagtcagttaagttcttggggtttctaatgagaagtaaactaagtgaaagttgcatgtgtatttttcaaaatggcctttttctgaagangtaaaagactgtgaaagctgtgtctgtatatataaaagagtacaattgttttgactgatgacatgtgtaacaacgaaataagtgatatttaaatctccaactgtgatctaagcaggacgaatcctcttacagagaaagcctttttcttctactgagcaaaaagttacaattatgtatataggtttagatgtaggagcttaggagaagttattttctctgcataacaaaatgaagaacaatagagctccttggggaaaccagggaggaagacagatgaaaattagagaagaaaagggaaggaggtagagagaaaaagaaaaaaagagatgatggataaaaatctcacaaaataccaatgagtactgtgcatagattttgtgtgtgtgtgtgtggaaaccagtgaagaggccacaattcctacatgggttaataaagcacaaaaaaaagaacctgcttgcacatgcacaaaagctgaaggcagagagtcagtgaggatgtaagtctctagggatggccagaaatcatgaggagtttattagcttctcacagttgatagaattggggagctggaaatgaagtttacttcactttctgagatgcagtaaggtccctgctggcatttcagttacttatctttgtgagcaatgttcatttatttatttaaaaactacattaaatggttgcaaggaatggcaccagacattatgatatgat

SEQ ID NO: 236170 - DNA, 582 bp, Homo sapiens
acactttgggcattctgtgggaaagaatgggagatagattggagattacagtactttttgatgaagattagcacccactggtcatctgtaagagagttgagtagctaaccatcacagatcaaggtgtacaacttcagcatgtctgaccaagagaacatgtgtctactctgcacatcagatgtgggcgagtggtttgactgccttttgtaggattgagatgtccagatggccatgagggagttctaagtacccctatgagagatgttgatagacctactcagtttggtgctgaattaatgcccccagagctctgtgctcacatttgagctaggaaaataccttggcccatgaagggcgtgtggtggagatgagaaggaagggatgcttggtaaagctggataagaccaaagaaatgaagaagatagtaggaagaaataggaaaaaaagaggggaaggggggaggagggaaaaagaagaaacattaaggaagttctgctttgttgctatattcaactccgacttctgtcagtgaatttgatgactaaagagctagtgtagttctctttggagagaatgttgatg

SEQ ID NO: 236171 - DNA, 577 bp, Homo sapiens
agtgctgaacagccttaagctgatcaaactgtaacaaataggtggatgatgatgctttgttacacgcagaaatagtgattattcagttatttgagtcatgccaggtgccactggctcatgcctgtaatcccgaggcaggtggatcacttgagtccaggagttttgagaccagcctgggcaacatagtgagatgcctgtctgtacaaaaaaaaattttttaaattagcctggcatggtggcacacacctgtagtcccagccacctcggatgctggggttaggaggatcacttgagcctgggaagtcaaggctgtagtgaacagtgatcacaccactgcattccaacctgggtgacagagtgagaccttgtttcaaagaaataattgagtcagtaagtgatcccagggacattgaaaatccaaaaacagggctgagtgtggcatggtggcacatgcctataattccagcgctatgggaggtcaaggtgggaagaccgcttgagccggggagtttaaggctgtaggcagctatgattgcaccactgcacgcgagcctgggtgacagggagacctcaaaga

SEQ ID NO: 236172 - DNA, 445 bp, Homo sapiens
atgtctaaatcacacacgtcactgctgtaatatggtacttactatcccatgaaacatccacaaactagacactcagaaagtggtgttggaataagggaggttctatggcccttcttctcctgccccccacccatgcgccgcccaccattcctttccgtggaccactgaccttcaagtttgaacacagaacgggcaagtggcctttggagctgagggtgggacgtggcctttggagctgagggtgggacatggcctgttgagaagagcagggccaaggaaggatggaagcctgagagacactggcagggggtggagaaaggcctcctctctgcctggcacctcattcattcacttatccattcattcattctccaggcccagccccgcctgtgggcctatggtgccacctccagagcatggatcctgccctctgagctgttgttaa

SEQ ID NO: 236173 - DNA, 701 bp, Homo sapiens
gggtaggccgaggcgggcagatcatgaggtcaggagatcgagaccatcctggctaacaccgtgaaaccctgtctctactaagaaatacaaaaattagccgggcgtggtgggcgtgctcagcacagctccaggacacaactggctgttcttgaaacttgcggtgatttagaggtgatgggcggcaccagcacattgaactgaatgcagaagttgaagtgaaaaaggcttcctgttccttgagcgaacagaccgaaagcgtgtgtgtgtgtgtgtgtgtgtgtgtgtgtgtgtgtgtgtgtgaagagctggtggctgtgggtgcgtcagttggtctgttccttgagtggacagtcagttggtcttggactcccagcaggacagaacgaaagtacgtctgcgtgtgaatgtgtctggaattggttccttccggtgggttctcggtctcgctgacttcaagaatgaagctgtggaccctcgcggtgagtgtcacagttcttaaagatggtgtgtccggagtttgttccttcagattttcagatgtgtctggagtgttttccttctggtgggttcgtggtctcgctgacttcaggagtgaagctgcagaccttcgcgctgagggttacagctcataaaggtagtacagacccaaagagtgagcagcagcaagatttattgtgaagagtgaaagaacacagctccca

SEQ ID NO: 236174 - DNA, 687 bp, Homo sapiens
cggaggaccgagctagaagaaatgaacaaggccctttaactgtcttctagtgtagagacatccttcattggacatttagtagaattcctcttgggccacaagaataaggagcaaataaacaactatggctgttcttgaaacttgcggtgatttagaggtgatgggcggcaccagcacattgaactgaatgcagaagttgaagtgaaaaaggcttcctgttccttgagcgaacagaccgaaagcgtgtgtgtgtgtgtgtgtgtgtgtgtgtgtgtgtgtgtgtgtgaagagctggtggctgtgggtgcgtcagttggtctgttccttgagtggacagtcagttggtcttggactcccagcaggacagaacgaaagtacgtctgcgtgtgaatgtgtctggaattggttccttccggtgggttctcggtctcgctgacttcaagaatgaagctgtggaccctcgcggtgagtgtcacagttcttaaagatggtgtgtccggagtttgttccttcagattttcagatgtgtctggagtgttttccttctggtgggttcgtggtctcgctgacttcaggagtgaagctgcagaccttcgcgctgagggttacagctcataaaggtagtacagacccaaagagtgagcagcagcaagatttattgtgaagagtgaaagaacacagctccca

SEQ ID NO: 236175 - DNA, 711 bp, Homo sapiens
ttgttgccaaaataagtgttttgatctgtccattactctgtgtaactcccttcatcctcaaatcgtaagtgtaatgggtgagtgtctcttaatagcaaggtatttgtagttaatcggtgaaaatgatggtgcatcccttgtctggtggctgcgtcagtttgtgactcttgtgtagtcagtgctctgtgggaattcagtgtggcccgtttgataaactttatagaaaaatggaatgaattcaaataaaagttattgtcttgaaattttgaaatgttttcagtgtgtgtgtgtgtgtgtgtgtgtgtgtgtgaagagctggtggctgtgggtgcgtcagttggtctgttccttgagtggacagtcagttggtcttggactcccagcaggacagaacgaaagtacgtctgcgtgtgaatgtgtctggaattggttccttccggtgggttctcggtctcgctgacttcaagaatgaagctgtggaccctcgcggtgagtgtcacagttcttaaagatggtgtgtccggagtttgttccttcagattttcagatgtgtctggagtgttttccttctggtgggttcgtggtctcgctgacttcaggagtgaagctgcagaccttcgcgctgagggttacagctcataaaggtagtacagacccaaagagtgagcagcagcaagatttattgtgaagagtgaaagaacacagctccca

SEQ ID NO: 236176 - DNA, 359 bp, Homo sapiens
gggtaggccgaggcgggcagatcatgaggtcaggagatcgagaccatcctggctaacaccgtgaaaccctgtctctactaagaaatacaaaaattagccgggcgtggtgggcgtgctcagcacagctccaggacacaactggctgttcttgaaacttgcggtgatttagaggtgatgggcggcaccagcacattgaactgaatgcagaagttgaagtgaaaaaggcttcctgttccttgagcgaacagaccgaaagcgtgtgtgtgtgttttaaaagaaaaaacccaatgaggaacaattggagatttttatgcagaaactaaataatccttaataaataaatctctattttggaatca

SEQ ID NO: 236177 - DNA, 487 bp, Homo sapiens
gggtcaggcctggtttcttaggtgttctttgtgctactcctcattttgtggagaggcatccttggtagaagtgaattttgtaaaatatgcaaaggtatggctgaatagtgaactcttcccctgtcctcaggaaaagcacatttggtacctcctgtcagaggggactcagcaatccactaaagactttttttttaatttattttttacttttgaaaaatgttggcagggtgcagtgactcacccctatggaagcgggtgaattacttgagcccaagagtttgagaccagcctgatcaacatgatgaaaacccgtctctactaaaaatagaaaaattacatgggcgtgggggtgtgcacctgtggtcccagctactcgggaggctgaggtgagagaatcacctgagcccaggaagtcgaggctgcagagagctgtgattgtaccactgcactccagcccagaagatgggagtgagaccctgtctcaaaa

SEQ ID NO: 236178 - DNA, 420 bp, Homo sapiens
agaggttagcactaggtctcctgcccaatctgtccctgaactacagggtaattttgattcccagtaactttcatagacctaagcaacagtcacacaaatgtccataaaaagaagctagtgtttctttaaacactcgcatccatgttattttagtacagggtagttttcaaaaatctgagaggatttagagtagttgatcaaaataaaaaacttctttacactttatttaaatcctagctaacagaagcatctccaaacagtgaaataaacattctgcagttcagcagtggggaaaacaaaatgtgttattctaaaacaggactgtcaggctgggcgcagtggctcacacctgtaatcccagagtgctgagattataggtgtgagccacctcgcccggacagcatgtatttcttacattag

SEQ ID NO: 236179 - DNA, 495 bp, Homo sapiens
aggctggagtacagtggtgcgagcatggcttactgcagcccctcctgggctcaagcaatccgcccacttcagcctcctgaatagctggttctacaggcacaagccaccaatcttggttaatttattatttttatttttgtagagatggggtctctctgtgtcacccattctggtcttgagtcctgggctcaagccatcctcccacctcacccttccaaagtgctagaattataggcataagccattgcacctggcctcattttgcttatttaaatacctcctggtggtgactgtctcagtgctaaggtgaagcccacatcagagctcctttagtcttgggtgtgtcaagaactctggctgtgaccagacccccactctaaatggggtcacatgcttcacctgtacattgacagaggggccccatgtgtgtactgagacccaactggaataatggatcatgagactgttgtgtttcaacaatagcagaacagtaaa

SEQ ID NO: 236180 - DNA, 2132 bp, Homo sapiens
  misc_feature (713)..(713): n is a, c, g, or t
  misc_feature (855)..(855): n is a, c, g, or t
  misc_feature (1302)..(1302): n is a, c, g, or t
  misc_feature (1305)..(1306): n is a, c, g, or t
  misc_feature (1344)..(1344): n is a, c, g, or t
  misc_feature (1349)..(1349): n is a, c, g, or t
gtttaataatgattatccaaccattctcttttcctttgaaatatccataacaaaagggaactactgacttggctttgtgacaagcttaaaataaaacttcaacacatgcttataattaatttttgtgaaaaaatgtaaaacagtcattatagagataggacataaaaatagtagctaacacttattaagtacttgttgcttgtcacatgttatattaaatgcccaaaaactctttataatgaattgggttataatacctctgtttgacttaaaagatgctgatacagtttgaatatttgtcccctccatatctcatggtgaaatgtgatccctaatgttggacatggagcctgctgggaggtgtctgggtcattgggatagatccctcttaagtgacttggtgccctccccatggtaatgagtgagttcttgctgttagttcacgagagagccggttgtttaaaggagcctgcacctcctcctctctctctttgctccctctcttgctatatgatgcgcctgctcttcctttgccttctgccatgatcggaagcttctgaggcctcaccagaagctgagcagatgctggtgccatgcttgtacagtctgaagaactgtgagccaaataaacctcttttttaaaatttaatttaattttttttttttgagacggagtcttgctctgtcgcccaggctggagtgcagtggtgcantcttggctcattgcaagctccgcctcccgggttcacaccattctcctgcctcagcctgccgagtagctgggactacaggcgtccaccaccacgcccggctaattttttgtatttttagtagagatgggatttcgccatgttngccaggatggtctcggtctcctgacctcatgatccgcccacctcagcttcccaaagtgctgggattacaggcgtgagccactgcacccggcaataaacctcttttctttacagattgcccagtcacaggtattcctttataggaatgcagaacagactaacacaaatgctaagaaaggccgagtgacttgcccaagatcagacagccagtgatgggtagagccaggttttggttccaggcctggctgagtccccagctggagctagctacagctacactcttctgctttgccaggggaattgcagcaggaggtgaagagtgggatagtctgctgggcacggcggctcatgcttgtaatcccagcactttgggtggccgaggcagacggatcatctgaagtcaggagttcgagtccagcctggccaacatatcgaaacccgtctactnaanntacaaaaattagccaggcgtggtggcacgtgcctgtanttccngctactcaggaggctgaggcaggagaatcacttgaacctgggaggcggaggttgtggtgagctgaaactgcactactgcactccagcctgggtaatacagtaagactctgtcaaaaaaaaaaaaaagagtgggatagtccctgagaaagggataggtatagggctgtggaaccacagagcacggagagtgttctcccaggtagagggcttgggaagcggacatggaggaagagatagtctattccagaagaggaagtaggagagggactggtggagacagtgagcagcacatgccaggagcagcaggagggtgggcagaggcatagcaaaggcccaggcacatttgaaggtgattgtagagttcgatctgcagccatgggagtggcccccagtcctctgaacagcgcgacccctgtcatccagtgttgtggatcctatgtgctgctacttggactttttaaattactctggattcagagagcacagccacacagtttcatcacttactggctgtgtgaccctgggcaagtcacttcacctctctgagctgaaggtttcctcatctgaaaactgggggtaatgatagcatctccttcttaggattgctgtgaggattcaatgagataaacctcaaattagcacatgcctggcacctccaagggctccatagaaaggtggggtattactgtcttaccgtgtaattgaatggtggcattataacgctatttttcaggaggcttgtgaaaaaaataacttctcattaaaaaaataattttagacttt

SEQ ID NO: 236181 - DNA, 556 bp, Homo sapiens
aaggaaaagatcgatcgctgttctggtaaaaggctaggagatggccctaaattcttgaagtctggtgatgctgccattgttgatatggttcctggcaagcccatgtgtgttgagagcttctcagactatccacctttgggtcgctttgctgttcgtgatatgagacagacagttgcggtgggtgtcatcaaagcagtggacaagaaggctgctggagctggcaaggtcaccaagtctgcccagaaagctcagaaggctaaatgaatattatccctaatacctgccaccccactcttaatcagtggtggaagaacggtctcagaactgtttgtttcaattggccatttaagtttagtagtaaaagactggttaatgataacaatgcatcgtaaaaccttcagaaggaaaggagaatgttttgtggaccactttggttttcttttttgcgtgtggcagttttaagttattagtttttaaaatcagtactttttaatggaaacaacttgaccaaaaatttgtcacagaattttgagacccattaaaaaagttaaatgag

SEQ ID NO: 236182 - DNA, 534 bp, Homo sapiens
accccacttttacaactaaggtcaggttttgaacttgagcacctcaccttggattggtaactactgcctggcatctgttcacaaacgaaggtataagcagaatgaccaaatgtttgacatgaattcgatcatttcataacgtcaagggataggtgtataatggtttcctttgccacatctttccttttgctactttgtcactggattctagtgtttggttattgaataacttaggctaaagagccaaaaataacgatttagctgtagttggaactatagtttcagttcgtgtaaatatttccaatttgtatttagaaatccaaacttctcagagttcatgataaaatattccagacccttatcaaaaggttatagtttagcgtaactatatttaggtgaaaggtcaggccgggcccggtggctcatgcctgtaatcccagcactttgggaggctgaggtgggtggatcacttgaggtcaggagtttgagaccagcctggccaacatggtgaaaccttgtctctactaaacatac

SEQ ID NO: 236183 - DNA, 406 bp, Homo sapiens
gatactgagtttgatccctcagttaaagtgtcagttgctaggtttttcaacgctaaatgtacacttttacctttgtcattaattagtaatctttagagtgatgctttggcatcttatgaatatcttgttccccaacaattttttacccagtggttttcacattttgatttaattttgctttaatagttatatataacatctttatgtgtttctaaaatcaaaagtataaaacaaggtacatgaagagaattcttgcttccattcctgtccccttcacctctctttctcgatagataaccctttaattagtttttggattattctttttcttgccgttatatgtttaaaatagaaatatatttgtattccctctaccttcacttcaataaaatatagatacactatt

SEQ ID NO: 236184 - DNA, 361 bp, Homo sapiens
tctctgatggcatctcactagcaaaagggagagggggctcatctccgagcacgtatggggtggggtgggtctgaggggagaactccaaagtcactccaccttgatgagagcactgaggacacagcagataaactcgaaagtcaaagaatatgggacgtatctcggatgtgagcacagtgagcacgcggcctgagttttggtagaatcgtgagccctgaacagtcagagtttactgcccacttttgctggaggagaagctcctgaacaactagagagactgtggttcccaaagagcagccggtaggcctgaggactgctctatgaccggcgtcagtccctgcctccctccttccgttcctcc

SEQ ID NO: 236185 - DNA, 730 bp, Homo sapiens
aacaaaggttaacagtgctccctcccattttccagaagttagtttttaacagcatggtgtgtatattgaagctttatataccttagtacaagctaatgtcacctctcgcctggaataatgaaataacttccaaattggtctctcgatgatccatattgcagacagtgatctttttattgtttactctgtttatgcacctcccttgattaaaaaactcttcagtggcttcccagtgaatatttttcttttgccttgccccacattcctcattgcctttcttctgtccagccatactggctggtgtcagtttcttgagcatgtaatagtattttctacctccagagctttgaactcactgttttcttttggcatacttatgcattgccctttgccttgtcatttagaccacaaattattggctgtttttctcccttttcttttttatttaattttgtaatacagtatttattagataagctcagtgaaacttttctgaacacccacatgtgtccttgctagatcgcctactcttatctttcattgcatcctgtacttttccatcagggaacttttcattatacttatttggatgatatttgattaatatttgcattcttaacacagctcctagactgtaatgaccaagaatgcaggcaatgtgtgtatggctcatttttatgtcaagaaaaatttattgtttataaacaattaattttgtacaccaatctca

SEQ ID NO: 236186 - DNA, 773 bp, Homo sapiens
accgtttaaactgttttacctcatttggaaacccacagcctcaaataaatttgctgtccaagagcaccatctgctggatgaaggtatttaagctaccccattgagggagagggaaaaaaagtctataggttaaatgccactatgtctaacaccttggtgtgaaaagattcccatgcctcaccaacaggtttcttataaaggagctcttgatttgacaaaattctaatacaagagaaatctggaactgacaaaaattcactatcattgaatttagttcatcttaaatattgcttatcataaagtaaacatttctgagctggaaggaacgagagagagcagttaattcaatttcttccccttgtagatgaagactctgagaaaaacacagagctttcctgtctttccttttttctgagagattcaaagcctccacgactctgtttcccccgtcccttctgaatttaatttgcactaagtcatttgcactggttggagttgtggagacggccttgagtctcagtacgagtgtgcgtgagtgtgagccaccttggcaagtgcctgtgcagggcccggccgccctccatctgggccgggtgactgggcgccggctgtgtgcccgaggcctcaccctgccctcgcctagtctggaagctccgaccgacatcacggagcagccttcaagcattccattacgccccatctcgctctgtgcccctccccaccagggcttcagcaggagccctggactcatcatcaataaacactgttacagc

SEQ ID NO: 236187 - DNA, 776 bp, Homo sapiens
gaggaagaggtggtggagatacattggagagaacaaatacaatagacttatctgaggtcaaatcaacagaacccagcaacggatcagacagagagagaaagcagaaagagtgaaataaaactccacggttctagcctgagtgattaagggcagagcaatgttctggaccttgctgggagattcaggaagaagagggaaatctgggtttatttcaaggaggggtgggaaggagagatgagatgaaggaggaccaggaaaataaaatatttcaagttagctaagctgcattggaagtgcttaccgcatatccaggtaagacgtccactgggtagttaagatctatgggtctggaacccaggagagaaattggggttggaaatgcagacttgggagtcaaaatcataatgatgttctcagtcttttggatttcaaattttagtaaaattatcaaaagaaaaaaagcaatttgcacgagtaacttttttgtttgtgaattaccaccatctactttcacaaagaaccagacactgtaattcccaaaaggtataaaaggcatcatcttagaataaaaggtcctccttcaaagagagtaaatttagccttatggaaaacttcctccatcatccccatttttctcattttgctgcaaacctgtaaaacttgtatcccacagacagtttggattgcatttggccaccatgggtttgagacatggcgggaacaaaagtgtgagttcttttgtttgttttttagagacagaatctcactctgttgcc

SEQ ID NO: 236188 - DNA, 454 bp, Homo sapiens
tatgtcccttttctagtccagttaccgcctccctccccactattctgaagtcaatgtgtgtcttcccatccatgtttaatacctagtgtgcatgtccatgaagaatggatagtgttctttggtctgtttttgcaattttatacaaatagcagtccatacatactctcctgaaagttgcttttcccttcaacaatatcttccagatgaatctagaattctgcatttctggtgagcagaggatgcgccaaccccctgcaatccccaccccaaagtgatgctgatgttctggtccaagacctgcacgtagcctggtgaggcttggagtcctgggacaggtctgtttgtcagccctttcttcctaaggaagcacagccagatgacctttggggcttggagactcacaaatgcccctcgccagcagtgcgcacatccgtcttcactcatcttcatcagt

SEQ ID NO: 236189 - DNA, 476 bp, Homo sapiens
tattgttttctttattgaaccccagacccatcctccataattttgccactttgcaatgtaaatacaatattgtgtgttactgcccaggatctggggactgggactagccgagcaagcttcatagcttcattccatccccacttgcattgtgccaatgcaaatctgagcatagaagatttcattgagccagcccatttggagacagtatctgccctcaaagggcttctaagccccagggcaagccagttgtggaagacagcagtatggagcagagtttgcaggacaccttgaaatccctacagcctctgagcaggagactaagcctgaaagacctggactatgtgtgaagtaaccatgttaatgaagctatttcgcactcttgcactgcaatcaccaaacttagcaatgctcaagtagctctgccggtagtccagatgggcctctggcgtatttaaataaatgatctggtttcctta

SEQ ID NO: 236190 - DNA, 427 bp, Homo sapiens
cataaatcgccacggagaaaagagaggctgcggggaggttattgccacacaaccctcacgccgaaggcccgctcagagcattagtggaattaattcatccttcatgagagcttgcagccggccctgtgatctatggtagcaaccaatttctcactacgggcaaaaggaaaaaaatgactcaccctgatcgactacacaaatctgcgttttaaaaatggcctcacattatctggagtgtggctcccagaggcatcatttgaaattcataccaagccaaaagcatccataaatcagcagagaaagttttgttagtttctgctgcggctgtaattatctgagactgcattatacccccatcaaggtaattacatttagattacccttaagtgatggtaataaaagaaagagaaatcagtctgaaactagt

SEQ ID NO: 236191 - DNA, 386 bp, Homo sapiens
atctttgtctattgactatacaactacaaagataaatttttaaaaaataacttgctgcctaaagcttagagcctagtagaagcattaatgacttaaggatcaaatttaaattggaaatatttaaaattaaaggttcttattgtatcacatgaggtatgcacatctatcatggagtataatacaatccttggaaatcatatttttaaagacaattaaatgacaaataaaaatctacagaataatgctttgtgaaaaagtagggtcctaagctatacataccatatggtttttcaaatcctgaaaaatatacaaataagcaaagaaaaatgttagaaagtaacatattaaaatgttaaagggggcttatctctggaaggagaaggttt

SEQ ID NO: 236192 - DNA, 445 bp, Homo sapiens
caagaatagcaccaagaggttggtgctaaaccattcacgaaggaccacccccatgattcagtcgcctcccaccaggccccacctccaaaattggggattacaattcaacatgagatttgggtggggacacaaatccaaatcatatcgagaattacaggcataattaaattattccttggtccctgtctctgacttccattaatattagagaaagggtaatacatcttcattaagttgggtttatctcaggaatgcaagcttggttaagcattagaaacccaatcaatgtgatttactctattaatggaatgaaggattacaataataaaatctttttcaaagaatgcaaaaaagcatttgtcaaaattcaatatccattaatggtaaaaactctcagcaaactaggaacagtaggaaacttccttaaaataataaaggcatttac

SEQ ID NO: 236193 - DNA, 430 bp, Homo sapiens
cttgaatatttatcatttcaatgtgctggggtcatttcaagttatctcttctagctattttgaaatatacaatacatgttgttaactatagtcaactagtttgctatcaaacattttatctcaatttttacatgaagcctattaagcaggtatgatttcctctagtcagacaaggaaatcaaggaaatgagaggcttagaaacgttttcacatttacagggctgctcagttgtgggattagaatcagaggttgattcacaagctctccagagctgccattgttgttcacatcaatacttctgcccttaccattttgttttcaaaactcttcttggtaatagtgacatgtaaacattaaattttaaacttagagaactctaatttcataaaagtagtattagactttacacccagctccgcacaccctgca

SEQ ID NO: 236194 - DNA, 533 bp, Homo sapiens
tctttcttggctcctagaaatgggggcagacaggttggggtggaagggctaatagcaatcttggatttatttccaagtaggaatcagaaacagctgggggcataatcatagttcctgacaatgtaaatagtgcattgagaggaaatgactgtgcagtagccctgtaagggacatattattgtcccctttgatgggagaagccgtttcctaaagttaatatgtgctggaagcctaaaccatggctttcccttctgttggtagctgccttgataagcagcaatcataaagtgttccccagaggtaaggatgctacagttgttctcctttatgtacatctgagcttacattgaggatcttgggcttaccctcaggtgtggaggattcacatttagtgtggaacagaacacctctcaacatctgagccttgtctacttcccctagctgattggctttcatctgtatagttgagatcccccactgacctccaggcaggcatggtcagaataaagaactcatgggatttgcaactgcca

SEQ ID NO: 236195 - DNA, 295 bp, Homo sapiens
aatggcagggatggctggcggcctccacagggctgggaaaggtggccagggcctccctcagagccttcagccagcctgcgggagagaaagatgataaacggtgttgtttttgttgttgttgtttgagacggagtctgtgtcacacaggctggagtgcaatggtgagatcttggctcactgcagcctcagcctcccgggttcaggagaatcacttgaaccaaggactcggaggttgcagtgagctgagattgtgtcattgcactccagcctggcgacagagcaagactccgtctca

SEQ ID NO: 236196 - DNA, 546 bp, Homo sapiens
tgagagctttagccaaactaactcctgcccttcggttgctgtgaaaagaagtgtgacacttgtgttataacttatgaaactcagaaatatttcttcattgtgtatataggaggattcttgccagagttgctattgtttgattccatgttgaatgggtttcacaaaaggatagggaaataatgccgccaaccagtaatgccaaggtgtggccaagattgtgtttgtgtcctgtgggctggatttgacagaaagcagtttgtcactgaaatataattaagtgataatctcctttcattgtcaaggttaaaatggctttcatgttattcccaacctttctaacaaagaattaagtctaaatgcaaaatgtttaactgatggttttggttcaactcctcctgctttgtgtttcactaactgcacctgtcagattttcatctcttatagttctcacatttcaaatgtgcatgttatggtaatactgagtgttattttttaaaaataggtttaagaaaagtatttcttaaccaaataaatcaatcttatcag

SEQ ID NO: 236197 - DNA, 415 bp, Homo sapiens
cagtgtggcaatttctaattgttttggttcttttatatagtatttaaatagtatgtcagtgtactttctgttttaaacatttagcatgccctgttatcagtattgtttcatttttaaatgatttttgaagcttaacttattacttagtgtctaaaacatagttaatgtcctccaaaatgtcatatgaataatgtacatagagatgtatgtctaaagttaaaaatgttacagtgtactagtaacatcttgttttggtcagaaaagtgtgtagagtacttgtatttttttcattcaaaatagaaaatttggtgttattatagaaattgatttaaaatgtttttatttgactgatttatgaatgagaaatgaacttctttgatgtttcaggatttttacttcattttttttcctcagt

SEQ ID NO: 236198 - DNA, 426 bp, Homo sapiens
acaagtgtgttattttggcttgatgtgctctccaaaacccattcctttcctttcctgcctctctgtgctcttcctacaaagtacgaagagcaagcatatactttcagtcaaatatctgaggagtattttacttataaccttaattgccatagtcattggactttaattcattaaatgccagcatttggaggcaactggagatatgataatgagtatatatgattatagttgcatatatatagcttccagtaggttaataattgggactaaatcctcctccacccacacactttctaataatttgttcaggggctctgccagccagtgatattcagggaacaaattgtcatcctttatgtgcattttaaagactggcgtttgctggagactcacactgtcgtgcagaagcttgagttctctgagtca

SEQ ID NO: 236199 - DNA, 2318 bp, Homo sapiens
  misc_feature (1240)..(1240): n is a, c, g, or t
  misc_feature (2043)..(2043): n is a, c, g, or t
tcaatggataaataaacaaacaccaaaaaccagagtgcatttctccccccgagactcccttttgtatctggactgtgacatttcctcattttccagtttctggccctggaaagagctagcaaacagcacactccccaggtttggagaaaccttctgagccattgactatggatttgccaaggtttttgcactggggagttctggagaagctggcccccaaagtgaatttctgtaaagtaaatcctattttcccattgacttggcccacacttttggagatatgttcctgctgtcaaaggctggtgacaggtgggggaagagctggaactcccctgggtgtcagctgccccgagcttctactcattccaccttgagagcagactgatgctggccaggagcacaggagcttagagccagggggagatgcaacagcaggggaagagatttggcatctggtcccagaagcctctgctgccagtgggatgctctgctgctaggcttctgggatagcacactccgtctcctccagactgatctgtttctgttcatctgtccgtacatccttccttctcacaatcccaccctccctccttcatccatccatctgtccatccattcagcaatcatttttgaaagactctaggatgctaggggacatagagggaaattaaagagaatcaatgttctgatggcaaagaattatatcccagtagaggtgataggcaaggcctccttcctcctttttctccttctcctactccattgctttttcctcttcatcctcctctacctcttctttcttttctgctctttcttcttcttttcttcttccctcatcaatatcatgatcatagcagcctccaccgttaagtccccactaagtgccaggcaccatcctaggtgagattctgacatactctaatttatctcaacaaccctgcataatagtttctttttctttttttttttttatgagacggagtctcgttctgtcacccaggctggagtgcagtggcatgatcttggctcactgcaacctccacctcccaggttcaagcgattctcctgcctcagtctcctgagtagctgggatttcaggcgtgcaccaccacacccggctaattttttatatttttagtagagatggagtttcaccatgttggccaggctggtcttgaactcctgacttcaagtgatctgcccgcctcagcctcccaaagtgctgggattacaggtgtgngctaccatgcccagcccgtaatagttaataatgctcattttgcaggtaaaaaagcaggctctgagatgtttagtgatatacccaaggtcacactttttagtacatacttgtgtatgagatggaatgtgttgagtgcggaggggaaagtcctccagcctgtgccgtcaggatggcattatttagtaggtaggattttgatacatagtagatggaaagaagggcattcttagcagggggaacagcctaggcaaaggcctagaggctggaaaggggtaggtttgtatgagccatggtgaaccaaagtgtgagaaagaaatggcaggagaggtttgagtccgttaagagaagccttgagtgatgagctatggctgacattggaagcagtaggaagccactgaaagaaatcaaaaggagggaaaggttcaggaagatggccatgaagcctggcatgggaggaggatccagagcagggagaggcaagctggaggccaggaggggctatatgggcctagcctccattaagccagaccctgggtgtggctatttctgcccagccagctactccagcagttgggagaggccaggacatagcccacatccttggtggatgggccacaatggcagggacaagggcagagtgaacgagttagggcagagcagctgcctgcctgccttctcccctcactgaagccccacagctcccagggggctcctccgcatcctgtcccaccctgcccacttcactccttgagccagggaatggttgccagtaccttgctgggcctcagctcttccatcgagcntggacaacccaagcagcaccctgagaaccatcccagaatatgcagagtgtcagagctggacatatggggaagctgaggcccagaaggggacagctagttgcctgaggacacacagagatagtggcacggctggaacttggggctagatctatagcataaaactccttccaagggagataagttggtgtctcccttttctagctgtggaggcttgaacatattttcttttcttttcttttttcctctcctgtctttgcctatgttttcttttcttt

SEQ ID NO: 236200 - DNA, 542 bp, Homo sapiens
catgagtgttgtggtgggaccagcatcaagcgcaagagatctgccgagtccacgtggatacactatgaccccgcagaccatgaaggtagatgaggaggtaatggcattccgtggtgcccaatgtgatggcatcagggttcttcctagcagcatggaagacactcctgccctcaagagggctaagtccagtaaaacccaaccaacaggagatagttgggcaggaagactcattctgagtgtagatggctctgggttttgtgagagggtgaaatctttggtcgttaaacaattctagctgccctagaatggtaaccccaagtcacttcagactggaaaagattttagtggctagaattaaatgtagagatggcaaaatacaccaaagccacagcattaatagacttgcatgaatttaggaataacctggaataattaatatttaaggcatttgcaatgctttaaggatgttgatattttaaaagatctgattctaatttgacatctgtattgaccttggacttgtgacttcttagttgaaaaaa

SEQ ID NO: 236201 - DNA, 389 bp, Homo sapiens
tatattttaatcgctccataattacggaattattttaaataatagcaataattataattgtagtatttaatgtcaatatttctacaaattatatttaagtaaataagtatattgtgaaaggagagggattcaggatcaggggtatgttcaaaaatctatttgtttttgtcattgttgaataaaaatctcccatctcaaaatctttgtaaaaggatatccatggaaaaaagaacctattactttattctccagtcaaaattaaaactggttcacaatggccacatcttctatttatacataaaacacagcttttaacatagactaatttttgtctgttaaaaatgaaattgagattcagtaaagatggattcaaattcaatacgttaaat

SEQ ID NO: 236202 - DNA, 407 bp, Homo sapiens
aaatgcaataatttttttaaaagcaaacaaaattatttaaaatacatgaatttagcttgccattcaagaagtaagataaaaaacatacaatgagtatatactaaaataaaatgatggaaaaaataacaaagagttacatttttgaaatgcaaccatggaagagttctgaggatgaaataatggaagcagacaataaatgtaataaaaccagtggggagaaaatgaaaattctgtcaagtctaacgttaggactcatgtaagagagccaggcacaatggcacacctataatcccaggtactgagtaggctgaggcagtaggattgcttgagcccaggagtttgaatccagccggggcagtataacaagacccaatctctataaaacaaaaaaacacaaacacaaacac

SEQ ID NO: 236203 - DNA, 447 bp, Homo sapiens
ttcctcagtaagcttcattatttctagttttttatttcaagtgcaactcttcttttcacttgaacacttggaggcctttgtaaggttattttttggcctaattttcatattgttatgtctcaggaactttgcatgtcattagggaggcctgaagagacagagatggagagtgaccagtggaacagtcagaacacacacaacatttaccaattaagtttgctgtcttataaggaagggcacactttatggtgccccaaaataattagtaacatcaaagaccaccaatcacaaatcacaataactaatataataatagtgaaaaagtttgaaatattgcaagaattaccaaagagtgacacagaaacacaaagtgaacacatgctgttggaaaaatgacactgtagacttgcttgacgcaaggttgccacaaaccttcaatgtgtaaaa

SEQ ID NO: 236204 - DNA, 313 bp, Homo sapiens
gggtggcagggccagcgccagagctcttagactgaaggcgcttcacatgcttataggctaaaaaggcagcttatctggcttagtactggtgagcgaataaagaagaacgaagattcaaggccggggtacaggcactgcagggcactgtgagccacagtgagaaattcacatttcactcctttcagtgggagacactggaaggtgtcacaccactgacgactgtgaggctgtgaaagatcattctggctactctgtttaaacagctaaagccacggaactcaatgagatttatgcatggaaggaaacaggttta

SEQ ID NO: 236205 - DNA, 306 bp, Homo sapiens
gacactcccaaaataatgctttactaggtttcttttctaagtgttctttaaccaggcaagttgacacctaaccgtcacaacccgctaggttgtcctgcggcctttctgctctaagccatttgtctttttcctgctggattacaggttatttgagtgtagagaatgtattcatccacgtgtatcttgcagcttccaggaaagcaacttaagcttaatagccgctccaatgtgaaagatattatggaataaattgtcaaaaaagacagatattacatttacttttgtgatagtttacatctataagga

SEQ ID NO: 236206 - DNA, 384 bp, Homo sapiens
taaatgagctgggattactataatttttattatttattttttaatttattacttatttttataatttactattgaaaaaaagcatttcttaaatgtactgggatacatatatatatatgactttttcttgttactaaaaaattactcatagaacttacatattaaaattttaggacttgtgatgaaaaataataaaataatttaaaacgataaaaagcaacataattttatatgttgtaccttgtacttccttataaggtacaacactacaatagccttagtgtgtagttttctttttgctatgtatgtatatatatatattcataaaagtggaaaaataacatttaataaatcctctttattttctgggaaatccttgcttta

SEQ ID NO: 236207 - DNA, 171 bp, Homo sapiens
ttttccccaggctgctctatttgtgcctgtagcttgatttttcaggctgtctttcattttgaaagaattttaccaaagacaagttttagctgtctgcccaactagtttttccttttctcctccctcaactggatcataacttatgactctgaggctgagggaggggatagt

SEQ ID NO: 236208 - DNA, 383 bp, Homo sapiens
agtgtgtcgccatgaggctcttgactgtgtggaatcacagaagaaaaattaaatggcccttacccaaaacaagaaacccaaaagaggccaggtgcgggggctcatgcctgtaatcccagtactttgggaggccaaggtgagcagatcacctgaggtcaggagttcgagaccagtctgaccaacatggtgaaaccccgtctctactaaaaatacaaaaattagactggtgtggtggcatgcacctgtaatcccagctattcgggaggctgaggcaggagaaatgcttgaacccgggaggcggaggttgcagtgagccaagattgcagaaagctgagatagcaccattgcactccagcctgggcgacagagcaagactccactca

SEQ ID NO: 236209 - DNA, 354 bp, Homo sapiens
attacaaacgtattgtattttagacacattacaaccaggagaacaaactggaagctctataggtatgttctgaccattaaaatatctggacagtgttaaaaaaaaaatcaggagtttaacataaagctagttttccgccttgccctgaaaacctggatgatctggactctttgggtctatgttcccagatggtccccagcaggcagagccaggagggtggcccatcaggagtggcacggtccttccactgggcacatcccctccccaggccactgtactccttcattacctgcatggcccctgaagacactggagttgatgacttcctggagtggataaaatgggcttttgtga

SEQ ID NO: 236210 - DNA, 145 bp, Homo sapiens
tgcttcctccttttttgctttttggttttgccttgcgttttctttctttctttctttctttctttctttctttctttctttctttctttctttctttctctctctctctgtctctctcccctccctccctccttggtgccttctc

SEQ ID NO: 236211 - DNA, 1344 bp, Homo sapiens
attttgagcaatatttcctttacctgtcatatatacagcatgttctgaaatacatggagtgtgatactggtgaaattaaaaaaaaaaatgtagcactttaaatttttttccttaaaggttgttttggtaattttaaatcctgaaatataattattacggggatattaagctcaaaattattctaaagttatcttttgttaaatgtggtttgttaagagatttcccattgttcagtgttagtaagtggacagtgaacaaagaggacagatttttgtcaagcataaacaacttttgcatcctgtttattaaatggaaaatacctcaatgaatgtctgtgctaaaagtagattccttcaggtttttagttttgtcctattaggggtggagtcatggaacaggaagaaagacatccagtaaacaggaattgtgtgctaagagatacattttgaaagggaaatggaggctcatgcttagaatttgagttataccatttcaccattatgagtaccttttcaagaatgttagatttaatggagtgctaaatggtctttttcattactgctatgagtgataaattgtcttgaccaagatagcatgttgcagaataaagttttgaaagttgacagaggtattttctcagattcattcattatcatgtttagcttgatgttctcaacgttttatactattaggagataattttccattttgggtagaaatagttttagtgtagttaaatatggttagtatagattcagtaatttagtatagccatttgtttttacatttacatatatttattcaagaaagtttgaaaatgggaggtataatattaaaaaattactcttcccctcctgggaatcaagcaaataaacagcaaatgaacctgaacttacctttctcttttaaaagcaattgttattggaaggtatatattaattccaatgatattactgtttcttaaaagatattttttgggatgtctctttgtaattgccaaatgttaggttgcatgtgacagctttaaatgttacaagtatcagagaattcaggatttgccatgggctgcgaaaatagagaagtggataaccaaggtaatgtagaagactgttctaattaccgggggatcaagatgaggaaaggttctcagtgacaactctctagtagacaaagaaataggaaatgaaattaacaagaccagcctgttatttagcagatagggcctgggaggacagaatttaacattgataacaccaatttaatgtttcatgaaagatcgtataagcaatgatgttgaatcttggtaagccaaaaatttttttctggaaaaaaaaaaaaattttt

SEQ ID NO: 236212 - DNA, 1291 bp, Homo sapiens
attttgagcaatatttcctttacctgtcatatatacagcatgttctgaaatacatggagtgtgatactggtgaaattaaaaaaaaaaatgtagcactttaaatttttttccttaaaggttgttttggtaattttaaatcctgaaatataattattacggggatattaagctcaaaattattctaaagttatcttttgttaaatgtggtttgttaagagatttcccattgttcagtgttagtaagtggacagtgaacaaagaggacagatttttgtcaagcataaacaacttttgcatcctgtttattaaatggaaaatacctcaatgaatgtctgtgctaaaaaggaagaaagacatccagtaaacaggaattgtgtgctaagagatacattttgaaagggaaatggaggctcatgcttagaatttgagttataccatttcaccattatgagtaccttttcaagaatgttagatttaatggagtgctaaatggtctttttcattactgctatgagtgataaattgtcttgaccaagatagcatgttgcagaataaagttttgaaagttgacagaggtattttctcagattcattcattatcatgtttagcttgatgttctcaacgttttatactattaggagataattttccattttgggtagaaatagttttagtgtagttaaatatggttagtatagattcagtaatttagtatagccatttgtttttacatttacatatatttattcaagaaagtttgaaaatgggaggtataatattaaaaaattactcttcccctcctgggaatcaagcaaataaacagcaaatgaacctgaacttacctttctcttttaaaagcaattgttattggaaggtatatattaattccaatgatattactgtttcttaaaagatattttttgggatgtctctttgtaattgccaaatgttaggttgcatgtgacagctttaaatgttacaagtatcagagaattcaggatttgccatgggctgcgaaaatagagaagtggataaccaaggtaatgtagaagactgttctaattaccgggggatcaagatgaggaaaggttctcagtgacaactctctagtagacaaagaaataggaaatgaaattaacaagaccagcctgttatttagcagatagggcctgggaggacagaatttaacattgataacaccaatttaatgtttcatgaaagatcgtataagcaatgatgttgaatcttggtaagccaaaaatttttttctggaaaaaaaaaaaaattttt

SEQ ID NO: 236213 - DNA, 244 bp, Homo sapiens
aagtatctggagaagatttctagaactcagaactgtgcttagaggctggccagcgaccccttggtcagtgcctatcatgtgggccttccagtccgggcagcccgtgagggcatctgaccgctccctgacatctgcctccacccccaatgcccccccagggaatggtgtaagtccctgatgctgtctcgaacccacatctccccgaccctgttctccctgataaataaataaaactgtaaataat

SEQ ID NO: 236214 - DNA, 467 bp, Homo sapiens
cgttgcgcaaggccaggcaggagcagggcccctgagcaggtattgtaccagccggcgtccctctcagtttccagcagccttagctggcctgctctgagggactaggtgctgcggtagccccgccagcccactaggacctaaaaggaacgcacccagagttgaataaaccagaacacaaatcctcccaagactgcctctggccagtggaatgaacccgggtctgatttcgcgcctacagaaatgaacacatattagtgaggtttcaggagagtccgtgattgaatgctcccagacaaggcttccttttgttaggaaaggaaaataaagcaagcattcacattctccaagttgtggtgcctgaggagagagctctctgaaagcagcccacaccaccagcaaagccacttccaccttctcagcttcctctgtttgcttcatgtcctttccttccccactcccccgccaaa

SEQ ID NO: 236215 - DNA, 540 bp, Homo sapiens
cagtgctgcttgagcatccacacaacatggcgctagcttcccccagagtgagtaatccagaatgaagaagacagaaaccacaatatcctttatgaactggccttataagtaatattttgtcatttccataaagtcctattggttacacaagactgccgtattcaatataagagtgacaacacatggggataaatacttggaggtgtaaatcattgggaaccatcctggaagttgcctacaatactaggatctatggctacaattccctgggtcttggcttcaagacagagaaaagggaaagaacatgaaacagccccatgtggtttttgttttttttttaatggacaagagtaagaaatggtgaacatttcttctactcatattctacagttagaatttggtcacataatgtatctaactatgaaggtagctaggtaatatcatctcttgttgggagggtagctgggaatacctctatacaatggaaggaagagcatgaacttttggtggagagataatgctctctgccatgataaaatg

SEQ ID NO: 236216 - DNA, 320 bp, Homo sapiens
agagagttggggaaaaaattaaaatgcaccctatatattatacagtatattaaataaacgttctggaatgcgctctttctaagattggtcagcatttaaaacatggttgaggaaaaagaattctactccttaatcacctgtttcaactattcaggaaaaatactgacacactgactgcctaaggcagaagatcctacaagttttgttatgtaaactctttttaaaagttttaaaaccaccctttactattgaatgtcatttgcacttgttttccccttgttttgtattacaagtctcagtaaaattctcatttaaccatg

SEQ ID NO: 236217 - DNA, 294 bp, Homo sapiens
gcctcctttgaaaaggcaaatgagaaactcaaaagaatttaaccgttggtgtctcacctatctgtggcctggacgctccctccccgcttggagtcttcctgcctttgcttcaagttgtcccgtctttccagaccgaaccgatgtgcttcttacatgtatcgatggatgtatcctgtctccctaaatgtataaaaccaagctgtgccccgaccaccttgggcacatgtcaggacttcctgaggctgtgtcacgggcgcgtcctcacccttggcaaaataaactttgtaaattaac

SEQ ID NO: 236218 - DNA, 445 bp, Homo sapiens
acacattctttcggagagggagggcaagacttttctccggagcctctggcaactcgtggagtctatataagctctggattgattgatgaccaccggcggccaatggctctgacaccacgccatcctcggtcgggcatcacagccccacgtccccgacctcagcctcccgggcgcgttggcatccccgaacccacagcgctgagcccgagcccggggccgccgcctcctccctgctctacgcctgggcgctgccaggttccttccctggaacggcggagaaaggaagggagggagccagcgagcgttggaagggggtgtggaggccacgggatctccccctcttctgacatcttttttcacttaaacttttgtttgtcccacccccccgacctgtttgtgtttgtttgcagcatctcaaatcaattatacatttttcatgacccgc

SEQ ID NO: 236219 - DNA, 434 bp, Homo sapiens
ccgctctgggagtgtctgccttatgcagttgtagatagggatgaaacacaacctggtctcctgcagcgcccccaggcttgctaggattaggaaaatccagcctggagaattctagtcagactgtttctctgctcttgaaccctgtttcctgttaagatgtttatcaatgacaatgtgtgcccagtgggacatgaaacttcatcagtaattctagttttgccctgaccttgtgacctcgccctgcccatttgccttgtgatattttattgcctttgaagcatgtgatctctgtgacccacatcctattcatacactccctcccctttgaaaattgctaataaaaacttgctggttttgcggttcggggggcatcacggaacctgccgacatgtgatgtctcccctggacacccagctttaaaatttctcctttta

SEQ ID NO: 236220 - DNA, 339 bp, Homo sapiens
aagagatgggatttcactatgttgcccaggctggtctcaaactcctggcctcaaatgatcctcctagatcagccactcaagtcactaggatcacaggctcagccactgtgcccagcatgcaagacaatttaagaggcatacaaaagacaaaaatataactcaacttaagaacagattaagaattaacaagataagaatatttaagaataggttaagtaaacaaatgtcatagacaaaactagagtcaggaacaagacaaaggataagaatcacttagatatggctgctctaagcagctactagtttgtcttcagctttctggcatccaacacaagaaag

SEQ ID NO: 236221 - DNA, 427 bp, Homo sapiens
ctttaatcaatggtaaattgtgagatgatgtaagcacatttccctgcaaactttgtaaaaactataaattttttatagtgggatacattcttccccctcccttttttcctcacaagtcttacaatgtttcttaaataaaattttcactaaaacacgattaaaatatagcaattgcaagataaatgtctatgaagccccatagtataactccctgacattctttactcaatcaaattggggctcagaaacaataccccaaaatgaaggccaaagaagcaacctcagaagcaaaatttttctgtgactttctcctgccctcttgtctctcagtcccattctcccctgaggctagacatagaaactagaattccggtttcccaaggtggcttatgacaaccagaatcctttttccccaaagccaaccaca

SEQ ID NO: 236222 - DNA, 381 bp, Homo sapiens
ttattaaaggtctgtaagattttaataaagaaattttcagagcagaataaaggaagacccaaataaatagtgtagcataccatcatgatcttggattgggaggctgaattttataacaatgtccaaattaatctacaagtccaatgcatttccatttaatatcccttccctcacttttttggggaatggaacctaaaatttatatttgcaaacagatatccataaagagtcaaaatattcctgaatagggagtcgttggtgggtagggaacaggagagatagagttcctgctatggtaattaagttggaatagtaagggcacatgtataaaactcagacatggcattacaaatcaatggggttagggagactttggctcta

SEQ ID NO: 236223 - DNA, 133 bp, Homo sapiens
gggcaccaacactttaatgataattaaactgccatttttcttccctcattacacagattactaaaagtgatttttaacctttgttagggttgtcacgattattttcagcctagatcccttctgtcgtcttctc

SEQ ID NO: 236224 - DNA, 465 bp, Homo sapiens
ctgatatttgctttcagtatcacggtctatcttcattcaagtcacagacctttcttcccctacccaaggaatcacttccccagccaccaatacagaaagacaagagggcacttctacatcacccattcaaaacaaaagaaaaaagaagatctcctgaattgatggaagctttcatgagaagtattcagcattttcaaatttgagtgagggcctttaagctgaagctagttcatctctggtcccttattcaccagaaggggaagggtcaaccttgacctgcaatgaatgactcccatggcgttagtgccttttcttctcctcacagaagtgagcaacaaggaccaatgcttccttccttcctttgtatacattaaatgcagcaagatgtatgtcagagcatacctttatttgtgtactactgtggatatcgtttagaggacaaataagattttacattatggaagc

SEQ ID NO: 236225 - DNA, 473 bp, Homo sapiens
atatacaagtaacccaaaagaaggcaggaaaggggaaaccgaggaatgaaaaacggaagaaacaaacagaaaacaagtaataaaatggcatccctaaatccaaccatatcaaaaagtacattagatataaatgttctaaacacaccaattaaaaaacagattgtcagaatggataaatacaatcaatattttcaaagaaaatttaacacctgaaatgagatgtgcagtaagtataaactgcaatccaaatattgaaaacttaatagaaaaaaatgtggaatctcattactttttatattgatttcatgctgaaatgttttttgtgtactgagttttaaaatatattattaaaatttcacctattacattgtatatttaaaaacatgactaccagaaaaatttaaattacctgtatggcttacattaaaatttccatcagacagcaatcttctaaggtatggcttttgtaaaaa

SEQ ID NO: 236226 - DNA, 2277 bp, Homo sapiens
  misc_feature (1732)..(1732): n is a, c, g, or t
tcactgacatgagcagagtgctgaaatatttgagtgtctggcacacatgtacgttctcagctgagttccaacaaggtggtgctctgccttcttgcttctgctctcatactgaaaacgtgtcctttttgtggctaatagtaccatgtttttcacacttttatgttttttattggtgattttgctatttaaaatgcccctcaagcattgtgctgatctgctgtctatgtttctcaatgctaggcagttgtgttgtgctttacaggaaaaatacatgtgttaaataagttttgttcaggcctgggctgtagtgctgttggctgtgacttcaatgttagtgaatcaacaatatttattaaataaggagtcttgaaacagaaacacacataaaacaagcttatgtattgattggttgacaaaaatgttgtagccagaggttcacaggaacctaatcctgtatttcccctaggagcaatagttcagtatttgctacttcactgtgtgtggcaactttatggaacataatcactacaaataatgagaatggactgtatcctgaatgttatttattatatttgtttatataactttgtagttatataattgtgaatagtatctgtttttatgctatattttctaatttggttttaactgatgtgcagagtattggttttggtatgctgatgttatgtcccagctctgtcattttactagctgtgtgacccatgacaagtttgttagtttcctagatttgtcataacaaagtgccacaaactgggtgactttaaacaacagaaatgtattgtctcacagttctggatgctagaagtctgaaattaaggtgtcagcaaggccatctccctctgaaaactgtaggaaacccctcctttttttcttcctagcttctggtgattgccagcaatctttggtttcccttggcttgtagctgcataactccaatttctgcctttgttgtcacatgatgttctcctgtgtgtgtctgtgcctaaatttcccttcttttacaaggacatcagtcatattatactagggcataccctaaaatgaccttatcttaaattgattatatctgcaaagacctgatatttgataaggcaatgggggttacctttaaaatgtcttttttgaggagcacaattcaacctataacagcaagttgcttaaccttcctgtgcttcagttttctctgacataattgtatcactctgataataactgtatcatttttaagggctgttgtattagattagttaatattattagtcaaaaatatatggaaaatccttagaactatgcctggtccacagtaagaattcaatgtgtaatctagtcaggtgacttttatttagcaattttgccgaactcctattggtttcaatagtttgtagactatcctgaatatactgtttagataatcacattgtatagaaaaggtaatgttgtcttttctaatttttatatattttatttcagtttcttaccttattattgtagggtaagccttgttattgttgtaagactttcagtataatgttgaatagaagcagtgatagtaagataatgagcaccttgttttgcttgtaatttaaatgaaaactattctataattttgtcattaaatgtgatgattgctacaggctagggtgatatcatttctcaggttaagaaaagttatttctagtcataattttagtgagttttaaaattaaatttngaatgagtactaaatacttttttttgcatctgttaagatacttatatgttattttccaatatcaagctggaaaggataggaatggagcagcaaatgaaagttcaggctatgggttaggagttgagtggaaacttgtttggaactagcctgggttgagggcaaagcaagaaacaaacaaacaaaaaaacacaggaatgactgtttgcctttactgtttggcaggtgaaaatatatggatgtaagaactagcttaaaggtggtattaatagtaataataacatgatcaataatagttaacgtcaacattcctcaccagatccctcaaaaacaatagaaataaaagggaatatatttcattttgtagcatacagagcatagttattctgtgcttttaagtgaaacaccagcataggaaaaaacaaaaaacaaaaactggagcccaggaggtcaaggctgcagtgagatgtgatcacaccactgcattccagttggggtgatttagtgagaccctgtctcaaaaacaacaacgacaaataaaaacaaac

SEQ ID NO: 236227 - DNA, 470 bp, Homo sapiens
agtttaattttcccacccccactcaataggagttggaggtacaccacatgccctgcctccctcccccacctccggttcaggccatttcattccatcagatgagcctgcatggagaagaactgtgcttctttcatagagggatgtccacttagattagattgattacggttaacttggtgatgtttaatatagcctttcctttgcacctgtagtgcataatttgttgtggtatactcaagatactctaaaattttaaactatggggtttccaccccaacacatggacacactaacacaacccaggatgatgattgtctcttgctaatcttggaagtccctgagaacagatttgttccccagaactgtaacggaaagatcatggtcagattatgggagtgggaagtgaggcaatagtgggagggacaaaagagagacacaaagtcttccctgatgttaagaagtcttatgac

SEQ ID NO: 236228 - DNA, 242 bp, Homo sapiens
tcccttagccagtcctcatgtcctggccggaaggcctgctcttccttccccctggctcagccaggggtctgcattgctgtccattgatagaattgttggtgctttatgatccagctgctcttgttgccttgaaccaggatttgaatattgtaacattaagttttttgcatgtttatgtccagtagattatgtattttgagactagacagtgggctaattaatattccacacggggtcccatg

SEQ ID NO: 236229 - DNA, 390 bp, Homo sapiens
ttagcagtgcccttggtgaatagcagaagcaaacataaatcctgcctgatagaattggacttcaatccagatccatagcaaatttaagatggcactgactgttaggtttatctaattgttcattcctggtttacaggaatgccatttattctgaataatgataggtacccagagatcttattgtattttgttagcttataaaacctactggaatttctgtgtagacaatcttatcgtctgtgaataacgacagttttcttcctattttccaatacttactgtttttctttttcgttttctttttttcattcttactcttatttgttttattggtcttattatctagtactagtacaacagtacatagaaatgatagtaaacacatttgcc

SEQ ID NO: 236230 - DNA, 469 bp, Homo sapiens
ctgaggttaggtaggagaggtgactgggatctattgagagaaaagtctgctctgttacccagtctggagtgcagtgaaacaatcacagctcactgcagcctccacctcccaggtttaagtgatcctcccacctcagcctcccaagtgtctgaaactacaggcatacaaacctgagaagtttgatttttgctaactggggccagcacggacactaagcagggacctgacatgtcaagtttggcagggcttccctagcagataggaccttaaaaaccctcactctgagccctattcctaaggagacctttgcactgaatgtatatgccttagtctccctaacccaagtttcagatggattattcaggaggtcagacacttttaatcaactgaagattattaaatatattttacacacagtctgtacttctttccacttgtaacaaaattaaaagaaagtttcccatccaaa

SEQ ID NO: 236231 - DNA, 909 bp, Homo sapiens
  misc_feature (1)..(2): n is a, c, g, or t
  misc_feature (4)..(4): n is a, c, g, or t
nntntttggcctctagacagccaaagccttttgtcacccaggctggagtgccatggcacgatcatggttcactgcggcctcgacctcctaggctcaagccatcctcccatctcaacctcccgaatagctaggaccacaggcacacgccaccaaaccagggagtttatagtccagtggaagagaaagactcagaaatcacataatcatagtccaacacagaatccatgcatagggcactgttggagcactgggagagtctacttcaatctgtgggttcaggacggggtcgctaaagtcttgcagaaagaagtcagtcttctgggatatggcttcttcgagaagatactgttaatggggattttggatggccatataatgaaataggaaaacgattaatggaagcccaggaggaaagacttggtgttattatagcagccatcttggattgtgagtgtgtctccaacaccatcttgaaggtgcagtgacttgcatatagtaggtgcttgatatttaccaagtaccccctgtgggtcaggccctactctcaccctaaggatacagcaggaagcaaagcagaggtggagaagatcccactaaacacacaggccgcttggaatgttgggccatctgtccttttgacatgaattttccctgtaatgggggtagagctggtaactgttggatcatctgattattggagacagaagtcctgtcacttgcccctgctgttaggaggtgggcttcctgaatggctttctgtatacatgaagaatttcaagaccttccgttaaggtggtcagagctaagtttcagcgtttacaagaggtctcttggctgacttgctataacttacagcaacctgatgtttggacaccttttcctttttttgtttttagtaaatatgatgag

SEQ ID NO: 236232 - DNA, 437 bp, Homo sapiens
gcggccgcctactactactaaattcgcggccgcgtcgacttttttcctagtggggctacaacttatgcttaatacaaataaatgccttttattcatttaatacagatatttaccaagtaccccctgtgggtcaggccctactctcaccctaaggatacagcaggaagcaaagcagaggtggagaagatcccactaaacacacaggcaaggcacatcagtgggtgatgagcgctaagaggaagtatggccagatgaggtagagggtgaggatggggcggagaggatcctacctgttggcaaagccttttctaccagatggtccaggaagatttatctgataagcaacaggagggtgagacctgaaggagcctccagatcagggctgcctgggggcagggacgtcgacgcggccgcgaatttagtagtagtagtcgacc

SEQ ID NO: 236233 - DNA, 513 bp, Homo sapiens
tcatcacattcccatgaagtagttgatggttttgtttttatcttcattttcaaatgtagaaactgaagcttaaggttatgacatttgcccaagaccatgcagctggagtttatagtccagtggaagagaaagactcagaaatcacataatcatagtccaacacagaatccatgcatagggcactgttggagcactgggagagtctacttcaatctgtgggttcaggacggggtcgctaaagtcttgcagaaagaagtcagtcttctgggatatggcttcttcgagaagatactgttaatggggattttggatggccatataatgaaataggaaaacgattaatggaagcccaggaggaaagacttggtgttattataggtttgtatcatatcaccattttcctgttctatttggaggaagagggaaaggggaaaggaagccagcccttattgtgtgcctgccacgcacctggtcctgcagtgctgggaagcactgtgagctctgactcccaga

SEQ ID NO: 236234 - DNA, 534 bp, Homo sapiens
ctgtgcaaatccagaaaatttgtagtgagtgtactgaattatttgccaatgatcaatagtgctgggctctgaatgcaatctgaaataaaaattgttttcctgaatgtatttatcaaaatactgagtgcttaccaaatactggtgcttactgtactagttgacccgtacaatcagtttaagtaagctaacttaaatttatgacttttgacttattcctgatctattcacaggccgcttggaatgttgggccatctgtccttttgacatgaattttccctgtaatgggggtagagctggtaactgttggatcatctgattattggagacagaagtcctgtcacttgcccctgctgttaggaggtgggcttcctgaatggctttctgtatacatgaagaatttcaagaccttccgttaaggtggtcagagctaagtttcagcgtttacaagaggtctcttggctgacttgctataacttacagcaacctgatgtttggacaccttttcctttttttgtttttagtaaatatgatgag

SEQ ID NO: 236235 - DNA, 572 bp, Homo sapiens
tgaggtgtgtcgagtgttctctacatggggcactgtggaggtgtcatcggctcagttccccaggtagtagggcaggtctgtaatgctgctcccctttcagatgaggaaaggaaggcccaggaggccatgtagtcaggacttggtccaggtgtgtctgtctttggctccttgtccctgggtgagaatgaattcagctccaagtaaagaccctgcagctaccccgctcggggctgcctggggtccgtcatggtctggtggcatgggacaaggcagtcagggctcctaaatggtccattgtgagaaacaatgtttgaagcccccatgcagctctcccagtcccctttggcagaacaaatggatttcccagagaaagaccagagtaagcatgtctgggcacacttgtcatcagctgggagccaccagaagtcttaacaaagctctcacgtgacaccatttcttgaagttggtcttcagaaagtactcgcttgccaaagtggagcgcaatgttcaggtctaaaaccaaccaagcacattgaatattttgaaaaataaaatcaagaggttgaattcca

SEQ ID NO: 236236 - DNA, 381 bp, Homo sapiens
gaaagtatttgaggcgctagtactgtgcctggtgtggtgcactgtaggactcagaaaatgctcgtagtgcgtggcaagggagggttctgggaggcagaggtgcatcccaaataagctcctgcagctttctcctccttccttccaacatcctgtccctgactcctgacccaaactgataagagcagttgacctggttcataacaggtactcaaaagcatctgtggaaacaagttacttgaatccgccctccccagatatttttaaacccaaaggcaagattgttaatccaagatgtctccaatttggagcgcaatgttcaggtctaaaaccaaccaagcacattgaatattttgaaaaataaaatcaagaggttgaattcca

SEQ ID NO: 236237 - DNA, 306 bp, Homo sapiens
ccgcccaaaatgctgggattacaggcgtgagccactgcagccggcctcttattctttatgatatgtttatcaccatgttttataaataattggttataattccatattcttatgtccgtaaacctttctgaatttttctaacatgtaaatgacttttttctagaagttaggaagtcatacagaataatgtattctggttgggtgcagtagctcatgcctataatcccaacactttgggaggccaggatcgcttgtggccaggaatttgagactagcctgggtaacatagtgagactctgattctac

SEQ ID NO: 236238 - DNA, 254 bp, Homo sapiens
catctttctagggctgcagcctcaccgcaaatcccaggtaggggaatggggcttcctgtatggagacttgggatgggcagggagagaatcttgactagacatccttacttgtagcaaaataatgacttcttgtttcagttattaattgctacctaatcagcaccacaaaacatagtgatttaaaacaaccgttttattttgctcacaattttgttgatcaggaattccaaaattccaaaattccaaaagtcaaa

SEQ ID NO: 236239 - DNA, 486 bp, Homo sapiens
taagcaactttgagccctttttttttaaggacccgaagtttactaatcataagccctattatcagaaatttctggcaaatctattcaagcaaactaaaacaaaaatatcaatagttaaactgaggaagacttgggatgttggaagtagtggttagctaaataaacagttaattactgattctaaaaaagtattgatttttaagataattgtgataaaacctggaatacataatccccaattatttcataatagaatggagtctcaaatattgttctccatgagcactgaatgtttttgataacgaaaaacaattagttttagtgactcctttttctcaagctgtttgttctgacaaaaagaccaattttgtatttgaaactcagagcaggcttcttcccttcagtcacgatcttgccttttatctcaactgagatgctaaaaacaaattcaataagaaaacaagaaagatctcttagaaattaaaa

SEQ ID NO: 236240 - DNA, 143 bp, Homo sapiens
tgtaactaagacaagtgggggttcagaaaggtagaactgtaatggggtaaggggataacaatatggctgaaaaaaacttgcctgctctttataataggaattttaaactatctctgacaagagtttaacttttaagaatgaac

SEQ ID NO: 236241 - DNA, 261 bp, Homo sapiens
agttcgggaaaccgtgcttttatggtggagtttgctttctgccttggtctccggatgtgtgtatctgtgggtggatgtctgcatgcaaatggcagtgtatacctgtgtgggtgtgtacaaaattcccaagtgaatctcagctttctggggacttccaggtcttgagcccagcagatgccatttgaagaaaaatcacttgaaaatgagatagaaagaatggaaactaaatcctagctctaaaggcaccaggctgattaaaaa

SEQ ID NO: 236242 - DNA, 346 bp, Homo sapiens
aggtacagagcctctggaactcaatgcacatcctctggacacttaagaacattccagcattgcacaagaatgcattcccattcattcaattgctttcagggagacacactctgtttgggggcatttcattggcagaacagattacaatggttaaatctgatgtgaaatatattatggaagccacatttccctgagaactcactagatccaggaggctggtcaacatgtgattctgactgaggttaggaccagtcatcccaggagcctaatttatcagaggccaatagtcattcctggttccaggtgatcactagagcttaggaaccaaaccaaccccaagggtaac

SEQ ID NO: 236243 - DNA, 423 bp, Homo sapiens
gggtttcaccatgttggccaagctggtcttgaactcctgacctcgtgatctgcctgcctcggcctcccaaagtgctgggattacaggcgtgagccactgcggctggcccacagctcttaatttctttgaattaattttcttggctgtaaaattattatctttatgtgtttgccttcccaagggttacaagcagaagagtacttgctaggcttttaggtgttacggcccacatctaagcaataactatgtataaaaagggcttaaaaatagtgaatagggagtgtggtggcacatgcctgtagtcctagctattcaggagactgaggcaagaggataatttaagcctaggagtttgaggctgcagtgggctatgatcacatcattgttactcagactgggtgacagagttaagaccagtctctt

SEQ ID NO: 236244 - DNA, 467 bp, Homo sapiens
gggagaagtgtttaaagttcggatcccgcagccatggcccccgcggcgtcctggggagggggcaccggggcgaggggcggggtggggggagatgcccggagccccggggaggcagagacccagaggacgaggagagggagtctctgagacgccgggacaggagagactcagagacggagagacagccaaggagacagagacggggagacgagcagagacggggagatgcagagagggagagagacagcgagatagacgcgcaaagagagcagagacggggagagctgaggacggagctccgggctggagctcagcacagcgagcgcgggcgggcgcgcgccggggacagcctggccggctgggggcgcggggcggccctgcctcctgcgccttctcctcttcctcctcttcctcctgctcctcctcctcctcgttctcctcctcctccctccactcctctgcgcgcc

SEQ ID NO: 236245 - DNA, 392 bp, Homo sapiens
ggagggcctgtggacgaggccaatcctgggtgtagagggggtccctaggatgagggtgggacagatgagggtggagcattgggtgcttaagggacacatggagacaggtccagcaaaggagctggtgggcacagctgggcagttgggggtccggaggccgtgctgccctgggagtggagggcaaagcaggtttcacctgagcgccgcagaaaggagtggagagcccgggcgtgggactcacgcttgaaatcccagcactttgggaagccatggtgggaggatcgcttgagctcaggagtttgagacaagcccgagcaacatagcggaagcccgtctctaccaaaaatacgaggcgggaggatcccttgagcctgggaggtggaggctgcagt

SEQ ID NO: 236246 - DNA, 623 bp, Homo sapiens
cacagaggaagaaaagagaagagtggattcctgaaatctaaaaaaaaaaaaaaaaaaaagtctaaacttaagggatgggtagagaaagaaagaaaccattgaaagaaactagaggtgagaccagttaatttgcttctaagacaaattaagagggttccagaataataaaatggtcatcatagtccagtgattcagaggtcaagctgaaaaagacagaattgtttgaatagatgtggcagttagatatcaatgatcttagcaggtgctattttcaggtagttcaggtggcatacatagtcctctggttagaagaatgcctgaaagatttatccaactataggctgtatcattggtctttatttttctctgtatttcaatgagtgcaaattttttctttcatttattccttcctctcttttcctttcttcctttctccttttctttccttgctcctttcccctcctctcccctctctctcctctcaagagatgtataggttcctttcctttctctctctctctctttttttttttaacaaagattctctttttgtgattttttttgttttattttattttattttattttattatactttaagttttagggtacatgtgcacatt

SEQ ID NO: 236247 - DNA, 429 bp, Homo sapiens
ggctgagtggcacttaagcgggccatgccgtgcaaccttgggcgctgccaaccgtgggcgagctctgggtgtgcgggcggcctggcgcggcgctccgctgtgtcagcgtgttatgatgccgtcccgtaccaacctggctactggaatccccagtagtaaagtgaaatattcaaggctctccagcacagacgatggctacattgaccttcagtttaagttgattggcgcctttctcattattataggctccctcctgctgtcaggctacatcagcaaagggggggcagaccgggccgttccagtgctgatcattggcattctggtgttcctacccggattttaccacctgcgcatcgcttactatgcatccggctaccgtggttactcctatgatgacattccagactttgatgactagcacccacccct

SEQ ID NO: 236248 - DNA, 501 bp, Homo sapiens
gaccgcgctcttcgccgaaatcaagctccgagtcatccgtgtggggcattcgtcccccctggcacagttggcctctttccagaagcccgttttgtttgttttacgtctaaattcgcgtcggttcttatttctctccctggcaaggtctgaagacgggtaggagaataacctgtgtcagcgtgttatgatgccgtcccgtaccaacctggctactggaatccccagtagtaaagtgaaatattcaaggctctccagcacagacgatggctacattgaccttcagtttaagttgattggcgcctttctcattattataggctccctcctgctgtcaggctacatcagcaaagggggggcagaccgggccgttccagtgctgatcattggcattctggtgttcctacccggattttaccacctgcgcatcgcttactatgcatccggctaccgtggttactcctatgatgacattccagactttgatgactagcacccacccct

SEQ ID NO: 236249 - DNA, 404 bp, Homo sapiens
ctgggattacaggcacgagccacctcacccggcccatacctatgctctcttctaagaattttatagctttatctcttaaatttaggtattagatccattttgagttaatgtgtttatattatgtaaggtaggagtctaactttactcttttgcatgtggccagccagttttcacagaactatttgttgagaagactattctatcttcatggaattatgttgtccatcttgtcaaattgttatagatatttggtggagtaaactaaaggatattttccacataaatctccctgttataccataaggcagttatctttcctgttttgcagagaagcaaaacaagctgctatgagattatatgaactgtccacgtgaacacaattaataagtaatggaatcaggatt

SEQ ID NO: 236250 - DNA, 444 bp, Homo sapiens
ttgaactcctgggctcaaatggtcccacctcagcctcccaaaatgccaggattagagtcatgaaccactgcatctggccttagtgaaatcattaatttatttcaccttgatcagaagttggtgatttcattgtcattctagtcagttccaaataccgttaatctgtatatacctgttcctaaatgaaaattattttacaagtacttgatcttctctcacaatacgtactagatggaatgagtgttttttcaaggaaataataaaatacttacaaactgtaagaatactgggtcgtggcagtgtttgccttgagcatattgttaatatgattaaaaatatcaggactcaacctatacagcaaaccaaaatagagggtcttttaaaatttttctgttatttccaggatataaggtaattttaagacatgtgaagaagatgaaaaaa

SEQ ID NO: 236251 - DNA, 458 bp, Homo sapiens
  misc_feature (426)..(427): n is a, c, g, or t
  misc_feature (432)..(434): n is a, c, g, or t
atccatgtagcttttctctggttctgttttgatggtcaccaacaaattatagcctgtttttgtaattgccttattgagtgacttgccatggagatttgacaaggtgtggctcctgcttgggccttcatttgctggcatactacatgaggctgagagccgtgttagtcctcgcagtgggcagccaggaaagcagggcttagcaagggctatctagggccttgaccaagtacagtgtacttggtagctgtttcttgcccacaaagcaagtgaacccaggtcagatttggcctgtcagataggtttgcacttttgaattttgaaatattctaagatgtaactttgtttatttatttatttagagacagagtctcattatattgcccatactgaagtgcagtgggccgagactgcgccactgcactccannctggnnncggagtgagactctgcctcaaaaa

SEQ ID NO: 236252 - DNA, 588 bp, Homo sapiens
cctgtttttacttaaatctaagattaaagcaaatgctaaagtcctattttttccaactttttctgctccctctcttctcagaggtaatcactgtcttgaaataaagccttctaggaactttttttgttgttcttctgcataactggattttatattataaagaagaaatcacctcaattatgttcagctgttttttaacaagtaaatactctttacaagtacagaaataaacttgaaagttattccacagaactctttgtaaattatcacttagaactatgttattcctttgtagaagatgtggaaatgatttgagatatttagacttttttgtaccaagtaggtggcatcactttgaagttgagactgagaggtgaagatttatgttttctgaatcagctgtgatactatcaagtaattttcatctattgtgtatctttgaacattaacagtggttgaccagatactgatgtgtcatttgttgctgcatttttgataatggaacataaatttaaagtatcagttcgggaattggccatttcatatttcttaaggaagccattattaaagcatgtgtaatgaatgaaa

SEQ ID NO: 236253 - DNA, 197 bp, Homo sapiens
ctgctatggctagaggtgcttggggccccccgacctaaccacccaccaccatgttacagaggacactgacggccagagtggggctgggcctgggcctcctgcctcttggccttgctcttgctgctgctcaggatgaactgcacggggaagccctctgtcctcgctcacatgctaacccagtgacagcgcccactgtc

SEQ ID NO: 236254 - DNA, 804 bp, Homo sapiens
tattttagaaagctggattcatatttcacatcattggctttcaaatttgaagtgactgtcggctattttttttaagtatcatctattttatcttttgttgttgttgtcttcataatgtgttaacattaaaaagctttccagatggcttctggcttttaaatgagaaaattggatatttttactaaatattttcccttaaaaacctgccaggctggtggttattctataaattagtgagattaaaaaaaaggccccatttgcttttcctgttttaatcttaataagagcttgatttcactactcaataatgtcaaagtaaaatagcatcttaaaatggaaaagctttcttctcctactctatttctaatctcctgccttaggctaccatcataaagatacctaagattctacagaagagcatttctgataaatacaattcataagggtcaaactgcattaggtctcccagatttgaacaagtggagtccaactgtaatccacgatattagtgagtgtaaagaaagaatggccagtagaagctggccgcggtggctcacgcctgtaatcccagcactttgggaggccgaggcgggtggatcacctgaggtcaggagtttgagaccagcctgaccaacacggtgaggtctctaataaaaatacaaaattagccgggcatggtggcacatgcctgtaatcccagctacctgggaggctgaggcaggagaattgcttgaacctaggaagcggaggttgcagtgagccaagatcacaccattgcactccagcctgggcaacaagagtgaa

SEQ ID NO: 236255 - DNA, 483 bp, Homo sapiens
ggtcctctatacatgtgttccctccgtctccaaggccacctcctctcagctttctccattgcatccccttcccatattctctctcctttcatccctgtgccactcccaaagcccctgcactttccggagcaacgtatcagtccccaaaccccactcatgtcatgtggatggcacagcttccagtggggctgtgcctctagtgatctccccagacctggcgtcaccactgtggataagagagatgggacacccagtgccatggtggaggccatcatgccgcagaggagggtggcagaagcttctcaagcaggaatgcattaagttttgttttgtcttttaaaaacctcacccagaggccaggcatggtggctcatgcctgtaatctcagcactttgggaggccgaggcagatggatcacttgaggccaggagttcaagaccagcctggccaatacaacaaaaccccatctctactaaaaatacc

SEQ ID NO: 236256 - DNA, 385 bp, Homo sapiens
ttggtaatgtgtttaggagggatgggcctataaaataacgacaacaaacacgcataccactgtctttccaggactggattaagacctttagagagccgaacctcttaaaaagattatgctgttcccatccctctgtgatccaaaatgcaataaaaacaagagtaaactatcctcattgctattgctattgaagtgtactgtttgctttgcctgggctttgcccagggttaaatggcacacattggaagtccaagtcacgcttcggccacccaggtgctaaaatgagacatgaggcatgaagacgttgctgggcacttccacacaatcatcctacatgacctaattggatcgaccattttaatggaacggtctcatcaattcgagc

SEQ ID NO: 236257 - DNA, 471 bp, Homo sapiens
agatcaggtgtcccagggtcaatgtaccgtgagaacgtcgctcctggaatatttccccggtctcaaaatacgaaagtgaccctgcagggacagcagaggacttccatcttgggaccatgaggttactgcacggaaatctttactcttgggagtgatctgcttacattccgtgttgagaaccagcacaacatacggaggactgtgcatcttaaatcggtctgggatgctgggtcagtttgtccactttttgtgtagataaaataagcaagtggttaatagtgtgttcagtaggtacgacgtatcaggcaccatacatagagcaggacactgaggttcacagtgatatttttctactgtggtcagggttgatcacaaagtatgcagcatggcagaaaccaccaccacccgtaaagtgcttaccaaaattgacatgcctgtattttcataaattgtaacatttgttgtgttttg

SEQ ID NO: 236258 - DNA, 458 bp, Homo sapiens
ctttctaataatatattaaacttaacttggatattttatgcacttctctgcatttgtggttttctttcactctttaaaaaaagttttaaaatacctatatatgatgcatacatgatacatacaagtgtacattcatacatatgtgtgtaaacagtggtgataaagatacttgtccttggacagaatggttttggtaaatgtgctgggctgtctgctttggcagaatgtcttgctaatcctaattaaggtagtttaagcctcctatatatttgttttcaggtatttgatttcagtcaaattgtgagaagagattatctgtaaactttaacattgagacatttaggctgggagtgatggcttacgcctgtaattccagcactttcagaggccaaggcagaaggattgcttgagccaggagttcaagaccaacctgggcaacacagcaagaccctgtctca

SEQ ID NO: 236259 - DNA, 395 bp, Homo sapiens
ctcgatctcttgacgttgtgatccacctgccttggcctcccaaagtgctgggattacaggagtgagccaccacacccggccgccattgctttttagtttttgtttttatccaagccacataatatagtgggtttttaacaaaagggcagtcttgacatttctcttcttcccgtttttgttactgcttcacaactgagtacgtaacaactggtacttcagtgatacagtggcctattttctttcttataaaagacattactatatcatacagtattttaacctttcctttacaaatctcatgatactgagatgcctttggttaacaaaaattgccattgagtctggaagattgtttgtttgctgactgaccagccccctcatctcatccttctcac

SEQ ID NO: 236260 - DNA, 497 bp, Homo sapiens
cactaattcaaggtcaatttgagattttttttttcctcatatggttcagccagttctagctaaaatgtaaagaattaaactcatttggaactgaaaaaaaatggataaaggaggtttttaaaaatcaaactgccatagaaactgctttacccaaattattgatccactgctttccttgggttacctattggggcaaataaagtttagccatgtgaacaggtcccaattttatcaaaaataatctggatccagctgtcttttatatagtaatgagtttgtgaagctagaattccaaaagctattggtaaaagctatcggatcttgcatgtatatgtataaacatgtttaaatgtgttatgtgtatgtgcatgtattatgctatgtgttatatctagcatggtaccgaatagcttataagtaaatacgtactcataaattaaataagtccagatgctcttcaggttcacgtgaattcaataatctttggtgaataagct

SEQ ID NO: 236261 - DNA, 421 bp, Homo sapiens
cattttggtggggactgacgacagactctaaagacaccctttgcccacctctagagtcttagcatttcttccattgacgggatttcccaccagcgccccgtagccaccctgcgtattccataccaggattcactggcccaggacgtggaaggacagactcttctgaagtggctccacatttcattgtctcctcacctagctgagacctcaaaaattccagaacattctacttgtttcacctagtttaattttaaagatcttggactttgaattccaggtggcagactgccagtttggagggcaagttgacagtcttgactaaaatggaatgtgtgcaaaaggtaagataagcacgttacaccccttcaccccatcataagcaatgaccaaaaagaccaatcgtttaaaaacaacaacaaca

SEQ ID NO: 236262 - DNA, 490 bp, Homo sapiens
cactgtgaaatctgggtaagattcaaagttaaagaagcctcgttaggagcctgttgctagttcagagcaggtttaagagcagcttgacctggatgggcgtgtgaatggaagacatattttttagaagattatttgacaatattatcaaaagtcttcatttgtgtacatttttaacccagcatttccatttctaggtgtttattctaaagaaataatttaggccaaatgtggtgtaatcccagcactttgggaggccgaggtgggtggatcacctgaggtcaggagttcgagaccagcctgaccaacatggtgaaacctcatctctactaaaaacacaaaattagccaggcgtggtggcacatgcctgtaatactagctacttggaaggctgaggcaggagaatcacttgaacctgggaggcggaggttgccagtgagcctattgcaccattgcactccagtctgggcaacaagagctaaactccatctca

SEQ ID NO: 236263 - DNA, 516 bp, Homo sapiens
tgagacagaatcgcactctgtcacccagactagagtgcagtggcgctatctcagttcactgcaacctctgtctcctgggttcaagcgattcttgtgcctcagcctctggaatagctggaattgcaggagtgtaccaccacgcccagctaatttttgtatttttcgtagagactgggttttgccatgttggccaggctggtcttgaactcttgacctcaagtctgcctgcctcagcctcccaaagtgctgggattacaggcgtgggccaccacacccgaccaagaatatattttcttaaaaagtatttggcttttgtccttggttcctgaagtagctcctgaaggataaaggtgaaagacagtctcttcttacttacaagatacttctttctgtcttttttcccgcacatcacctcaactttccttttctttttttttcccccattcccctacctgatgcaatggtcttaggaccagggctgcaactacatgtgctggaagcaggaatgattcctag

SEQ ID NO: 236264 - DNA, 615 bp, Homo sapiens
tcatatatagtacaggaaaatctattccaaaagctcagcacatcttatagccttaattttttacaaagttaatacatgttcattttaaaaaactggaacaagatagatgataagttaaagatagatgatatatattaatagatggatgatagatagaaatagtagctgcaaagtgtaggctatctactgtatctggcactattgtcattgattactacatttaattatcacaacgaccctgtgaagtagaatattcctgatgttcagattttttttaagcaattttaaggagtaaggtgttatgttactcaaaatcttatagttaacaagttacagagctgcgatgtgatcctttgcattgtgtctcaagatcctgtaatgaatgacaagtatgcaatacagacctggacataattgttattaatagggtcatttcagatcagtccaggcctttttttttttttttttttacaaaagtgagatcatacttatataatactcagcaacttgctctttctcactcagcaatcatagataaccttgcatgtcattctgcatacatctccttaatacattcatgctttggttaacaactttcctgcttagcaacatacc

SEQ ID NO: 236265 - DNA, 361 bp, Homo sapiens
tgggttccagccacaggggccagcccaggcagggctcaaggaacctgctttctgggtgtgcaaggtccttgggtcctggccatctgaaccccctctgagagcctagatccaaacccataagcctttacatggagtccctcagagatgggcagcctgttgccctggaaacactcctcttgtttcctgtccatgaccagggcctgccttatgctgacctgaatgaccatggggactcaggcactcatggatgggtggggaaagcagctgggacctcggttcctatgcaaggcttggtgaggtgcctcctctttggggctccccaatgctaaggggagatagataataaacaggtgtgtcaaca

SEQ ID NO: 236266 - DNA, 684 bp, Homo sapiens
tgctaattcagataggctcccttttcagaactctgttttactgggtaacactttcctcccttgacaagagatctttaaattgcttaggttagccttacagaatgagaaaaggaagacatgaaactacctatgagtatgcagggtctaaggaacaggatgtgagtatcttagggtcaatgaagcaacttaactgcagaatcattacctcctatagaaggaatcttatggtcattcttttctttctccttccttaagctcttaagacactaaacgcagtacaccatagttcaaaaagcactggcattggaaataaagtttaaaacgttcaagtgcaatttgatctaaatgtcagttagaagtgtaattttgggcaagttgtttacctcactgagcctcagttttctcacctgtaaaattgggataatgtccaatctataggtttgggagaattaaaataataaacaaaagcaccttgcttaatattagtgaaatacagtaacaacaacacagaagcaaattccaaaaccctcaatccccaaactggaagctggttccattaccgatagcctccatctatagctaacatatacatcctgcctactatgatttcagcacatttcctcttagatggatattattttattgtgaatatatactgataaagagtaatagaagtattaaaac

SEQ ID NO: 236267 - DNA, 362 bp, Homo sapiens
ccctcctggctgctggttatttttatgatcaccccgcacttgcatgcctccccgatatgtctgccagccctgcggatgtggccgcctgggacgcgggtctaccctgagcagatcgtggtctgggccgtggcttcctttaggggaaaattcaggatcctggctgagcctgggagcgcttcctgcctcctgcccctccacgtgggttgtgtggaagcacccagtcctcgtggagaaacactggacgtgtctctctacaaaagagcttttactgttagtggtctagttttttttttttttttctgtttctcaaaattaatcagtgacatagagagctgccaatcagactgcagtctgtgcggccg

SEQ ID NO: 236268 - DNA, 711 bp, Homo sapiens
tcaagttttgctgccaccatctgaggaataattttatttgattttggcattgatttcactgttccatctttctttcttaaatagtcctactaatatgaataatagttaaactcatttgctttacaaatattaactcattgaattctcaccgtatttctgtaagattgctgctatgcaaatgagagaaccactacatgtattataacctgcccaacatcacacagccagaaaatggctttaatccagactggtttcatgtgtgtcataagctgtcccctcattcctcataagatattatatgtagatctcagatagtttgaagaatttctactcccagcacttgtgtttattggcgcatgtctttactggttcattcttaggactgtaagctccctgaagggagagaatgtggccctttagatattaagccgccgccgggcgcagtggctcatgcctgtaatcccagcactttgggaggacgagacaggtggatcacgaggtcaggagatcgagaccatcctggctaacacggtgaaaccctgtccctactaaaaatacaaaaataagccgggcgtggtggcggttgcctgtagtcccagctactggggaggctgaggcaggagaatggcaggaacccaggaggcggagtttgcagtgatccgaagccgcgccacttcactccagcctgggccacagagcgagactccatct

SEQ ID NO: 236269 - DNA, 419 bp, Homo sapiens
  misc_feature (10)..(10): n is a, c, g, or t
caatgtgtanagagttccagatgttccacatccttgccagtacttgatattgtcaggttttgtttgttaagtagttctaataggtgggaatgggtcatatgataattaaatatttaactttgtagaaactgccaaactgttttccagagcagctgcaccattttgcattctcacctgcaatgtgtaaagagttccagatgttccacatccttgccagtacttgatattgtcaggttttgtttgttaagtagttctaataggtgtgtagtagtatttcattatcttttgattttacatgttttttagtggctaatgatgttaacatcttttcatgtgcttacttgctattcatttaaccaaagaggataaatgcggacgcgtgggtcgacccacgcgtccggttctagatcgcggccgct

SEQ ID NO: 236270 - DNA, 267 bp, Homo sapiens
ccttaggcatttttactttaccacacatttcagaagagaaggaatgaaggggaaccagctaatctacaaatgttcacctacagtagatcaggccaaaaaaaggagagaagaatatgacccaaagcttcttcagaaataagaactgcttattaatagtctaatgcaggggtgtccagtcttttggctttcctgagccacactggaagaagaagaagtgtcttgcgccacacataaaatacactaacactaaagaaagctgatgagcta

SEQ ID NO: 236271 - DNA, 1601 bp, Homo sapiens
agatgatgctgtttttaggagattgtttaaaagttcatgcttgttagtgtttggtacttaaagatacttttgaaaatggtttatttgccatctttttttgtgtgtgtgttgttttttgttttttggttttttgagatggagtctcgctctgttgcccaggctggatggagtgcagtggcgcgatctcggctcactacagcctctgcctccctggttcaagcagttctcctgcctcagcctccaaagtagctgggattacagtcatgtgccactgcacctgcctaattgggaaaacaagttttaaatgacatctcttttttccaccagatgttgctgtagcattacatttatctgctgtgttaaattgttactaatatgcaattatgtaaaataactttttaactgaaaatcttaagtgtagagatagcttactagctaatggttcaattgtaaattcagatgagccactgcgcctggcctatttgccatctttgagctaagctaaccgtacttaagagtttgttttcctttccaaagaaaggaatgtagagagtaatatgttggtaatatgatttatattagtgaagagtattatgaatggagtttctatttacttgttattaaacaagttcaaatgatttttttttttcttttagtgattagctttttcttactgcttcaaatttggtaaaagtgttctatgagatattattttatttattttttggagacggagtctcactctgtcacacaggctggagtgcagtggcacaatcttggctcactgcaacctccgcctcccaggttcaagcagttctgcctgccatagcttcctgaggtcaggagttcaagaccagcctagccaacatagtgaaactctgtctctactaaaaaatacaaaaattagctgggcgtggtggcgggcgcctgtaatcccagatactcgggaggctaaggcaggagaatcacttgaacccgggaggtgaaggttgcagagagccaagatcacaccactgcactccagcctgggtgaccgagcgagactccgtctcaaaaaaaaaaaaaaaaaagctttaaaaagctgaattttagaaatatttctagcagtgtcagtgagttcctcttttaatagtgttttaaagtataaatctggtaacatactgttcttgtagttttttgttagttttgtttttcaggttaattacccaaagcctcatccatcctcaaggtttttaaattttatttttttaaaataaattgtgcattgtatttgtgaatttttaaaatattactgttttatttaaatgccatgctgagcaattgttctctgtacatggtaaccaaaacttagagatttcgatcaattttgatcaatgtttagtaaaccaaaacatgtactgtgtacaacggaaataatatggcatattagccaggcatgatggttgcccaagacagttaaattaaattaagctcaattctgtattttattagggctctgttatgtccttcatctgaaatgtacacatttttggtgtatgcttggtactggagattcatatatgcaaatattctcatgcaagaagttccacagtaacaacagc

SEQ ID NO: 236272 - DNA, 363 bp, Homo sapiens
atattggtgaagatttagaaaaagatcatggatgattgtagacataaatatttaggtagctgcagagcctgttggagagtcaattgtagaggacagcagttatcttgaacctgcagattaatgtgatacaaagtttgtgaaaggtagttcttatatattaagttctgaattactaaagaatatgaaactatatctaaaatgaggaaaatggtgaagaagctgcattgtctataaagaagagattttaaaaaatgaaaaatttaatggaaaatagggacagaaggactagaaatatagaatagttggaagggaatacaaatgcaaaacaaagtaaattgtgaaaagaagaagcactttatatag

SEQ ID NO: 236273 - DNA, 625 bp, Homo sapiens
catttccttgcatggacatgggaattcactgctagcgaggctggtgatgaactccgcaaaagctgggaaatctcgtttgagcaggagcgcccattatcttggccaagctgctgcagctgggctgagtgggtgtggaagtgtgggtggtattcatgtaagttctccagccaagcccaagttcctctgcagacctgtgcatgatggcatatccagatgattccaacctcctgctgtggattcagtcccgcttcataagacttctctgcagtccccagacatcaacaaggaccaataagctatcttttctgtgtcttacctgaattcttgtccctgtgaagcattagcaaattgaaatgtttgttttctaccagcattcgggggtattagttttttttatttaaaaataatcacagtaaagacatcaggaataacacacttgtaggacattcacgaggtacagaagtatgcacaccgaaatctggacttgtcttttcctcttctgtagcctgccagcttctgcctctggaagtaacaactgttaagtttctgcacatctttccagatttattaattgaacaatcatatagcactgacaccgtgacaaagctttgtcaaaggactttgg

SEQ ID NO: 236274 - DNA, 697 bp, Homo sapiens
gtcttactgtcctctaggctggagtacggtggcgtaatctcagctcaccgtagcctctgccgccctggctcaaacaatcctcccacctcagcctccccaacggctgcaactacaggcatgcaccaccacgcccagctaattttttattttttgtagaaatggggttttgccatgttgcccaggctggtcttcaactcctgggctcaagcgatcctcccacctcaacctctcaaagttttgggattacaggcatgagccactgcagtcagccagtaaggatcactcttatccctagtaaaaaggatccgtgatacaaaatggccactgagtcccttctctctccccagtctcttacacattctcataaacagtgattgactcacttattttctgcagaagatagaatggcatgaatgggatggaaacggttcatatgactacttggatatctctcatcctgtgaaccagtctaacaagcaattaccttgaggaatctgaaaataaaatcgtgatatgaattcatgaatcaggaaagaaccgtgtacttgcataattagctttctttagagaatggggaaatacatatctgatacaagacaatttttaaggtgtaatcccatcatttgcaagtcactaagaataaatgtgaaggtgacagtgggaaaaaaaagaaagagaaagagagatgggttggtat

SEQ ID NO: 236275 - DNA, 643 bp, Homo sapiens
gtcttactgtcctctaggctggagtacggtggcgtaatctcagctcaccgtagcctctgccgccctggctcaaacaatcctcccacctcagcctccccaacggctgcaactacaggcatgcaccaccacgcccagctaattttttattttttgtagaaatggggttttgccatgttgcccaggctggtcttcaactcctgggctcaagcgatcctcccacctcaacctctcaaagttttgggattacaggcatgagccactgcagtcagccagtaaggatcactcttatccctagtaaaaaggatccgtgatacaaaatggccactgagtcccttcctgcagaagatagaatggcatgaatgggatggaaacggttcatatgactacttggatatctctcatcctgtgaaccagtctaacaagcaattaccttgaggaatctgaaaataaaatcgtgatatgaattcatgaatcaggaaagaaccgtgtacttgcataattagctttctttagagaatggggaaatacatatctgatacaagacaatttttaaggtgtaatcccatcatttgcaagtcactaagaataaatgtgaaggtgacagtgggaaaaaaaagaaagagaaagagagatgggttggtat

SEQ ID NO: 236276 - DNA, 537 bp, Homo sapiens
cctcatcgccccctcctgggtcctctccgctgctcactgtttcatgacgaatgggacgctggagcccgcggccgagtggtcggtactgctgggcgtgcactcccaggacgggcccctggacggcgcgcacacccgcgcagtggccgccatcgtggtgccggccaactacagccaagtggagctgggcgccgacctggccctgctgcgcctggcctcacccgccagcctgggccccgccgtgtggcctgtctgcctgccccgcgcctcacaccgcttcgtgcacggcaccgcctgctgggccaccggctggggagacgtccaggaggcagatcctctgcctctcccctgggtgctacaggaagtggagctaaggctgctgggcgaggccacctgtcaatgtctctacagccagcccggtcccttcaacctcactctccagatattgccagggatgctgtgtgctggctacccagagggccgcagggacacctgccagggtgactctggggggcccctggtctgtgaggaaggcggccg

SEQ ID NO: 236277 - DNA, 453 bp, Homo sapiens
ccttattgaaaggaatcagtggaaagctataccatatttatgggtgggataattaaaaatcattaatttgatatcctgcatttttctttatagcatttacttctaccagccacactctaaatttgtttacttgcttatcatgtctatcatgtctctgtctcctggaatataagctccaagccgggaacttgttttgtttcttgctctattctcagttcctagatcagtacctttcacatgggagtggattaataaatatttatttaatgaaggatgaatgaacgaatgaatgagaggtattaacactgtttactctgctacaggagtccttggctaaaaagattgagaaccagtaagctatagaacactctatgcaaaacgaaaaccacccatacttttcacatggaagcataagacagttttaactaaataaatgaaaacttttcttcaaaa

SEQ ID NO: 236278 - DNA, 476 bp, Homo sapiens
tcgaagaatggaggagcttcacaattcaccatcttagccaccacttaccatatgtttagttaaaacattgaggtggatataaaactgtgttaaatgtgaaagactcgggagccagtacatctcctcttaagcctaacaaggaaacccaatatagggagacaagccaataggatgaatgtcagatgcagtaggagggtgatgcacacagcaaaaatgaagacattcaacatagggagaaagcccatccttacggtcaattacagaaatacagcagacttatatcaaggttctcttctgctttgctttaatagaaattacaacatttaatactagaaagagcataaggatctagtgtaatgttggtgccatgggaaactgatacaatgttttggaactcagtaaaattatatttagcaaaagtgatttgcatattctttacccagtatggttaatctacactaaagaaagaactcaac

SEQ ID NO: 236279 - DNA, 445 bp, Homo sapiens
aacctcctctcctaaactcctcgtgtgtgtccatgtcctaaattttcctggcatgagatgatgaaccccaggtattgatttaccccagacaatgtagccacttcatcatcgcatctccttctcttaatctgatcttcctcctttctttataagggtccttgtgatttcactgggcctacactaggtaatccaagataatctcccatctcaaagtcttcatcacattggaaaatgccttttgccatggagggtaatatattcacagattctggggattaggaagtagacaattttgggaggaggcaatatatggactgagtcccaggaactcgcatttctaacaagcccccaggtgatgctggctcaaggaccacactctgagaaccactggggtagactaactactgtaacaagtagccccaaaatatataatggcttaaacaca

SEQ ID NO: 236280 - DNA, 413 bp, Homo sapiens
ccttccgggatgtatgtgcagcttttaggaattgaaaccaccagctcttggaaacttgtgccaggcttcagggtgggagaggcagttttagagctgcagccgccaagccaagccaaatggccccatcatctctcgcaagagcaggagagtacctgggggcagaggccatagttgtacctttctaggcaaagggtcagtgtctgtagtgtccatatgggcagtggggctcggggggaagcaggcccaggggtctgtttccaatgacctcctcaaaagtcagaactggaaggcaaaaccccgtatagactgggtgcacctgtaatcccagcatgttgggaggctgaggtgggaggattgcttgaggccagagtttgagaccagtcttggcaatgtagcaagacccctgtctctac

SEQ ID NO: 236281 - DNA, 453 bp, Homo sapiens
ttctacaaacaccaaatttgctgtgaaatttacatttcagaatctctcaagaaatagtgcccagcagcaattcttactgttttcactttttcccccgtcttcacatttttatgtttgacagtgccaacatattttctcaacatttattctgaaaggaatgtactttgtgaattccttaaatgcaggatgattctgattttattggcctaatagctcctccttatgcgtgggttagtataacagaatgcatttgagacctgctatactattttaaattaagacatttcatgtagcacatagtattttaaaatgaagaacattgtcttggaaagcacacaggctaactgctattttcttgatgcaagaaatatttaaattctctgtgcttcagtctatacaatcagttttccagggatgctgtgtatataaaacgagggagtgtattaagagtat

SEQ ID NO: 236282 - DNA, 371 bp, Homo sapiens
gcggtcagagcggacaccgaggccgaggaggcgctgagagcgagcgagggctgctagcacattgtcacctctcaataagccactcagtctatggtaatttgtttttgcagctcgaagtaaaacaagttgtttcagtattaattcttttttaattgtcataggaaacccaaatctaaacagaaagttacagcttaggctgggtgcggtggcttatgcctgtaatcctagcattttgggaggccaaggtgggcagatcacctgaggtcaggagtttgagaccagcctggccaacatagtgaaaccccatctctactaaaaatacaaaaattagcctggccaacatggcgaaaccccgtctctactaaaaatac

SEQ ID NO: 236283 - DNA, 493 bp, Homo sapiens
atttaatattctgttgtgtgcataccatggtttatttaactagttttctggtcatttaggtagtttccgcttttacaaatagcactatgatgtcaaatctatttgtagggtaaattcccagaaatggaattactggactgattttgatagatgttgtcagctattgtatttctctcattgtgagtgaaggggaataccttttttttgtttaagagccttttggctgggcacggtggctcacgcctgtaaccccagcactttgggaggccgaggcgggtggatcacgaggtcaggagtttgagaccagcctgaccaacatggtgaaaccccatttctactaaaaatacaaaattagctgggcggggtggcacatgcctgtaatcccagctacttgggaggctgaggcaggagaattgcttgaggcggaggttgtggtgagccaagatggcgccattgcactgcagcctgggcaacaagagcaaaactttgtctc

SEQ ID NO: 236284 - DNA, 231 bp, Homo sapiens
ggatttcaacatgttggccaggctggtcttgaactcctggcctcaagtgatccacccacttcagcctcccgaagtgctgggattacagatgtgagccaccatgcccagccatttcctcatttcttgaaagtaatgatggatattatatgccctaccttcctcacagtttgcttgctgctcaagtgaaataatggttgtgaaacttcccctaagaaggcttgagagcttaat

SEQ ID NO: 236285 - DNA, 532 bp, Homo sapiens
aagggttcaccacttcctgtgagagggaaacggaccagctgggctctgagctccccacccagcctcagccagggtccattttatattgtgggcttcagacatgcctttgtttgaaagcagttctgctgctttaaaatgtttgataaccattgaactaatctacccacctccctttttaaaaaaaaaaggaaaacttttttttaagctgttttttttgttttttgtttttttttaaactgtaaaaacaatacttaggtctggctcagtgtgcctgtaattccaacactgagaggctgaggtaggaggattgcttgaggctagaatttcgagactagcctctgggcaacatagacagacctcatctctacaaaaaattttaaaaattatccgggtgtggtacgtgtctgtagttccagctatgaaggactgagacgggaggattgcttgagccaaggaattcgaagttagagtgagctatgtttatgcctctgtactctaggttgggtaacagagtaggaccctgtctctaaaa

SEQ ID NO: 236286 - DNA, 543 bp, Homo sapiens
accacatgtgaagacgccgcacagccttcctggaggctgtgtgccccagccctgccatcagctgcctgctcccgctcacgtctccccagttcacctgcctccagtgctggtttatagaacatttgtgtgacttcttcagatgatctgtaaacagaggcagtctaggtggtgttttgttttctaatttcctttatggaaaggagagtttgcatttcccttgtgattttgacacacattgtattatgaaatattttcagtgtttgtcaaactcggtgtggggtaagcgcatcccaccaagataggcgcttacaggcagccaaggaacccaccgtgtggtttccttttaggttggatttcctgtcttacagcctcatgttcctagttggaaattaaggttgagactgtagccaggtgtgcatttattcatccgccagctctggagaggtctgctttagaggccctgcggccccagaagtcatgcctctgagtccgtggttcttagctgagggtggctttgcagtgtccggagatgattctggttgt

SEQ ID NO: 236287 - DNA, 482 bp, Homo sapiens
aaaccagcatagtagagacccaactgctgaaatttatttcatatgagcatttggagttattctttctatattttatgaaagtaaaaagttatttatctctctccttcttttccccccatgaaatacttccatcctatcaataccaatgcccaaactacagaacaagtaaacaaaaactcctaaaatctagaaaattaaaatgaaattcaggtagttgtactctgctatgtctgctaccattttctggctgaataatctttacttatataatattccgtataatgtagcttcttcatctccatttaccctgattgaacttcctgaaatgaagatatgccaaaaatccttttcaaaaaggctcatttaaataaagatttgtttagatgaaaagaaatgtctcttcaaacactgagatatactctggcactgcatgtcaacgatcacatgttgtgcattaaaaagaaaaattaactatgcaagta

SEQ ID NO: 236288 - DNA, 463 bp, Homo sapiens
ctccctgggaagcagcgctgagtcagggttacctggctccactgtgcccctagcgaggtgaaagttcgcacaatgacatgggctctctgttgaggataaggaggctacagcccaaggagcttgtgcaccgcaggcagagccactcaggtcatcttccagagcgggatgtctgactccagagcccgccagcccacactgctctcctgaggactgggtttctctggcctgagtctgcctgagtctacaggaagaaccctgctggcaccccagtaagcccctctagaccttggagctctaactgctctcagagctcacttttcagttagcctgtaaggcaggggtgtccaatcttttggcttcccttggccacattggaaggagaattggcttgtgtcacacataaaatacactaacactaacgatagctgatgagctaaaaacaattaaaaatcacaaactcata

SEQ ID NO: 236289 - DNA, 456 bp, Homo sapiens
acatgtcttatacaaattttctgtatattagttgtttatagatttgccaaaatcgatttggctgcttctctggggaaggggaggagggggtgttgcatgtgtaaatctggctatcttgctgggaatggttctaggtaatgtagatcgtgcaaattaaaatgctttctttcatttattccttcgacattgagtgcctagtctgttccaggtgttaatactattctgggcactgggggatacagcagtgagcaaaatggccaaagtccctgccttcattaagctttcattctagtaaatgagatagacaataaaaaagataaagtactttgggccaggcacgatggctaacacctgtgatctcaacacttggggagtccagcgttggtggattgcttgaacccaggagtttgagaccagcctaggcaatatagtgagaccttgtctctactaaataga

SEQ ID NO: 236290 - DNA, 544 bp, Homo sapiens
caggctggcacgggctctagcgctaaagcaccctagagaaactgtcagagaatgtcccctttgctaattcgtctctgaaagacgcctgccgctgccgccaactgcgaactgggcgcagggactgcgacagcagtgaaagagaacacctgatgcgttcatctgcgctacggaaggacacgtctgaattcctccacggagcacactctgcactcggtttatgtatcagaaaaaggaaatgccctcgtgccctgactcctggccttcttggagcccggaacagaccaagaggaaggggcatcacacattgcctgacagtggtgtgcgtccacacagcacaagctgaacgggaaatgacacagtcattagacagaggagacagtactcaagctggaaccgcagccaacactgagatgataaaaggaagtcttcctttgtttcccctgagtcaggaacgtggaaagagaaatctcaggggaggggttaggtttttttgttttgttttgttttttaaagaacagtttcacaaattatcgataaatatttg

SEQ ID NO: 236291 - DNA, 402 bp, Homo sapiens
tcttatgacactataatcaagactacattactggattccaccctaccaggcctttgtatctaaattatttcaatacaaattctgttattttagtgcattgccactttattaaggaggtagctggaaagcttatgcatttcagaagaaaacagtagccatgtcccttcagtgaaataatgtaggcaaatcatttacatcacagtcattcaaaaaacattagttccctttcttccacattctgtattctattcaagtttaacttataaaatgatccaagtagtattaataataagaaaaaatatttgaccttctagaaaggtaaggaagtatcttaactcacctaatattttttaatctactgttggatgttataataaacacacgcgcacacacacacacaca

SEQ ID NO: 236292 - DNA, 693 bp, Homo sapiens
tgcctcacaattttatgtatagcaaaactgtcaagaggctgtccaagttacgagagtatcaacagtatcatccaagcctgacctgcgtcatggaaggaaaggacatagaagattggagctgctgcccaaccccttggacttcatttcagtctagttgctactttatttctactgggatgcaatcttggactaagagtcaaaagaactgttctgtgatgggggctgatctggtggtgatcaacaccagggaagaacaggatttcatcattcagaatctgaaaagaaattcttcttattttctggggctgtcagatccagggggtcggcgacattggcaatgggttgaccagacaccatacaatgaaaatgtcacgtgagtatagaatgagattctggcactcaggtgaacccaataaccttgatgagcgttgtgcgataataaatttccgttcttcagaagaatggggctggaatgacattcactgtcatgtacctcagaagtcaatttgcaagatgaagaagatctacatataaatgaaatattctccctggaaatgtgtttgggttggcatccaccgttgtagaaagctaaattgattttttaatttatgtgtaagttttgtacaaggaatgcccctaaaatgtttcagcaggctgtcacctattacacttatgatataatccattcacaca

SEQ ID NO: 236293 - DNA, 476 bp, Homo sapiens
tgcctcacaattttatgtatagcaaaactgtcaagaggctgtccaagttacgagagtatcaacagtatcatccaagcctgacctgcgtcatggaaggaaaggacatagaagattggagctgctgcccaaccccttggacttcatttcagtctagttgctactttatttctactgggatgcaatcttggactaagagtcaaaagaactgttctgtgatgggggctgatctggtggtgatcaacaccagggaagaacaggatttcatcattcagaatctgaaaagaaattcttcttattttctggggctgtcagatccagggggtcggcgacattggcaatgggttgaccagacaccatacaatgaaaatgtcacgtgagtatagaatgaggtaaaggacactgggtcctgatcatgtaggggtttagggtgttccatcagctattaagcaaacaaacaataaaacccacaacacttt

SEQ ID NO: 236294 - DNA, 856 bp, Homo sapiens
cggctacccattacaacagctccagttacaacagccccagttacaacagctccagttacaacagctccagttacaacagctccagttacaacagctccagttacaacagctccagttacaacagccccagttacaacagctccagttacaacagctccagttacaacagctgaaaagagacaaactaatgcacaattacagctagggattaatttaacatccctccttagtaacagaactagtatatacacattaatcagtaagaatatagaactgaaaatcataagccgactggattaaattgacatttatagaacacaccaccccaaactagcagaatgtatctcctgaagtacacatggaacattcagcatgatcatatctttgctcataaacacacctgatttaaattgacaaacttggatctagtatgataaactgatggctatagacaaaatcagcaccttatttatccccaaagatgttaagtcacttaaccttgatgtgaatacggtggccaaattagaagcggacaattagaatataaaagaaaatgctcaagaattaaatggtggccaggcacagtaactcctgcctgcaatcccagtactttgggaggctcgcttgagctcagggttttgagtccagcctgggcaacacacagggagaccctgtctccacaaaatgttagccagacatggtggtgtgcacctgtagtcctcgctacttggaaggcttaggtggcaggatggattgagcccaggaggttgaaactgcagtgagctgattgtgcccagcctgggcaacaaagcaagaccccatctcaagaaaaataaattaaaaaaaactaaaaaaa

SEQ ID NO: 236295 - DNA, 434 bp, Homo sapiens
agaaaatatatctttgaatcaggtgataatagtgtagaaggaatttgattaaatgcatacaaccaatatgatttctagcattaaattgcaatgtatattgtgttagtgaaaaaatcattagtaaaaatatagtccagtggtgtatcctgcttgaatagagcatgctgggattacaggcgtgaaccaccacatccactcccttgttttattaaagcgagaaaaatagactcaaaacataataactgaagtatgtctgatgtttttgctactacctcatcttgctattgaagccactgttacctggccaggcatggtggctcacgcctataatcccagcactttaggaagtcaaggcaggagaagcgtttgagctcgggagtttgagttcagcctggacaacatagcaaggccctgtctctagtcccaaaaaaaaa

SEQ ID NO: 236296 - DNA, 358 bp, Homo sapiens
aaagtaatttttttttttgtaaaaagagtttatgggcaatgctggagtttagcctcttgggaaatgatttaaatactggcaatgttttactagatgctaaagtcaagaaaattttattattgagggtgaaatggcatgataatataaaggtaacaagttatccttatggtaattaaactgtattgcctagaaattccaatgaaatgcttaatgagataatgcccaaaataaattcatgtttgaaagagtgtattatagcaacacaaggcagtgttacttgtggtaaggtaggacctatgctaaataaactaatgacctaaacataatgagatgcaggttagctaaaaagctctggctc

SEQ ID NO: 236297 - DNA, 466 bp, Homo sapiens
ctgcctggcgtgctgcagtccttggaagcctggagagggcacgagggcaggccaggagagccgggatggctccaggagcaggtggacctcgagccacgcctcggaggctggtgggaggagcaggggtcagcagggttgggaaaaggctgccccaggtgggaagacccatgggtgaaaagaccgggctccacagacggctcacggagcaggtgcctccatatgtggctggagcccccagcgagggaagaggccgctgtgctgggggtttgtacctgggcacgtgggcacattggcactatttagaagatcatgttagaggcaggtacagtggctcatgtctataatcctagcatttcggggggctgaggcagaaggatcacttcagtgctggaggttgagacaggagtgagccatgattgtgtcacagtagcctgggcaacagagcaagaccccatctctaatcaaa

SEQ ID NO: 236298 - DNA, 287 bp, Homo sapiens
caggcgtggtggctcacgcctggaatcccagcacttgaggccaggagttccagagcagcctgggcaacgcagtgagagaccccatctctacaaaaaaaaaaaaagaaagaaagaaaatgagagatccaggtttaaaaattcataaacaccacaaggaaacaatacactatgagacccagcagaagcaacagattgactctagacccagatactagaattatcagagagaatataaagtaacagtgttttatatatctaaagaaataaaagagatttctggaaaaaaa

SEQ ID NO: 236299 - DNA, 1142 bp, Homo sapiens
tggggctcccaagtactctaacctcaaggtgcatgccctccactcactaattggctcctctggctgtgatcgagctccaaaagggaaggaggctaattcaaatgggatggccccaaaataagaggaatagtgtgcatttaaaccaggatatgggctatacctgcttacagtaccctttatgcaatctccagttcattaactctagtagatattgtgaagatactatcaaaaaaaggttatgttcccccaaattagggaagccctaagggattccgtatctcctttttgtacagagtttgttagaaaatcagatactggtctgagaaaaatgctgattcagatggtcaagagactaaaaaaaagtactttaaaacatcagaatgaaatcactgaaggcaatccttagctttatgatgtgctgtactcctggacaagatggtgagggcatgtggcaaagcatggcagggaattctttcaaaagtggaatccaggaagaaaattccttgggaaactttggactggattctcaacaaacccttcagagagacttaaagccggtaaaagaccttttgcaaaagtgatccggggggcctccactttgtttctctggatatttctctgttgaaatataggtgtcaagcacgtcccattttagatgctcttcagacttcaaaacattaccttcctgctttcagggagccatttcatcagcttttgtactgtgtattcactgcagaccctgctgttatgcaaggtaccaccatggctaaaaattcacaagacgattcttagttgcactgattttttttttatttgatctttcacaatgttgctgcttccgtttcaaaaacgtctcaaagctttgatttgattgcagctggattcaaggatacccaaagccaagtttgatcctgaattccccaaatcaaaagtatttcatttcagatgtatgttctatacctggccataataatgaacagcaaccattactggagcatgcttttgatttttttttcattaacagtcatttttatgatttggaaacataattagaagattcctattccagactacaaatcaatggatttgattctactacacatttgccaataaagagcaatggtatcaaatgaagcatttga

SEQ ID NO: 236300 - DNA, 652 bp, Homo sapiens
ttaccacaaatgatctactcattcaaatataagtagcccacaaataccatgttaaactttctaaatttgaattgtttaaaaaagcaaagttatagaaaatgacatttatgacccattatcagaagctttagatccaatattagaatattagaggcttttgtgctaaactcttttctttcttataaattctagcctttatttatctattttaggagggcatgtggcaaagcatggcagggaattctttcaaaagtggaatccaggaagaaaattccttgggaaactttggactggattctcaacaaacccttcagagagacttaaagccggtaaaagaccttttgcaaaagtgatccggggggcctccactttgtttctctggatatttctctgttgaaatataggtgtcaagcacgtcccattttagatgctcttcagacttcaaaacattaccttcctgctttcagggagccatttcatcagcttttgtactgtgtattcactgcagaccctgctgttatgcaaggtaccaccatggctaaaaattcacaagacgattcttagttgcactgattttttttttatttgatctttcacaatgttgctgcttccgtttcaaaaacgtctcaaagctttgatttgattgcagctg

SEQ ID NO: 236301 - DNA, 3367 bp, Homo sapiens
  misc_feature (488)..(488): n is a, c, g, or t
  misc_feature (491)..(491): n is a, c, g, or t
  misc_feature (962)..(962): n is a, c, g, or t
gcaggtgccctgtgctcatctctgcctgggaatggggaggaacagatcttgggggacattggggagtgggcggacaagcactccagggcatcagtccgggccgctgaccaggcggagggcagtgtcccaattatacaggcgttacctccttttctccatctcagcatctgatccctccctccgcagtggaacccaggctcctgatatccatctgggtgagccagccagagggaccggctgtgtcagaggcaagcaaacaagtattagagtgcaagactgtgggcggagagaggaagcccgagccgccagcagggagcttcggagagagaaagcccaggaacatcccagagagagctgggcccatcctcagccctacccagccccgcagcccctagccctccgcccagaaacccagccctgtccggcgtgccgctcttctcctccaggccggctgctgttgcggccagcgttgccggggcatcccttcntcnttcccatcatggcagtgtaccgcctgtgtgtgaccactggtccctacctgagggccggcacactggacaacatctctgtcacactggtgggcacgtgtggtgaaagccccaagcagcggctagatcgaatgggcagggacttcgcccctggatcggtacagaagtacaaggtgcgttgcacagcggagctgggtgagctcttgctgctgcgtgtacacaaggagcgctacgctttcttccgcaaggactcttggtactgtagccgcatctgtgtcaccgaaccggatggtagtgtatcccacttcccctgctatcagtggattgaaggctactgcaccgtggagctgaggccaggaacagcaagaactatttgtcaggactctcttcccctcctcctggatcacaggacacgggagctccgggcccgacaagaatgctaccgctggaagatctatgcccctggcttccccngcatggtagacgtcaacagctttcaggagatggagtcagacaagaaatttgccttgacaaagacgacaacttgtgtagaccagggtgacagcagtgggaatcggtacctgcccggcttccccatgaaaattgacatcccatccctgatgtacatggagcccaatgttcgatactcagccaccaagacgatctcgctgctcttcaatgccatccctgcgtccttgggaatgaagcttcgagggctgttggatcgcaagggctcctggaagaagctggatgacatgcagaacatcttctggtgccataagaccttcacgacaaagtatgtcacagagcactggtgtgaagatcacttctttgggtaccagtacctgaatggtgtcaatcccgtcatgctccactgcatctctagcttgcccagcaagctgcctgtcaccaatgacatggtggcccccttgctgggacaggacacatgcctgcagacagagctagagagggggaacatcttcctagcggactactggatcctggcggaggcccccacccactgcctaaacggccgccagcagtacgtggccgccccactgtgcctgctgtggctcagcccccagggggcgctggtgcccttggccatccagctcagccagacccccgggcctgacagccccatcttcctgcccactgactccgaatgggactggctgctggccaagacgtgggtgcgcaactctgagttcctggtgcacgaaaacaacacgcactttctgtgcacgcatttgctgtgcgaggccttcgccatggccacgctgcgccagctgccgctctgccaccccatctacaagctcctactcccccacactcgatacacgctgcaggtgaacaccatcgcgagggccacgctgctcaaccccgagggcctcgtggaccaggtcacgtccatcgggaggcaaggcctcatctacctcatgagcacgggcctggcccacttcacctacaccaatttctgccttccggacagcctgcgggcccgcggcgtcctggctatccccaactaccactaccgagacgacggcctgaagatctgggcggccattgagagctttgtctcagaaatcgtgggctactattatcccagtgacgcatctgtgcagcaggattcggagctgcaggcctggactggcgagatttttgctcaggcgttcctgggccgggaaagctcaggtttcccaagccggctgtgcaccccaggagagatggtgaagttcctcactgcaatcatcttcaattgctctgcccagcacgctgctgtcaacagtgggcagcatgactttggggcctggatgcccaatgctccatcatccatgaggcagcccccaccccagaccaaggggaccaccaccctgaagacttacctagacaccctccctgaagtgaacatcagctgtaacaacctcctcctcttctggttggttagccaagaacccaaggaccagaggcccctgggcacctacccagatgagcacttcacagaggaggccccgaggcggagcatcgccgccttccagagccgcctggcccagatctcaagggacatccaggagcggaaccagggtctggcactgccctacacctacctggaccctcccctcattgagaacagcgtctccatctaaccacccccaaataccacccaagaagaaagaaaggtccaagcatgaggaggaccagttcctcaggtcctccagacccttccatcctccctgttctcagttcacctgaaccttctcttctgcacatggagacttttgcagccaagatggctctgacatcatacaaactgggccctgagctgtgagagaccagcacagcagcgtccaggttaaaagccgctgaccaaagtccaatgcacaatagcccctccgaaaggaaggaaccgcttcacttcttgccccacttggggcagcctcttgttccagcctcttggaatgcccagcttgggtttctgagcttttctccctcatcctccccaatccccaaactccttctcctaccatgcctttctacgttctctttcttccaagcctagagccaccagcccagcttccttctctggaaaagcctggaaactgggcacagaaggactgtgtgcctgggtctaacatgtggtcccctttgtccctagcacctttaaggggaggggaagaattggagggcagcttgcctggacccctaacggctgttctcaggaacaggttcccaggcctggggtgtttgtggagatctgtctttctccaaagatttcatccaactcccctttcatcccactccctttcatcccatttttttctttctgtccttgagcccagtgagttcaataaaaaccaaaatatttggctctcaaaaaa

SEQ ID NO: 236302 - DNA, 2680 bp, Homo sapiens
  misc_feature (488)..(488): n is a, c, g, or t
  misc_feature (491)..(491): n is a, c, g, or t
  misc_feature (962)..(962): n is a, c, g, or t
gcaggtgccctgtgctcatctctgcctgggaatggggaggaacagatcttgggggacattggggagtgggcggacaagcactccagggcatcagtccgggccgctgaccaggcggagggcagtgtcccaattatacaggcgttacctccttttctccatctcagcatctgatccctccctccgcagtggaacccaggctcctgatatccatctgggtgagccagccagagggaccggctgtgtcagaggcaagcaaacaagtattagagtgcaagactgtgggcggagagaggaagcccgagccgccagcagggagcttcggagagagaaagcccaggaacatcccagagagagctgggcccatcctcagccctacccagccccgcagcccctagccctccgcccagaaacccagccctgtccggcgtgccgctcttctcctccaggccggctgctgttgcggccagcgttgccggggcatcccttcntcnttcccatcatggcagtgtaccgcctgtgtgtgaccactggtccctacctgagggccggcacactggacaacatctctgtcacactggtgggcacgtgtggtgaaagccccaagcagcggctagatcgaatgggcagggacttcgcccctggatcggtacagaagtacaaggtgcgttgcacagcggagctgggtgagctcttgctgctgcgtgtacacaaggagcgctacgctttcttccgcaaggactcttggtactgtagccgcatctgtgtcaccgaaccggatggtagtgtatcccacttcccctgctatcagtggattgaaggctactgcaccgtggagctgaggccaggaacagcaagaactatttgtcaggactctcttcccctcctcctggatcacaggacacgggagctccgggcccgacaagaatgctaccgctggaagatctatgcccctggcttccccngcatggtagacgtcaacagctttcaggagatggagtcagacaagaaatttgccttgacaaagacgacaacttgtgtagaccagggtgacagcagtgggaatcggtacctgcccggcttccccatgaaaattgacatcccatccctgatgtacatggagcccaatgttcgatactcagccaccaagacgatctcgctgctcttcaatgccatccctgcgtccttgggaatgaagcttcgagggctgttggatcgcaagggctcctggaagaagctggatgacatgcagaacatcttctggtgccataagaccttcacgacaaagtatgtcacagagcactggtgtgaagatcacttctttgggtaccagtacctgaatggtgtcaatcccgtcatgctccactgcatctctagcttgcccagcaagctgcctgtcaccaatgacatggtggcccccttgctgggacaggacacatgcctgcagacagagctagagagggggaacatcttcctagcggactactggatcctggcggaggcccccacccactgcctaaacggccgccagcagtacgtggccgccccactgtgcctgctgtggctcagcccccagggggcgctggtgcccttggccatccagctcagccagacccccgggcctgacagccccatcttcctgcccactgactccgaatgggactggctgctggccaagacgtgggtgcgcaactctgagttcctggtgcacgaaaacaacacgcactttctgtgcacgcatttgctgtgcgaggccttcgccatggccacgctgcgccagctgccgctctgccaccccatctacaagctcctactcccccacactcgatacacgctgcaggtgaacaccatcgcgagggccacgctgctcaaccccgagggcctcgtggaccaggtcacgtccatcgggaggcaaggcctcatctacctcatgagcacgggcctggcccacttcacctacaccaatttctgccttccggacagcctgcgggcccgcggcgtcctggctatccccaactaccactaccgagacgacggcctgaagatctgggcggccattgagagctttgtctcagaaatcgtgggctactattatcccagtgacgcatctgtgcagcaggattcggagctgcaggcctggactggcgagatttttgctcaggcgttcctgggccgggaaagctcaggtttcccaagccggctgtgcaccccaggagagatggtgaagttcctcactgcaatcatcttcaattgctctgcccagcacgctgctgtcaacagtgggcaggacggcagaggtggaatcagggatggtgaagagggaggtgatactccccttctggccaactgacccaactgggatgggggtctccacagcatgactttggggcctggatgcccaatgctccatcatccatgaggcagcccccaccccagaccaaggggaccaccaccctgaagacttacctagacaccctccctgaagtgaacatcacttgcctggacccctaacggctgttctcaggaacaggttcccaggcctggggtgtttgtggagatctgtctttctccaaagatttcatccaactcccctttcatcccactccctttcatcccatttttttctttctgtccttgagcccagtgagttcaataaaaaccaaaatatttggctctcaaaaaa

SEQ ID NO: 236303 - DNA, 964 bp, Homo sapiens
  misc_feature (50)..(50): n is a, c, g, or t
cagccacactttcaatcacacgaacacacatcccgccccgaagactttgngaaggcccctgggcacctacccagatgagcacttcacagaggaggccccgaggcggagcatcgccgccttccagagccgcctggcccagatctcaagggacatccaggagcggaaccagggtctggcactgccctacacctacctggaccctcccctcattgagaacagcgtctccatctaaccacccccaaataccacccaagaagaaagaaaggtccaagcatgaggaggaccagttcctcaggtcctccagacccttccatcctccctgttctcagttcacctgaaccttctcttctgcacatggagacttttgcagccaagatggctctgacatcatacaaactgggccctgagctgtgagagaccagcacagcagcgtccaggttaaaagccgctgaccaaagtccaatgcacaatagcccctccgaaaggaaggaaccgcttcacttcttgccccacttggggcagcctcttgttccagcctcttggaatgcccagcttgggtttctgagcttttctccctcatcctccccaatccccaaactccttctcctaccatgcctttctacgttctctttcttccaagcctagagccaccagcccagcttccttctctggaaaagcctggaaactgggcacagaaggactgtgtgcctgggtctaacatgtggtcccctttgtccctagcacctttaaggggaggggaagaattggagggcagcttgcctggacccctaacggctgttctcaggaacaggttcccaggcctggggtgtttgtggagatctgtctttctccaaagatttcatccaactcccctttcatcccactccctttcatcccatttttttctttctgtccttgagcccagtgagttcaataaaaaccaaaatatttggctctcaaaaaa

SEQ ID NO: 236304 - DNA, 429 bp, Homo sapiens
tctaaaagaaaaaatcaacgtgagttagatagcatttgtgatgatctgaagaaatatgtgacgtttatcagaattaaacatggctcaaattaaactaacactagagtttgttctcagttacgtgaaacacccacaatccttcaaggttgtccaaaataagcagagtgcttactgtgtgagcgcacccaaagctatttttgtaacataattcatatttatgaagtactttgtatactaaataggaaaatatgtactccttaatatgtatttaatatgcctgacttgttttcctgatcacagtgaatttatcagtaagtataaatgtagacagaaagaaatatactaaactgaaacaagctggtgtgaacagaaatattctggactttgtgatcaggtgtaacttaaaaacaaaaaaattttaaaacaaac

SEQ ID NO: 236305 - DNA, 1168 bp, Homo sapiens
ttattgggaatagtcagcaaggtggtgtgccttgcccggcagacgcaggtgagggtggacaagagttgaatttaacctgcttggggtttggcaggtgcgtacacctatgggttcgagtggcaagggagtttagaccgaataattaaaatgacggagcatggactttatgctgaggaagcagagaaaccgatggcatagggatgggtggggggcagtgaaaaggcgggtaggatcaacggattgttgtgtccctatgggctgtcgaatgctgcggctggagtgctgacttttattttgtagatttcagcatatatacatatacgctgaaattatatattacatgctatatatgttattatatgttatatattatctgcatatatacacacacatattcccagaggaagttaaacttaacctggtctcatatatactacacatataaaatatgtatatacacatatgtatgtatacacacatagacatgtatacacacatatatacatatgtatatataaaaatatatacagatattttaaatttcatatatatttcccgtcccctccaagagccctttctgacccctgacccccttctttagcagaacccaaatggtttccgtgggtggaacatctccctgcgtttctgaggacatcagcgcacgtggtttctttcccggccgccgcagcccacttggtcggtttcctcctagttttggcctggtgccctccccgcggggctctgccgggtctgcgggtcggggccgtccgtcctttcaccctggaggagagaaagcagagatgggaagcttgcgcgctcgggcggggccagtccaccgagcccgacgaggctcggacggccccggaggtgggcgcgcctcggccgttcctccgcggcgggggctgctccggacgccccacgtctcgggcctgggattcagcctgtgagtgggggcggccggggcggcggctgccgggaggggctcattgttctgccggccgctttgacttcattttctgcttttcatcccaggccggacggtttagaatgcaaatgcgggctgcttttgtagctgtgcgtttgtctgggagccgtgcgtttgtctggggtgagatcacagcaaaagggttttgtttggctttttaaattcttctggggagagcaaaag

SEQ ID NO: 236306 - DNA, 653 bp, Homo sapiens
cccaaccccaccccctctacctccacccccagggagtccttttattcttaggcaggttcctgagtgcctcttatacttcccccgaatcccatcaacctcccagcttaaaccctcctctcccaatattccaatgttatagtaaaccatttttctatcaaaatagaatagatggaaatacattcagagtatatctttgcttctctctttcaggatctggcagagctttgcttccacctgtctaggtattgggaattaaactggttcacttttttccattaccagaaatgtactaactttagaccaacataataaaagctctgatttctgacaaaggcccctagataaatgcatgttatgtttaaaaagctgtgtctcaattatacccagactgatttttaaatataaatgatgttcctaagatattacttaaataatttttaaaaatattgataaccagttcttttcatcaatcatgacattctcgattttaaacaagtctttttttgtgtgtttgtttttgagacggagtcttactctgtcacgcaggctggagtgcagtggtgcaatatcagctcactgcaacctccgcctcccggaatcgggcgattcttgcgcgtcaggctccagagcaactaggattacaggcaagtgcc

SEQ ID NO: 236307 - DNA, 599 bp, Homo sapiens
cccaaccccaccccctctacctccacccccagggagtccttttattcttaggcaggttcctgagtgcctcttatacttcccccgaatcccatcaacctcccagcttaaaccctcctctcccaatattccaatgttatagtaaaccatttttctatcaaaatagaatagatggaaatacattcagagtatatctttgcttctctctttcaggatctgttccattaccagaaatgtactaactttagaccaacataataaaagctctgatttctgacaaaggcccctagataaatgcatgttatgtttaaaaagctgtgtctcaattatacccagactgatttttaaatataaatgatgttcctaagatattacttaaataatttttaaaaatattgataaccagttcttttcatcaatcatgacattctcgattttaaacaagtctttttttgtgtgtttgtttttgagacggagtcttactctgtcacgcaggctggagtgcagtggtgcaatatcagctcactgcaacctccgcctcccggaatcgggcgattcttgcgcgtcaggctccagagcaactaggattacaggcaagtgcc

SEQ ID NO: 236308 - DNA, 492 bp, Homo sapiens
tcttctgctaatcccatccagtgtattttcaatctcacatgctacagtttccatctctagaaggccagttgggtcttttatattgtccttgtctcccgtctagctttttgcacacagaatatagttattccgtatgttttaatgtttgtatctaccaattatctgtgccagttctgggttagttttgattgattttcccccttcatttttggtcatatttttattactgtattttgtctcgttgcattggatatttttgtattccttaaaaacttcccatgctttattctgggatacagttaagttacttggaaacagttttatcttttgtggtcttgaatttattatttgttaggcagccctacaattcacagtctaggactaattattccatgcttttgaggcaagatgtctcctgtactcaacagtgtcccatgaattgagagtttcaaccttgccttgtgggaacaggcacattccctggccttgtgt

SEQ ID NO: 236309 - DNA, 206 bp, Homo sapiens
ctgtctccagagctccatgtgattactagaatggccatgtcattgagggggaaggagaaatgtgctgctccttggagttccataacagagccaagctgaggcctctgctagttacttgtcatgtgatcctggagaaactccttacatttttttatgtctcagttccttgatctgtgcaataaccgtatgtcccatatatccaaaat

SEQ ID NO: 236310 - DNA, 444 bp, Homo sapiens
atgacaatttcaattatactttcagttgaaagatttttaaaagtaaaacgttagcattggatctggagaattttgctaactgagataattaatagctgggctggtggtgatagggtttgtgtgtttttgagagagagagagagagagagaggaagagacagacagagatggaaatataaagatcattcttccactgttatatgtgttttttcccctttaaaggaataggcatttgaatttcctctctgttgtcaggtgttctgacttgggtacatcagctcttactgagtgcttgaatgttcaggatttctatgacatatctcaatctaatgaaaatctgactgtgaaatgtctatatatctccccaggcttcgttttcttggttaaatgagaaaagtgctcttatttcaaatgttggaaagtagctctacctttttctggaaa

SEQ ID NO: 236311 - DNA, 515 bp, Homo sapiens
tctccatcgactgagctgtctgtgtcaaaacaattaaagtgcacttttccactagaattacctaatttttttcctagaattaccagacaaggaaggcaggttggagacagttatgaagtagaagtcatcgtttttctcttaccctgcttctagcatgaggtgagagtccacttactcagatagtctgaagtcgttcttcccttttgtttaggagtggggaaggaatggagatctgcaaagttaagatttttgctttggacggagcatctagctgaagaataaaggatgcaatattagctttctatggctgtggaaacaaatgaccctgaacagtttaaaacagcacagattggtgatgccatcgtgaaggaggccaggtgtccggccaggcccaaatccaggagctgtcagggctgcctgccttagcggcagtcacaggggagtctgttcgttgcttttggggttgttggtagaatttcattccatgggattacgggactgagttccattttctt

SEQ ID NO: 236312 - DNA, 565 bp, Homo sapiens
  misc_feature (6)..(6): n is a, c, g, or t
  misc_feature (18)..(18): n is a, c, g, or t
ggcccnggaaagtgtgtngccgggggatagaccccaagctgtagtactacacccagcgtaagacaaaagaacttaagtgttgatctcaagatttctaaattgtcaagatttacatggcattgtggtggaactagttaacacttagagcttttggtatgtaataactatttgctatggactgattaaatgtttcaaaagattgtgttcttcaattttggtgggttttgatttttgtttttttaactgcctctcagattatatttacttagtttaaatttctttgctttattcattaaagtataaaaacttcaggtctctgatatttattttcacttgtttactaattatttacaaaacaccctttgttgacttttattttataaatgtgtaatgtattaaacgtctttaaatttttgttcaactgaaactacattaactttgatttgctttactgggatttttttttaaagacactttttccatgtcagtgcgcagcacttaaccagtcgtttgtattccctttctttcaatccaataaacagaatgaatacctaaataaaaattg

SEQ ID NO: 236313 - DNA, 6833 bp, Homo sapiens
agatggtggtgagggagagaggaaataagttttttctaaatgctggagtctggaacccatgaagaatcagctgctagctgctgcccctcccgccgccgctgctgtcccccaccgaagtagcggccacagcctggtcagcggcagcatcatgcaggccaatggggcaggaggaggaggaggaggtggcggcggcggcggtggaggaggagggggcggcgggggccagggacagaccccggaactcgcctgcttgtcggcccagaacggggagtcgtccccctcgtcgtcgtcgtccgcgggggacctggcccacgccaatgggctcctgccttccgccccctccgccgccagcaacaatagcaacagcctgaatgtcaataacggggttcccggcggggcggccgccgcatcctcagccaccgtcgcagctgcctccgccaccaccgccgcctcctcttccttggccaccccagaactgggcagcagcctcaagaagaagaagcggctctcccagtcagatgaggatgtcattaggctaataggacagcacttgaatggcttagggctcaaccagactgttgatctcctcatgcaagagtcaggatgtcgtttagaacatccttctgctaccaaattccgaaatcatgtcatggaaggagactgggataaggcagaaaatgacctgaatgaactaaagcctttagtgcattctcctcatgctattgtggtaagaggcgcacttgaaatctctcaaacgttgttgggaataattgtgaggatgaagtttttgctgctgcagcagaagtacctagaatacctggaggatggcaaggtcctggaggcacttcaagttctacgctgtgaattgacgccgctgaaatacaatacagagcgcattcatgttcttagtgggtatctgatgtgtagccatgcagaagacctacgtgcaaaagcagaatgggaaggcaaagggacagcttcccgatctaaactattggataaacttcagacctatttaccaccatcagtgatgcttcccccacggcgtttacagactctcctgcggcaggcggtggaactacaaagggatcggtgcctatatcacaataccaaacttgataataatctagattctgtgtctctgcttatagaccatgtttgtagtaggaggcagttcccatgttatacgcagcagatacttacggagcattgtaatgaagtgtggttctgtaaattctctaatgatggcactaaactagcaacaggatcaaaagatacaacagttatcatatggcaagttgatccggatacacacctgctaaaactgcttaaaacattagaaggacatgcttatggcgtttcttatattgcatggagtccagatgacaactatcttgttgcttgtggcccagatgactgctctgagctttggctttggaatgtacaaacaggagaactaaggacaaaaatgagccagtctcatgaagacagtttgacaagtgtggcttggaatccagatgggaagcgctttgtgactggaggtcagcgtgggcagttctatcagtgtgacttagatggtaatctccttgactcctgggaaggggtaagagtgcaatgcctttggtgcttgagtgatggaaagactgttctggcatcagatacacaccagcgaattcggggctataacttcgaggaccttacagataggaacatagtacaagaagatcatcctattatgtcttttactatttcaaaaaatggccgattagctttgttaaatgtagcaactcagggagttcatttatgggacttgcaagacagagttttagtaagaaagtatcaaggtgttacacaagggttttatacaattcattcatgttttggaggccataatgaagacttcatcgctagtggcagtgaagatcacaaggtttacatctggcacaaacgtagtgaactgccaattgcggagctgacagggcacacacgtacagtaaactgtgtgagctggaacccacagattccatccatgatggccagcgcctcagatgatggcactgttagaatatggggaccagcaccttttatagaccaccagaatattgaagaggaatgcagtagcatggatagttgatggtgaatttggagcagacgacttctgtttaacttaaaattagtcgtattttaatggcttgggatttggtgcaaacaaacatgattgatagctggacagacatgctcgtcatgaaaaaagaaccatttctgaagcccgattggggccaaacatttacaccttgcttcatagtaaccagttgagatgaagcacgtcgttagaacgttgttggacaccatgttgaattattcccccatcggttgtgaagaactgtgctacattcaggcttacccattgaactcagtatatatatttttttccttcctgtcttttgtctggcaggataccattcttgttgctcttctgtgtaatgaagtttaaatgcttgtttggaaaactttatttaacagtttagaaggcttgatagaaagagtgcattagtctgaagagtatacattggataggaaagaatttccttcttttgtttctccaaatctttccgccttatttagcttgagatctttgcagcttggttcatggattctagccttgcccgttgcgcagtatatactgatccagatgataaaccagtgaactatgtcaaaagcactctcaatattacatttgacaaaaagttttgtacttttcacatagcttgttgccccgtaaaagggttaacagcacaattttttaaaaataaattaagaagtatttataggattaaagtgacttcatttgtatacatttggaatctaaaccagcttaaaaacagtttcctcaatgacttagatacacagtataactgatgctcttctggaataccacatgagacatggtcagaaacagtgcttggaaggacattacacaagaaattcagagtaatgctttgaagatttccccccttttgttttattcctgaaggaacatcagtacccgatcttgaagaaattcaagattcaaaaagaattttaaatacaccaacatgagacatcagtagtcagttggttttcagtaaagcttgttccaagttgttctcaacttaggaagtaattttggtgtgatctagcaaaagagtaggaatcagcgatacaaccactttggaagtttatagtataattgaaattattagaagaattcagcaggttacagacatacttaaactgggattaaaacctcatagtcatttttcttaattgcccttaatattttgacatatagggatacataaatttaaagaatattttttctcagttttttcagatattgccatactgaacctcattctaaactggtgctgtggatagtctttccctctcccctcctgttttagtttaaggaaaggtttccttcatggaaaagcacttttaattttgagaatttcacatttaaaataagccaaaagcctgatgttcacattgtgcttttaaactccgtaacagctgaatacaacataacatagtctcccttgaaattccctccctttttcagtagaggataaatagggtgactccagctgttggaatgagaatggggatacccccaaaataagattctggtgaagaaaaagtcttgtactaagttcccctttaggtgtagccaagtctataatataattatgatcatgaatagactccagaatccacaaagagaagagggcttggatgtcaaaaattcttccattgtggggtaggtggtcggggatgggagaaagggaaaagtcagggaaaggggagaagaaagaaaaacacatttggccttaaaatagcatgcattctcccagaagcccatagtaaagaaaatgacagatcgtggtcagcagactcttatcaaattggtatgtaaaagatttcttcaagctccattttgcagagaccaccacttagagaatcaaaaaattcctgttttgatacttctaagttaaaatatatgttacagtttatctggtacttcatttttcttaactaaaattactttttactttaagcttgaataaaaatcttcattggtaactgtatgtaattaagtggcaacttctctttacctcagtatagttaaaaaccattcatattttaagtgattcatgtataccctgaagccgttaatacaccccagtctctatggtaacatcactaaatgtgggcatagaaactccacagctgtttacaaatttggttacagtgtgctatggtgcatttgtaacactcagatttgtgcccattcaggggcaatttggcactcagattctactctacttcacctaaccacccctagatctgagttttcagagtgcttctgaagtacagtttaaaaacactttttaaaaagtggagtaaaagtgaggcacattttacaagaacataactcctattaaaacggagtaacaactatgcaaaggtttctatagcagctaggtgagtttgttttccgggtctgtcttaactggcagcttcctgtacatactggtacttatttgctgtaaacgtctgtttcatacatttgccatgcagtgactgtgctcgaaaggtgaaatcaatggtaaagaagcctaggattttatggtatgagaaactgatcgcaggattttctgatccatagctattaattgaaaacttctgatagtgctgtaggctctatagtaggcttaagagtgagtcttatactatgaagccagccacaagatactaacaaatgtataaattgaaaagtaccaatactttttgcacatagatcaaaatagagtggagaatttgggctccaaaaatcaggttagtaggctcatttccatgtgcttaaaaatgtttttgttgttatgcattgattaagggctagagcaaatataaaattaaatgtctttttcctccaaataattggttattaatggtaaaatgttggacttggggattactgagattagtatgtgggtagtaaagaattggagtgggagttagtggggagggatgacaaagcttcagctttggtttttgtatttttttagtcttcataacagctacatttctgttgctcttattggccagataaatgtgttatattaaaccaggtaagtattttaaacagagaacattttatttgcatatatccctacaaattggcccattttattgggtggggggataaaaaagggattccctaactttaaataatcagaatatcctgcaattgaaaggagaaaaaaatccaattttgtcagtattttcttagtctgaaaaaaacagcagtagtaatctggtgaatgttattattaggagtgttctgcctctacagtggcatattccatgacattaatagaaaacccttctttcccacccctccccatcttgacattttcttttttaggatgttggttcctgcaaacaagaactgaccctatcacctctgcctcacagtgggtaaatatatcatacatctcttgaaagggaaaatatccatgtcagtttctttcacagtagaagaatggctgcttttgaatggggaggaaagaagacatttttcttaatatcctttttgtcccatctctaaaatgtataaatattttgatttggttttactttaatttctcattcataatttcgcaactgtccttttgggttgccctccaacacattacttccatttcagaaaccatatctgatttaatataaactgctaacttaagaagaggtgaatttgcatttacacttagacactttctaaaaacagggtgaacttaattgaaatttttcagtgttgttaagctattgttatagtagctgccctatagttacaaaaataaaaactataaaaacccatcccctatctacttaatccagatagcctggatttaacaaaaccaatagtataaaaatgtgtgtgtgtgttctgtgtgtgtgtgagagagagagtacttgattcattaaaaagtcctggaaacagctgttctaggatcttgtcatttttactgaaagtctcgtgcacatgtgaagtgccctctgagtttaaggtttggttaatactggtatatttttataagattgaaattgtgtccccatctttaacttaaacattttcattatcagggtcaatgtgctagaactgaattgtaacatttttaggcacagatggaaaaaaatgttattggctccttgaaaatgtgtgtgtgtggcgaggggaatagatccacaaaagcatgtatgtacttacaaaccaagctgtagagatcaagaaaagaacttaagtgttgatctcaagatttctaaattgtcaagatttacatggcattgtggtggaactagttaacacttagagcttttggtatgtaataactatttgctatggactgattaaatgtttcaaaagattgtgttcttcaattttggtgggttttgatttttgtttttttaactgcctctcagattatatttacttagtttaaatttctttgctttattcattaaagtataaaaacttcaggtctctgatatttattttcacttgtttactaattatttacaaaacaccctttgttgacttttattttataaatgtgtaatgtattaaacgtctttaaatttttgttcaactgaaactacattaactttgatttgctttactgggatttttttttaaagacactttttccatgtcagtgcgcagcacttaaccagtcgtttgtattccctttctttcaatccaataaacagaatgaatacctaaataaaaattg

SEQ ID NO: 236314 - DNA, 6850 bp, Homo sapiens
agatggtggtgagggagagaggaaataagttttttctaaatgctggagtctggaacccatgaagaatcagctgctagctgctgcccctcccgccgccgctgctgtcccccaccgaagtagcggccacagcctggtcagcggcagcatcatgcaggccaatggggcaggaggaggaggaggaggtggcggcggcggcggtggaggaggagggggcggcgggggccagggacagaccccggaactcgcctgcttgtcggcccagaacggggagtcgtccccctcgtcgtcgtcgtccgcgggggacctggcccacgccaatgggctcctgccttccgccccctccgccgccagcaacaatagcaacagcctgaatgtcaataacggggttcccggcggggcggccgccgcatcctcagccaccgtcgcagctgcctccgccaccaccgccgcctcctcttccttggccaccccagaactgggcagcagcctcaagaagaagaagcggctctcccagtcagatgaggatgtcattaggctaataggacagcacttgaatggcttagggctcaaccagactgttgatctcctcatgcaagagtcaggatgtcgtttagaacatccttctgctaccaaattccgaaatcatgtcatggaaggagactgggataaggcagaaaatgacctgaatgaactaaagcctttagtgcattctcctcatgctattgtggcacaaacattttctgaaacttccatcaacttttttcccctgactgctgctttctgtcatgtcagaggatgaagtttttgctgctgcagcagaagtacctagaatacctggaggatggcaaggtcctggaggcacttcaagttctacgctgtgaattgacgccgctgaaatacaatacagagcgcattcatgttcttagtgggtatctgatgtgtagccatgcagaagacctacgtgcaaaagcagaatgggaaggcaaagggacagcttcccgatctaaactattggataaacttcagacctatttaccaccatcagtgatgcttcccccacggcgtttacagactctcctgcggcaggcggtggaactacaaagggatcggtgcctatatcacaataccaaacttgataataatctagattctgtgtctctgcttatagaccatgtttgtagtaggaggcagttcccatgttatacgcagcagatacttacggagcattgtaatgaagtgtggttctgtaaattctctaatgatggcactaaactagcaacaggatcaaaagatacaacagttatcatatggcaagttgatccggatacacacctgctaaaactgcttaaaacattagaaggacatgcttatggcgtttcttatattgcatggagtccagatgacaactatcttgttgcttgtggcccagatgactgctctgagctttggctttggaatgtacaaacaggagaactaaggacaaaaatgagccagtctcatgaagacagtttgacaagtgtggcttggaatccagatgggaagcgctttgtgactggaggtcagcgtgggcagttctatcagtgtgacttagatggtaatctccttgactcctgggaaggggtaagagtgcaatgcctttggtgcttgagtgatggaaagactgttctggcatcagatacacaccagcgaattcggggctataacttcgaggaccttacagataggaacatagtacaagaagatcatcctattatgtcttttactatttcaaaaaatggccgattagctttgttaaatgtagcaactcagggagttcatttatgggacttgcaagacagagttttagtaagaaagtatcaaggtgttacacaagggttttatacaattcattcatgttttggaggccataatgaagacttcatcgctagtggcagtgaagatcacaaggtttacatctggcacaaacgtagtgaactgccaattgcggagctgacagggcacacacgtacagtaaactgtgtgagctggaacccacagattccatccatgatggccagcgcctcagatgatggcactgttagaatatggggaccagcaccttttatagaccaccagaatattgaagaggaatgcagtagcatggatagttgatggtgaatttggagcagacgacttctgtttaacttaaaattagtcgtattttaatggcttgggatttggtgcaaacaaacatgattgatagctggacagacatgctcgtcatgaaaaaagaaccatttctgaagcccgattggggccaaacatttacaccttgcttcatagtaaccagttgagatgaagcacgtcgttagaacgttgttggacaccatgttgaattattcccccatcggttgtgaagaactgtgctacattcaggcttacccattgaactcagtatatatatttttttccttcctgtcttttgtctggcaggataccattcttgttgctcttctgtgtaatgaagtttaaatgcttgtttggaaaactttatttaacagtttagaaggcttgatagaaagagtgcattagtctgaagagtatacattggataggaaagaatttccttcttttgtttctccaaatctttccgccttatttagcttgagatctttgcagcttggttcatggattctagccttgcccgttgcgcagtatatactgatccagatgataaaccagtgaactatgtcaaaagcactctcaatattacatttgacaaaaagttttgtacttttcacatagcttgttgccccgtaaaagggttaacagcacaattttttaaaaataaattaagaagtatttataggattaaagtgacttcatttgtatacatttggaatctaaaccagcttaaaaacagtttcctcaatgacttagatacacagtataactgatgctcttctggaataccacatgagacatggtcagaaacagtgcttggaaggacattacacaagaaattcagagtaatgctttgaagatttccccccttttgttttattcctgaaggaacatcagtacccgatcttgaagaaattcaagattcaaaaagaattttaaatacaccaacatgagacatcagtagtcagttggttttcagtaaagcttgttccaagttgttctcaacttaggaagtaattttggtgtgatctagcaaaagagtaggaatcagcgatacaaccactttggaagtttatagtataattgaaattattagaagaattcagcaggttacagacatacttaaactgggattaaaacctcatagtcatttttcttaattgcccttaatattttgacatatagggatacataaatttaaagaatattttttctcagttttttcagatattgccatactgaacctcattctaaactggtgctgtggatagtctttccctctcccctcctgttttagtttaaggaaaggtttccttcatggaaaagcacttttaattttgagaatttcacatttaaaataagccaaaagcctgatgttcacattgtgcttttaaactccgtaacagctgaatacaacataacatagtctcccttgaaattccctccctttttcagtagaggataaatagggtgactccagctgttggaatgagaatggggatacccccaaaataagattctggtgaagaaaaagtcttgtactaagttcccctttaggtgtagccaagtctataatataattatgatcatgaatagactccagaatccacaaagagaagagggcttggatgtcaaaaattcttccattgtggggtaggtggtcggggatgggagaaagggaaaagtcagggaaaggggagaagaaagaaaaacacatttggccttaaaatagcatgcattctcccagaagcccatagtaaagaaaatgacagatcgtggtcagcagactcttatcaaattggtatgtaaaagatttcttcaagctccattttgcagagaccaccacttagagaatcaaaaaattcctgttttgatacttctaagttaaaatatatgttacagtttatctggtacttcatttttcttaactaaaattactttttactttaagcttgaataaaaatcttcattggtaactgtatgtaattaagtggcaacttctctttacctcagtatagttaaaaaccattcatattttaagtgattcatgtataccctgaagccgttaatacaccccagtctctatggtaacatcactaaatgtgggcatagaaactccacagctgtttacaaatttggttacagtgtgctatggtgcatttgtaacactcagatttgtgcccattcaggggcaatttggcactcagattctactctacttcacctaaccacccctagatctgagttttcagagtgcttctgaagtacagtttaaaaacactttttaaaaagtggagtaaaagtgaggcacattttacaagaacataactcctattaaaacggagtaacaactatgcaaaggtttctatagcagctaggtgagtttgttttccgggtctgtcttaactggcagcttcctgtacatactggtacttatttgctgtaaacgtctgtttcatacatttgccatgcagtgactgtgctcgaaaggtgaaatcaatggtaaagaagcctaggattttatggtatgagaaactgatcgcaggattttctgatccatagctattaattgaaaacttctgatagtgctgtaggctctatagtaggcttaagagtgagtcttatactatgaagccagccacaagatactaacaaatgtataaattgaaaagtaccaatactttttgcacatagatcaaaatagagtggagaatttgggctccaaaaatcaggttagtaggctcatttccatgtgcttaaaaatgtttttgttgttatgcattgattaagggctagagcaaatataaaattaaatgtctttttcctccaaataattggttattaatggtaaaatgttggacttggggattactgagattagtatgtgggtagtaaagaattggagtgggagttagtggggagggatgacaaagcttcagctttggtttttgtatttttttagtcttcataacagctacatttctgttgctcttattggccagataaatgtgttatattaaaccaggtaagtattttaaacagagaacattttatttgcatatatccctacaaattggcccattttattgggtggggggataaaaaagggattccctaactttaaataatcagaatatcctgcaattgaaaggagaaaaaaatccaattttgtcagtattttcttagtctgaaaaaaacagcagtagtaatctggtgaatgttattattaggagtgttctgcctctacagtggcatattccatgacattaatagaaaacccttctttcccacccctccccatcttgacattttcttttttaggatgttggttcctgcaaacaagaactgaccctatcacctctgcctcacagtgggtaaatatatcatacatctcttgaaagggaaaatatccatgtcagtttctttcacagtagaagaatggctgcttttgaatggggaggaaagaagacatttttcttaatatcctttttgtcccatctctaaaatgtataaatattttgatttggttttactttaatttctcattcataatttcgcaactgtccttttgggttgccctccaacacattacttccatttcagaaaccatatctgatttaatataaactgctaacttaagaagaggtgaatttgcatttacacttagacactttctaaaaacagggtgaacttaattgaaatttttcagtgttgttaagctattgttatagtagctgccctatagttacaaaaataaaaactataaaaacccatcccctatctacttaatccagatagcctggatttaacaaaaccaatagtataaaaatgtgtgtgtgtgttctgtgtgtgtgtgagagagagagtacttgattcattaaaaagtcctggaaacagctgttctaggatcttgtcatttttactgaaagtctcgtgcacatgtgaagtgccctctgagtttaaggtttggttaatactggtatatttttataagattgaaattgtgtccccatctttaacttaaacattttcattatcagggtcaatgtgctagaactgaattgtaacatttttaggcacagatggaaaaaaatgttattggctccttgaaaatgtgtgtgtgtggcgaggggaatagatccacaaaagcatgtatgtacttacaaaccaagctgtagagatcaagaaaagaacttaagtgttgatctcaagatttctaaattgtcaagatttacatggcattgtggtggaactagttaacacttagagcttttggtatgtaataactatttgctatggactgattaaatgtttcaaaagattgtgttcttcaattttggtgggttttgatttttgtttttttaactgcctctcagattatatttacttagtttaaatttctttgctttattcattaaagtataaaaacttcaggtctctgatatttattttcacttgtttactaattatttacaaaacaccctttgttgacttttattttataaatgtgtaatgtattaaacgtctttaaatttttgttcaactgaaactacattaactttgatttgctttactgggatttttttttaaagacactttttccatgtcagtgcgcagcacttaaccagtcgtttgtattccctttctttcaatccaataaacagaatgaatacctaaataaaaattg

SEQ ID NO: 236315 - DNA, 6404 bp, Homo sapiens
  misc_feature (33)..(33): n is a, c, g, or t
  misc_feature (35)..(35): n is a, c, g, or t
atttaaaaattaatttaatgcttggctaaatcntngttacatataactgggcagcagcctcaagaagaagaagcggctctcccagtcagatgaggatgtcattaggctaataggacagcacttgaatggcttagggctcaaccagactgttgatctcctcatgcaagagtcaggatgtcgtttagaacatccttctgctaccaaattccgaaatcatgtcatggaaggagactgggataaggcagaaaatgacctgaatgaactaaagcctttagtgcattctcctcatgctattgtggtaagaggcgcacttgaaatctctcaaacgttgttgggaataattgtgaggatgaagtttttgctgctgcagcagaagtacctagaatacctggaggatggcaaggtcctggaggcacttcaagttctacgctgtgaattgacgccgctgaaatacaatacagagcgcattcatgttcttagtgggtatctgatgtgtagccatgcagaagacctacgtgcaaaagcagaatgggaaggcaaagggacagcttcccgatctaaactattggataaacttcagacctatttaccaccatcagtgatgcttcccccacggcgtttacagactctcctgcggcaggcggtggaactacaaagggatcggtgcctatatcacaataccaaacttgataataatctagattctgtgtctctgcttatagaccatgtttgtagtaggaggcagttcccatgttatacgcagcagatacttacggagcattgtaatgaagtgtggttctgtaaattctctaatgatggcactaaactagcaacaggatcaaaagatacaacagttatcatatggcaagttgatccggatacacacctgctaaaactgcttaaaacattagaaggacatgcttatggcgtttcttatattgcatggagtccagatgacaactatcttgttgcttgtggcccagatgactgctctgagctttggctttggaatgtacaaacaggagaactaaggacaaaaatgagccagtctcatgaagacagtttgacaagtgtggcttggaatccagatgggaagcgctttgtgactggaggtcagcgtgggcagttctatcagtgtgacttagatggtaatctccttgactcctgggaaggggtaagagtgcaatgcctttggtgcttgagtgatggaaagactgttctggcatcagatacacaccagcgaattcggggctataacttcgaggaccttacagataggaacatagtacaagaagatcatcctattatgtcttttactatttcaaaaaatggccgattagctttgttaaatgtagcaactcagggagttcatttatgggacttgcaagacagagttttagtaagaaagtatcaaggtgttacacaagggttttatacaattcattcatgttttggaggccataatgaagacttcatcgctagtggcagtgaagatcacaaggtttacatctggcacaaacgtagtgaactgccaattgcggagctgacagggcacacacgtacagtaaactgtgtgagctggaacccacagattccatccatgatggccagcgcctcagatgatggcactgttagaatatggggaccagcaccttttatagaccaccagaatattgaagaggaatgcagtagcatggatagttgatggtgaatttggagcagacgacttctgtttaacttaaaattagtcgtattttaatggcttgggatttggtgcaaacaaacatgattgatagctggacagacatgctcgtcatgaaaaaagaaccatttctgaagcccgattggggccaaacatttacaccttgcttcatagtaaccagttgagatgaagcacgtcgttagaacgttgttggacaccatgttgaattattcccccatcggttgtgaagaactgtgctacattcaggcttacccattgaactcagtatatatatttttttccttcctgtcttttgtctggcaggataccattcttgttgctcttctgtgtaatgaagtttaaatgcttgtttggaaaactttatttaacagtttagaaggcttgatagaaagagtgcattagtctgaagagtatacattggataggaaagaatttccttcttttgtttctccaaatctttccgccttatttagcttgagatctttgcagcttggttcatggattctagccttgcccgttgcgcagtatatactgatccagatgataaaccagtgaactatgtcaaaagcactctcaatattacatttgacaaaaagttttgtacttttcacatagcttgttgccccgtaaaagggttaacagcacaattttttaaaaataaattaagaagtatttataggattaaagtgacttcatttgtatacatttggaatctaaaccagcttaaaaacagtttcctcaatgacttagatacacagtataactgatgctcttctggaataccacatgagacatggtcagaaacagtgcttggaaggacattacacaagaaattcagagtaatgctttgaagatttccccccttttgttttattcctgaaggaacatcagtacccgatcttgaagaaattcaagattcaaaaagaattttaaatacaccaacatgagacatcagtagtcagttggttttcagtaaagcttgttccaagttgttctcaacttaggaagtaattttggtgtgatctagcaaaagagtaggaatcagcgatacaaccactttggaagtttatagtataattgaaattattagaagaattcagcaggttacagacatacttaaactgggattaaaacctcatagtcatttttcttaattgcccttaatattttgacatatagggatacataaatttaaagaatattttttctcagttttttcagatattgccatactgaacctcattctaaactggtgctgtggatagtctttccctctcccctcctgttttagtttaaggaaaggtttccttcatggaaaagcacttttaattttgagaatttcacatttaaaataagccaaaagcctgatgttcacattgtgcttttaaactccgtaacagctgaatacaacataacatagtctcccttgaaattccctccctttttcagtagaggataaatagggtgactccagctgttggaatgagaatggggatacccccaaaataagattctggtgaagaaaaagtcttgtactaagttcccctttaggtgtagccaagtctataatataattatgatcatgaatagactccagaatccacaaagagaagagggcttggatgtcaaaaattcttccattgtggggtaggtggtcggggatgggagaaagggaaaagtcagggaaaggggagaagaaagaaaaacacatttggccttaaaatagcatgcattctcccagaagcccatagtaaagaaaatgacagatcgtggtcagcagactcttatcaaattggtatgtaaaagatttcttcaagctccattttgcagagaccaccacttagagaatcaaaaaattcctgttttgatacttctaagttaaaatatatgttacagtttatctggtacttcatttttcttaactaaaattactttttactttaagcttgaataaaaatcttcattggtaactgtatgtaattaagtggcaacttctctttacctcagtatagttaaaaaccattcatattttaagtgattcatgtataccctgaagccgttaatacaccccagtctctatggtaacatcactaaatgtgggcatagaaactccacagctgtttacaaatttggttacagtgtgctatggtgcatttgtaacactcagatttgtgcccattcaggggcaatttggcactcagattctactctacttcacctaaccacccctagatctgagttttcagagtgcttctgaagtacagtttaaaaacactttttaaaaagtggagtaaaagtgaggcacattttacaagaacataactcctattaaaacggagtaacaactatgcaaaggtttctatagcagctaggtgagtttgttttccgggtctgtcttaactggcagcttcctgtacatactggtacttatttgctgtaaacgtctgtttcatacatttgccatgcagtgactgtgctcgaaaggtgaaatcaatggtaaagaagcctaggattttatggtatgagaaactgatcgcaggattttctgatccatagctattaattgaaaacttctgatagtgctgtaggctctatagtaggcttaagagtgagtcttatactatgaagccagccacaagatactaacaaatgtataaattgaaaagtaccaatactttttgcacatagatcaaaatagagtggagaatttgggctccaaaaatcaggttagtaggctcatttccatgtgcttaaaaatgtttttgttgttatgcattgattaagggctagagcaaatataaaattaaatgtctttttcctccaaataattggttattaatggtaaaatgttggacttggggattactgagattagtatgtgggtagtaaagaattggagtgggagttagtggggagggatgacaaagcttcagctttggtttttgtatttttttagtcttcataacagctacatttctgttgctcttattggccagataaatgtgttatattaaaccaggtaagtattttaaacagagaacattttatttgcatatatccctacaaattggcccattttattgggtggggggataaaaaagggattccctaactttaaataatcagaatatcctgcaattgaaaggagaaaaaaatccaattttgtcagtattttcttagtctgaaaaaaacagcagtagtaatctggtgaatgttattattaggagtgttctgcctctacagtggcatattccatgacattaatagaaaacccttctttcccacccctccccatcttgacattttcttttttaggatgttggttcctgcaaacaagaactgaccctatcacctctgcctcacagtgggtaaatatatcatacatctcttgaaagggaaaatatccatgtcagtttctttcacagtagaagaatggctgcttttgaatggggaggaaagaagacatttttcttaatatcctttttgtcccatctctaaaatgtataaatattttgatttggttttactttaatttctcattcataatttcgcaactgtccttttgggttgccctccaacacattacttccatttcagaaaccatatctgatttaatataaactgctaacttaagaagaggtgaatttgcatttacacttagacactttctaaaaacagggtgaacttaattgaaatttttcagtgttgttaagctattgttatagtagctgccctatagttacaaaaataaaaactataaaaacccatcccctatctacttaatccagatagcctggatttaacaaaaccaatagtataaaaatgtgtgtgtgtgttctgtgtgtgtgtgagagagagagtacttgattcattaaaaagtcctggaaacagctgttctaggatcttgtcatttttactgaaagtctcgtgcacatgtgaagtgccctctgagtttaaggtttggttaatactggtatatttttataagattgaaattgtgtccccatctttaacttaaacattttcattatcagggtcaatgtgctagaactgaattgtaacatttttaggcacagatggaaaaaaatgttattggctccttgaaaatgtgtgtgtgtggcgaggggaatagatccacaaaagcatgtatgtacttacaaaccaagctgtagagatcaagaaaagaacttaagtgttgatctcaagatttctaaattgtcaagatttacatggcattgtggtggaactagttaacacttagagcttttggtatgtaataactatttgctatggactgattaaatgtttcaaaagattgtgttcttcaattttggtgggttttgatttttgtttttttaactgcctctcagattatatttacttagtttaaatttctttgctttattcattaaagtataaaaacttcaggtctctgatatttattttcacttgtttactaattatttacaaaacaccctttgttgacttttattttataaatgtgtaatgtattaaacgtctttaaatttttgttcaactgaaactacattaactttgatttgctttactgggatttttttttaaagacactttttccatgtcagtgcgcagcacttaaccagtcgtttgtattccctttctttcaatccaataaacagaatgaatacctaaataaaaattg

SEQ ID NO: 236316 - DNA, 5817 bp, Homo sapiens
gcggccgccccctcgcccgtcacgcacggcgtttacagactctcctgcggcaggcggtggaactacaaagggatcggtgcctatatcacaataccaaacttgataataatctagattctgtgtctctgcttatagaccatgtttgtagtaggaggcagttcccatgttatacgcagcagatacttacggagcattgtaatgaagtgtggttctgtaaattctctaatgatggcactaaactagcaacaggatcaaaagatacaacagttatcatatggcaagttgatccggatacacacctgctaaaactgcttaaaacattagaaggacatgcttatggcgtttcttatattgcatggagtccagatgacaactatcttgttgcttgtggcccagatgactgctctgagctttggctttggaatgtacaaacaggagaactaaggacaaaaatgagccagtctcatgaagacagtttgacaagtgtggcttggaatccagatgggaagcgctttgtgactggaggtcagcgtgggcagttctatcagtgtgacttagatggtaatctccttgactcctgggaaggggtaagagtgcaatgcctttggtgcttgagtgatggaaagactgttctggcatcagatacacaccagcgaattcggggctataacttcgaggaccttacagataggaacatagtacaagaagatcatcctattatgtcttttactatttcaaaaaatggccgattagctttgttaaatgtagcaactcagggagttcatttatgggacttgcaagacagagttttagtaagaaagtatcaaggtgttacacaagggttttatacaattcattcatgttttggaggccataatgaagacttcatcgctagtggcagtgaagatcacaaggtttacatctggcacaaacgtagtgaactgccaattgcggagctgacagggcacacacgtacagtaaactgtgtgagctggaacccacagattccatccatgatggccagcgcctcagatgatggcactgttagaatatggggaccagcaccttttatagaccaccagaatattgaagaggaatgcagtagcatggatagttgatggtgaatttggagcagacgacttctgtttaacttaaaattagtcgtattttaatggcttgggatttggtgcaaacaaacatgattgatagctggacagacatgctcgtcatgaaaaaagaaccatttctgaagcccgattggggccaaacatttacaccttgcttcatagtaaccagttgagatgaagcacgtcgttagaacgttgttggacaccatgttgaattattcccccatcggttgtgaagaactgtgctacattcaggcttacccattgaactcagtatatatatttttttccttcctgtcttttgtctggcaggataccattcttgttgctcttctgtgtaatgaagtttaaatgcttgtttggaaaactttatttaacagtttagaaggcttgatagaaagagtgcattagtctgaagagtatacattggataggaaagaatttccttcttttgtttctccaaatctttccgccttatttagcttgagatctttgcagcttggttcatggattctagccttgcccgttgcgcagtatatactgatccagatgataaaccagtgaactatgtcaaaagcactctcaatattacatttgacaaaaagttttgtacttttcacatagcttgttgccccgtaaaagggttaacagcacaattttttaaaaataaattaagaagtatttataggattaaagtgacttcatttgtatacatttggaatctaaaccagcttaaaaacagtttcctcaatgacttagatacacagtataactgatgctcttctggaataccacatgagacatggtcagaaacagtgcttggaaggacattacacaagaaattcagagtaatgctttgaagatttccccccttttgttttattcctgaaggaacatcagtacccgatcttgaagaaattcaagattcaaaaagaattttaaatacaccaacatgagacatcagtagtcagttggttttcagtaaagcttgttccaagttgttctcaacttaggaagtaattttggtgtgatctagcaaaagagtaggaatcagcgatacaaccactttggaagtttatagtataattgaaattattagaagaattcagcaggttacagacatacttaaactgggattaaaacctcatagtcatttttcttaattgcccttaatattttgacatatagggatacataaatttaaagaatattttttctcagttttttcagatattgccatactgaacctcattctaaactggtgctgtggatagtctttccctctcccctcctgttttagtttaaggaaaggtttccttcatggaaaagcacttttaattttgagaatttcacatttaaaataagccaaaagcctgatgttcacattgtgcttttaaactccgtaacagctgaatacaacataacatagtctcccttgaaattccctccctttttcagtagaggataaatagggtgactccagctgttggaatgagaatggggatacccccaaaataagattctggtgaagaaaaagtcttgtactaagttcccctttaggtgtagccaagtctataatataattatgatcatgaatagactccagaatccacaaagagaagagggcttggatgtcaaaaattcttccattgtggggtaggtggtcggggatgggagaaagggaaaagtcagggaaaggggagaagaaagaaaaacacatttggccttaaaatagcatgcattctcccagaagcccatagtaaagaaaatgacagatcgtggtcagcagactcttatcaaattggtatgtaaaagatttcttcaagctccattttgcagagaccaccacttagagaatcaaaaaattcctgttttgatacttctaagttaaaatatatgttacagtttatctggtacttcatttttcttaactaaaattactttttactttaagcttgaataaaaatcttcattggtaactgtatgtaattaagtggcaacttctctttacctcagtatagttaaaaaccattcatattttaagtgattcatgtataccctgaagccgttaatacaccccagtctctatggtaacatcactaaatgtgggcatagaaactccacagctgtttacaaatttggttacagtgtgctatggtgcatttgtaacactcagatttgtgcccattcaggggcaatttggcactcagattctactctacttcacctaaccacccctagatctgagttttcagagtgcttctgaagtacagtttaaaaacactttttaaaaagtggagtaaaagtgaggcacattttacaagaacataactcctattaaaacggagtaacaactatgcaaaggtttctatagcagctaggtgagtttgttttccgggtctgtcttaactggcagcttcctgtacatactggtacttatttgctgtaaacgtctgtttcatacatttgccatgcagtgactgtgctcgaaaggtgaaatcaatggtaaagaagcctaggattttatggtatgagaaactgatcgcaggattttctgatccatagctattaattgaaaacttctgatagtgctgtaggctctatagtaggcttaagagtgagtcttatactatgaagccagccacaagatactaacaaatgtataaattgaaaagtaccaatactttttgcacatagatcaaaatagagtggagaatttgggctccaaaaatcaggttagtaggctcatttccatgtgcttaaaaatgtttttgttgttatgcattgattaagggctagagcaaatataaaattaaatgtctttttcctccaaataattggttattaatggtaaaatgttggacttggggattactgagattagtatgtgggtagtaaagaattggagtgggagttagtggggagggatgacaaagcttcagctttggtttttgtatttttttagtcttcataacagctacatttctgttgctcttattggccagataaatgtgttatattaaaccaggtaagtattttaaacagagaacattttatttgcatatatccctacaaattggcccattttattgggtggggggataaaaaagggattccctaactttaaataatcagaatatcctgcaattgaaaggagaaaaaaatccaattttgtcagtattttcttagtctgaaaaaaacagcagtagtaatctggtgaatgttattattaggagtgttctgcctctacagtggcatattccatgacattaatagaaaacccttctttcccacccctccccatcttgacattttcttttttaggatgttggttcctgcaaacaagaactgaccctatcacctctgcctcacagtgggtaaatatatcatacatctcttgaaagggaaaatatccatgtcagtttctttcacagtagaagaatggctgcttttgaatggggaggaaagaagacatttttcttaatatcctttttgtcccatctctaaaatgtataaatattttgatttggttttactttaatttctcattcataatttcgcaactgtccttttgggttgccctccaacacattacttccatttcagaaaccatatctgatttaatataaactgctaacttaagaagaggtgaatttgcatttacacttagacactttctaaaaacagggtgaacttaattgaaatttttcagtgttgttaagctattgttatagtagctgccctatagttacaaaaataaaaactataaaaacccatcccctatctacttaatccagatagcctggatttaacaaaaccaatagtataaaaatgtgtgtgtgtgttctgtgtgtgtgtgagagagagagtacttgattcattaaaaagtcctggaaacagctgttctaggatcttgtcatttttactgaaagtctcgtgcacatgtgaagtgccctctgagtttaaggtttggttaatactggtatatttttataagattgaaattgtgtccccatctttaacttaaacattttcattatcagggtcaatgtgctagaactgaattgtaacatttttaggcacagatggaaaaaaatgttattggctccttgaaaatgtgtgtgtgtggcgaggggaatagatccacaaaagcatgtatgtacttacaaaccaagctgtagagatcaagaaaagaacttaagtgttgatctcaagatttctaaattgtcaagatttacatggcattgtggtggaactagttaacacttagagcttttggtatgtaataactatttgctatggactgattaaatgtttcaaaagattgtgttcttcaattttggtgggttttgatttttgtttttttaactgcctctcagattatatttacttagtttaaatttctttgctttattcattaaagtataaaaacttcaggtctctgatatttattttcacttgtttactaattatttacaaaacaccctttgttgacttttattttataaatgtgtaatgtattaaacgtctttaaatttttgttcaactgaaactacattaactttgatttgctttactgggatttttttttaaagacactttttccatgtcagtgcgcagcacttaaccagtcgtttgtattccctttctttcaatccaataaacagaatgaatacctaaataaaaattg

SEQ ID NO: 236317 - DNA, 6531 bp, Homo sapiens
agatggtggtgagggagagaggaaataagttttttctaaatgctggagtctggaacccatgaagaatcagctgctagctgctgcccctcccgccgccgctgctgtcccccaccgaagtagcggccacagcctggtcagcggcagcatcatgcaggccaatggggcaggaggaggaggaggaggtggcggcggcggcggtggaggaggagggggcggcgggggccagggacagaccccggaactcgcctgcttgtcggcccagaacggggagtcgtccccctcgtcgtcgtcgtccgcgggggacctggcccacgccaatgggctcctgccttccgccccctccgccgccagcaacaatagcaacagcctgaatgtcaataacggggttcccggcggggcggccgccgcatcctcagccaccgtcgcagctgcctccgccaccaccgccgcctcctcttccttggccaccccagaactgggcagcagcctcaagaagaagaagcggctctcccagtcagatgaggatgtcattaggctaataggacagcacttgaatggcttagggctcaaccagactgttgatctcctcatgcaagagtcaggatgtcgtttagaacatccttctgctaccaaattccgaaatcatgtcatggaaggagactgggataaggcagaaaatgacctgaatgaactaaagcctttagtgcattctcctcatgctattgtgaggatgaagtttttgctgctgcagcagaagtacctagaatacctggaggatggcaaggtcctggaggcacttcaagttctacgctgtgaattgacgccgctgaaatacaatacagagcgcattcatgttcttagtgggtatctgatgtgtagccatgcagaagacctacgtgcaaaagcagaatgggaaggcaaagggacagcttcccgatctaaactattggataaacttcagacctatttaccaccatcagtgatgcttcccccacggcgtttacagactctcctgcggcaggcggtggaactacaaagggatcggtgcctatatcacaataccaaacttgataataatctagattctgtgtctctgcttatagaccatgtttgtagtaggaggcagttcccatgttatacgcagcagatacttacggagcattgtaatgaagtgtggttctgtaaattctctaatgatggcactaaactagcaacaggatcaaaagatacaacagttatcatatggcaagttgatccggatacacacctgctaaaactgcttaaaacattagaaggacatgcttatggcgtttcttatattgcatggagtccagatgacaactatcttgttgcttgtggcccagatgactgctctgagctttggctttggaatgtacaaacaggagaactaaggacaaaaatgagccagtctcatgaagacagtttgacaagtgtggcttggaatccagatgggaagcgctttgtgactggaggtcagcgtgggcagttctatcagtgtgacttagatggtaatctccttgactcctgggaaggggtaagagtgcaatgcctttggtgcttgagtgatggaaagactgttctggcatcagatacacaccagcgaattcggggctataacttcgaggaccttacagataggaacatagtacaagaagatcatcctattatgtcttttactatttcaaaaaatggccgattagctttgttaaatgtagcaactcagggagttcatttatgggacttgcaagacagagttttagtaagaaagtatcaaggtgttacacaagggttttatacaattcattcatgttttggaggccataatgaagacttcatcgctagtggcagtgaagatcacaaggtttacatctggcacaaacgtagtgaactgccaattgcggagctgacagggcacacacgtacagtaaactgtgtgagctggaacccacagattccatccatgatggccagcgcctcagatgatggcactgttagaatatggggaccagcaccttttatagaccaccagaatattgaagaggaatgcagtagcatggatagttgatggtgaatttggagcagacgacttctgtttaacttaaaattagtcgtattttaatggcttgggatttggtgcaaacaaacatgattgatagctggacagacatgctcgtcatgaaaaaagaaccatttctgaagcccgattggggccaaacatttacaccttgcttcatagtaaccagttgagatgaagcacgtcgttagaacgttgttggacaccatgttgaattattcccccatcggttgtgaagaactgtgctacattcaggcttacccattgaactcagtatatatatttttttccttcctgtcttttgtctggcaggataccattcttgttgctcttctgtgtaatgaagtttaaatgcttgtttggaaaactttatttaacagtttagaaggcttgatagaaagagtgcattagtctgaagagtatacattggataggaaagaatttccttcttttgtttctccaaatctttccgccttatttagcttgagatctttgcagcttggttcatggattctagccttgcccgttgcgcagtatatactgatccagatgataaaccagtgaactatgtcaaaagcactctcaatattacatttgacaaaaagttttgtacttttcacatagcttgttgccccgtaaaagggttaacagcacaattttttaaaaataaattaagaagtatttataggattaaagtgacttcatttgtatacatttggaatctaaaccagcttaaaaacagtttcctcaatgacttagatacacagtataactgatgctcttctggaataccacatgagacatggtcagaaacagtgcttggaaggacattacacaagaaattcagagtaatgctttgaagatttccccccttttgttttattcctgaaggaacatcagtacccgatcttgaagaaattcaagattcaaaaagaattttaaatacaccaacatgagacatcagtagtcagttggttttcagtaaagcttgttccaagttgttctcaacttaggaagtaattttggtgtgatctagcaaaagagtaggaatcagcgatacaaccactttggaagtttatagtataattgaaattattagaagaattcagcaggttacagacatacttaaactgggattaaaacctcatagtcatttttcttaattgcccttaatattttgacatatagggatacataaatttaaagaatattttttctcagttttttcagatattgccatactgaacctcattctaaactggtgctgtggatagtctttccctctcccctcctgttttagtttaaggaaaggtttccttcatggaaaagcacttttaattttgagaatttcacatttaaaataagccaaaagcctgatgttcacattgtgcttttaaactccgtaacagctgaatacaacataacatagtctcccttgaaattccctccctttttcagtagaggataaatagggtgactccagctgttggaatgagaatggggatacccccaaaataagattctggtgaagaaaaagtcttgtactaagttcccctttaggtgtagccaagtctataatataattatgatcatgaatagactccagaatccacaaagagaagagggcttggatgtcaaaaattcttccattgtggggtaggtggtcggggatgggagaaagggaaaagtcagggaaaggggagaagaaagaaaaacacatttggccttaaaatagcatgcattctcccagaagcccatagtaaagaaaatgacagatcgtggtcagcagactcttatcaaattggtatgtaaaagatttcttcaagctccattttgcagagaccaccacttagagaatcaaaaaattcctgttttgatacttctaagttaaaatatatgttacagtttatctggtacttcatttttcttaactaaaattactttttactttaagcttgaataaaaatcttcattggtaactgtatgtaattaagtggcaacttctctttacctcagtatagttaaaaaccattcatattttaagtgattcatgtataccctgaagccgttaatacaccccagtctctatggtaacatcactaaatgtgggcatagaaactccacagctgtttacaaatttggttacagtgtgctatggtgcatttgtaacactcagatttgtgcccattcaggggcaatttggcactcagattctactctacttcacctaaccacccctagatctgagttttcagagtgcttctgaagtacagtttaaaaacactttttaaaaagtggagtaaaagtgaggcacattttacaagaacataactcctattaaaacggagtaacaactatgcaaaggtttctatagcagctaggtgagtttgttttccgggtctgtcttaactggcagcttcctgtacatactggtacttatttgctgtaaacgtctgtttcatacatttgccatgcagtgactgtgctcgaaaggtgaaatcaatggtaaagaagcctaggattttatggtatgagaaactgatcgcaggattttctgatccatagctattaattgaaaacttctgatagtgctgtaggctctatagtaggcttaagagtgagtcttatactatgaagccagccacaagatactaacaaatgtataaattgaaaagtaccaatactttttgcacatagatcaaaatagagtggagaatttgggctccaaaaatcaggttagtaggctcatttccatgtgcttaaaaatgtttttgttgttatgcattgattaagggctagagcaaatataaaattaaatgtctttttcctccaaataattggttattaatggtaaaatgttggacttggggattactgagattagtatgtgggtagtaaagaattggagtgggagttagtggggagggatgacaaagcttcagctttggtttttgtatttttttagtcttcataacagctacatttctgttgctcttattggccagataaatgtgttatattaaaccaggtaagtattttaaacagagaacattttatttgcatatatccctacaaattggcccattttattgggtggggggataaaaaagggattccctaactttaaataatcagaatatcctgcaattgaaaggagaaaaaaatccaattttgtcagtattttcttagtctgaaaaaaacagcagtagtaatctggtgaatgttattattaggagtgttctgcctctacagtggcatattccatgacattaatagaaaacccttctttcccacccctccccatcttgacattttcttttttaggatgttggttcctgcaaacaagaactgaccctatcacctctgcctcacagtgggtaaatatatcatacatctcttgaaagggaaaatatccatgtcagtttctttcacagtagaagaatggctgcttttgaatggggaggaaagaagacatttttcttaatatcctttttgtcccatctctaaaatgtataaatattttgatttggttttactttaatttctcattcataatttcgcaactgtccttttgggttgccctccaacacattacttccatttcagaaaccatatctgatttaatataaactgctaacttaagaagaggtgaatttgcatttacacttagacactttctaaaaacagggtgaacttaattgaaatttttcagtgttgttaagctattgttatagtagctgccctatagttacaaaaataaaaactataaaaacccatcccctatctacttaatccagatagcctggatttaacaaaaccaatagtataaaaatgtgtgtgtgtgttctgtgtgtgtgtgagagagagagtacttgattcattaaaaagtcctggaaacagctgttctaggatcttgtcatttttactgaaagtctcgtgcacatgtgaagtgccctctgagtttaaggtttggttaatactggtatatttttataagattgaaattgtgtccccatctttaacttaaacattttcattatcagggtcaatgtgctagaactgaattgtaacatttttaggcacagatggaaaaaaatgttattggctccttgaaaatgtgtgtgtgtggcgaggggaatagatccacaaaagcatgtatgtacttacaaaccaagctgtagagatcaagaaaagaacttaagtgttgatctcaagatttctaaattgtcaagatttacatggcattgtggtggaactagttaacacttagagcttttggtatgtaataactatttgctatggactgattaaatgtttcaaaagattgtgttcttcaattttggtgggttttgatttttgtttttttaactgcctctcagattatatttacttagtttaaatttctttgctttattcattaaagtataaaaacttca

SEQ ID NO: 236318 - DNA, 2785 bp, Homo sapiens
agatggtggtgagggagagaggaaataagttttttctaaatgctggagtctggaacccatgaagaatcagctgctagctgctgcccctcccgccgccgctgctgtcccccaccgaagtagcggccacagcctggtcagcggcagcatcatgcaggccaatggggcaggaggaggaggaggaggtggcggcggcggcggtggaggaggagggggcggcgggggccagggacagaccccggaactcgcctgcttgtcggcccagaacggggagtcgtccccctcgtcgtcgtcgtccgcgggggacctggcccacgccaatgggctcctgccttccgccccctccgccgccagcaacaatagcaacagcctgaatgtcaataacggggttcccggcggggcggccgccgcatcctcagccaccgtcgcagctgcctccgccaccaccgccgcctcctcttccttggccaccccagaactgggcagcagcctcaagaagaagaagcggctctcccagtcagatgaggatgtcattaggctaataggacagcacttgaatggcttagggctcaaccagactgttgatctcctcatgcaagagtcaggatgtcgtttagaacatccttctgctaccaaattccgaaatcatgtcatggaaggagactgggataaggcagaaaatgacctgaatgaactaaagcctttagtgcattctcctcatgctattgtgaggatgaagtttttgctgctgcagcagaagtacctagaatacctggaggatggcaaggtcctggaggcacttcaagttctacgctgtgaattgacgccgctgaaatacaatacagagcgcattcatgttcttagtgggtatctgatgtgtagccatgcagaagacctacgtgcaaaagcagaatgggaaggcaaagggacagcttcccgatctaaactattggataaacttcagacctatttaccaccatcagtgatgcttcccccacggcgtttacagactctcctgcggcaggcggtggaactacaaagggatcggtgcctatatcacaataccaaacttgataataatctagattctgtgtctctgcttatagaccatgtttgtagtaggaggcagttcccatgttatacgcagcagatacttacggagcattgtaatgaagtgtggttctgtaaattctctaatgatggcactaaactagcaacaggatcaaaagatacaacagttatcatatggcaagttgatccggatacacacctgctaaaactgcttaaaacattagaaggacatgcttatggcgtttcttatattgcatggagtccagatgacaactatcttgttgcttgtggcccagatgactgctctgagctttggctttggaatgtacaaacaggagaactaaggacaaaaatgagccagtctcatgaagacagtttgacaagtgtggcttggaatccagatgggaagcgctttgtgactggaggtcagcgtgggcagttctatcagtgtgacttagatggtaatctccttgactcctgggaaggggtaagagtgcaatgcctttggtgcttgagtgatggaaagactgttctggcatcagatacacaccagcgaattcggggctataacttcgaggaccttacagataggaacatagtacaagaagatcatcctattatgtcttttactatttcaaaaaatggccgattagctttgttaaatgtagcaactcagggagttcatttatgggacttgcaagacagagttttagtaagaaagtatcaaggtgttacacaagggttttatacaattcattcatgttttggaggccataatgaagacttcatcgctagtggcagtgaagatcacaaggtttacatctggcacaaacgtagtgaactgccaattgcggagctgacagggcacacacgtacagtaaactgtgtgagctggaacccacagattccatccatgatggccagcgcctcagatgatggcactgttagaatatggggaccagcaccttttatagaccaccagaatattgaagaggaatgcagtagcatggatagttgatggtgaatttggagcagacgacttctgtttaacttaaaattagtcgtattttaatggcttgggatttggtgcaaacaaacatgattgatagctggacagacatgctcgtcatgaaaaaagaaccatttctgaagcccgattggggccaaacatttacaccttgcttcatagtaaccagttgagatgaagcacgtcgttagaacgttgttggacaccatgttgaattattcccccatcggttgtgaagaactgtgctacattcaggcttacccattgaactcagtatatatatttttttccttcctgtcttttgtctggcaggataccattcttgttgctcttctgtgtaatgaagtttaaatgcttgtttggaaaactttatttaacagtttagaaggcttgatagaaagagtgcattagtctgaagagtatacattggataggaaagaatttccttcttttgtttctccaaatctttccgccttatttagcttgagatctttgcagcttggttcatggattctagccttgcccgttgcgcagtatatactgatccagatgataaaccagtgaactatgtcaaaagcactctcaatattacatttgacaaaaagttttgtacttttcacatagcttgttgccccgtaaaagggttaacagcacaattttttaaaaataaattaagaagtatttatagga

SEQ ID NO: 236319 - DNA, 4927 bp, Homo sapiens
agatggtggtgagggagagaggaaataagttttttctaaatgctggagtctggaacccatgaagaatcagctgctagctgctgcccctcccgccgccgctgctgtcccccaccgaagtagcggccacagcctggtcagcggcagcatcatgcaggccaatggggcaggaggaggaggaggaggtggcggcggcggcggtggaggaggagggggcggcgggggccagggacagaccccggaactcgcctgcttgtcggcccagaacggggagtcgtccccctcgtcgtcgtcgtccgcgggggacctggcccacgccaatgggctcctgccttccgccccctccgccgccagcaacaatagcaacagcctgaatgtcaataacggggttcccggcggggcggccgccgcatcctcagccaccgtcgcagctgcctccgccaccaccgccgcctcctcttccttggccaccccagaactgggcagcagcctcaagaagaagaagcggctctcccagtcagatgaggatgtcattaggctaataggacagcacttgaatggcttagggctcaaccagactgttgatctcctcatgcaagagtcaggatgtcgtttagaacatccttctgctaccaaattccgaaatcatgtcatggaaggagactgggataaggcagaaaatgacctgaatgaactaaagcctttagtgcattctcctcatgctattgtgaggatgaagtttttgctgctgcagcagaagtacctagaatacctggaggatggcaaggtcctggaggcacttcaagttctacgctgtgaattgacgccgctgaaatacaatacagagcgcattcatgttcttagtgggtatctgatgtgtagccatgcagaagacctacgtgcaaaagcagaatgggaaggcaaagggacagcttcccgatctaaactattggataaacttcagacctatttaccaccatcagtgatgcttcccccacggcgtttacagactctcctgcggcaggcggtggaactacaaagggatcggtgcctatatcacaataccaaacttgataataatctagattctgtgtctctgcttatagaccatgtttgtagtaggaggcagttcccatgttatacgcagcagatacttacggagcattgtaatgaagtgtggttctgtaaattctctaatgatggcactaaactagcaacaggatcaaaagatacaacagttatcatatggcaagttgatccggatacacacctgctaaaactgcttaaaacattagaaggacatgcttatggcgtttcttatattgcatggagtccagatgacaactatcttgttgcttgtggcccagatgactgctctgagctttggctttggaatgtacaaacaggagaactaaggacaaaaatgagccagtctcatgaagacagtttgacaagtgtggcttggaatccagatgggaagcgctttgtgactggaggtcagcgtgggcagttctatcagtgtgacttagatggtaatctccttgactcctgggaaggggtaagagtgcaatgcctttggtgcttgagtgatggaaagactgttctggcatcagatacacaccagcgaattcggggctataacttcgaggaccttacagataggaacatagtacaagaagatcatcctattatgtcttttactatttcaaaaaatggccgattagctttgttaaatgtagcaactcagggagttcatttatgggacttgcaagacagagttttagtaagaaagtatcaaggtgttacacaagggttttatacaattcattcatgttttggaggccataatgaagacttcatcgctagtggcagtgaagatcacaaggtttacatctggcacaaacgtagtgaactgccaattgcggagctgacagggcacacacgtacagtaaactgtgtgagctggaacccacagattccatccatgatggccagcgcctcagatgatggcactgttagaatatggggaccagcaccttttatagaccaccagaatattgaagaggaatgcagtagcatggatagttgatggtgaatttggagcagacgacttctgtttaacttaaaattagtcgtattttaatggcttgggatttggtgcaaacaaacatgattgatagctggacagacatgctcgtcatgaaaaaagaaccatttctgaagcccgattggggccaaacatttacaccttgcttcatagtaaccagttgagatgaagcacgtcgttagaacgttgttggacaccatgttgaattattcccccatcggttgtgaagaactgtgctacattcaggcttacccattgaactcagtatatatatttttttccttcctgtcttttgtctggcaggataccattcttgttgctcttctgtgtaatgaagtttaaatgcttgtttggaaaactttatttaacagtttagaaggcttgatagaaagagtgcattagtctgaagagtatacattggataggaaagaatttccttcttttgtttctccaaatctttccgccttatttagcttgagatctttgcagcttggttcatggattctagccttgcccgttgcgcagtatatactgatccagatgataaaccagtgaactatgtcaaaagcactctcaatattacatttgacaaaaagttttgtacttttcacatagcttgttgccccgtaaaagggttaacagcacaattttttaaaaataaattaagaagtatttataggattaaagtgacttcatttgtatacatttggaatctaaaccagcttaaaaacagtttcctcaatgacttagatacacagtataactgatgctcttctggaataccacatgagacatggtcagaaacagtgcttggaaggacattacacaagaaattcagagtaatgctttgaagatttccccccttttgttttattcctgaaggaacatcagtacccgatcttgaagaaattcaagattcaaaaagaattttaaatacaccaacatgagacatcagtagtcagttggttttcagtaaagcttgttccaagttgttctcaacttaggaagtaattttggtgtgatctagcaaaagagtaggaatcagcgatacaaccactttggaagtttatagtataattgaaattattagaagaattcagcaggttacagacatacttaaactgggattaaaacctcatagtcatttttcttaattgcccttaatattttgacatatagggatacataaatttaaagaatattttttctcagttttttcagatattgccatactgaacctcattctaaactggtgctgtggatagtctttccctctcccctcctgttttagtttaaggaaaggtttccttcatggaaaagcacttttaattttgagaatttcacatttaaaataagccaaaagcctgatgttcacattgtgcttttaaactccgtaacagctgaatacaacataacatagtctcccttgaaattccctccctttttcagtagaggataaatagggtgactccagctgttggaatgagaatggggatacccccaaaataagattctggtgaagaaaaagtcttgtactaagttcccctttaggtgtagccaagtctataatataattatgatcatgaatagactccagaatccacaaagagaagagggcttggatgtcaaaaattcttccattgtggggtaggtggtcggggatgggagaaagggaaaagtcagggaaaggggagaagaaagaaaaacacatttggccttaaaatagcatgcattctcccagaagcccatagtaaagaaaatgacagatcgtggtcagcagactcttatcaaattggtatgtaaaagatttcttcaagctccattttgcagagaccaccacttagagaatcaaaaaattcctgttttgatacttctaagttaaaatatatgttacagtttatctggtacttcatttttcttaactaaaattactttttactttaagcttgaataaaaatcttcattggtaactgtatgtaattaagtggcaacttctctttacctcagtatagttaaaaaccattcatattttaagtgattcatgtataccctgaagccgttaatacaccccagtctctatggtaacatcactaaatgtgggcatagaaactccacagctgtttacaaatttggttacagtgtgctatggtgcatttgtaacactcagatttgtgcccattcaggggcaatttggcactcagattctactctacttcacctaaccacccctagatctgagttttcagagtgcttctgaagtacagtttaaaaacactttttaaaaagtggagtaaaagtgaggcacattttacaagaacataactcctattaaaacggagtaacaactatgcaaaggtttctatagcagctaggtgagtttgttttccgggtctgtcttaactggcagcttcctgtacatactggtacttatttgctgtaaacgtctgtttcatacatttgccatgcagtgactgtgctcgaaaggtgaaatcaatggtaaagaagcctaggattttatggtatgagaaactgatcgcaggattttctgatccatagctattaattgaaaacttctgatagtgctgtaggctctatagtaggcttaagagtgagtcttatactatgaagccagccacaagatactaacaaatgtataaattgaaaagtaccaatactttttgcacatagatcaaaatagagtggagaatttgggctccaaaaatcaggttagtaggctcatttccatgtgcttaaaaatgtttttgttgttatgcattgattaagggctagagcaaatataaaattaaatgtctttttcctcca

SEQ ID NO: 236320 - DNA, 4205 bp, Homo sapiens
agatggtggtgagggagagaggaaataagttttttctaaatgctggagtctggaacccatgaagaatcagctgctagctgctgcccctcccgccgccgctgctgtcccccaccgaagtagcggccacagcctggtcagcggcagcatcatgcaggccaatggggcaggaggaggaggaggaggtggcggcggcggcggtggaggaggagggggcggcgggggccagggacagaccccggaactcgcctgcttgtcggcccagaacggggagtcgtccccctcgtcgtcgtcgtccgcgggggacctggcccacgccaatgggctcctgccttccgccccctccgccgccagcaacaatagcaacagcctgaatgtcaataacggggttcccggcggggcggccgccgcatcctcagccaccgtcgcagctgcctccgccaccaccgccgcctcctcttccttggccaccccagaactgggcagcagcctcaagaagaagaagcggctctcccagtcagatgaggatgtcattaggctaataggacagcacttgaatggcttagggctcaaccagactgttgatctcctcatgcaagagtcaggatgtcgtttagaacatccttctgctaccaaattccgaaatcatgtcatggaaggagactgggataaggcagaaaatgacctgaatgaactaaagcctttagtgcattctcctcatgctattgtgaggatgaagtttttgctgctgcagcagaagtacctagaatacctggaggatggcaaggtcctggaggcacttcaagttctacgctgtgaattgacgccgctgaaatacaatacagagcgcattcatgttcttagtgggtatctgatgtgtagccatgcagaagacctacgtgcaaaagcagaatgggaaggcaaagggacagcttcccgatctaaactattggataaacttcagacctatttaccaccatcagtgatgcttcccccacggcgtttacagactctcctgcggcaggcggtggaactacaaagggatcggtgcctatatcacaataccaaacttgataataatctagattctgtgtctctgcttatagaccatgtttgtagtaggaggcagttcccatgttatacgcagcagatacttacggagcattgtaatgaagtgtggttctgtaaattctctaatgatggcactaaactagcaacaggatcaaaagatacaacagttatcatatggcaagttgatccggatacacacctgctaaaactgcttaaaacattagaaggacatgcttatggcgtttcttatattgcatggagtccagatgacaactatcttgttgcttgtggcccagatgactgctctgagctttggctttggaatgtacaaacaggagaactaaggacaaaaatgagccagtctcatgaagacagtttgacaagtgtggcttggaatccagatgggaagcgctttgtgactggaggtcagcgtgggcagttctatcagtgtgacttagatggtaatctccttgactcctgggaaggggtaagagtgcaatgcctttggtgcttgagtgatggaaagactgttctggcatcagatacacaccagcgaattcggggctataacttcgaggaccttacagataggaacatagtacaagaagatcatcctattatgtcttttactatttcaaaaaatggccgattagctttgttaaatgtagcaactcagggagttcatttatgggacttgcaagacagagttttagtaagaaagtatcaaggtgttacacaagggttttatacaattcattcatgttttggaggccataatgaagacttcatcgctagtggcagtgaagatcacaaggtttacatctggcacaaacgtagtgaactgccaattgcggagctgacagggcacacacgtacagtaaactgtgtgagctggaacccacagattccatccatgatggccagcgcctcagatgatggcactgttagaatatggggaccagcaccttttatagaccaccagaatattgaagaggaatgcagtagcatggatagttgatggtgaatttggagcagacgacttctgtttaacttaaaattagtcgtattttaatggcttgggatttggtgcaaacaaacatgattgatagctggacagacatgctcgtcatgaaaaaagaaccatttctgaagcccgattggggccaaacatttacaccttgcttcatagtaaccagttgagatgaagcacgtcgttagaacgttgttggacaccatgttgaattattcccccatcggttgtgaagaactgtgctacattcaggcttacccattgaactcagtatatatatttttttccttcctgtcttttgtctggcaggataccattcttgttgctcttctgtgtaatgaagtttaaatgcttgtttggaaaactttatttaacagtttagaaggcttgatagaaagagtgcattagtctgaagagtatacattggataggaaagaatttccttcttttgtttctccaaatctttccgccttatttagcttgagatctttgcagcttggttcatggattctagccttgcccgttgcgcagtatatactgatccagatgataaaccagtgaactatgtcaaaagcactctcaatattacatttgacaaaaagttttgtacttttcacatagcttgttgccccgtaaaagggttaacagcacaattttttaaaaataaattaagaagtatttataggattaaagtgacttcatttgtatacatttggaatctaaaccagcttaaaaacagtttcctcaatgacttagatacacagtataactgatgctcttctggaataccacatgagacatggtcagaaacagtgcttggaaggacattacacaagaaattcagagtaatgctttgaagatttccccccttttgttttattcctgaaggaacatcagtacccgatcttgaagaaattcaagattcaaaaagaattttaaatacaccaacatgagacatcagtagtcagttggttttcagtaaagcttgttccaagttgttctcaacttaggaagtaattttggtgtgatctagcaaaagagtaggaatcagcgatacaaccactttggaagtttatagtataattgaaattattagaagaattcagcaggttacagacatacttaaactgggattaaaacctcatagtcatttttcttaattgcccttaatattttgacatatagggatacataaatttaaagaatattttttctcagttttttcagatattgccatactgaacctcattctaaactggtgctgtggatagtctttccctctcccctcctgttttagtttaaggaaaggtttccttcatggaaaagcacttttaattttgagaatttcacatttaaaataagccaaaagcctgatgttcacattgtgcttttaaactccgtaacagctgaatacaacataacatagtctcccttgaaattccctccctttttcagtagaggataaatagggtgactccagctgttggaatgagaatggggatacccccaaaataagattctggtgaagaaaaagtcttgtactaagttcccctttaggtgtagccaagtctataatataattatgatcatgaatagactccagaatccacaaagagaagagggcttggatgtcaaaaattcttccattgtggggtaggtggtcggggatgggagaaagggaaaagtcagggaaaggggagaagaaagaaaaacacatttggccttaaaatagcatgcattctcccagaagcccatagtaaagaaaatgacagatcgtggtcagcagactcttatcaaattggtatgtaaaagatttcttcaagctccattttgcagagaccaccacttagagaatcaaaaaattcctgttttgatacttctaagttaaaatatatgttacagtttatctggtacttcatttttcttaactaaaattactttttactttaagcttgaataaaaatcttcattggtaactgtatgtaattaagtggcaacttctctttacctcagtatagttaaaaaccattcatattttaagtgattcatgtataccctgaagccgttaatacaccccggatcaccccggagtcttccgggatcctct

SEQ ID NO: 236321 - DNA, 3933 bp, Homo sapiens
ggatttgctggtgcagtacaactaggcttaatagggacatgagacatggtcagaaacagtgcttggaaggacattacacaagaaattcagagtaatgctttgaagatttccccccttttgttttattcctgaaggaacatcagtacccgatcttgaagaaattcaagattcaaaaagaattttaaatacaccaacatgagacatcagtagtcagttggttttcagtaaagcttgttccaagttgttctcaacttaggaagtaattttggtgtgatctagcaaaagagtaggaatcagcgatacaaccactttggaagtttatagtataattgaaattattagaagaattcagcaggttacagacatacttaaactgggattaaaacctcatagtcatttttcttaattgcccttaatattttgacatatagggatacataaatttaaagaatattttttctcagttttttcagatattgccatactgaacctcattctaaactggtgctgtggatagtctttccctctcccctcctgttttagtttaaggaaaggtttccttcatggaaaagcacttttaattttgagaatttcacatttaaaataagccaaaagcctgatgttcacattgtgcttttaaactccgtaacagctgaatacaacataacatagtctcccttgaaattccctccctttttcagtagaggataaatagggtgactccagctgttggaatgagaatggggatacccccaaaataagattctggtgaagaaaaagtcttgtactaagttcccctttaggtgtagccaagtctataatataattatgatcatgaatagactccagaatccacaaagagaagagggcttggatgtcaaaaattcttccattgtggggtaggtggtcggggatgggagaaagggaaaagtcagggaaaggggagaagaaagaaaaacacatttggccttaaaatagcatgcattctcccagaagcccatagtaaagaaaatgacagatcgtggtcagcagactcttatcaaattggtatgtaaaagatttcttcaagctccattttgcagagaccaccacttagagaatcaaaaaattcctgttttgatacttctaagttaaaatatatgttacagtttatctggtacttcatttttcttaactaaaattactttttactttaagcttgaataaaaatcttcattggtaactgtatgtaattaagtggcaacttctctttacctcagtatagttaaaaaccattcatattttaagtgattcatgtataccctgaagccgttaatacaccccagtctctatggtaacatcactaaatgtgggcatagaaactccacagctgtttacaaatttggttacagtgtgctatggtgcatttgtaacactcagatttgtgcccattcaggggcaatttggcactcagattctactctacttcacctaaccacccctagatctgagttttcagagtgcttctgaagtacagtttaaaaacactttttaaaaagtggagtaaaagtgaggcacattttacaagaacataactcctattaaaacggagtaacaactatgcaaaggtttctatagcagctaggtgagtttgttttccgggtctgtcttaactggcagcttcctgtacatactggtacttatttgctgtaaacgtctgtttcatacatttgccatgcagtgactgtgctcgaaaggtgaaatcaatggtaaagaagcctaggattttatggtatgagaaactgatcgcaggattttctgatccatagctattaattgaaaacttctgatagtgctgtaggctctatagtaggcttaagagtgagtcttatactatgaagccagccacaagatactaacaaatgtataaattgaaaagtaccaatactttttgcacatagatcaaaatagagtggagaatttgggctccaaaaatcaggttagtaggctcatttccatgtgcttaaaaatgtttttgttgttatgcattgattaagggctagagcaaatataaaattaaatgtctttttcctccaaataattggttattaatggtaaaatgttggacttggggattactgagattagtatgtgggtagtaaagaattggagtgggagttagtggggagggatgacaaagcttcagctttggtttttgtatttttttagtcttcataacagctacatttctgttgctcttattggccagataaatgtgttatattaaaccaggtaagtattttaaacagagaacattttatttgcatatatccctacaaattggcccattttattgggtggggggataaaaaagggattccctaactttaaataatcagaatatcctgcaattgaaaggagaaaaaaatccaattttgtcagtattttcttagtctgaaaaaaacagcagtagtaatctggtgaatgttattattaggagtgttctgcctctacagtggcatattccatgacattaatagaaaacccttctttcccacccctccccatcttgacattttcttttttaggatgttggttcctgcaaacaagaactgaccctatcacctctgcctcacagtgggtaaatatatcatacatctcttgaaagggaaaatatccatgtcagtttctttcacagtagaagaatggctgcttttgaatggggaggaaagaagacatttttcttaatatcctttttgtcccatctctaaaatgtataaatattttgatttggttttactttaatttctcattcataatttcgcaactgtccttttgggttgccctccaacacattacttccatttcagaaaccatatctgatttaatataaactgctaacttaagaagaggtgaatttgcatttacacttagacactttctaaaaacagggtgaacttaattgaaatttttcagtgttgttaagctattgttatagtagctgccctatagttacaaaaataaaaactataaaaacccatcccctatctacttaatccagatagcctggatttaacaaaaccaatagtataaaaatgtgtgtgtgtgttctgtgtgtgtgtgagagagagagtacttgattcattaaaaagtcctggaaacagctgttctaggatcttgtcatttttactgaaagtctcgtgcacatgtgaagtgccctctgagtttaaggtttggttaatactggtatatttttataagattgaaattgtgtccccatctttaacttaaacattttcattatcagggtcaatgtgctagaactgaattgtaacatttttaggcacagatggaaaaaaatgttattggctccttgaaaatgtgtgtgtgtggcgaggggaatagatccacaaaagcatgtatgtacttacaaaccaagctgtagagatcaagaaaagaacttaagtgttgatctcaagatttctaaattgtcaagatttacatggcattgtggtggaactagttaacacttagagcttttggtatgtaataactatttgctatggactgattaaatgtttcaaaagattgtgttcttcaattttggtgggttttgatttttgtttttttaactgcctctcagattatatttacttagtttaaatttctttgctttattcattaaagtataaaaacttcaggtctctgatatttattttcacttgtttactaattatttacaaaacaccctttgttgacttttattttataaatgtgtaatgtattaaacgtctttaaatttttgttcaactgaaactacattaactttgatttgctttactgggatttttttttaaagacactttttccatgtcagtgcgcagcacttaaccagtcgtttgtattccctttctttcaatccaataaacagaatgaatacctaaataaaaattg

SEQ ID NO: 236322 - DNA, 3107 bp, Homo sapiens
tccgcaaaagataaaaatttttctcaaagcaaagagaagagggcttggatgtcaaaaattcttccattgtggggtaggtggtcggggatgggagaaagggaaaagtcagggaaaggggagaagaaagaaaaacacatttggccttaaaatagcatgcattctcccagaagcccatagtaaagaaaatgacagatcgtggtcagcagactcttatcaaattggtatgtaaaagatttcttcaagctccattttgcagagaccaccacttagagaatcaaaaaattcctgttttgatacttctaagttaaaatatatgttacagtttatctggtacttcatttttcttaactaaaattactttttactttaagcttgaataaaaatcttcattggtaactgtatgtaattaagtggcaacttctctttacctcagtatagttaaaaaccattcatattttaagtgattcatgtataccctgaagccgttaatacaccccagtctctatggtaacatcactaaatgtgggcatagaaactccacagctgtttacaaatttggttacagtgtgctatggtgcatttgtaacactcagatttgtgcccattcaggggcaatttggcactcagattctactctacttcacctaaccacccctagatctgagttttcagagtgcttctgaagtacagtttaaaaacactttttaaaaagtggagtaaaagtgaggcacattttacaagaacataactcctattaaaacggagtaacaactatgcaaaggtttctatagcagctaggtgagtttgttttccgggtctgtcttaactggcagcttcctgtacatactggtacttatttgctgtaaacgtctgtttcatacatttgccatgcagtgactgtgctcgaaaggtgaaatcaatggtaaagaagcctaggattttatggtatgagaaactgatcgcaggattttctgatccatagctattaattgaaaacttctgatagtgctgtaggctctatagtaggcttaagagtgagtcttatactatgaagccagccacaagatactaacaaatgtataaattgaaaagtaccaatactttttgcacatagatcaaaatagagtggagaatttgggctccaaaaatcaggttagtaggctcatttccatgtgcttaaaaatgtttttgttgttatgcattgattaagggctagagcaaatataaaattaaatgtctttttcctccaaataattggttattaatggtaaaatgttggacttggggattactgagattagtatgtgggtagtaaagaattggagtgggagttagtggggagggatgacaaagcttcagctttggtttttgtatttttttagtcttcataacagctacatttctgttgctcttattggccagataaatgtgttatattaaaccaggtaagtattttaaacagagaacattttatttgcatatatccctacaaattggcccattttattgggtggggggataaaaaagggattccctaactttaaataatcagaatatcctgcaattgaaaggagaaaaaaatccaattttgtcagtattttcttagtctgaaaaaaacagcagtagtaatctggtgaatgttattattaggagtgttctgcctctacagtggcatattccatgacattaatagaaaacccttctttcccacccctccccatcttgacattttcttttttaggatgttggttcctgcaaacaagaactgaccctatcacctctgcctcacagtgggtaaatatatcatacatctcttgaaagggaaaatatccatgtcagtttctttcacagtagaagaatggctgcttttgaatggggaggaaagaagacatttttcttaatatcctttttgtcccatctctaaaatgtataaatattttgatttggttttactttaatttctcattcataatttcgcaactgtccttttgggttgccctccaacacattacttccatttcagaaaccatatctgatttaatataaactgctaacttaagaagaggtgaatttgcatttacacttagacactttctaaaaacagggtgaacttaattgaaatttttcagtgttgttaagctattgttatagtagctgccctatagttacaaaaataaaaactataaaaacccatcccctatctacttaatccagatagcctggatttaacaaaaccaatagtataaaaatgtgtgtgtgtgttctgtgtgtgtgtgagagagagagtacttgattcattaaaaagtcctggaaacagctgttctaggatcttgtcatttttactgaaagtctcgtgcacatgtgaagtgccctctgagtttaaggtttggttaatactggtatatttttataagattgaaattgtgtccccatctttaacttaaacattttcattatcagggtcaatgtgctagaactgaattgtaacatttttaggcacagatggaaaaaaatgttattggctccttgaaaatgtgtgtgtgtggcgaggggaatagatccacaaaagcatgtatgtacttacaaaccaagctgtagagatcaagaaaagaacttaagtgttgatctcaagatttctaaattgtcaagatttacatggcattgtggtggaactagttaacacttagagcttttggtatgtaataactatttgctatggactgattaaatgtttcaaaagattgtgttcttcaattttggtgggttttgatttttgtttttttaactgcctctcagattatatttacttagtttaaatttctttgctttattcattaaagtataaaaacttcaggtctctgatatttattttcacttgtttactaattatttacaaaacaccctttgttgacttttattttataaatgtgtaatgtattaaacgtctttaaatttttgttcaactgaaactacattaactttgatttgctttactgggatttttttttaaagacactttttccatgtcagtgcgcagcacttaaccagtcgtttgtattccctttctttcaatccaataaacagaatgaatacctaaataaaaattg

SEQ ID NO: 236323 - DNA, 3063 bp, Homo sapiens
ggtctagaggatcccacagaggctgaagggtaggtggtcggggatgggagaaagggaaaagtcagggaaaggggagaagaaagaaaaacacatttggccttaaaatagcatgcattctcccagaagcccatagtaaagaaaatgacagatcgtggtcagcagactcttatcaaattggtatgtaaaagatttcttcaagctccattttgcagagaccaccacttagagaatcaaaaaattcctgttttgatacttctaagttaaaatatatgttacagtttatctggtacttcatttttcttaactaaaattactttttactttaagcttgaataaaaatcttcattggtaactgtatgtaattaagtggcaacttctctttacctcagtatagttaaaaaccattcatattttaagtgattcatgtataccctgaagccgttaatacaccccagtctctatggtaacatcactaaatgtgggcatagaaactccacagctgtttacaaatttggttacagtgtgctatggtgcatttgtaacactcagatttgtgcccattcaggggcaatttggcactcagattctactctacttcacctaaccacccctagatctgagttttcagagtgcttctgaagtacagtttaaaaacactttttaaaaagtggagtaaaagtgaggcacattttacaagaacataactcctattaaaacggagtaacaactatgcaaaggtttctatagcagctaggtgagtttgttttccgggtctgtcttaactggcagcttcctgtacatactggtacttatttgctgtaaacgtctgtttcatacatttgccatgcagtgactgtgctcgaaaggtgaaatcaatggtaaagaagcctaggattttatggtatgagaaactgatcgcaggattttctgatccatagctattaattgaaaacttctgatagtgctgtaggctctatagtaggcttaagagtgagtcttatactatgaagccagccacaagatactaacaaatgtataaattgaaaagtaccaatactttttgcacatagatcaaaatagagtggagaatttgggctccaaaaatcaggttagtaggctcatttccatgtgcttaaaaatgtttttgttgttatgcattgattaagggctagagcaaatataaaattaaatgtctttttcctccaaataattggttattaatggtaaaatgttggacttggggattactgagattagtatgtgggtagtaaagaattggagtgggagttagtggggagggatgacaaagcttcagctttggtttttgtatttttttagtcttcataacagctacatttctgttgctcttattggccagataaatgtgttatattaaaccaggtaagtattttaaacagagaacattttatttgcatatatccctacaaattggcccattttattgggtggggggataaaaaagggattccctaactttaaataatcagaatatcctgcaattgaaaggagaaaaaaatccaattttgtcagtattttcttagtctgaaaaaaacagcagtagtaatctggtgaatgttattattaggagtgttctgcctctacagtggcatattccatgacattaatagaaaacccttctttcccacccctccccatcttgacattttcttttttaggatgttggttcctgcaaacaagaactgaccctatcacctctgcctcacagtgggtaaatatatcatacatctcttgaaagggaaaatatccatgtcagtttctttcacagtagaagaatggctgcttttgaatggggaggaaagaagacatttttcttaatatcctttttgtcccatctctaaaatgtataaatattttgatttggttttactttaatttctcattcataatttcgcaactgtccttttgggttgccctccaacacattacttccatttcagaaaccatatctgatttaatataaactgctaacttaagaagaggtgaatttgcatttacacttagacactttctaaaaacagggtgaacttaattgaaatttttcagtgttgttaagctattgttatagtagctgccctatagttacaaaaataaaaactataaaaacccatcccctatctacttaatccagatagcctggatttaacaaaaccaatagtataaaaatgtgtgtgtgtgttctgtgtgtgtgtgagagagagagtacttgattcattaaaaagtcctggaaacagctgttctaggatcttgtcatttttactgaaagtctcgtgcacatgtgaagtgccctctgagtttaaggtttggttaatactggtatatttttataagattgaaattgtgtccccatctttaacttaaacattttcattatcagggtcaatgtgctagaactgaattgtaacatttttaggcacagatggaaaaaaatgttattggctccttgaaaatgtgtgtgtgtggcgaggggaatagatccacaaaagcatgtatgtacttacaaaccaagctgtagagatcaagaaaagaacttaagtgttgatctcaagatttctaaattgtcaagatttacatggcattgtggtggaactagttaacacttagagcttttggtatgtaataactatttgctatggactgattaaatgtttcaaaagattgtgttcttcaattttggtgggttttgatttttgtttttttaactgcctctcagattatatttacttagtttaaatttctttgctttattcattaaagtataaaaacttcaggtctctgatatttattttcacttgtttactaattatttacaaaacaccctttgttgacttttattttataaatgtgtaatgtattaaacgtctttaaatttttgttcaactgaaactacattaactttgatttgctttactgggatttttttttaaagacactttttccatgtcagtgcgcagcacttaaccagtcgtttgtattccctttctttcaatccaataaacagaatgaatacctaaataaaaattg

SEQ ID NO: 236324 - DNA, 2478 bp, Homo sapiens
agatggtggtgagggagagaggaaataagttttttctaaatgctggagtctggaacccatgaagaatcagctgctagctgctgcccctcccgccgccgctgctgtcccccaccgaagtagcggccacagcctggtcagcggcagcatcatgcaggccaatggggcaggaggaggaggaggaggtggcggcggcggcggtggaggaggagggggcggcgggggccagggacagaccccggaactcgcctgcttgtcggcccagaacggggagtcgtccccctcgtcgtcgtcgtccgcgggggacctggcccacgccaatgggctcctgccttccgccccctccgccgccagcaacaatagcaacagcctgaatgtcaataacggggttcccggcggggcggccgccgcatcctcagccaccgtcgcagctgcctccgccaccaccgccgcctcctcttccttggccaccccagaactgggcagcagcctcaagaagaagaagcggctctcccagtcagatgaggatgtcattaggctaataggacagcacttgaatggcttagggctcaaccagactgttgatctcctcatgcaagagtcaggatgtcgtttagaacatccttctgctaccaaattccgaaatcatgtcatggaaggagactgggataaggcagaaaatgacctgaatgaactaaagcctttagtgcattctcctcatgctattgtgaggatgaagtttttgctgctgcagcagaagtacctagaatacctggaggatggcaaggtcctggaggcacttcaagttctacgctgtgaattgacgccgctgaaatacaatacagagcgcattcatgttcttagtgggtatctgatgtgtagccatgcagaagacctacgtgcaaaagcagaatgggaaggcaaagggacagcttcccgatctaaactattggataaacttcagacctatttaccaccatcagtgatgcttcccccacggcgtttacagactctcctgcggcaggcggtggaactacaaagggatcggtgcctatatcacaataccaaacttgataataatctagattctgtgtctctgcttatagaccatgtttgtagtaggaggcagttcccatgttatacgcagcagatacttacggagcattgtaatgaagtgtggttctgtaaattctctaatgatggcactaaactagcaacaggatcaaaagatacaacagttatcatatggcaagttgatccggatacacacctgctaaaactgcttaaaacattagaaggacatgcttatggcgtttcttatattgcatggagtccagatgacaactatcttgttgcttgtggcccagatgactgctctgagctttggctttggaatgtacaaacaggagaactaaggacaaaaatgagccagtctcatgaagacagtttgacaagtgtggcttggaatccagatgggaagcgctttgtgactggaggtcagcgtgggcagttctatcagtgtgacttagatggtaatctccttgactcctgggaaggggtaagagtgcaatgcctttggtgcttgagtgatggaaagactgttctggcatcagatacacaccagcgaattcggggctataacttcgaggaccttacagataggaacatagtacaagaagatcatcctattatgtcttttactatttcaaaaaatggccgattagctttgttaaatgtagcaactcagggagttcatttatgggacttgcaagacagagttttagtaagaaagtatcaaggtgttacacaagggttttatacaattcattcatgttttggaggccataatgaagacttcatcgctagtggcagtgaagatcacaaggtttacatctggcacaaacgtagtgaactgccaattgcggagctgacagggcacacacgtacagtaaactgtgtgagctggaacccacagattccatccatgatggccagcgcctcagatgatggcactgttagaatatggggaccagcaccttttatagaccaccagaatattgaagaggaatgcagtagcatggatagttgatggtgaatttggagcagacgacttctgtttaacttaaaattagtcgtattttaatggcttgggatttggtgcaaacaaacatgattgatagctggacagacatgctcgtcatgaaaaaagaaccatttctgaagcccgattggggccaaacatttacaccttgcttcatagtaaccagttgagatgaagcacgtcgttagaacgttgttggacaccatgttgaattattcccccatcggttgtgaagaactgtgctacattcaggcttacccattgaactcagtatatatatttttttccttcctgtcttttgtctggcaggataccattcttgttgctcttctgatagaggagtgcacggatcctcctagaatcaacccggccacgatcac

SEQ ID NO: 236325 - DNA, 2831 bp, Homo sapiens
agatggtggtgagggagagaggaaataagttttttctaaatgctggagtctggaacccatgaagaatcagctgctagctgctgcccctcccgccgccgctgctgtcccccaccgaagtagcggccacagcctggtcagcggcagcatcatgcaggccaatggggcaggaggaggaggaggaggtggcggcggcggcggtggaggaggagggggcggcgggggccagggacagaccccggaactcgcctgcttgtcggcccagaacggggagtcgtccccctcgtcgtcgtcgtccgcgggggacctggcccacgccaatgggctcctgccttccgccccctccgccgccagcaacaatagcaacagcctgaatgtcaataacggggttcccggcggggcggccgccgcatcctcagccaccgtcgcagctgcctccgccaccaccgccgcctcctcttccttggccaccccagaactgggcagcagcctcaagaagaagaagcggctctcccagtcagatgaggatgtcattaggctaataggacagcacttgaatggcttagggctcaaccagactgttgatctcctcatgcaagagtcaggatgtcgtttagaacatccttctgctaccaaattccgaaatcatgtcatggaaggagactgggataaggcagaaaatgacctgaatgaactaaagcctttagtgcattctcctcatgctattgtgaggatgaagtttttgctgctgcagcagaagtacctagaatacctggaggatggcaaggtcctggaggcacttcaagttctacgctgtgaattgacgccgctgaaatacaatacagagcgcattcatgttcttagtgggtatctgatgtgtagccatgcagaagacctacgtgcaaaagcagaatgggaaggcaaagggacagcttcccgatctaaactattggataaacttcagacctatttaccaccatcagtgatgcttcccccacggcgtttacagactctcctgcggcaggcggtggaactacaaagggatcggtgcctatatcacaataccaaacttgataataatctagattctgtgtctctgcttatagaccatgtttgtagtaggaggcagttcccatgttatacgcagcagatacttacggagcattgtaatgaagtgtggttctgtaaattctctaatgatggcactaaactagcaacaggatcaaaagatacaacagttatcatatggcaagttgatccggatacacacctgctaaaactgcttaaaacattagaaggacatgcttatggcgtttcttatattgcatggagtccagatgacaactatcttgttgcttgtggcccagatgactgctctgagctttggctttggaatgtacaaacaggagaactaaggacaaaaatgagccagtctcatgaagacagtttgacaagtgtggcttggaatccagatgggaagcgctttgtgactggaggtcagcgtgggcagttctatcagtgtgacttagatggtaatctccttgactcctgggaaggggtaagagtgcaatgcctttggtgcttgagtgatggaaagactgttctggcatcagatacacaccagcgaattcggggctataacttcgaggaccttacagataggaacatagtacaagaagatcatcctattatgtcttttactatttcaaaaaatggccgattagctttgttaaatgtagcaactcagggagttcatttatgggacttgcaagacagagttttagtaagaaagtatcaaggtgttacacaagggttttatacaattcattcatgttttggaggccataatgaagacttcatcgctagtggcagtgaaggtaaattgtgtccttatcagtttacatatgttgatattaaagtctgtaaatctcaatttatgaaggcagtcatgtctccaagaaaattcagggtagtaagttaaaattctttcatttatccaatacacggttaatttctctctgtaatgacctaagcccctgtattatcacaaattgtcacatgctgtcatgtattactttctccttttctgtaatgacctaagccctccatattgtcatgtattgtcacggattagcagtgcttattctgaccacgtagcagtgtgtttggtgcatgtgtctaatcaagatttagttaaattattatactttcatatgttgacttgtattttcatgggactgatggtttttaagggttggtagtatctgaaaaatcaaggttaattatgatgctctacctgaacttggacagatttgactatagttagttcttcagtatttcttcagcggtcaccagagttataattgagtttgataattcttaagattttaggaaagctgaaattattcttcctactactacccttttgaataaacttgttctctaatctaaaagtgtcagtattccagacaggaatatgcctaaagtcactctaaagtgtgaattgtttagaagatgcaagcacaaataagtgaggcagtaataaaaattagtgtactttttaaggcgataggaacttaactagtggcaaattattgcaagtttttattcaacacatttttcttcaatacccactgtacatttctaggtactataaaagcaaattatttaagtcactttttttggccgggcatgatggcttacacctgtaatctcaacactctgggaggcctagatgggagtactgcttgaggccacgagttccagaccaacctgggcaacatggctagacactgtctctacaaaaagtaaaaaaaatatatactgaatctggt

SEQ ID NO: 236326 - DNA, 3032 bp, Homo sapiens
  misc_feature (939)..(939): n is a, c, g, or t
  misc_feature (977)..(977): n is a, c, g, or t
  misc_feature (2913)..(2913): n is a, c, g, or t
agatggtggtgagggagagaggaaataagttttttctaaatgctggagtctggaacccatgaagaatcagctgctagctgctgcccctcccgccgccgctgctgtcccccaccgaagtagcggccacagcctggtcagcggcagcatcatgcaggccaatggggcaggaggaggaggaggaggtggcggcggcggcggtggaggaggagggggcggcgggggccagggacagaccccggaactcgcctgcttgtcggcccagaacggggagtcgtccccctcgtcgtcgtcgtccgcgggggacctggcccacgccaatgggctcctgccttccgccccctccgccgccagcaacaatagcaacagcctgaatgtcaataacggggttcccggcggggcggccgccgcatcctcagccaccgtcgcagctgcctccgccaccaccgccgcctcctcttccttggccaccccagaactgggcagcagcctcaagaagaagaagcggctctcccagtcagatgaggatgtcattaggctaataggacagcacttgaatggcttagggctcaaccagactgttgatctcctcatgcaagagtcaggatgtcgtttagaacatccttctgctaccaaattccgaaatcatgtcatggaaggagactgggataaggcagaaaatgacctgaatgaactaaagcctttagtgcattctcctcatgctattgtggtaagaggcgcacttgaaatctctcaaacgttgttgggaataattgtggtaaatacacttttgttcttagtttcacatttatgcttattttagtaggttattgataactctaggcttctgcctcttataaaaaaataaggcctaaaagtagttaaatttcatataatttgtaaactaggatgagtataatgttttaaagtatgagttttatntctttaaaatcatacttagtaaatgtgtcatttgaacnttataaattaagctctacaaaaaatatattgaaagctcttcatgctttcagtgctactaatagaggttttatatttatagagttaaagataaattatacttttattatgttacttaaaatactgaatgtgctggttaaagagaaaatgtgtttgggtgtgtgtatatccatacagccttaagaagctgatacattatctttttttttaatctttgggaattacagttaattcaagccaactccatttgtgtgctggccattttccattcttgcattccagttgtgtgaattgacagtgtcaaagtttgtataataacgtatcactctggtggagggtttgtgtgcagatttgaccatttggccctgcttactggccttatttccctgacaagatcaatttagtagtttaacctgttagccgctttcataattcttaatgaatcttttagacttatgggctttaattcttcagtagatggtggtgagggagagaggaaataagttttttctaaatgctggagtttggaaaccatgaagaatcagctgctagctgctggctttttaacttctagctgattcatttgttgtcaaaagcagtttcctgtctgggggtggggagagaaagaaggcaaataggaagtgaagtagagaaaccagctgtttgttaaatattagtaaatgactattacattttgatttttttaaaattgagtcaaacattaatcttttctgcctttttctataaaaataaggccttgtgtttttttcttttgaaatcttattacaaaagagttttcaaactcagtataattctacacaataatataatcctagagaaatgggcttcaggtgaattaaaggtgcaaacaagcaagaataaatgcaaattcatttaaattgatgatgtagtgtattatttttattctttcattaaatacttaaaatattaaaaattttaaactactgttgactaagatgattggtaataagttaacttataaaataattctgtagtaaaattgaaaaataaaaacagaagttaaaatagttaaacatctatattcaaagggattggaaatttttcgttaactaaagtttcctcagttggtgtgtttggggtttaaaaaaaaaatacccaagtacattttattgagcagttctgcataaatttttgcttctgactgaatgagctaaaataaaaacagttagatggccaaaagaagaattaaggttgctttcccattgggcaagttagcactacttgtgtgttgacaataaagaacttgcctgtggactggtttaaaatgtgtgtgatttcttggaggttgtttaagcttcgcccaaattatatctgtaatttagtagtaaaaaatttaataggcttacttcctatttttttcttatttgtttatagtaatttgagagttctgtattggatttcgattatgactatctcattagaaaccttcattagaggcagcatgtaaactgaagaaaggtagttatagataataaggaggaatcctttctttttacagcctgttcagtctgtagaacattctaggatctaataaaagatgaagattaaatctctggctgagcctcatgccatcaaactgtttaggtatttataaaaagaaaagggttccaacttttatctcactttaagcattgatgaatcaattgcttttaaagattaatttcagcattttttgaagttgctcttcacctctctaattgtgtttaaatttacttttctcatccatcccatctccagaagaagagaatctaatataagcttaaatttgtaataatatcttagaagacaactattagggtttctttaaacgtaattattttaattgtatacccagacacatttgatggcttagtctagactaaaattgtactttattttttaagcctgaatgttttnattgacccaatccactctctctacagcctgggtgattgagtgagactctgtcaaaaaagaaaaaagaaagaaaggaagagagaaagagagaaggaaaggaaggaaggacgaaaaaaaaa

SEQ ID NO: 236327 - DNA, 1460 bp, Homo sapiens
agatggtggtgagggagagaggaaataagttttttctaaatgctggagtctggaacccatgaagaatcagctgctagctgctgcccctcccgccgccgctgctgtcccccaccgaagtagcggccacagcctggtcagcggcagcatcatgcaggccaatggggcaggaggaggaggaggaggtggcggcggcggcggtggaggaggagggggcggcgggggccagggacagaccccggaactcgcctgcttgtcggcccagaacggggagtcgtccccctcgtcgtcgtcgtccgcgggggacctggcccacgccaatgggctcctgccttccgccccctccgccgccagcaacaatagcaacagcctgaatgtcaataacggggttcccggcggggcggccgccgcatcctcagccaccgtcgcagctgcctccgccaccaccgccgcctcctcttccttggccaccccagaactgggcagcagcctcaagaagaagaagcggctctcccagtcagatgaggatgtcattaggctaataggacagcacttgaatggcttagggctcaaccagactgttgatctcctcatgcaagagtcaggatgtcgtttagaacatccttctgctaccaaattccgaaatcatgtcatggaaggagactgggataaggcagaaaatgacctgaatgaactaaagcctttagtgcattctcctcatgctattgtgaggatgaagtttttgctgctgcagcagaagtacctagaatacctggaggatggcaaggtcctggaggcacttcaagttctacgctgtgaattgacgccgctgaaatacaatacagagcgcattcatgttcttagtgggtatctgatgtgtagccatgcagaagacctacgtgcaaaagcagaatgggaaggcaaagggacagcttcccgatctaaactattggataaacttcagacctatttaccaccatcagtgatgcttcccccacggcgtttacagactctcctgcggcaggcggtggaactacaaagggatcggtgcctatatcacaataccaaacttgataataatctagattctgtgtctctgcttatagaccatgtttgtagtaggtaagaggaaaacttccctatattcctgaaacagccctaacattttacaaaattttagttttcttttttagagtcttatcctgtagcctatataacagttcatgtctgatttagcatttgttcacgagtaaagctggaacaatgaaaattgaaaattatgagaaatttctgtatgtttacttagtaaccataccttgagaactgaagttgggaagccagtttttcgttatctataggtttggttacttgttttctgtgtctgacaatttaactatgtcccaaattatttactgcactccagcttgggcgacagggtcaaagctccgtctcaaaaaaaaaaa

SEQ ID NO: 236328 - DNA, 1096 bp, Homo sapiens
  misc_feature (1023)..(1023): n is a, c, g, or t
agatggtggtgagggagagaggaaataagttttttctaaatgctggagtctggaacccatgaagaatcagctgctagctgctgcccctcccgccgccgctgctgtcccccaccgaagtagcggccacagcctggtcagcggcagcatcatgcaggccaatggggcaggaggaggaggaggaggtggcggcggcggcggtggaggaggagggggcggcgggggccagggacagaccccggaactcgcctgcttgtcggcccagaacggggagtcgtccccctcgtcgtcgtcgtccgcgggggacctggcccacgccaatgggctcctgccttccgccccctccgccgccagcaacaatagcaacagcctgaatgtcaataacggggttcccggcggggcggccgccgcatcctcagccaccgtcgcagctgcctccgccaccaccgccgcctcctcttccttggccaccccagaactgggcagcagcctcaagaagaagaagcggctctcccagtcagatgaggatgtcattaggctaataggacagcacttgaatggcttagggctcaaccagactgttgatctcctcatgcaagagtcaggatgtcgtttagaacatccttctgctaccaaattccgaaatcatgtcatggaaggagactgggataaggcagaaaatgacctgaatgaactaaagcctttagtgcattctcctcatgctattgtggtaagaggcgcacttgaaatctctcaaacgttgttgggaataattgtgaggatgaagtttttgctgctgcagcagaagtacctagaatacctggaggatggcaaggtcctggaggcacttcaagttctacgctgtgaattgacgccgctgaaatacaatacagagcgcattcatgttcttagtgggtatctgatgtgtagccatgcagaagacctacgtgcaaaagcagaatgggaaggcaaagggacagcttcccgatctaaactattggataaacttcagacctattaccaccntcaggatgcttccccctcgggccgaatcttgggcttgagggccaaatccctattgggggcggtttaaatcgga

SEQ ID NO: 236329 - DNA, 1355 bp, Homo sapiens
agatggtggtgagggagagaggaaataagttttttctaaatgctggagtctggaacccatgaagaatcagctgctagctgctgcccctcccgccgccgctgctgtcccccaccgaagtagcggccacagcctggtcagcggcagcatcatgcaggccaatggggcaggaggaggaggaggaggtggcggcggcggcggtggaggaggagggggcggcgggggccagggacagaccccggaactcgcctgcttgtcggcccagaacggggagtcgtccccctcgtcgtcgtcgtccgcgggggacctggcccacgccaatgggctcctgccttccgccccctccgccgccagcaacaatagcaacagcctgaatgtcaataacggggttcccggcggggcggccgccgcatcctcagccaccgtcgcagctgcctccgccaccaccgccgcctcctcttccttggccaccccagaactgggcagcagcctcaagaagaagaagcggctctcccagtcagatgaggatgtcattaggctaataggacagcacttgaatggcttagggctcaaccagactgttgatctcctcatgcaagagtcaggatgtcgtttagaacatccttctgctaccaaattccgaaatcatgtcatggaaggagactgggataaggcagaaaatgacctgaatgaactaaagcctttagtgcattctcctcatgctattgtggtaagaggcgcacttgaaatctctcaaacgttgttgggaataattgtggcacaaacattttctgaaacttccatcaacttttttcccctgactgctgctttctgtcatgtcagaggatgaagtttttgctgctgcagcagaagtacctagaatacctggaggatggcaaggtcctggaggcacttcaagttctacgctgtgaattgacgccgctgaaatacaatacagagcgcattcatgttcttagtgggtatctgatgtgtagccatgcagaagacctacgtgcaaaagcagaatgggaaggcaaagggacagcttcccgatctaaactattggataaacttcagagtaagagtcttaattttttatgttgctgtgttttctcttagattacaaatggatacagtgatcaattaggaagacagatggggaatatctggacatacttttattgagtgcttagaagagggagaatccagtttttcagactctgtcatggagtctaagaagctaacctcaggagtcagtgaaagggcactggttccagagcagcccttctttcatttgtattatgtgatgatgttcccccttaagattttgtttgggggaaaagtactgtgttaagaga

SEQ ID NO: 236330 - DNA, 687 bp, Homo sapiens
ggtaatctccttgactcctgggaaggggtaagagtgcaatgcctttggtgcttgagtgatggaaagactgttctggcatcagatacacaccagcgaattcggggctataacttcgaggaccttacagataggaacatgtaactattttttgtttccattaaacaacaattacctgatttatattcaaatgtgtagtggaacttgccttttcacagtttttatgtttttcgttttggtttgcgtggtaatttggattgaaggtcacatggtacttagtaatcagtaactcagattcttctcaattgaagtatagtatgtaatagtgattgcaggcaaaattgtcatacttaagctagcacatcttatgtattgataatttgaatgtcttgactgttaatatgttgtttttgacaaattattttctggttccagagtacaagaagatcatcctattatgtcttttactatttcaaaaaatggccgattagctttgttaaatgtagcaactcaggtatgtttattagtataattttctgaaaaatttggcttagtacaagttttattttaactgttattttcagtgtatttatattaacaaaattttctacttacccttaaatttgattgcatgtgattgatccttaaatgtgtataatcaaccataaatttgtcagaatgttggtattt

SEQ ID NO: 236331 - DNA, 415 bp, Homo sapiens
cagtacatttggcggacagtagacaggtccctgaagaggagcaataagagatgaagccaaaaagaaagactgaaagcaacctgtggtgagcaagacagaatttggattttattctgtaggtaatgtggtgttactgaaggttcctcagtgtgtagagtggtatttcagaattgttcatctgcacatagacctgaaacttggctttagaaagacctaaagacccagagttcagataacagattctcaagctgtgttttagtacagagaaaaatgttctgtaagggactttataaattcagaattctaacacgagcagtgttggttacctaaaaattagaaaaactggaatatagagtttagatagcaatggaatccaatttatttttcatcattttacttttgttaatgaagtgtg

SEQ ID NO: 236332 - DNA, 274 bp, Homo sapiens
gagcaggcctctcccctccgtcctcgtcgtcctcgtcctcctcctcctcctcctcctccgtggtggtagtggtgggacttcccccggctgctgcccctcccgccgccgctgctgtcccccaccgaagtagcggccacagcctggtcagcggcagcatcatgcaggccaatggggcaggaggaggaggaggaggtggcggcggcggcggtggaggaggagggggcggcgggggccagggacagaccccggaactcgcctgcttgtcggcccagaa

SEQ ID NO: 236333 - DNA, 6785 bp, Homo sapiens
agatggtggtgagggagagaggaaataagttttttctaaatgctggagtctggaacccatgaagaatcagctgctagctgctgcccctcccgccgccgctgctgtcccccaccgaagtagcggccacagcctggtcagcggcagcatcatgcaggccaatggggcaggaggaggaggaggaggtggcggcggcggcggtggaggaggagggggcggcgggggccagggacagaccccggaactcgcctgcttgtcggcccagaacggggagtcgtccccctcgtcgtcgtcgtccgcgggggacctggcccacgccaatgggctcctgccttccgccccctccgccgccagcaacaatagcaacagcctgaatgtcaataacggggttcccggcggggcggccgccgcatcctcagccaccgtcgcagctgcctccgccaccaccgccgcctcctcttccttggccaccccagaactgggcagcagcctcaagaagaagaagcggctctcccagtcagatgaggatgtcattaggctaataggacagcacttgaatggcttagggctcaaccagactgttgatctcctcatgcaagagtcaggatgtcgtttagaacatccttctgctaccaaattccgaaatcatgtcatggaaggagactgggataaggcagaaaatgacctgaatgaactaaagcctttagtgcattctcctcatgctattgtgaggatgaagtttttgctgctgcagcagaagtacctagaatacctggaggatggcaaggtcctggaggcacttcaagttctacgctgtgaattgacgccgctgaaatacaatacagagcgcattcatgttcttagtgggtatctgatgtgtagccatgcagaagacctacgtgcaaaagcagaatgggaaggcaaagggacagcttcccgatctaaactattggataaacttcagacctatttaccaccatcagtgatgcttcccccacggcgtttacagactctcctgcggcaggcggtggaactacaaagggatcggtgcctatatcacaataccaaacttgataataatctagattctgtgtctctgcttatagaccatgtttgtagtaggaggcagttcccatgttatacgcagcagatacttacggagcattgtaatgaagtgtggttctgtaaattctctaatgatggcactaaactagcaacaggatcaaaagatacaacagttatcatatggcaagttgatccggatacacacctgctaaaactgcttaaaacattagaaggacatgcttatggcgtttcttatattgcatggagtccagatgacaactatcttgttgcttgtggcccagatgactgctctgagctttggctttggaatgtacaaacaggagaactaaggacaaaaatgagccagtctcatgaagacagtttgacaagtgtggcttggaatccagatgggaagcgctttgtgactggaggtcagcgtgggcagttctatcagtgtgacttagatggtaatctccttgactcctgggaaggggtaagagtgcaatgcctttggtgcttgagtgatggaaagactgttctggcatcagatacacaccagcgaattcggggctataacttcgaggaccttacagataggaacatagtacaagaagatcatcctattatgtcttttactatttcaaaaaatggccgattagctttgttaaatgtagcaactcagggagttcatttatgggacttgcaagacagagttttagtaagaaagtatcaaggtgttacacaagggttttatacaattcattcatgttttggaggccataatgaagacttcatcgctagtggcagtgaagatcacaaggtttacatctggcacaaacgtagtgaactgccaattgcggagctgacagggcacacacgtacagtaaactgtgtgagctggaacccacagattccatccatgatggccagcgcctcagatgatggcactgttagaatatggggaccagcaccttttatagaccaccagaatattgaagaggaatgcagtagcatggatagttgatggtgaatttggagcagacgacttctgtttaacttaaaattagtcgtattttaatggcttgggatttggtgcaaacaaacatgattgatagctggacagacatgctcgtcatgaaaaaagaaccatttctgaagcccgattggggccaaacatttacaccttgcttcatagtaaccagttgagatgaagcacgtcgttagaacgttgttggacaccatgttgaattattcccccatcggttgtgaagaactgtgctacattcaggcttacccattgaactcagtatatatatttttttccttcctgtcttttgtctggcaggataccattcttgttgctcttctgtgtaatgaagtttaaatgcttgtttggaaaactttatttaacagtttagaaggcttgatagaaagagtgcattagtctgaagagtatacattggataggaaagaatttccttcttttgtttctccaaatctttccgccttatttagcttgagatctttgcagcttggttcatggattctagccttgcccgttgcgcagtatatactgatccagatgataaaccagtgaactatgtcaaaagcactctcaatattacatttgacaaaaagttttgtacttttcacatagcttgttgccccgtaaaagggttaacagcacaattttttaaaaataaattaagaagtatttataggattaaagtgacttcatttgtatacatttggaatctaaaccagcttaaaaacagtttcctcaatgacttagatacacagtataactgatgctcttctggaataccacatgagacatggtcagaaacagtgcttggaaggacattacacaagaaattcagagtaatgctttgaagatttccccccttttgttttattcctgaaggaacatcagtacccgatcttgaagaaattcaagattcaaaaagaattttaaatacaccaacatgagacatcagtagtcagttggttttcagtaaagcttgttccaagttgttctcaacttaggaagtaattttggtgtgatctagcaaaagagtaggaatcagcgatacaaccactttggaagtttatagtataattgaaattattagaagaattcagcaggttacagacatacttaaactgggattaaaacctcatagtcatttttcttaattgcccttaatattttgacatatagggatacataaatttaaagaatattttttctcagttttttcagatattgccatactgaacctcattctaaactggtgctgtggatagtctttccctctcccctcctgttttagtttaaggaaaggtttccttcatggaaaagcacttttaattttgagaatttcacatttaaaataagccaaaagcctgatgttcacattgtgcttttaaactccgtaacagctgaatacaacataacatagtctcccttgaaattccctccctttttcagtagaggataaatagggtgactccagctgttggaatgagaatggggatacccccaaaataagattctggtgaagaaaaagtcttgtactaagttcccctttaggtgtagccaagtctataatataattatgatcatgaatagactccagaatccacaaagagaagagggcttggatgtcaaaaattcttccattgtggggtaggtggtcggggatgggagaaagggaaaagtcagggaaaggggagaagaaagaaaaacacatttggccttaaaatagcatgcattctcccagaagcccatagtaaagaaaatgacagatcgtggtcagcagactcttatcaaattggtatgtaaaagatttcttcaagctccattttgcagagaccaccacttagagaatcaaaaaattcctgttttgatacttctaagttaaaatatatgttacagtttatctggtacttcatttttcttaactaaaattactttttactttaagcttgaataaaaatcttcattggtaactgtatgtaattaagtggcaacttctctttacctcagtatagttaaaaaccattcatattttaagtgattcatgtataccctgaagccgttaatacaccccagtctctatggtaacatcactaaatgtgggcatagaaactccacagctgtttacaaatttggttacagtgtgctatggtgcatttgtaacactcagatttgtgcccattcaggggcaatttggcactcagattctactctacttcacctaaccacccctagatctgagttttcagagtgcttctgaagtacagtttaaaaacactttttaaaaagtggagtaaaagtgaggcacattttacaagaacataactcctattaaaacggagtaacaactatgcaaaggtttctatagcagctaggtgagtttgttttccgggtctgtcttaactggcagcttcctgtacatactggtacttatttgctgtaaacgtctgtttcatacatttgccatgcagtgactgtgctcgaaaggtgaaatcaatggtaaagaagcctaggattttatggtatgagaaactgatcgcaggattttctgatccatagctattaattgaaaacttctgatagtgctgtaggctctatagtaggcttaagagtgagtcttatactatgaagccagccacaagatactaacaaatgtataaattgaaaagtaccaatactttttgcacatagatcaaaatagagtggagaatttgggctccaaaaatcaggttagtaggctcatttccatgtgcttaaaaatgtttttgttgttatgcattgattaagggctagagcaaatataaaattaaatgtctttttcctccaaataattggttattaatggtaaaatgttggacttggggattactgagattagtatgtgggtagtaaagaattggagtgggagttagtggggagggatgacaaagcttcagctttggtttttgtatttttttagtcttcataacagctacatttctgttgctcttattggccagataaatgtgttatattaaaccaggtaagtattttaaacagagaacattttatttgcatatatccctacaaattggcccattttattgggtggggggataaaaaagggattccctaactttaaataatcagaatatcctgcaattgaaaggagaaaaaaatccaattttgtcagtattttcttagtctgaaaaaaacagcagtagtaatctggtgaatgttattattaggagtgttctgcctctacagtggcatattccatgacattaatagaaaacccttctttcccacccctccccatcttgacattttcttttttaggatgttggttcctgcaaacaagaactgaccctatcacctctgcctcacagtgggtaaatatatcatacatctcttgaaagggaaaatatccatgtcagtttctttcacagtagaagaatggctgcttttgaatggggaggaaagaagacatttttcttaatatcctttttgtcccatctctaaaatgtataaatattttgatttggttttactttaatttctcattcataatttcgcaactgtccttttgggttgccctccaacacattacttccatttcagaaaccatatctgatttaatataaactgctaacttaagaagaggtgaatttgcatttacacttagacactttctaaaaacagggtgaacttaattgaaatttttcagtgttgttaagctattgttatagtagctgccctatagttacaaaaataaaaactataaaaacccatcccctatctacttaatccagatagcctggatttaacaaaaccaatagtataaaaatgtgtgtgtgtgttctgtgtgtgtgtgagagagagagtacttgattcattaaaaagtcctggaaacagctgttctaggatcttgtcatttttactgaaagtctcgtgcacatgtgaagtgccctctgagtttaaggtttggttaatactggtatatttttataagattgaaattgtgtccccatctttaacttaaacattttcattatcagggtcaatgtgctagaactgaattgtaacatttttaggcacagatggaaaaaaatgttattggctccttgaaaatgtgtgtgtgtggcgaggggaatagatccacaaaagcatgtatgtacttacaaaccaagctgtagagatcaagaaaagaacttaagtgttgatctcaagatttctaaattgtcaagatttacatggcattgtggtggaactagttaacacttagagcttttggtatgtaataactatttgctatggactgattaaatgtttcaaaagattgtgttcttcaattttggtgggttttgatttttgtttttttaactgcctctcagattatatttacttagtttaaatttctttgctttattcattaaagtataaaaacttcaggtctctgatatttattttcacttgtttactaattatttacaaaacaccctttgttgacttttattttataaatgtgtaatgtattaaacgtctttaaatttttgttcaactgaaactacattaactttgatttgctttactgggatttttttttaaagacactttttccatgtcagtgcgcagcacttaaccagtcgtttgtattccctttctttcaatccaataaacagaatgaatacctaaataaaaattg

SEQ ID NO: 236334 - DNA, 6898 bp, Homo sapiens
agatggtggtgagggagagaggaaataagttttttctaaatgctggagtctggaacccatgaagaatcagctgctagctgctgcccctcccgccgccgctgctgtcccccaccgaagtagcggccacagcctggtcagcggcagcatcatgcaggccaatggggcaggaggaggaggaggaggtggcggcggcggcggtggaggaggagggggcggcgggggccagggacagaccccggaactcgcctgcttgtcggcccagaacggggagtcgtccccctcgtcgtcgtcgtccgcgggggacctggcccacgccaatgggctcctgccttccgccccctccgccgccagcaacaatagcaacagcctgaatgtcaataacggggttcccggcggggcggccgccgcatcctcagccaccgtcgcagctgcctccgccaccaccgccgcctcctcttccttggccaccccagaactgggcagcagcctcaagaagaagaagcggctctcccagtcagatgaggatgtcattaggctaataggacagcacttgaatggcttagggctcaaccagactgttgatctcctcatgcaagagtcaggatgtcgtttagaacatccttctgctaccaaattccgaaatcatgtcatggaaggagactgggataaggcagaaaatgacctgaatgaactaaagcctttagtgcattctcctcatgctattgtggtaagaggcgcacttgaaatctctcaaacgttgttgggaataattgtggcacaaacattttctgaaacttccatcaacttttttcccctgactgctgctttctgtcatgtcagaggatgaagtttttgctgctgcagcagaagtacctagaatacctggaggatggcaaggtcctggaggcacttcaagttctacgctgtgaattgacgccgctgaaatacaatacagagcgcattcatgttcttagtgggtatctgatgtgtagccatgcagaagacctacgtgcaaaagcagaatgggaaggcaaagggacagcttcccgatctaaactattggataaacttcagacctatttaccaccatcagtgatgcttcccccacggcgtttacagactctcctgcggcaggcggtggaactacaaagggatcggtgcctatatcacaataccaaacttgataataatctagattctgtgtctctgcttatagaccatgtttgtagtaggaggcagttcccatgttatacgcagcagatacttacggagcattgtaatgaagtgtggttctgtaaattctctaatgatggcactaaactagcaacaggatcaaaagatacaacagttatcatatggcaagttgatccggatacacacctgctaaaactgcttaaaacattagaaggacatgcttatggcgtttcttatattgcatggagtccagatgacaactatcttgttgcttgtggcccagatgactgctctgagctttggctttggaatgtacaaacaggagaactaaggacaaaaatgagccagtctcatgaagacagtttgacaagtgtggcttggaatccagatgggaagcgctttgtgactggaggtcagcgtgggcagttctatcagtgtgacttagatggtaatctccttgactcctgggaaggggtaagagtgcaatgcctttggtgcttgagtgatggaaagactgttctggcatcagatacacaccagcgaattcggggctataacttcgaggaccttacagataggaacatagtacaagaagatcatcctattatgtcttttactatttcaaaaaatggccgattagctttgttaaatgtagcaactcagggagttcatttatgggacttgcaagacagagttttagtaagaaagtatcaaggtgttacacaagggttttatacaattcattcatgttttggaggccataatgaagacttcatcgctagtggcagtgaagatcacaaggtttacatctggcacaaacgtagtgaactgccaattgcggagctgacagggcacacacgtacagtaaactgtgtgagctggaacccacagattccatccatgatggccagcgcctcagatgatggcactgttagaatatggggaccagcaccttttatagaccaccagaatattgaagaggaatgcagtagcatggatagttgatggtgaatttggagcagacgacttctgtttaacttaaaattagtcgtattttaatggcttgggatttggtgcaaacaaacatgattgatagctggacagacatgctcgtcatgaaaaaagaaccatttctgaagcccgattggggccaaacatttacaccttgcttcatagtaaccagttgagatgaagcacgtcgttagaacgttgttggacaccatgttgaattattcccccatcggttgtgaagaactgtgctacattcaggcttacccattgaactcagtatatatatttttttccttcctgtcttttgtctggcaggataccattcttgttgctcttctgtgtaatgaagtttaaatgcttgtttggaaaactttatttaacagtttagaaggcttgatagaaagagtgcattagtctgaagagtatacattggataggaaagaatttccttcttttgtttctccaaatctttccgccttatttagcttgagatctttgcagcttggttcatggattctagccttgcccgttgcgcagtatatactgatccagatgataaaccagtgaactatgtcaaaagcactctcaatattacatttgacaaaaagttttgtacttttcacatagcttgttgccccgtaaaagggttaacagcacaattttttaaaaataaattaagaagtatttataggattaaagtgacttcatttgtatacatttggaatctaaaccagcttaaaaacagtttcctcaatgacttagatacacagtataactgatgctcttctggaataccacatgagacatggtcagaaacagtgcttggaaggacattacacaagaaattcagagtaatgctttgaagatttccccccttttgttttattcctgaaggaacatcagtacccgatcttgaagaaattcaagattcaaaaagaattttaaatacaccaacatgagacatcagtagtcagttggttttcagtaaagcttgttccaagttgttctcaacttaggaagtaattttggtgtgatctagcaaaagagtaggaatcagcgatacaaccactttggaagtttatagtataattgaaattattagaagaattcagcaggttacagacatacttaaactgggattaaaacctcatagtcatttttcttaattgcccttaatattttgacatatagggatacataaatttaaagaatattttttctcagttttttcagatattgccatactgaacctcattctaaactggtgctgtggatagtctttccctctcccctcctgttttagtttaaggaaaggtttccttcatggaaaagcacttttaattttgagaatttcacatttaaaataagccaaaagcctgatgttcacattgtgcttttaaactccgtaacagctgaatacaacataacatagtctcccttgaaattccctccctttttcagtagaggataaatagggtgactccagctgttggaatgagaatggggatacccccaaaataagattctggtgaagaaaaagtcttgtactaagttcccctttaggtgtagccaagtctataatataattatgatcatgaatagactccagaatccacaaagagaagagggcttggatgtcaaaaattcttccattgtggggtaggtggtcggggatgggagaaagggaaaagtcagggaaaggggagaagaaagaaaaacacatttggccttaaaatagcatgcattctcccagaagcccatagtaaagaaaatgacagatcgtggtcagcagactcttatcaaattggtatgtaaaagatttcttcaagctccattttgcagagaccaccacttagagaatcaaaaaattcctgttttgatacttctaagttaaaatatatgttacagtttatctggtacttcatttttcttaactaaaattactttttactttaagcttgaataaaaatcttcattggtaactgtatgtaattaagtggcaacttctctttacctcagtatagttaaaaaccattcatattttaagtgattcatgtataccctgaagccgttaatacaccccagtctctatggtaacatcactaaatgtgggcatagaaactccacagctgtttacaaatttggttacagtgtgctatggtgcatttgtaacactcagatttgtgcccattcaggggcaatttggcactcagattctactctacttcacctaaccacccctagatctgagttttcagagtgcttctgaagtacagtttaaaaacactttttaaaaagtggagtaaaagtgaggcacattttacaagaacataactcctattaaaacggagtaacaactatgcaaaggtttctatagcagctaggtgagtttgttttccgggtctgtcttaactggcagcttcctgtacatactggtacttatttgctgtaaacgtctgtttcatacatttgccatgcagtgactgtgctcgaaaggtgaaatcaatggtaaagaagcctaggattttatggtatgagaaactgatcgcaggattttctgatccatagctattaattgaaaacttctgatagtgctgtaggctctatagtaggcttaagagtgagtcttatactatgaagccagccacaagatactaacaaatgtataaattgaaaagtaccaatactttttgcacatagatcaaaatagagtggagaatttgggctccaaaaatcaggttagtaggctcatttccatgtgcttaaaaatgtttttgttgttatgcattgattaagggctagagcaaatataaaattaaatgtctttttcctccaaataattggttattaatggtaaaatgttggacttggggattactgagattagtatgtgggtagtaaagaattggagtgggagttagtggggagggatgacaaagcttcagctttggtttttgtatttttttagtcttcataacagctacatttctgttgctcttattggccagataaatgtgttatattaaaccaggtaagtattttaaacagagaacattttatttgcatatatccctacaaattggcccattttattgggtggggggataaaaaagggattccctaactttaaataatcagaatatcctgcaattgaaaggagaaaaaaatccaattttgtcagtattttcttagtctgaaaaaaacagcagtagtaatctggtgaatgttattattaggagtgttctgcctctacagtggcatattccatgacattaatagaaaacccttctttcccacccctccccatcttgacattttcttttttaggatgttggttcctgcaaacaagaactgaccctatcacctctgcctcacagtgggtaaatatatcatacatctcttgaaagggaaaatatccatgtcagtttctttcacagtagaagaatggctgcttttgaatggggaggaaagaagacatttttcttaatatcctttttgtcccatctctaaaatgtataaatattttgatttggttttactttaatttctcattcataatttcgcaactgtccttttgggttgccctccaacacattacttccatttcagaaaccatatctgatttaatataaactgctaacttaagaagaggtgaatttgcatttacacttagacactttctaaaaacagggtgaacttaattgaaatttttcagtgttgttaagctattgttatagtagctgccctatagttacaaaaataaaaactataaaaacccatcccctatctacttaatccagatagcctggatttaacaaaaccaatagtataaaaatgtgtgtgtgtgttctgtgtgtgtgtgagagagagagtacttgattcattaaaaagtcctggaaacagctgttctaggatcttgtcatttttactgaaagtctcgtgcacatgtgaagtgccctctgagtttaaggtttggttaatactggtatatttttataagattgaaattgtgtccccatctttaacttaaacattttcattatcagggtcaatgtgctagaactgaattgtaacatttttaggcacagatggaaaaaaatgttattggctccttgaaaatgtgtgtgtgtggcgaggggaatagatccacaaaagcatgtatgtacttacaaaccaagctgtagagatcaagaaaagaacttaagtgttgatctcaagatttctaaattgtcaagatttacatggcattgtggtggaactagttaacacttagagcttttggtatgtaataactatttgctatggactgattaaatgtttcaaaagattgtgttcttcaattttggtgggttttgatttttgtttttttaactgcctctcagattatatttacttagtttaaatttctttgctttattcattaaagtataaaaacttcaggtctctgatatttattttcacttgtttactaattatttacaaaacaccctttgttgacttttattttataaatgtgtaatgtattaaacgtctttaaatttttgttcaactgaaactacattaactttgatttgctttactgggatttttttttaaagacactttttccatgtcagtgcgcagcacttaaccagtcgtttgtattccctttctttcaatccaataaacagaatgaatacctaaataaaaattg

SEQ ID NO: 236335 - DNA, 6656 bp, Homo sapiens
agcgggagtggaagtcaggaaaggctcccctgaggaggtttgaaatgagctgagtcttgaaagactgactggcatcagacaggtgaagaaaagacgggagagtgtagtcaaagactctcaaggagaaatgagccagtacatttggcggacagtagacaggtccctgaagaggagcaataagagatgaagccaaaaagaaagactgaaagcaacctgtggaaaactacttcagagaaagactttaaatttctgagaaaatctttatacatattgagtatagatgctatcaaccacatacatgaaaataattgtttggggataatgcacaccatttgccaatgattaagattcagcccagtctttgttgctgcatttctacattcacataaattgccagactgttgatctcctcatgcaagagtcaggatgtcgtttagaacatccttctgctaccaaattccgaaatcatgtcatggaaggagactgggataaggcagaaaatgacctgaatgaactaaagcctttagtgcattctcctcatgctattgtggtaagaggcgcacttgaaatctctcaaacgttgttgggaataattgtgaggatgaagtttttgctgctgcagcagaagtacctagaatacctggaggatggcaaggtcctggaggcacttcaagttctacgctgtgaattgacgccgctgaaatacaatacagagcgcattcatgttcttagtgggtatctgatgtgtagccatgcagaagacctacgtgcaaaagcagaatgggaaggcaaagggacagcttcccgatctaaactattggataaacttcagacctatttaccaccatcagtgatgcttcccccacggcgtttacagactctcctgcggcaggcggtggaactacaaagggatcggtgcctatatcacaataccaaacttgataataatctagattctgtgtctctgcttatagaccatgtttgtagtaggaggcagttcccatgttatacgcagcagatacttacggagcattgtaatgaagtgtggttctgtaaattctctaatgatggcactaaactagcaacaggatcaaaagatacaacagttatcatatggcaagttgatccggatacacacctgctaaaactgcttaaaacattagaaggacatgcttatggcgtttcttatattgcatggagtccagatgacaactatcttgttgcttgtggcccagatgactgctctgagctttggctttggaatgtacaaacaggagaactaaggacaaaaatgagccagtctcatgaagacagtttgacaagtgtggcttggaatccagatgggaagcgctttgtgactggaggtcagcgtgggcagttctatcagtgtgacttagatggtaatctccttgactcctgggaaggggtaagagtgcaatgcctttggtgcttgagtgatggaaagactgttctggcatcagatacacaccagcgaattcggggctataacttcgaggaccttacagataggaacatagtacaagaagatcatcctattatgtcttttactatttcaaaaaatggccgattagctttgttaaatgtagcaactcagggagttcatttatgggacttgcaagacagagttttagtaagaaagtatcaaggtgttacacaagggttttatacaattcattcatgttttggaggccataatgaagacttcatcgctagtggcagtgaagatcacaaggtttacatctggcacaaacgtagtgaactgccaattgcggagctgacagggcacacacgtacagtaaactgtgtgagctggaacccacagattccatccatgatggccagcgcctcagatgatggcactgttagaatatggggaccagcaccttttatagaccaccagaatattgaagaggaatgcagtagcatggatagttgatggtgaatttggagcagacgacttctgtttaacttaaaattagtcgtattttaatggcttgggatttggtgcaaacaaacatgattgatagctggacagacatgctcgtcatgaaaaaagaaccatttctgaagcccgattggggccaaacatttacaccttgcttcatagtaaccagttgagatgaagcacgtcgttagaacgttgttggacaccatgttgaattattcccccatcggttgtgaagaactgtgctacattcaggcttacccattgaactcagtatatatatttttttccttcctgtcttttgtctggcaggataccattcttgttgctcttctgtgtaatgaagtttaaatgcttgtttggaaaactttatttaacagtttagaaggcttgatagaaagagtgcattagtctgaagagtatacattggataggaaagaatttccttcttttgtttctccaaatctttccgccttatttagcttgagatctttgcagcttggttcatggattctagccttgcccgttgcgcagtatatactgatccagatgataaaccagtgaactatgtcaaaagcactctcaatattacatttgacaaaaagttttgtacttttcacatagcttgttgccccgtaaaagggttaacagcacaattttttaaaaataaattaagaagtatttataggattaaagtgacttcatttgtatacatttggaatctaaaccagcttaaaaacagtttcctcaatgacttagatacacagtataactgatgctcttctggaataccacatgagacatggtcagaaacagtgcttggaaggacattacacaagaaattcagagtaatgctttgaagatttccccccttttgttttattcctgaaggaacatcagtacccgatcttgaagaaattcaagattcaaaaagaattttaaatacaccaacatgagacatcagtagtcagttggttttcagtaaagcttgttccaagttgttctcaacttaggaagtaattttggtgtgatctagcaaaagagtaggaatcagcgatacaaccactttggaagtttatagtataattgaaattattagaagaattcagcaggttacagacatacttaaactgggattaaaacctcatagtcatttttcttaattgcccttaatattttgacatatagggatacataaatttaaagaatattttttctcagttttttcagatattgccatactgaacctcattctaaactggtgctgtggatagtctttccctctcccctcctgttttagtttaaggaaaggtttccttcatggaaaagcacttttaattttgagaatttcacatttaaaataagccaaaagcctgatgttcacattgtgcttttaaactccgtaacagctgaatacaacataacatagtctcccttgaaattccctccctttttcagtagaggataaatagggtgactccagctgttggaatgagaatggggatacccccaaaataagattctggtgaagaaaaagtcttgtactaagttcccctttaggtgtagccaagtctataatataattatgatcatgaatagactccagaatccacaaagagaagagggcttggatgtcaaaaattcttccattgtggggtaggtggtcggggatgggagaaagggaaaagtcagggaaaggggagaagaaagaaaaacacatttggccttaaaatagcatgcattctcccagaagcccatagtaaagaaaatgacagatcgtggtcagcagactcttatcaaattggtatgtaaaagatttcttcaagctccattttgcagagaccaccacttagagaatcaaaaaattcctgttttgatacttctaagttaaaatatatgttacagtttatctggtacttcatttttcttaactaaaattactttttactttaagcttgaataaaaatcttcattggtaactgtatgtaattaagtggcaacttctctttacctcagtatagttaaaaaccattcatattttaagtgattcatgtataccctgaagccgttaatacaccccagtctctatggtaacatcactaaatgtgggcatagaaactccacagctgtttacaaatttggttacagtgtgctatggtgcatttgtaacactcagatttgtgcccattcaggggcaatttggcactcagattctactctacttcacctaaccacccctagatctgagttttcagagtgcttctgaagtacagtttaaaaacactttttaaaaagtggagtaaaagtgaggcacattttacaagaacataactcctattaaaacggagtaacaactatgcaaaggtttctatagcagctaggtgagtttgttttccgggtctgtcttaactggcagcttcctgtacatactggtacttatttgctgtaaacgtctgtttcatacatttgccatgcagtgactgtgctcgaaaggtgaaatcaatggtaaagaagcctaggattttatggtatgagaaactgatcgcaggattttctgatccatagctattaattgaaaacttctgatagtgctgtaggctctatagtaggcttaagagtgagtcttatactatgaagccagccacaagatactaacaaatgtataaattgaaaagtaccaatactttttgcacatagatcaaaatagagtggagaatttgggctccaaaaatcaggttagtaggctcatttccatgtgcttaaaaatgtttttgttgttatgcattgattaagggctagagcaaatataaaattaaatgtctttttcctccaaataattggttattaatggtaaaatgttggacttggggattactgagattagtatgtgggtagtaaagaattggagtgggagttagtggggagggatgacaaagcttcagctttggtttttgtatttttttagtcttcataacagctacatttctgttgctcttattggccagataaatgtgttatattaaaccaggtaagtattttaaacagagaacattttatttgcatatatccctacaaattggcccattttattgggtggggggataaaaaagggattccctaactttaaataatcagaatatcctgcaattgaaaggagaaaaaaatccaattttgtcagtattttcttagtctgaaaaaaacagcagtagtaatctggtgaatgttattattaggagtgttctgcctctacagtggcatattccatgacattaatagaaaacccttctttcccacccctccccatcttgacattttcttttttaggatgttggttcctgcaaacaagaactgaccctatcacctctgcctcacagtgggtaaatatatcatacatctcttgaaagggaaaatatccatgtcagtttctttcacagtagaagaatggctgcttttgaatggggaggaaagaagacatttttcttaatatcctttttgtcccatctctaaaatgtataaatattttgatttggttttactttaatttctcattcataatttcgcaactgtccttttgggttgccctccaacacattacttccatttcagaaaccatatctgatttaatataaactgctaacttaagaagaggtgaatttgcatttacacttagacactttctaaaaacagggtgaacttaattgaaatttttcagtgttgttaagctattgttatagtagctgccctatagttacaaaaataaaaactataaaaacccatcccctatctacttaatccagatagcctggatttaacaaaaccaatagtataaaaatgtgtgtgtgtgttctgtgtgtgtgtgagagagagagtacttgattcattaaaaagtcctggaaacagctgttctaggatcttgtcatttttactgaaagtctcgtgcacatgtgaagtgccctctgagtttaaggtttggttaatactggtatatttttataagattgaaattgtgtccccatctttaacttaaacattttcattatcagggtcaatgtgctagaactgaattgtaacatttttaggcacagatggaaaaaaatgttattggctccttgaaaatgtgtgtgtgtggcgaggggaatagatccacaaaagcatgtatgtacttacaaaccaagctgtagagatcaagaaaagaacttaagtgttgatctcaagatttctaaattgtcaagatttacatggcattgtggtggaactagttaacacttagagcttttggtatgtaataactatttgctatggactgattaaatgtttcaaaagattgtgttcttcaattttggtgggttttgatttttgtttttttaactgcctctcagattatatttacttagtttaaatttctttgctttattcattaaagtataaaaacttcaggtctctgatatttattttcacttgtttactaattatttacaaaacaccctttgttgacttttattttataaatgtgtaatgtattaaacgtctttaaatttttgttcaactgaaactacattaactttgatttgctttactgggatttttttttaaagacactttttccatgtcagtgcgcagcacttaaccagtcgtttgtattccctttctttcaatccaataaacagaatgaatacctaaataaaaattg

SEQ ID NO: 236336 - DNA, 6798 bp, Homo sapiens
agatggtggtgagggagagaggaaataagttttttctaaatgctggagtctggaacccatgaagaatcagctgctagctgctgcccctcccgccgccgctgctgtcccccaccgaagtagcggccacagcctggtcagcggcagcatcatgcaggccaatggggcaggaggaggaggaggaggtggcggcggcggcggtggaggaggagggggcggcgggggccagggacagaccccggaactcgcctgcttgtcggcccagaacggggagtcgtccccctcgtcgtcgtcgtccgcgggggacctggcccacgccaatgggctcctgccttccgccccctccgccgccagcaacaatagcaacagcctgaatgtcaataacggggttcccggcggggcggccgccgcatcctcagccaccgtcgcagctgcctccgccaccaccgccgcctcctcttccttggccaccccagaactgggcagcagcctcaagaagaagaagcggctctcccagtcagatgaggatgtcattaggctaataggacagcacttgaatggcttagggctcaagcagaaaatgacctgaatgaactaaagcctttagtgcattctcctcatgctattgtggtaagaggcgcacttgaaatctctcaaacgttgttgggaataattgtggcacaaacattttctgaaacttccatcaacttttttcccctgactgctgctttctgtcatgtcagaggatgaagtttttgctgctgcagcagaagtacctagaatacctggaggatggcaaggtcctggaggcacttcaagttctacgctgtgaattgacgccgctgaaatacaatacagagcgcattcatgttcttagtgggtatctgatgtgtagccatgcagaagacctacgtgcaaaagcagaatgggaaggcaaagggacagcttcccgatctaaactattggataaacttcagacctatttaccaccatcagtgatgcttcccccacggcgtttacagactctcctgcggcaggcggtggaactacaaagggatcggtgcctatatcacaataccaaacttgataataatctagattctgtgtctctgcttatagaccatgtttgtagtaggaggcagttcccatgttatacgcagcagatacttacggagcattgtaatgaagtgtggttctgtaaattctctaatgatggcactaaactagcaacaggatcaaaagatacaacagttatcatatggcaagttgatccggatacacacctgctaaaactgcttaaaacattagaaggacatgcttatggcgtttcttatattgcatggagtccagatgacaactatcttgttgcttgtggcccagatgactgctctgagctttggctttggaatgtacaaacaggagaactaaggacaaaaatgagccagtctcatgaagacagtttgacaagtgtggcttggaatccagatgggaagcgctttgtgactggaggtcagcgtgggcagttctatcagtgtgacttagatggtaatctccttgactcctgggaaggggtaagagtgcaatgcctttggtgcttgagtgatggaaagactgttctggcatcagatacacaccagcgaattcggggctataacttcgaggaccttacagataggaacatagtacaagaagatcatcctattatgtcttttactatttcaaaaaatggccgattagctttgttaaatgtagcaactcagggagttcatttatgggacttgcaagacagagttttagtaagaaagtatcaaggtgttacacaagggttttatacaattcattcatgttttggaggccataatgaagacttcatcgctagtggcagtgaagatcacaaggtttacatctggcacaaacgtagtgaactgccaattgcggagctgacagggcacacacgtacagtaaactgtgtgagctggaacccacagattccatccatgatggccagcgcctcagatgatggcactgttagaatatggggaccagcaccttttatagaccaccagaatattgaagaggaatgcagtagcatggatagttgatggtgaatttggagcagacgacttctgtttaacttaaaattagtcgtattttaatggcttgggatttggtgcaaacaaacatgattgatagctggacagacatgctcgtcatgaaaaaagaaccatttctgaagcccgattggggccaaacatttacaccttgcttcatagtaaccagttgagatgaagcacgtcgttagaacgttgttggacaccatgttgaattattcccccatcggttgtgaagaactgtgctacattcaggcttacccattgaactcagtatatatatttttttccttcctgtcttttgtctggcaggataccattcttgttgctcttctgtgtaatgaagtttaaatgcttgtttggaaaactttatttaacagtttagaaggcttgatagaaagagtgcattagtctgaagagtatacattggataggaaagaatttccttcttttgtttctccaaatctttccgccttatttagcttgagatctttgcagcttggttcatggattctagccttgcccgttgcgcagtatatactgatccagatgataaaccagtgaactatgtcaaaagcactctcaatattacatttgacaaaaagttttgtacttttcacatagcttgttgccccgtaaaagggttaacagcacaattttttaaaaataaattaagaagtatttataggattaaagtgacttcatttgtatacatttggaatctaaaccagcttaaaaacagtttcctcaatgacttagatacacagtataactgatgctcttctggaataccacatgagacatggtcagaaacagtgcttggaaggacattacacaagaaattcagagtaatgctttgaagatttccccccttttgttttattcctgaaggaacatcagtacccgatcttgaagaaattcaagattcaaaaagaattttaaatacaccaacatgagacatcagtagtcagttggttttcagtaaagcttgttccaagttgttctcaacttaggaagtaattttggtgtgatctagcaaaagagtaggaatcagcgatacaaccactttggaagtttatagtataattgaaattattagaagaattcagcaggttacagacatacttaaactgggattaaaacctcatagtcatttttcttaattgcccttaatattttgacatatagggatacataaatttaaagaatattttttctcagttttttcagatattgccatactgaacctcattctaaactggtgctgtggatagtctttccctctcccctcctgttttagtttaaggaaaggtttccttcatggaaaagcacttttaattttgagaatttcacatttaaaataagccaaaagcctgatgttcacattgtgcttttaaactccgtaacagctgaatacaacataacatagtctcccttgaaattccctccctttttcagtagaggataaatagggtgactccagctgttggaatgagaatggggatacccccaaaataagattctggtgaagaaaaagtcttgtactaagttcccctttaggtgtagccaagtctataatataattatgatcatgaatagactccagaatccacaaagagaagagggcttggatgtcaaaaattcttccattgtggggtaggtggtcggggatgggagaaagggaaaagtcagggaaaggggagaagaaagaaaaacacatttggccttaaaatagcatgcattctcccagaagcccatagtaaagaaaatgacagatcgtggtcagcagactcttatcaaattggtatgtaaaagatttcttcaagctccattttgcagagaccaccacttagagaatcaaaaaattcctgttttgatacttctaagttaaaatatatgttacagtttatctggtacttcatttttcttaactaaaattactttttactttaagcttgaataaaaatcttcattggtaactgtatgtaattaagtggcaacttctctttacctcagtatagttaaaaaccattcatattttaagtgattcatgtataccctgaagccgttaatacaccccagtctctatggtaacatcactaaatgtgggcatagaaactccacagctgtttacaaatttggttacagtgtgctatggtgcatttgtaacactcagatttgtgcccattcaggggcaatttggcactcagattctactctacttcacctaaccacccctagatctgagttttcagagtgcttctgaagtacagtttaaaaacactttttaaaaagtggagtaaaagtgaggcacattttacaagaacataactcctattaaaacggagtaacaactatgcaaaggtttctatagcagctaggtgagtttgttttccgggtctgtcttaactggcagcttcctgtacatactggtacttatttgctgtaaacgtctgtttcatacatttgccatgcagtgactgtgctcgaaaggtgaaatcaatggtaaagaagcctaggattttatggtatgagaaactgatcgcaggattttctgatccatagctattaattgaaaacttctgatagtgctgtaggctctatagtaggcttaagagtgagtcttatactatgaagccagccacaagatactaacaaatgtataaattgaaaagtaccaatactttttgcacatagatcaaaatagagtggagaatttgggctccaaaaatcaggttagtaggctcatttccatgtgcttaaaaatgtttttgttgttatgcattgattaagggctagagcaaatataaaattaaatgtctttttcctccaaataattggttattaatggtaaaatgttggacttggggattactgagattagtatgtgggtagtaaagaattggagtgggagttagtggggagggatgacaaagcttcagctttggtttttgtatttttttagtcttcataacagctacatttctgttgctcttattggccagataaatgtgttatattaaaccaggtaagtattttaaacagagaacattttatttgcatatatccctacaaattggcccattttattgggtggggggataaaaaagggattccctaactttaaataatcagaatatcctgcaattgaaaggagaaaaaaatccaattttgtcagtattttcttagtctgaaaaaaacagcagtagtaatctggtgaatgttattattaggagtgttctgcctctacagtggcatattccatgacattaatagaaaacccttctttcccacccctccccatcttgacattttcttttttaggatgttggttcctgcaaacaagaactgaccctatcacctctgcctcacagtgggtaaatatatcatacatctcttgaaagggaaaatatccatgtcagtttctttcacagtagaagaatggctgcttttgaatggggaggaaagaagacatttttcttaatatcctttttgtcccatctctaaaatgtataaatattttgatttggttttactttaatttctcattcataatttcgcaactgtccttttgggttgccctccaacacattacttccatttcagaaaccatatctgatttaatataaactgctaacttaagaagaggtgaatttgcatttacacttagacactttctaaaaacagggtgaacttaattgaaatttttcagtgttgttaagctattgttatagtagctgccctatagttacaaaaataaaaactataaaaacccatcccctatctacttaatccagatagcctggatttaacaaaaccaatagtataaaaatgtgtgtgtgtgttctgtgtgtgtgtgagagagagagtacttgattcattaaaaagtcctggaaacagctgttctaggatcttgtcatttttactgaaagtctcgtgcacatgtgaagtgccctctgagtttaaggtttggttaatactggtatatttttataagattgaaattgtgtccccatctttaacttaaacattttcattatcagggtcaatgtgctagaactgaattgtaacatttttaggcacagatggaaaaaaatgttattggctccttgaaaatgtgtgtgtgtggcgaggggaatagatccacaaaagcatgtatgtacttacaaaccaagctgtagagatcaagaaaagaacttaagtgttgatctcaagatttctaaattgtcaagatttacatggcattgtggtggaactagttaacacttagagcttttggtatgtaataactatttgctatggactgattaaatgtttcaaaagattgtgttcttcaattttggtgggttttgatttttgtttttttaactgcctctcagattatatttacttagtttaaatttctttgctttattcattaaagtataaaaacttcaggtctctgatatttattttcacttgtttactaattatttacaaaacaccctttgttgacttttattttataaatgtgtaatgtattaaacgtctttaaatttttgttcaactgaaactacattaactttgatttgctttactgggatttttttttaaagacactttttccatgtcagtgcgcagcacttaaccagtcgtttgtattccctttctttcaatccaataaacagaatgaatacctaaataaaaattg

SEQ ID NO: 236337 - DNA, 1689 bp, Homo sapiens
agatggtggtgagggagagaggaaataagttttttctaaatgctggagtctggaacccatgaagaatcagctgctagctgctgcccctcccgccgccgctgctgtcccccaccgaagtagcggccacagcctggtcagcggcagcatcatgcaggccaatggggcaggaggaggaggaggaggtggcggcggcggcggtggaggaggagggggcggcgggggccagggacagaccccggaactcgcctgcttgtcggcccagaacggggagtcgtccccctcgtcgtcgtcgtccgcgggggacctggcccacgccaatgggctcctgccttccgccccctccgccgccagcaacaatagcaacagcctgaatgtcaataacggggttcccggcggggcggccgccgcatcctcagccaccgtcgcagctgcctccgccaccaccgccgcctcctcttccttggccaccccagaactgggcagcagcctcaagaagaagaagcggctctcccagtcagatgaggatgtcattaggctaataggacagcacttgaatggcttagggctcaaccagactgttgatctcctcatgcaagagtcaggatgtcgtttagaacatccttctgctaccaaattccgaaatcatgtcatggaaggagactgggataaggcagaaaatgacctgaatgaactaaagcctttagtgcattctcctcatgctattgtgaggatgaagtttttgctgctgcagcagaagtacctagaatacctggaggatggcaaggtcctggaggcacttcaagttctacgctgtgaattgacgccgctgaaatacaatacagagcgcattcatgttcttagtgggtatctgatgtgtagccatgcagaagacctacgtgcaaaagcagaatgggaaggcaaagggacagcttcccgatctaaactattggataaacttcagacctatttaccaccatcagtgatgcttcccccacggcgtttacagactctcctgcggcaggcggtggaactacaaagggatcggtgcctatatcacaataccaaacttgataataatctagattctgtgtctctgcttatagaccatgtttgtagtaggaggcagttcccatgttatacgcagcagatacttacggagcattgtaatgaagtgtggttctgtaaattctctaatgatggcactaaactagcaacaggatcaaaagatacaacagttatcatatggcaagttgatccggatacacacctgctaaaactgcttaaaacattagaaggacatgcttatggcgtttcttatattgcatggagtccagatgacaactatcttgttgcttgtggcccagatgactgctctgagctttggctttggaatgtacaaacaggagaactaacggcacccagaactgagccagtctcatgcagacacgccagacaactgtggccccgcaatccacatcgccagccgctgcagactgagaacacacggtgcacagtcccaacccactgatccctcccaacttggatatctacttgaaatacctgggaaagccgctaaaagctgcacaagccatagtgcaatgaataattgcaaagcctctactacgacaaatacgaacacacccgacaagcgcctctacactctatgatactccaacaagtcactctact

SEQ ID NO: 236338 - DNA, 1242 bp, Homo sapiens
agatggtggtgagggagagaggaaataagttttttctaaatgctggagtctggaacccatgaagaatcagctgctagctgctgcccctcccgccgccgctgctgtcccccaccgaagtagcggccacagcctggtcagcggcagcatcatgcaggccaatggggcaggaggaggaggaggaggtggcggcggcggcggtggaggaggagggggcggcgggggccagggacagaccccggaactcgcctgcttgtcggcccagaacggggagtcgtccccctcgtcgtcgtcgtccgcgggggacctggcccacgccaatgggctcctgccttccgccccctccgccgccagcaacaatagcaacagcctgaatgtcaataacggggttcccggcggggcggccgccgcatcctcagccaccgtcgcagctgcctccgccaccaccgccgcctcctcttccttggccaccccagaactgggcagcagcctcaagaagaagaagcggctctcccagtcagatgaggatgtcattaggctaataggacagcacttgaatggcttagggctcaaccagactgttgatctcctcatgcaagagtcaggatgtcgtttagaacatccttctgctaccaaattccgaaatcatgtcatggaaggagactgggataaggcagaaaatgacctgaatgaactaaagcctttagtgcattctcctcatgctattgtgaggatgaagtttttgctgctgcagcagaagtacctagaatacctggaggatggcaaggtcctggaggcacttcaagttctacgctgtgaattgacgccgctgaaatacaatacagagcgcattcatgttcttagtgggtatctgatgtgtagccatgcagaagacctacgtgcaaaagcagaatgggaaggcaaagggacagcttcccgatctaaactattggataaacttcagagtaagagtcttaattttttatgttgctgtgttttctcttagattacaaatggatacagtgatcaattaggaagacagatggggaatatctggacatacttttattgagtgcttagaagagggagaatccagtttttcagactctgtcatggagtctaagaagctaacctcaggagtcagtgaaagggcactggttccagagcagcccttctttcatttgtattatgtgatgatgttcccccttaagattttgtttgggggaaaagtactgtgttaagaga

SEQ ID NO: 236339 - DNA, 480 bp, Homo sapiens
agccacaggttgtcttatgtatgtatcttattgcaatataagaaatgatagtctatacttacattgatggaacaatttgagaaacagttgcatctttaggttaaatagaaactagataaaagtactacataataaactgagggccacagacatctccaactgattttctcatttggaagaaaacataaactttatttcctttagaagtacaggctttttcaattaaaaaattcaaaagttctcctgaagcaaatgtttaaactgaaacctaaaggataagtagatagacaaaggaggtcatttggcccaggatttgaaaggcaactagtggcagaagcataaatcctgagtctaagctgggcatggtggctcaggcctgtaattccagctcttggggaggctgagctgaagaggatcacttgaggccaggaattagaaaacagcctaggcaacgtaactgagacctcccccgtctcaaaa

SEQ ID NO: 236340 - DNA, 1246 bp, Homo sapiens
  misc_feature (622)..(622): n is a, c, g, or t
  misc_feature (853)..(853): n is a, c, g, or t
tgcagctgagctggctccaaagtgggatcggaggccagaaggcatccacagccttctcaggtccgggaacttaccagcccaattctatggtaaccctggcaggcccagctggcagcagtggggatggcaagagcaaagccctgggggccagtcctgccaagagggggaaaggtcaggccagggctggagcccaggcaggcaaccagctctcactacattttttatgcggttggaggcaaaccaggagatgatattactgtagcaaccaaggccagcaggaatgtcaaggcagggagaggatgtgaccacactgaggatagtgcagagacaggaacccagaggggccttccagtgcacctggttggaagagaggtctggagggcatgcaggggagaggagaaggaatagctgcttcaagttcagagaaaagagatggaagagggaggaacatgagagctgaagaaagttttttgagaaccagtgtgatttggcatgctggaggctctagggaaagccaagagttagtcatcagaagagcaagaagactaagattatgtccagtgacttagagtacatagaagaaaatggggtcctcagaagacacgcaaagtgagataaaggnaaaatgagttgttccttacatcttccagttggaggtgagttcgtccagctaaagtgtgccatgtcaccacgcatatttggtggtaacctagtgaatcagaatctgcacgtatctgagtgtttcaacaacttccccactgttcccaatgcccagccagtttggagaactggtccagaagatatggagcaggtaccctgattcagggaggggtttggttttcttgctgctgtnggcagcagagaagcatggaggaaaacaggaaagtagagcatgggccattgtggaaccaaggtcacgagctgtatgatacaacaaggaaagaaggatttcgaaagtctaccagattggggccgggcgaggtgtctcaggcctataatctcagcactatgggaggccgaggtgggtggatcacgaggtcaggagatcgagaccatcctaacacggtgaaatcccgtctctattaaaaatacaaaaaattagccgggcgtggtggcaggcacctgtagtcccagctactcaggaggctgaggcaggagaagggcgtgaacccgggaggcggagcttgcagtgagccaagatcgcgccactgcactccagcctggcgacagagcaagacttcgtctc

SEQ ID NO: 236341 - DNA, 2208 bp, Homo sapiens
tctcgggaagcgcgcctgtgtttgtaccgggaatcggccattctggcggtggagcgggcgggaaggaggcgttcgtctagatttgtcggcttgcggggagacttcaggagtcgctgtctctgaacttccagcctcagagaccgccgcccttgtccccgagggccatgggccgggtctcagggcttgtgccctctcgcttcctgacgctcctggcgcatctggtggtcgtcatcaccttattctggtcccggtgcccttccagctgtcactgaaatggctttattcgtcaccgtctttgggctgaaaaagaaacccttctgattaccttcatgacgggaacctaaggacgaagcctacaggggcaagggccgcttcgtattcctggaagaaggaaggcataggcttcggttttcccctcggaaactgcttctgctggaggatatgtgttggaataattacgtcttgagtctgggattatccgcattgtatttagtgctttgtaataaaatatgttttgtagtaacattaagacttatatacagttttaggggacaattgagatggctgaactactgaataaaaaaaaaacaacgctgttttctagtcctgcagaccgtaagatacttggtatcgcttctattttggttactacggtaggtgcctggcggaagggagtgggcggagatatgtaaatagaaagtgcgtacagttagaacgtccggcacgtaactgatcggagcattctgggaagaagtaatttattccttttcggcagccgaatgaaaaaaaaatttaaaaaaatgtgcgagctaatatggcaaaacaactggaaggacgctaaataataggattgctcataccagcgcgttatgaactcaccctagcttgtaacggaatctttttcactgagtgcagaatgtcggctgtttgtctgtatcgtcaggtgggataatccttacctgttcctcctccggagggcagattagaacatgatgattggagatgcatgaaacgtgattaacgtctctgcgtaatcaggacttgcaacaccctgattgctcctgtctgattctttctgacgatcacttacatttgtgttatgctgattagcagatatccacaaacatagctatgaagttctgactgggataaccttgctgtttgtctattttgcagtcttgctattgctgtttgtctattttgcagtcttgctaaatttgtttgttcttgaaaattgtgatttggtttttgttgctttctggaatttaggcagtgaaataatacaaatgggctctttgttttttgtcgtttgataactttaatcctcacttctcaggaaacattgcacatcagtaaatatctgcagtcttgtgcacatggtggttgccctcaggatggtattcaataggaactgtatttctttttccttgaggtagggtcttggtctgtcgccaaggcaggagtgcacggcgcagatgtatatacatggatacatttgtttttggagagttggttgttaaaaatctaccagtacacccccaagaaactcatcatcaccaatgacttcttcccaaatccagagtcacttttcagacttgagattgacctctcttcagcatatggtatgttgaccacccccctcttttggttttttttttttttttttttgagacagtctcactctgttgcccaggctagagtgcagtgtgcagtggtgggatcatggctcactgcagcctcaaactcccaggctcagatgatcctcctgcatcagcctcccaagtagctgggactacaggtgagcaccaccacacctggttgttttaaaatttttctatagagacagggtctcactgtgttgcccaagctggtcccaaactcctgggctcaagccgtcctccccactaggcctctaggcctcctaaagtgctaggatacaggcatgagccaccgcgtttctcccactcccctcttttgcacttttttctcccttagttttgaaacagtggttcacctggtttgcctactattatactgttctggttgttccttcttacattaattcaataaatacttattgagtacctgcagtgtgtcagttactggggacataatactgggttgtctcttctgcttgccccgtaagtgctggtgatcactgctcttcgggtgacttcatccatctcttgttttcttttcttttctttt

SEQ ID NO: 236342 - DNA, 2145 bp, Homo sapiens
tctcgggaagcgcgcctgtgtttgtaccgggaatcggccattctggcggtggagcgggcgggaaggaggcgttcgtctagatttgtcggcttgcggggagacttcaggagtcgctgtctctgaacttccagcctcagagaccgccgcccttgtccccgagggccatgggccgggtctcagggcttgtgccctctcgcttcctgacgctcctggcgcatctggtggtcgtcatcaccttattctggtcccggtgcccttccagctgtcactgaaatggctttattcgtcaccgtctttgggctgaaaaagaaacccttctgattaccttcatgacgggaacctaaggacgaagcctacaggggcaagggccgcttcgtattcctggaagaaggaaggcataggcttcggttttcccctcggaaactgcttctgctggaggatatgtgttggaataattacgtcttgagtctgggattatccgcattgtatttagtgctttgtaataaaatatgttttgtagtaacattaagacttatatacagttttaggggacaattgagatggctgaactactgaataaaaaaaaaacaacgctgttttctagtcctgcagaccgtaagatacttggtatcgcttctattttggttactacggtaggtgcctggcggaagggagtgggcggagatatgtaaatagaaagtgcgtacagttagaacgtccggcacgtaactgatcggagcattctgggaagaagtaatttattccttttcggcagccgaatgaaaaaaaaatttaaaaaaatgtgcgagctaatatggcaaaacaactggaaggacgctaaataataggattgctcataccagcgcgttatgaactcaccctagcttgtaacggaatctttttcactgagtgcagaatgtcggctgtttgtctgtatcgtcaggtgggataatccttacctgttcctcctccggagggcagattagaacatgatgattggagatgcatgaaacgtgattaacgtctctgcgtaatcaggacttgcaacaccctgattgctcctgtctgattctttctgacgatcacttacatttgtgttatgctgattagcagatatccacaaacatagctatgaagttctgactgggataaccttgctgtttgtctattttgcagtcttgctattgctgtttgtctattttgcagtcttgctaaatttgtttgttcttgaaaattgtgatttggtttttgttgctttctggaatttaggcagtgaaataatacaaatgggctctttgttttttgtcgtttgataactttaatcctcacttctcaggaaacattgcacatcagtaaatatctgcagtcttgtgcacatggtggttgccctcaggatggtattcaataggaactgtatttctttttccttgaggtagggtcttggtctgtcgccaaggcaggagtgcacggcgcagatgtatatacatggatacatttgtttttggagagttggttgttaaaaatctaccagtacacccccaagaaactcatcatcaccaatgacttcttcccaaatccagagtcacttttcagacttgagattgacctctcttcagcatatggtatgttgaccacccccctcttttggttttttttttttttttttttgagacagtctcactctgttgcccaggctagagtgcagtgtgcagtggtgggatcatggctcactgcagcctcaaactcccaggctcagatgatcctcctgcatcagcctcccaagtagctgggactacaggtgagcaccaccacacctggttgttttaaaatttttctatagagacagggtctcactgtgttgcccaagctggtcccaaactcgagccaccgcgtttctcccactcccctcttttgcacttttttctcccttagttttgaaacagtggttcacctggtttgcctactattatactgttctggttgttccttcttacattaattcaataaatacttattgagtacctgcagtgtgtcagttactggggacataatactgggttgtctcttctgcttgccccgtaagtgctggtgatcactgctcttcgggtgacttcatccatctcttgttttcttttcttttctttt

SEQ ID NO: 236343 - DNA, 3861 bp, Homo sapiens
  misc_feature (1146)..(1146): n is a, c, g, or t
  misc_feature (1235)..(1235): n is a, c, g, or t
  misc_feature (1290)..(1290): n is a, c, g, or t
  misc_feature (1331)..(1331): n is a, c, g, or t
tctcgggaagcgcgcctgtgtttgtaccgggaatcggccattctggcggtggagcgggcgggaaggaggcgttcgtctagatttgtcggcttgcggggagacttcaggagtcgctgtctctgaacttccagcctcagagaccgccgcccttgtccccgagggccatgggccgggtctcagggcttgtgccctctcgcttcctgacgctcctggcgcatctggtggtcgtcatcaccttattctggtcccgggacagcaacatacaggcctgcctgcctctcacgttcacccccgaggagtatgacaagcaggacattcagctggtggccgcgctctctgtcaccctgggcctctttgcagtggagctggccggtttcctctcaggagtctccatgttcaacagcacccagagcctcatctgtatcctttctgcctgcccacctttcccacacgacccacttctatcaggactcccttcagccacctgacacaatagtgtctgctgtagccaatccttccagttcaaagatcttcaacgatgtgctaaatcctgctgtttactaggcacttaaaatcccaaaatgagagtaaaatacagtttttggccaggcatgttggctcacgtctgtaatcccagcactgtgggaggcgcaggcaggaggcaacatagtgagaacccaagtctacaaaaataataggaataataaaaaccccaccgtttctttttacaatgaggaggaggtagatacaaatctgtaattcagtgtgataagcactgtgctatagaagtgtgtgaagatagaaagcacaggcagggcgcgatggctcacgcatgtaatcccagcactttgggaggccgaggcaggtggaccacctgaggtcaggagttcgagaccggcctgaccaacatggtgaaacccccgtctctactaaaaatacaaaaattagtcgggcgtggcggcgcactcctgtaatcccagctactcaggagactgaggaaggagaattgcttgaacccgggaggcagaggttgcagtgagctgagatcgtgccactgcactccagccagggcaacagagcaagactctgtcaaaaaacaaacaaaagatataaagcacaatgggaactcagaagaggcaacggaancgagcactgggaactcagaagaggcaaaggagatgaggcacatgggtcagagaattgtggaccaggaggaccaggacactggaggctgnttccagcgcatattaagtcgctgtcagcactcctttgtggcatagcagaaggagngcctactcttacctctcatctgaaggatccaggctggcccncagataaggggtagggtagcctgaggtccgatctgtgcagtcacttctggtctctcctcacatgactgtcctaaaattcagaagtcagagctgctgactctagcccttgaaacatggtgagggagcaagggatgaacctgaatgcagatgccagccccaccactggccttttctgacccatcactgtctgtcgatccaaagactttccttaatctcgtgccttcccaagccattggggctcactgtagtgcatccgtggccctgtccttcttcatattcgagcgttgggagtgcactacgtattggtacatttttgtcttctgcaggtgtggtagcatccaatatttggggatgagggaggaaggttggccctaaacctgaaggtttttcccctacccagccctttcctccatgtgtgagataccagatccactcaacatcctgtaggcttttaaagtttcatcccctaccccccatgccacctgccctacactttcagaggtggggtctctggtttggagatttgggtatttatactgaaagggtttctgaatctaccacttgccttggtagtgcccttccagctgtcactgaaatggctttattcgtcaccgtctttgggctgaaaaagaaacccttctgattaccttcatgacgggaacctaaggacgaagcctacaggggcaagggccgcttcgtattcctggaagaaggaaggcataggcttcggttttcccctcggaaactgcttctgctggaggatatgtgttggaataattacgtcttgagtctgggattatccgcattgtatttagtgctttgtaataaaatatgttttgtagtaacattaagacttatatacagttttaggggacaattgagatggctgaactactgaataaaaaaaaaacaacgctgttttctagtcctgcagaccgtaagatacttggtatcgcttctattttggttactacggtaggtgcctggcggaagggagtgggcggagatatgtaaatagaaagtgcgtacagttagaacgtccggcacgtaactgatcggagcattctgggaagaagtaatttattccttttcggcagccgaatgaaaaaaaaatttaaaaaaatgtgcgagctaatatggcaaaacaactggaaggacgctaaataataggattgctcataccagcgcgttatgaactcaccctagcttgtaacggaatctttttcactgagtgcagaatgtcggctgtttgtctgtatcgtcaggtgggataatccttacctgttcctcctccggagggcagattagaacatgatgattggagatgcatgaaacgtgattaacgtctctgcgtaatcaggacttgcaacaccctgattgctcctgtctgattctttctgacgatcacttacatttgtgttatgctgattagcagatatccacaaacatagctatgaagttctgactgggataaccttgctgtttgtctattttgcagtcttgctattgctgtttgtctattttgcagtcttgctaaatttgtttgttcttgaaaattgtgatttggtttttgttgctttctggaatttaggcagtgaaataatacaaatgggctctttgttttttgtcgtttgataactttaatcctcacttctcaggaaacattgcacatcagtaaatatctgcagtcttgtgcacatggtggttgccctcaggatggtattcaataggaactgtatttctttttccttgaggtagggtcttggtctgtcgccaaggcaggagtgcacggcgcagatgtatatacatggatacatttgtttttggagagttggttgttaaaaatctaccagtacacccccaagaaactcatcatcaccaatgacttcttcccaaatccagagtcacttttcagacttgagattgacctctcttcagcatatggtatgttgaccacccccctcttttggttttttttttttttttttttgagacagtctcactctgttgcccaggctagagtgcagtgtgcagtggtgggatcatggctcactgcagcctcaaactcccaggctcagatgatcctcctgcatcagcctcccaagtagctgggactacaggtgagcaccaccacacctggttgttttaaaatttttctatagagacagggtctcactgtgttgcccaagctggtcccaaactcctgggctcaagccgtcctccccactaggcctctaggcctcctaaagtgctaggatacaggcatgagccaccgcgtttctcccactcccctcttttgcacttttttctcccttagttttgaaacagtggttcacctggtttgcctactattatactgttctggttgttccttcttacattaattcaataaatacttattgagtacctgcagtgtgtcagttactggggacataatactgggttgtctcttctgcttgccccgtaagtgctggtgatcactgctcttcgggtgacttcatccatctcttgttttcttttcttttctttt

SEQ ID NO: 236344 - DNA, 2492 bp, Homo sapiens
tctcgggaagcgcgcctgtgtttgtaccgggaatcggccattctggcggtggagcgggcgggaaggaggcgttcgtctagatttgtcggcttgcggggagacttcaggagtcgctgtctctgaacttccagcctcagagaccgccgcccttgtccccgagggccatgggccgggtctcagggcttgtgccctctcgcttcctgacgctcctggcgcatctggtggtcgtcatcaccttattctggtcccgggacagcaacatacaggcctgcctgcctctcacgttcacccccgaggagtatgacaagcaggacattcatccacttcctctctgcaggctggtggccgcgctctctgtcaccctgggcctctttgcagtggagctggccggtttcctctcaggagtctccatgttcaacagcacccagagcctcatctccattggggctcactgtagtgcatccgtggccctgtccttcttcatattcgagcgttgggagtgcactacgtattggtacatttttgtcttctgcagtgcccttccagctgtcactgaaatggctttattcgtcaccgtctttgggctgaaaaagaaacccttctgattaccttcatgacgggaacctaaggacgaagcctacaggggcaagggccgcttcgtattcctggaagaaggaaggcataggcttcggttttcccctcggaaactgcttctgctggaggatatgtgttggaataattacgtcttgagtctgggattatccgcattgtatttagtgctttgtaataaaatatgttttgtagtaacattaagacttatatacagttttaggggacaattgagatggctgaactactgaataaaaaaaaaacaacgctgttttctagtcctgcagaccgtaagatacttggtatcgcttctattttggttactacggtaggtgcctggcggaagggagtgggcggagatatgtaaatagaaagtgcgtacagttagaacgtccggcacgtaactgatcggagcattctgggaagaagtaatttattccttttcggcagccgaatgaaaaaaaaatttaaaaaaatgtgcgagctaatatggcaaaacaactggaaggacgctaaataataggattgctcataccagcgcgttatgaactcaccctagcttgtaacggaatctttttcactgagtgcagaatgtcggctgtttgtctgtatcgtcaggtgggataatccttacctgttcctcctccggagggcagattagaacatgatgattggagatgcatgaaacgtgattaacgtctctgcgtaatcaggacttgcaacaccctgattgctcctgtctgattctttctgacgatcacttacatttgtgttatgctgattagcagatatccacaaacatagctatgaagttctgactgggataaccttgctgtttgtctattttgcagtcttgctattgctgtttgtctattttgcagtcttgctaaatttgtttgttcttgaaaattgtgatttggtttttgttgctttctggaatttaggcagtgaaataatacaaatgggctctttgttttttgtcgtttgataactttaatcctcacttctcaggaaacattgcacatcagtaaatatctgcagtcttgtgcacatggtggttgccctcaggatggtattcaataggaactgtatttctttttccttgaggtagggtcttggtctgtcgccaaggcaggagtgcacggcgcagatgtatatacatggatacatttgtttttggagagttggttgttaaaaatctaccagtacacccccaagaaactcatcatcaccaatgacttcttcccaaatccagagtcacttttcagacttgagattgacctctcttcagcatatggtatgttgaccacccccctcttttggttttttttttttttttttttgagacagtctcactctgttgcccaggctagagtgcagtgtgcagtggtgggatcatggctcactgcagcctcaaactcccaggctcagatgatcctcctgcatcagcctcccaagtagctgggactacaggtgagcaccaccacacctggttgttttaaaatttttctatagagacagggtctcactgtgttgcccaagctggtcccaaactcctgggctcaagccgtcctccccactaggcctctaggcctcctaaagtgctaggatacaggcatgagccaccgcgtttctcccactcccctcttttgcacttttttctcccttagttttgaaacagtggttcacctggtttgcctactattatactgttctggttgttccttcttacattaattcaataaatacttattgagtacctgcagtgtgtcagttactggggacataatactgggttgtctcttctgcttgccccgtaagtgctggtgatcactgctcttcgggtgacttcatccatctcttgttttcttttcttttctttt

SEQ ID NO: 236345 - DNA, 2474 bp, Homo sapiens
tctcgggaagcgcgcctgtgtttgtaccgggaatcggccattctggcggtggagcgggcgggaaggaggcgttcgtctagatttgtcggcttgcggggagacttcaggagtcgctgtctctgaacttccagcctcagagaccgccgcccttgtccccgagggccatgggccgggtctcagggcttgtgccctctcgcttcctgacgctcctggcgcatctggtggtcgtcatcaccttattctggtcccgggacagcaacatacaggcctgcctgcctctcacgttcacccccgaggagtatgacaagcaggacattcagctggtggccgcgctctctgtcaccctgggcctctttgcagtggagctggccggtttcctctcaggagtctccatgttcaacagcacccagagcctcatctccattggggctcactgtagtgcatccgtggccctgtccttcttcatattcgagcgttgggagtgcactacgtattggtacatttttgtcttctgcagtgcccttccagctgtcactgaaatggctttattcgtcaccgtctttgggctgaaaaagaaacccttctgattaccttcatgacgggaacctaaggacgaagcctacaggggcaagggccgcttcgtattcctggaagaaggaaggcataggcttcggttttcccctcggaaactgcttctgctggaggatatgtgttggaataattacgtcttgagtctgggattatccgcattgtatttagtgctttgtaataaaatatgttttgtagtaacattaagacttatatacagttttaggggacaattgagatggctgaactactgaataaaaaaaaaacaacgctgttttctagtcctgcagaccgtaagatacttggtatcgcttctattttggttactacggtaggtgcctggcggaagggagtgggcggagatatgtaaatagaaagtgcgtacagttagaacgtccggcacgtaactgatcggagcattctgggaagaagtaatttattccttttcggcagccgaatgaaaaaaaaatttaaaaaaatgtgcgagctaatatggcaaaacaactggaaggacgctaaataataggattgctcataccagcgcgttatgaactcaccctagcttgtaacggaatctttttcactgagtgcagaatgtcggctgtttgtctgtatcgtcaggtgggataatccttacctgttcctcctccggagggcagattagaacatgatgattggagatgcatgaaacgtgattaacgtctctgcgtaatcaggacttgcaacaccctgattgctcctgtctgattctttctgacgatcacttacatttgtgttatgctgattagcagatatccacaaacatagctatgaagttctgactgggataaccttgctgtttgtctattttgcagtcttgctattgctgtttgtctattttgcagtcttgctaaatttgtttgttcttgaaaattgtgatttggtttttgttgctttctggaatttaggcagtgaaataatacaaatgggctctttgttttttgtcgtttgataactttaatcctcacttctcaggaaacattgcacatcagtaaatatctgcagtcttgtgcacatggtggttgccctcaggatggtattcaataggaactgtatttctttttccttgaggtagggtcttggtctgtcgccaaggcaggagtgcacggcgcagatgtatatacatggatacatttgtttttggagagttggttgttaaaaatctaccagtacacccccaagaaactcatcatcaccaatgacttcttcccaaatccagagtcacttttcagacttgagattgacctctcttcagcatatggtatgttgaccacccccctcttttggttttttttttttttttttttgagacagtctcactctgttgcccaggctagagtgcagtgtgcagtggtgggatcatggctcactgcagcctcaaactcccaggctcagatgatcctcctgcatcagcctcccaagtagctgggactacaggtgagcaccaccacacctggttgttttaaaatttttctatagagacagggtctcactgtgttgcccaagctggtcccaaactcctgggctcaagccgtcctccccactaggcctctaggcctcctaaagtgctaggatacaggcatgagccaccgcgtttctcccactcccctcttttgcacttttttctcccttagttttgaaacagtggttcacctggtttgcctactattatactgttctggttgttccttcttacattaattcaataaatacttattgagtacctgcagtgtgtcagttactggggacataatactgggttgtctcttctgcttgccccgtaagtgctggtgatcactgctcttcgggtgacttcatccatctcttgttttcttttcttttctttt

SEQ ID NO: 236346 - DNA, 3295 bp, Homo sapiens
  misc_feature (827)..(827): n is a, c, g, or t
  misc_feature (916)..(916): n is a, c, g, or t
  misc_feature (971)..(971): n is a, c, g, or t
  misc_feature (1012)..(1012): n is a, c, g, or t
tctcgggaagcgcgcctgtgtttgtaccgggaatcggccattctggcggtggagcgggcgggaaggaggcgttcgtctagatttgtcggcttgcggggagacttcaggagtcgctgtctctgaacttccagcctcagagaccgccgcccttgtccccgagggccatgggccgggtctcagggcttgtgccctctcgcttcctgacgctcctggcgcatctggtggtcgtcatcaccttattctggtcccgggacagcaacatacaggcctgcctgcctctcacgttcacccccgaggagtatgacaagcaggacattcagctggtggccgcgctctctgtcaccctgggcctctttgcagtggagctggccggtttcctctcaggagtctccatgttcaacagcacccagagcctcatctctggaactttgggaaaagagaagcctggactcttcctggaaataaaagcatgctataaaataaaataattagcctgggcgcgatggctcacgcatgtaatcccagcactttgggaggccgaggcaggtggaccacctgaggtcaggagttcgagaccggcctgaccaacatggtgaaacccccgtctctactaaaaatacaaaaattagtcgggcgtggcggcgcactcctgtaatcccagctactcaggagactgaggaaggagaattgcttgaacccgggaggcagaggttgcagtgagctgagatcgtgccactgcactccagccagggcaacagagcaagactctgtcaaaaaacaaacaaaagatataaagcacaatgggaactcagaagaggcaacggaancgagcactgggaactcagaagaggcaaaggagatgaggcacatgggtcagagaattgtggaccaggaggaccaggacactggaggctgnttccagcgcatattaagtcgctgtcagcactcctttgtggcatagcagaaggagngcctactcttacctctcatctgaaggatccaggctggcccncagataaggggtagggtagcctgaggtccgatctgtgcagtcacttctggtctctcctcacatgactgtcctaaaattcagaagtcagagctgctgactctagcccttgaaacatggtgagggagcaagggatgaacctgaatgcagatgccagccccaccactggccttttctgacccatcactgtctgtcgatccaaagactttccttaatctcgtgccttcccaagccattggggctcactgtagtgcatccgtggccctgtccttcttcatattcgagcgttgggagtgcactacgtattggtacatttttgtcttctgcagtgcccttccagctgtcactgaaatggctttattcgtcaccgtctttgggctgaaaaagaaacccttctgattaccttcatgacgggaacctaaggacgaagcctacaggggcaagggccgcttcgtattcctggaagaaggaaggcataggcttcggttttcccctcggaaactgcttctgctggaggatatgtgttggaataattacgtcttgagtctgggattatccgcattgtatttagtgctttgtaataaaatatgttttgtagtaacattaagacttatatacagttttaggggacaattgagatggctgaactactgaataaaaaaaaaacaacgctgttttctagtcctgcagaccgtaagatacttggtatcgcttctattttggttactacggtaggtgcctggcggaagggagtgggcggagatatgtaaatagaaagtgcgtacagttagaacgtccggcacgtaactgatcggagcattctgggaagaagtaatttattccttttcggcagccgaatgaaaaaaaaatttaaaaaaatgtgcgagctaatatggcaaaacaactggaaggacgctaaataataggattgctcataccagcgcgttatgaactcaccctagcttgtaacggaatctttttcactgagtgcagaatgtcggctgtttgtctgtatcgtcaggtgggataatccttacctgttcctcctccggagggcagattagaacatgatgattggagatgcatgaaacgtgattaacgtctctgcgtaatcaggacttgcaacaccctgattgctcctgtctgattctttctgacgatcacttacatttgtgttatgctgattagcagatatccacaaacatagctatgaagttctgactgggataaccttgctgtttgtctattttgcagtcttgctattgctgtttgtctattttgcagtcttgctaaatttgtttgttcttgaaaattgtgatttggtttttgttgctttctggaatttaggcagtgaaataatacaaatgggctctttgttttttgtcgtttgataactttaatcctcacttctcaggaaacattgcacatcagtaaatatctgcagtcttgtgcacatggtggttgccctcaggatggtattcaataggaactgtatttctttttccttgaggtagggtcttggtctgtcgccaaggcaggagtgcacggcgcagatgtatatacatggatacatttgtttttggagagttggttgttaaaaatctaccagtacacccccaagaaactcatcatcaccaatgacttcttcccaaatccagagtcacttttcagacttgagattgacctctcttcagcatatggtatgttgaccacccccctcttttggttttttttttttttttttttgagacagtctcactctgttgcccaggctagagtgcagtgtgcagtggtgggatcatggctcactgcagcctcaaactcccaggctcagatgatcctcctgcatcagcctcccaagtagctgggactacaggtgagcaccaccacacctggttgttttaaaatttttctatagagacagggtctcactgtgttgcccaagctggtcccaaactcctgggctcaagccgtcctccccactaggcctctaggcctcctaaagtgctaggatacaggcatgagccaccgcgtttctcccactcccctcttttgcacttttttctcccttagttttgaaacagtggttcacctggtttgcctactattatactgttctggttgttccttcttacattaattcaataaatacttattgagtacctgcagtgtgtcagttactggggacataatactgggttgtctcttctgcttgccccgtaagtgctggtgatcactgctcttcgggtgacttcatccatctcttgttttcttttcttttctttt

SEQ ID NO: 236347 - DNA, 2276 bp, Homo sapiens
tctcgggaagcgcgcctgtgtttgtaccgggaatcggccattctggcggtggagcgggcgggaaggaggcgttcgtctagatttgtcggcttgcggggagacttcaggagtcgctgtctctgaacttccagcctcagagaccgccgcccttgtccccgagggccatgggccgggtctcagggcttgtgccctctcgcttcctgacgctcctggcgcatctggtggtcgtcatcaccttattctggtcccgggacagcaacatacaggcctgcctgcctctcacgttcacccccgaggagtatgacaagcaggacattcatgcccttccagctgtcactgaaatggctttattcgtcaccgtctttgggctgaaaaagaaacccttctgattaccttcatgacgggaacctaaggacgaagcctacaggggcaagggccgcttcgtattcctggaagaaggaaggcataggcttcggttttcccctcggaaactgcttctgctggaggatatgtgttggaataattacgtcttgagtctgggattatccgcattgtatttagtgctttgtaataaaatatgttttgtagtaacattaagacttatatacagttttaggggacaattgagatggctgaactactgaataaaaaaaaaacaacgctgttttctagtcctgcagaccgtaagatacttggtatcgcttctattttggttactacggtaggtgcctggcggaagggagtgggcggagatatgtaaatagaaagtgcgtacagttagaacgtccggcacgtaactgatcggagcattctgggaagaagtaatttattccttttcggcagccgaatgaaaaaaaaatttaaaaaaatgtgcgagctaatatggcaaaacaactggaaggacgctaaataataggattgctcataccagcgcgttatgaactcaccctagcttgtaacggaatctttttcactgagtgcagaatgtcggctgtttgtctgtatcgtcaggtgggataatccttacctgttcctcctccggagggcagattagaacatgatgattggagatgcatgaaacgtgattaacgtctctgcgtaatcaggacttgcaacaccctgattgctcctgtctgattctttctgacgatcacttacatttgtgttatgctgattagcagatatccacaaacatagctatgaagttctgactgggataaccttgctgtttgtctattttgcagtcttgctattgctgtttgtctattttgcagtcttgctaaatttgtttgttcttgaaaattgtgatttggtttttgttgctttctggaatttaggcagtgaaataatacaaatgggctctttgttttttgtcgtttgataactttaatcctcacttctcaggaaacattgcacatcagtaaatatctgcagtcttgtgcacatggtggttgccctcaggatggtattcaataggaactgtatttctttttccttgaggtagggtcttggtctgtcgccaaggcaggagtgcacggcgcagatgtatatacatggatacatttgtttttggagagttggttgttaaaaatctaccagtacacccccaagaaactcatcatcaccaatgacttcttcccaaatccagagtcacttttcagacttgagattgacctctcttcagcatatggtatgttgaccacccccctcttttggttttttttttttttttttttgagacagtctcactctgttgcccaggctagagtgcagtgtgcagtggtgggatcatggctcactgcagcctcaaactcccaggctcagatgatcctcctgcatcagcctcccaagtagctgggactacaggtgagcaccaccacacctggttgttttaaaatttttctatagagacagggtctcactgtgttgcccaagctggtcccaaactcctgggctcaagccgtcctccccactaggcctctaggcctcctaaagtgctaggatacaggcatgagccaccgcgtttctcccactcccctcttttgcacttttttctcccttagttttgaaacagtggttcacctggtttgcctactattatactgttctggttgttccttcttacattaattcaataaatacttattgagtacctgcagtgtgtcagttactggggacataatactgggttgtctcttctgcttgccccgtaagtgctggtgatcactgctcttcgggtgacttcatccatctcttgttttcttttcttttctttt

SEQ ID NO: 236348 - DNA, 1167 bp, Homo sapiens
tctcgggaagcgcgcctgtgtttgtaccgggaatcggccattctggcggtggagcgggcgggaaggaggcgttcgtctagatttgtcggcttgcggggagacttcaggagtcgctgtctctgaacttccagcctcagagaccgccgcccttgtccccgagggccatgggccgggtctcagggcttgtgccctctcgcttcctgacgctcctggcgcatctggtggtcgtcatcaccttattctggtcccgggacagcaacatacaggcctgcctgcctctcacgttcacccccgaggagtatgacaagcaggacattcatccacttcctctctgcaggctggtggccgcgctctctgtcaccctgggcctctttgcagtggagctggccggtttcctctcaggagtctccatgttcaacagcacccagagcctcatctccattggggctcactgtagtgcatccgtggccctgtccttcttcatattcgagcgttgggagtgcactacgtattggtacatttttgtcttctgcagtgcccttccagctgtcactgaaatggctttattcgtcaccgtctttgggctgaaaaagaaacccttctgattaccttcatgacgggaacctaaggacgaagcctacaggggcaagggccgcttcgtattcctggaagaaggaaggcataggcttcggttttcccctcggaaactgcttctgctggaggatatgtgttggaataattacgtcttgagtctgggattatccgcattgtatttagtgctttgtaataaaatatgttttgtagtaacattaagacttatatacagttttaggggacaattgagatggctgaactactgaataaaaaaaaaacaacgctgaaaaaaaaaaaaaaaaaaaaaaaaaaaaaaaaaaaaaaaaaaaaaaaaaaaaaaaaacacacaaataagaggcgacgcgcaactcaaacaaaccacctctaggaggacgcaccaccgccacaacacccatcaccgatatcacgagcagacagggcgcaccacaccacaggcgcgcacataatcaacaagcgcgagaacaggcgccgccacaacacagcgccacagagcgaaaccggcgcaacgccgacaccccgcgcaggacaccaccgcacccgcgcggagcacca

SEQ ID NO: 236349 - DNA, 1303 bp, Homo sapiens
cgacacggctgcgagaagacgacagaaggggacgtcaggtgggataatccttacctgttcctcctccggagggcagattagaacatgatgattggagatgcatgaaacgtgattaacgtctctgcgtaatcaggacttgcaacaccctgattgctcctgtctgattctttctgacgatcacttacatttgtgttatgctgattagcagatatccacaaacatagctatgaagttctgactgggataaccttgctgtttgtctattttgcagtcttgctattgctgtttgtctattttgcagtcttgctaaatttgtttgttcttgaaaattgtgatttggtttttgttgctttctggaatttaggcagtgaaataatacaaatgggctctttgttttttgtcgtttgataactttaatcctcacttctcaggaaacattgcacatcagtaaatatctgcagtcttgtgcacatggtggttgccctcaggatggtattcaataggaactgtatttctttttccttgaggtagggtcttggtctgtcgccaaggcaggagtgcacggcgcagatgtatatacatggatacatttgtttttggagagttggttgttaaaaatctaccagtacacccccaagaaactcatcatcaccaatgacttcttcccaaatccagagtcacttttcagacttgagattgacctctcttcagcatatggtatgttgaccacccccctcttttggttttttttttttttttttttgagacagtctcactctgttgcccaggctagagtgcagtgtgcagtggtgggatcatggctcactgcagcctcaaactcccaggctcagatgatcctcctgcatcagcctcccaagtagctgggactacaggtgagcaccaccacacctggttgttttaaaatttttctatagagacagggtctcactgtgttgcccaagctggtcccaaactcctgggctcaagccgtcctccccactaggcctctaggcctcctaaagtgctaggatacaggcatgagccaccgcgtttctcccactcccctcttttgcacttttttctcccttagttttgaaacagtggttcacctggtttgcctactattatactgttctggttgttccttcttacattaattcaataaatacttattgagtacctgcagtgtgtcagttactggggacataatactgggttgtctcttctgcttgccccgtaagtgctggtgatcactgctcttcgggtgacttcatccatctcttgttttcttttcttttctttt

SEQ ID NO: 236350 - DNA, 106 bp, Homo sapiens
ctgagagacccgcagcagccggagaatgtactgctcgcgaggatttccgagaacgcggcgccgagcccgcgtacacggttaccaaggcaactgggcggtgcctgag

SEQ ID NO: 236351 - DNA, 2748 bp, Homo sapiens
tctcgggaagcgcgcctgtgtttgtaccgggaatcggccattctggcggtggagcgggcgggaaggaggcgttcgtctagatttgtcggcttgcggggagacttcaggagtcgctgtctctgaacttccagcctcagagaccgccgcccttgtccccgagggccatgggccgggtctcagggcttgtgccctctcgcttcctgacgctcctggcgcatctggtggtcgtcatcaccttattctggtcccgggtaagacccacggctgcactcaatccgtccccattcccatctctgagtggtcctagtcctaccctgccccctcccagtgtcttaccctcttgggttttcttgtttcccgccgcccccaggcctgccctgcagcctgcccctttttcacttctcttcctgtgccctgctcccaggacagcaacatacaggcctgcctgcctctcacgttcacccccgaggagtatgacaagcaggacattcagtgagctcttgggacggggtggccagaacgaagaggtggtgggagtggaggggtcttagaataagtccaaaggcctgggccagtccacttcctctctgcaggctggtggccgcgctctctgtcaccctgggcctctttgcagtggagctggccggtttcctctcaggagtctccatgttcaacagcacccagagcctcatctccattggggctcactgtagtgcatccgtggccctgtccttcttcatattcgagcgttgggagtgcactacgtattggtacatttttgtcttctgcagtgcccttccagctgtcactgaaatggctttattcgtcaccgtctttgggctgaaaaagaaacccttctgattaccttcatgacgggaacctaaggacgaagcctacaggggcaagggccgcttcgtattcctggaagaaggaaggcataggcttcggttttcccctcggaaactgcttctgctggaggatatgtgttggaataattacgtcttgagtctgggattatccgcattgtatttagtgctttgtaataaaatatgttttgtagtaacattaagacttatatacagttttaggggacaattgagatggctgaactactgaataaaaaaaaaacaacgctgttttctagtcctgcagaccgtaagatacttggtatcgcttctattttggttactacggtaggtgcctggcggaagggagtgggcggagatatgtaaatagaaagtgcgtacagttagaacgtccggcacgtaactgatcggagcattctgggaagaagtaatttattccttttcggcagccgaatgaaaaaaaaatttaaaaaaatgtgcgagctaatatggcaaaacaactggaaggacgctaaataataggattgctcataccagcgcgttatgaactcaccctagcttgtaacggaatctttttcactgagtgcagaatgtcggctgtttgtctgtatcgtcaggtgggataatccttacctgttcctcctccggagggcagattagaacatgatgattggagatgcatgaaacgtgattaacgtctctgcgtaatcaggacttgcaacaccctgattgctcctgtctgattctttctgacgatcacttacatttgtgttatgctgattagcagatatccacaaacatagctatgaagttctgactgggataaccttgctgtttgtctattttgcagtcttgctattgctgtttgtctattttgcagtcttgctaaatttgtttgttcttgaaaattgtgatttggtttttgttgctttctggaatttaggcagtgaaataatacaaatgggctctttgttttttgtcgtttgataactttaatcctcacttctcaggaaacattgcacatcagtaaatatctgcagtcttgtgcacatggtggttgccctcaggatggtattcaataggaactgtatttctttttccttgaggtagggtcttggtctgtcgccaaggcaggagtgcacggcgcagatgtatatacatggatacatttgtttttggagagttggttgttaaaaatctaccagtacacccccaagaaactcatcatcaccaatgacttcttcccaaatccagagtcacttttcagacttgagattgacctctcttcagcatatggtatgttgaccacccccctcttttggttttttttttttttttttttgagacagtctcactctgttgcccaggctagagtgcagtgtgcagtggtgggatcatggctcactgcagcctcaaactcccaggctcagatgatcctcctgcatcagcctcccaagtagctgggactacaggtgagcaccaccacacctggttgttttaaaatttttctatagagacagggtctcactgtgttgcccaagctggtcccaaactcctgggctcaagccgtcctccccactaggcctctaggcctcctaaagtgctaggatacaggcatgagccaccgcgtttctcccactcccctcttttgcacttttttctcccttagttttgaaacagtggttcacctggtttgcctactattatactgttctggttgttccttcttacattaattcaataaatacttattgagtacctgcagtgtgtcagttactggggacataatactgggttgtctcttctgcttgccccgtaagtgctggtgatcactgctcttcgggtgacttcatccatctcttgttttcttttcttttctttt

SEQ ID NO: 236352 - DNA, 2908 bp, Homo sapiens
  misc_feature (1146)..(1146): n is a, c, g, or t
  misc_feature (1235)..(1235): n is a, c, g, or t
  misc_feature (1290)..(1290): n is a, c, g, or t
  misc_feature (1331)..(1331): n is a, c, g, or t
  misc_feature (2866)..(2866): n is a, c, g, or t
  misc_feature (2905)..(2905): n is a, c, g, or t
tctcgggaagcgcgcctgtgtttgtaccgggaatcggccattctggcggtggagcgggcgggaaggaggcgttcgtctagatttgtcggcttgcggggagacttcaggagtcgctgtctctgaacttccagcctcagagaccgccgcccttgtccccgagggccatgggccgggtctcagggcttgtgccctctcgcttcctgacgctcctggcgcatctggtggtcgtcatcaccttattctggtcccgggacagcaacatacaggcctgcctgcctctcacgttcacccccgaggagtatgacaagcaggacattcagctggtggccgcgctctctgtcaccctgggcctctttgcagtggagctggccggtttcctctcaggagtctccatgttcaacagcacccagagcctcatctgtatcctttctgcctgcccacctttcccacacgacccacttctatcaggactcccttcagccacctgacacaatagtgtctgctgtagccaatccttccagttcaaagatcttcaacgatgtgctaaatcctgctgtttactaggcacttaaaatcccaaaatgagagtaaaatacagtttttggccaggcatgttggctcacgtctgtaatcccagcactgtgggaggcgcaggcaggaggcaacatagtgagaacccaagtctacaaaaataataggaataataaaaaccccaccgtttctttttacaatgaggaggaggtagatacaaatctgtaattcagtgtgataagcactgtgctatagaagtgtgtgaagatagaaagcacaggcagggcgcgatggctcacgcatgtaatcccagcactttgggaggccgaggcaggtggaccacctgaggtcaggagttcgagaccggcctgaccaacatggtgaaacccccgtctctactaaaaatacaaaaattagtcgggcgtggcggcgcactcctgtaatcccagctactcaggagactgaggaaggagaattgcttgaacccgggaggcagaggttgcagtgagctgagatcgtgccactgcactccagccagggcaacagagcaagactctgtcaaaaaacaaacaaaagatataaagcacaatgggaactcagaagaggcaacggaancgagcactgggaactcagaagaggcaaaggagatgaggcacatgggtcagagaattgtggaccaggaggaccaggacactggaggctgnttccagcgcatattaagtcgctgtcagcactcctttgtggcatagcagaaggagngcctactcttacctctcatctgaaggatccaggctggcccncagataaggggtagggtagcctgaggtccgatctgtgcagtcacttctggtctctcctcacatgactgtcctaaaattcagaagtcagagctgctgactctagcccttgaaacatggtgagggagcaagggatgaacctgaatgcagatgccagccccaccactggccttttctgacccatcactgtctgtcgatccaaagactttccttaatctcgtgccttcccaagccattggggctcactgtagtgcatccgtggccctgtccttcttcatattcgagcgttgggagtgcactacgtattggtacatttttgtcttctgcaggtgtggtagcatccaatatttggggatgagggaggaaggttggccctaaacctgaaggtttttcccctacccagccctttcctccatgtgtgagataccagatccactcaacatcctgtaggcttttaaagtttcatcccctaccccccatgccacctgccctacactttcagaggtggggtctctggtttggagatttgggtatttatactgaaagggtttctgaatctaccacttgccttggtagtgcccttccagctgtcactgaaatggctttattcgtcaccgtctttgggctgaaaaagaaacccttctgattaccttcatgacgggaacctaaggacgaagcctacaggggcaagggccgcttcgtattcctggaagaaggaaggcataggcttcggttttcccctcggaaactgcttctgctggaggatatgtgttggaataattacgtcttgagtctgggattatccgcattgtatttagtgctttgtaataaaatatgttttgtagtaacattaagacttatatacagttttaggggacaattgagatggctgaactactgaataaaaaaaaaacaacgctgttttctagtcctgcagaccgtaagatacttggtatcgcttctattttggttactacggtaggtgcctggcggaagggagtgggcggagatatgtaaatagaaagtgcgtacagttagaacgtccggcacgtaactgatcggagcattctgggaagaagtaatttattccttttcggcagccgaatgaaaaaaaaatttaaaaaaatgtgcgagctaatatggcaaaacaactggaaggacgctaaataataggattgctcataccagcgcgttatgaactcaccctagcttgtaacggaatctttttcactgagtgcagaatgtcggctgtttgtctgtatcgtcaggtgggataatccttacctgttcctcctccggagggcagattagaacatgatgattggagatgcatgaaacgtgattaacgtctctgcgtaatcaggacttgcaacaccctgattgctcctgtctgattctttctgacgatcacttacatttgtgttatgctgattagcagatatccacaaacatagctatgaagttctgactgggataaccttgctgtttgtctattttgcagtcttgctattgctgtttgtctatttgcagtcttgctnttgtttggtctgtggattgggttttggtgcttctggttnggc

SEQ ID NO: 236353 - DNA, 1081 bp, Homo sapiens
atcaaaatagcattcaaatggatattagaaaacgttagaactaaacaattatgaaaaattctatatatcaaaacatggaatacagataaaatagtgcagagagaagtttatagactttcagaagggatgaaaattaataaagtaatcatcaatgatttagaataatattgaaaaaataaatccagaaagcagaaaaagaagataacaaaaataaaagcaaaaattaacaaaacataagaatatggaaaattaatgaaactacctctgttctttgaagcagttaaaatctagatgtctctgacaaattaagaaaaaagggatagatacaatatcggcaaatcacaagaaaacaacttcagaaggactagaatgatagcagaatgttatagacaacttttaattataatgacaacttggataaaatgggcacatttctagaaagttatattttgcaaaaattgacttatgaaagaattagaaaacctgtgcagtcctgaatcattgaaattagttaaacattgaagttaaactatcttttcacataaaactgaagtccacagttttataataaattctgctaaatatatttaatgagcaaatattccaatttaacataaactcttccagaaaataaaaaaaaaaaagacacgttcctctttaagttgtttaatgaggccatgattgttatcttgattccaaaatccaatacaaaatattagcaatctaaatgtagcaatgcattaaacacacacacaaattactaaattgactttatccaaaaaataaaaggctaattagcatcaaaactattaacataaattaacaaaataatgacaacttataaaatcatctctttttgcagatgaaagtcaatattcattcacattagaaactctcagtgaacgtggaatagaaggaaattctcataactggcaaaagagtaaatacaaaattctcaaaggagatatcatattcattggagaggtggtaaaatcattttctttaaaggaaggaacaaaagaaggatgcccactattaccatgcatattcaacattgaactaaggatggcagaaaccacat

SEQ ID NO: 236354 - DNA, 1035 bp, Homo sapiens
aaaaatttggtctggaaattccaagagcattacacttagaagataaatctccagaaagattgaagctcagtggatgggccaaaggggaatgaactcagtttacatggcagctcattcacattcctccttttgaaggggtgtattttcttactggagatgaaaagaaaaaaaaatctttatatcatgattccgccatgtgtacttccttctggaagaaattccatactatgatcaggcacttctttcagaagtcctatatttactcagaacatgctttctagcagtagtttgcagaagaaaaatgcaacttctacaattggaataaactgcctataggaacccagaaaaaatataaagtatattcagtagtaacgactgaaaaacacttgaaatagcttcttcaacacatatattgtatagctatttaaaacccaaatacaaatgttatatgaagactttcaaaaggccgcaggataattccaatggatctatttgttcagtcattcagaagctatatcgggaacccatcatggatgagctctgctctaggcatggggagaaaggatgaggaagacaaatatggccctagttcttgtggatcttatgttctagtggtggtgactattactttttgaattgtgtatttgccacaggggagattggattactcttcagaaattttataagcatctagagatgacctgcattattgccttgggcaggaaaataacagggttgaaaaaaatctgaacaaagaaatcaccatttgatggatatacacaggataatcttttctgaagttactaaaatggcgaagttcccaaaaaatgtaatgcgaattaaatttcactttgcctctgagaaaaagttaaaagaatttattattactctcgctacatgtattatcaaaaatgaagggttgatatttttaaggaaagaagagttggccagtcactttagtgaagttttattttttcgtaaatatagtttgcctttgcttccatgaaaaaatagctcataaaccttgaccctgat

SEQ ID NO: 236355 - DNA, 671 bp, Homo sapiens
ttttggtttctatttctttacatagtcggagtcacaaataccgttcatgttgtttttttcccccacatattttataattttctttgttttatatagatgttatattaacattcactttaaaaaataattacttattatttcatggaaccacatatcatggtttaagctcttttctatagagaaattaatgagtttccattattttaaataattgtacaatgcacacctttgggcaagcaaaggctctttcaggatttaggaatatgttctttgaactcctagaagcacaataactatgtaaaaactaaaagtaattttaagattcataatataaatttcaagttgcttcccaaaatgaaaaaatactatttccattatctgtgctaattatgtaaatctagttttctaggtaactgtatgtgaatgtaaatttccaaggctgaatatctgataacaatctctacttccagttcagagcttctgccttcatcagtgctacttccttatcttctcctttctgacctctgacccatagatcatctacctcaagcgaattagtcttcatttttattccaagtacactgtgtgtgttctcgtttattgcattttcttattgcccctggggtttcttctgctttccttcctctgacccaagtttcatttgtcttgaa

SEQ ID NO: 236356 - DNA, 310 bp, Homo sapiens
tattatatatacttacatatataaaggtatattttatatatacttacacgtacagtgtgtacatcaggaagtatgtataaaacatgcaagtgatgcttatgtggaaggtcactgctggtggccaccagggacagtctgtagcacaaacgtccatgtggacccgtgttccctgtccactgtggattgctcagagctgcctgttttctctgcagcttcagtactcggaggaagactgtgctttcgaggaggagatccgcccagatggctacaatgtgtaccgatccgagaagcaccgcctcccggtctccct

SEQ ID NO: 236357 - DNA, 2443 bp, Homo sapiens
ctgagactgtcggaactgccggggaaaattctacgggacggctttgacgtcagatgtgcggggctgcgaaagtcgggggagggagtgcgagtgggcttttaaggggaagggcactaaggccgaggtgaggcttttcccgacagagggtgaagggggcaaaactcggtgccccccaacctctggccccggggttcctgaccccgcccccgctagtgccccacgccgagtgcatccactgggagcctgaggcctgggggaagggccccagttgtcgattgctttacaaagtcaaactctcccagccaagaacctcggggccgctgcgcggtggggaggagttccccgaaacccggccgctaagcgaggcctcctcctcccgcagatccgaacggcctgggcggggtcaccccggctgggacaagaagccgccgcctgcctgcccgggcccggggagggggctggggctggggccggaggcggggtgtgagtgggtgtgtgcggggggcggaggcttgatgcaatcccgataagaaatgctcgggtgtcttgggcacctacccgtggggcccgtaaggcgctactatataaggctgccggcccggagccgccgcgccgtcagagcaggagcgctgcgtccaggatctagggccacgaccatcccaacccggcactcacagccccgcagcgcatcccggtcgccgcccagcctcccgcacccccatcgccggagctgcgccgagagccccagggaggtgccatgcggagcgggtgtgtggtggtccacgtatggatcctggccggcctctggctggccgtggccgggcgccccctcgccttctcggacgcggggccccacgtgcactacggctggggcgaccccatccgcctgcggcacctgtacacctccggcccccacgggctctccagctgcttcctgcgcatccgtgccgacggcgtcgtggactgcgcgcggggccagagcgcgcacagtttgctggagatcaaggcagtcgctctgcggaccgtggccatcaagggcgtgcacagcgtgcggtacctctgcatgggcgccgacggcaagatgcaggggctgcttcagtactcggaggaagactgtgctttcgaggaggagatccgcccagatggctacaatgtgtaccgatccgagaagcaccgcctcccggtctccctgagcagtgccaaacagcggcagctgtacaagaacagaggctttcttccactctctcatttcctgcccatgctgcccatggtcccagaggagcctgaggacctcaggggccacttggaatctgacatgttctcttcgcccctggagaccgacagcatggacccatttgggcttgtcaccggactggaggccgtgaggagtcccagctttgagaagtaactgagaccatgcccgggcctcttcactgctgccaggggctgtggtacctgcagcgtgggggacgtgcttctacaagaacagtcctgagtccacgttctgtttagctttaggaagaaacatctagaagttgtacatattcagagttttccattggcagtgccagtttctagccaatagacttgtctgatcataacattgtaagcctgtagcttgcccagctgctgcctgggcccccattctgctccctcgaggttgctggacaagctgctgcactgtctcagttctgcttgaatacctccatcgatggggaactcacttcctttggaaaaattcttatgtcaagctgaaattctctaattttttctcatcacttccccaggagcagccagaagacaggcagtagttttaatttcaggaacaggtgatccactctgtaaaacagcaggtaaatttcactcaaccccatgtgggaattgatctatatctctacttccagggaccatttgcccttcccaaatccctccaggccagaactgactggagcaggcatggcccaccaggcttcaggagtaggggaagcctggagccccactccagccctgggacaacttgagaattccccctgaggccagttctgtcatggatgctgtcctgagaataacttgctgtcccggtgtcacctgcttccatctcccagcccaccagccctctgcccacctcacatgcctccccatggattggggcctcccaggccccccaccttatgtcaacctgcacttcttgttcaaaaatcaggaaaagaaaagatttgaagaccccaagtcttgtcaataacttgctgtgtggaagcagcgggggaagacctagaaccctttccccagcacttggttttccaacatgatatttatgagtaatttattttgatatgtacatctcttattttcttacattatttatgcccccaaattatatttatgtatgtaagtgaggtttgttttgtatattaaaatggagtttgtttgtaaaaaaggtgca

SEQ ID NO: 236358 - DNA, 9191 bp, Homo sapiens
  misc_feature (9116)..(9116): n is a, c, g, or t
  misc_feature (9119)..(9119): n is a, c, g, or t
  misc_feature (9121)..(9121): n is a, c, g, or t
  misc_feature (9132)..(9132): n is a, c, g, or t
  misc_feature (9140)..(9140): n is a, c, g, or t
tacaaggtggggatgtaagaaaggggtgctttatttttgagactttttctttagatgagattaaagaagaatctgactatatcagcaccaagaaaacaattactgaagaagtaatacagggtgatgtaaaaagctacagaatgctctttgaaacccagccactctatgcaattcaagaccgagaagggtcctatcatgaagtgaccacagttaaaaaagaagaggtaattcatggagatgtgcgaggaacaaggtggcttttgaaacaaagccattagactctattaataaatcagaaactgtgtatgttattaaatctgtcacacaagaagacattcagaagggagatgttagttctgtcagatacagatttgaaactcagccactggatcagatttctgaagaatcacataatattatgcccagtattgaccatatacaaggtggcaatgtaaagacaagtagacaattctttgagtctgaaaatttgataagaataactatatacgaacagtaagtgtcaatgaaatacaaaagggcaatgttaaaacatctacttggctatttgaaacccacactatggatgaactgagaggagaagggttagaatatgaaaatatcaagacagtcactcaggaagatgtgcagaaaggtgatgttaagcaggctgtgtggcttttgaaaatcgaactttcgattctattatggaagcacataaaggtatcacaaaaatgaccaaggaagaaatccctccttctgatgtcaaaacaaccacatggctctttgaaacaacaccacttcatgaatttaatgaaactagagtagaaaagatagaaattattggcaagagcattaaagaaaccttagaagatctctactctcaaaaagttatccaggctcctggaatcatcattgaagctgatgaaataggggatgttcgaatggcaaaatacaagctaatgaaccaagcatctcctgagatacagaaagaagaaattatcagggctgatctcagaaatataatggtgaacctactttccaaaagggactgtactgaaagagagatttgattagtgaagaagagaagggaaatgttaatttgactaaaactcaattattaaacagatcaactgaatttcatgctgaaaaagaagagatagtgaaaggtgatgtacaacaagcaataaaaaacctgttctctgaggaaagatctgtaaagaaaggcatcttaattcaggaagatgaaaaaggagatattaacatgactatctattgtcttcttcatgaaaatgatggtgacacaattgagcgtgaagaagtaataggtggtgatgtcaaacgtaccattcataatttattgtcttccacatcaaacaataaaatatctgaaagggctaaaattgatgcctctgagagaggaaatgttcagtttttcacaacctgcatagaagctggagctttggattatctgaaacaactccacacagagtcaaatgaaacactgacagctaagaaacaagaaggagagaaagaaatcattggtggtgatgttgaaggtacaaaactgttactgaagaaaaggcagtctctggttgaacgtactgttagtgaaactgacatcatccctggagatgtgcataacacagttaaggtttttatgaccgagcctcagagtacatttggtaagatacccaaagaagagattataaaaggtgatttgacatcaaccctaaattccctcagccaggctgtaaatcagaaaacagtgacgaaaacagaagaaattataaaaggtaacatgctagccacactcaagtcacttaaagaatcaagccatcgatggaaagaatctaaacagcctgatgccatccctggtgatattgaaaaagctattgaatgccttgaaaaagctacaaatacaaagacagaaattctgaaaaaggagcttctcaaagatgacctggaaacatcactaaggtctttgaaagaagcacaaagaagtttcaaagaggtacataaagaaggtgtaataaaaaaagatgctaaagctgtgatggcaggatcctcgggagagcagaaaacagatattcatcaggttgctgtccagaggaacaaaaatagtcttcttcagccaaagccaggtccatttgagccagcggccaagtggcaagggggagcagatactctcagtcaaactatggggaaatcttgccatggcaatttagtagaagaaagaactgaggttaatcttccaaaagcccccaaaggcactgtaaagattgtcatagatcgtgaacaaaacaatgatgctctggagaaaagccttagaagactatctaattcacaccataaatctaatgttttggaatcaggagacaaaacgggtgtctggactgatactacaggagaacagcatcttagagatgaatatatgagcagacaattaacttcaactgtgtcagttaagaataatctaacaactaaagaatcagacagggcagtgagagagctgaagaaggatgatgtctttaattccatccaatctgctggtaaaaccgttggaaagcaacagacatatgaactgagaaatgaccaccagaaaatggagggttttcatataaagagtcctaaaaagaccaaaaatattaaaatattaactgatacacaaagctccaagcccagtcccacccagcatccagtcagcatgccagttggaggaacttacgacctttcaggggactttcagaagcaaactttgttaaagcaagaaacaaaatattctaataaggatataaagaaaaagaatataaaccttcaaccaatgtggcagcttttgcctgtagagcaagacacatccaatgtaacagaaatgaaagtctctgaaaaaagtcacaatacatttaaggcaaccaacaaaaagcgggagactgatgttcacttgaaaagccaggactttctaatgaaaacaaatacttccacaggcttaaaaatggcaatggaaaggtccttgaatccaatcaactttaaccctgagaataatgtaaaagaaagtgagtgcccccttccacctccatctccacctcctccaccaccttctaatgcatcatctgaaattgaatttcctcttcctcctccacctcctttgatgatgtttcctgaaaaaaatggtgggttcctctcccttcacctgtccacagagaagataaaggctgactcttgaaagttttccaggcctccctcttcctccacctccagtagatgagaaatctgaaagagaaagttcatcgatgtttctgccgcctcctcctcctccaactccatctcaaaagccagcacatctcctttcctcctctgctccggaaaagcacagtggagacttcatgcaacaatattcccaaaaagaagcctcgaactctcagaattctcaggctaaaatcataacaggaaaaaccggtgtgttgccacctcccacattgcccaaacccaaacttcccaagcatataaaagataataagaacgatttttcccccaaagttgaactggcaacctccctgtcagatatggaatgtaaaattactacctcaaaggatcagaaaaaagtaatggtgatgaccagcagtgaacacacggagacaaagcagaacgttattagtaagagtcttgatgaaagaaaacaattatctattgactctgcaaactgtctctcacacacagttccaggaacttcagcacccaggaaaaaacagattgcgcctcttataaaatctcattcatttccagagagttcaggacaacaaaatccaaaaccttatatgagaaaatttaagacacctttaatgattgctgaagaaaaatatagacaacaaaaagaagaaatgaaaaacagaaacaggagagttcttactacaacatgttaaaactcaaagccaaaatcaacacataacagaggtggaaaaggaaatgccattacaaaaaaccaatgaggaggtttccctatctggaattgattcagaatgcactgtggttcaacccagcccaggctctcaaagtaatgctcggatactaggagtgtgttctgataaccaactctccacaacatcgccagaaacagtcgctgccaagaggctccaccatgttttagcagcttcagaagacaaagataagatgaaaaaggaagttttacaaagctcaagggacattatgcaatccaaatcagcttgcgaaattaaacaaagtcaccaagaatgtagtacccaacaaacacaacagaagaagtatttggagcagttgcacttgccccaaagcaaaccaatttccccaaatttcaaagttaaaaccatcaaacttccaactctagatcatacattaaatgaaacagaccacagctatgaaagtcataaacagcaatctgagattgatgttcaaacctttaccaaaaaacaatatctgaaaaccaagaaaactgaagcaagcactgaatgtagtcataagcaatctctggctgaaagacattatcagttacctaagaaggagaaaagagtgacagtacaattgcctacagaatccatacagaagaaccaggaagataagctcaagatggttcccaggaagcaaagagaatttagcggatctgacagagggaaacttccaggaagtgaagaaaaaaatcagggaccatcaatgattggtcgaaaagaagagagattaataactgaaagaaaacacgaacatctgaagaataaatcagcaccaaaggtcgtcaagcaaaaggttatcgatgcacatcttgattcacagactcagaattttcagcaaacacaaatacagaccgctgaaagtaaagctgaacataaaaaattgccccagccatataatagtctgcaggaagaaaaatgtctcgaagtcaagggcatacaagagaaacaagtcttctctaatactaaagattcaaagcaagagattacacagaacaaatctttcttttcctctgtgaaagaatcccagcgggatgatggaaaaggtgccttaaatatagtggaattcttgagaaaacgtgaagaactgcaacagattttgtcgagagtgaaacagtttgaagcagagccaaataaaagtggccttaaaacatttcagacactattaaatactatcccaggatggctgataagtgaagataagagagaatatgcagttcacattgccatggagaataatttagaaaaagtaaaagaagaaataacacatattaaaactcaagcggaagatatgcttgtgtcctatgaaaatataattcagacagccatgatgtcctccaaaacaggaaaaccgggaaataaacccactagtcttgatgaaacatcatccaaagtatctaatgttcatgtcagcaataataaaaatagtgaacagaaagaaaataaaattgccaaagagaaaacagtacagcaccaagtagcagctcatcatgaagcaactgttcgtagtcacgtgaaaacccatcaggaaattaaacttgatgatagcaacattcctcctccctctttaaaaacacgcccaccgtcaccaacttttatcacaatagaatctactgcccgacgaacagaaaaccctactaagaacgagctttctcagtcccctaaaaaggacagttatgttgaacccccaccaagaaggcccatgtcgcaaaaatctgaaattcacagagcaaacacttccccttctccacccaggagtcgctctgaacaacttgtcagactcaaagacaccactgcaaagttatccaaaggggccatcccatgtccagcagcaaccccggttccaattgtagagaagaggtctgaaatcatcatgtctcctgcaacacttcgtcgtcaaattaagatagaaactcgtggtagggactctccacctacaatcacaataccagtaaatataaatcatgctgctagtggttccttcagagaatctgtggacgctcaagaggaaatcaggaaagtggagaagagagctacttatgttcataaagatggactaaattccactgatcacatggtgcccgacactgaaagttatgatgcagttgaaatcatccgcaaggttgcagtgcctcctcgcctgtcagagcacacacagagatatgaagcggccaaccgaactgttcaaatggctgaaaatttcgtgaatgaccctgaaaatgaaataaacagatggttcagggaatttgagcatggcccagtttctgaagcaaagtcaaatagaagagtttatgcaaagggagaaacaaaccataacatacaacaagaaagtcgtacatttgtaaggaggaatttggattaacatctttaggaaacacgagttttacagacttttcttgcaaacatcctagagaactgcgagaaaagattcctgttaagcagcccaggatctgctctgaaaccaggtctctaagtgaacatttctcaggcatggatgcatttgagagtcaaattgttgagtcgaagatgaaaacctcttcatcacatagctcagaagctggcaaatctggctgtgacttcaagcatgccccaccaacctatgaggatgtcattgctggacatattttagatatctctgattcacctaaagaagtaagaaaaaattttcaaaagacgtggcaagagagtggaagagtttttaaaggcctgggatatgcaaccgcagatgcttctgcaactgagatgagaaccaccttccaagaggaatctgcatttataagtgaagctgctgctccaagacaaggaaatatgtatactttgtcaaaagacagtttatccaatggagtgcctagtggcagacaagcagaattttcataagtcctgcttccgatgccaccattgcaacagtaaactaagtttgggaaattatgcatcacttcatggacaaatatactgtaaacctcactttaaacaacttttcaaatccaaaggaaattatgatgaaggttttggacataagcagcataaagatagatggaactgcaaaaaccaaagcagatcagtggactttattcctaatgaagaaccaaatatgtgtaaaaatattgcagaaaacacccttgtacctggagatcgtaatgaacatttagatgctggtaacagtgaagggcaaaggaatgatttgagaaaattaggggaaaggggaaaattaaaagtcatttggcctccttccaaggagatccctaagaaaaccttaccctttgaggaagagctcaaaatgagtaaacctaagtggccacctgaaatgacaaccctgctatcccctgaatttaaaagtgaatctctgctagaagatgttagaactccagaaaataaaggacaaagacaagatcactttccatttttgcagccttatctacagtccacccatgtttgtcagaaagaggatgttataggaatcaaagaaatgaaaatgcctgaaggaagaaaagatgaaaagaaggaaggaaggaagaatgtgcaagataggccgagtgaagctgaagacacaaagagtaacaggaaaagtgctatggatcttaatgacaacaataatgtgattgtgcagagtgctgaaaaggagaaaaatgaaaaaactaaccaaactaatggtgcagaagttttacaggttactaacactgatgatgagatgatgccagaaaatcataaagaaaatttgaataagaataataataacaattatgtagcagtctcatatctgaataattgcaggcagaagacatctattttagaatttcttgatctattacccttgtcgagtgaagcaaatgacactgcaaatgaatatgaaattgagaagttagaaaatacatctagaatctcagagttacttggtatatttgaatctgaaaagacttattcgaggaatgtactagcaatggctctgaagaaacagactgacagagcagctgctggcagtcctgtgcagcctgctccaaaaccaagcctcagcagaggccttatggtaaaggggggaagttcaatcatctctcctgatacaaatctcttaaacattaaaggaagccattcaaagagcaaaaatttacactttttcttttctaacaccgtgaaaatcactgcattttccaagaaaaatgagaacattttcaattgtgatttaatagattctgtagatcaaattaaaaatatgccatgcttggatttaagggaattggaaaggatgttaaaccttggcatgttgaaacaacagaagctgcccgcaataatgaaaacacaggttttgatgctctgagccatgaatgtacagctaagcctttgtttcccagagtggaggtgcagtcagaacaactcacggtggaagagcagattaaaagaaacaggtgctacagtgacactgagtaaaatatctatggccactgacagtccacacttaggcactgagagatattgatgttctgaaataagattttatgaatttggatacccttttgaggaacttgatgtaaacatggtgttcagaaatctcgtgtctatctcaatgggatatttcttgtattacaccttgtcatttttttcacaatttatttacatctacttttgtttgaactggaatgaagagatgaaacactatggatatgttttccattcaaatggcactttagcatattgttctgttttcctgtaaaacatcatgggtgtgatttttatactgctgctgcttgtcacaattattataacttctctgtaatttcctctgaaataaaattgaatcacctgaggtgcaaaccaaaatacttctgtaacttttttgatatatactgtcattctaagtacatatactccttgtgacttgggaagtattgtcttgaggcaagtatttaccacccacactaaaataatgctggaaaaaataaaatactaaactgaaggcacagtattattagaaagtgtaacattttcattttctcttttactctacattttaaagatacgagggttattgtcttgaaataattacctatattaattatcatagaatgtgtctataaacctttgacgaaaaatgttggttttcctccagaataatgtgaagtccatactcagaaattaactagaaaggtntgncnttcttataatnttccctgnttggtgcggcccggaggggggataaaccaccacagcggggggggccaaaag

SEQ ID NO: 236359 - DNA, 9065 bp, Homo sapiens
  misc_feature (8990)..(8990): n is a, c, g, or t
  misc_feature (8993)..(8993): n is a, c, g, or t
  misc_feature (8995)..(8995): n is a, c, g, or t
  misc_feature (9006)..(9006): n is a, c, g, or t
  misc_feature (9014)..(9014): n is a, c, g, or t
tacaaggtggggatgtaagaaaggggtgctttatttttgagactttttctttagatgagattaaagaagaatctgactatatcagcaccaagaaaacaattactgaagaagtaatacagggtgatgtaaaaagctacagaatgctctttgaaacccagccactctatgcaattcaagaccgagaagggtcctatcatgaagtgaccacagttaaaaaagaagaggtaattcatggagatgtgcgaggaacaaggtggcttttgaaacaaagccattagactctattaataaatcagaaactgtgtatgttattaaatctgtcacacaagaagacattcagaagggagatgttagttctgtcagatacagatttgaaactcagccactggatcagatttctgaagaatcacataatattatgcccagtattgaccatatacaaggtggcaatgtaaagacaagtagacaattctttgagtctgaaaatttgataagaataactatatacgaacagtaagtgtcaatgaaatacaaaagggcaatgttaaaacatctacttggctatttgaaacccacactatggatgaactgagaggagaagggttagaatatgaaaatatcaagacagtcactcaggaagatgtgcagaaaggtgatgttaagcaggctgtgtggcttttgaaaatcgaactttcgattctattatggaagcacataaaggtatcacaaaaatgaccaaggaagaaatccctccttctgatgtcaaaacaaccacatggctctttgaaacaacaccacttcatgaatttaatgaaactagagtagaaaagatagaaattattggcaagagcattaaagaaaccttagaagatctctactctcaaaaagttatccaggctcctggaatcatcattgaagctgatgaaataggggatgttcgaatggcaaaatacaagctaatgaaccaagcatctcctgagatacagaaagaagaaattatcagggctgatctcagaaatataatggtgaacctactttccaaaagggactgtactgaaagagagatttgattagtgaagaagagaagggaaatgttaatttgactaaaactcaattattaaacagatcaactgaatttcatgctgaaaaagaagagatagtgaaaggtgatgtacaacaagcaataaaaaacctgttctctgaggaaagatctgtaaagaaaggcatcttaattcaggaagatgaaaaaggagatattaacatgactatctattgtcttcttcatgaaaatgatggtgacacaattgagcgtgaagaagtaataggtggtgatgtcaaacgtaccattcataatttattgtcttccacatcaaacaataaaatatctgaaagggctaaaattgatgcctctgagagaggaaatgttcagtttttcacaacctgcatagaagctggagctttggattatctgaaacaactccacacagagtcaaatgaaacactgacagctaagaaacaagaaggagagaaagaaatcattggtggtgatgttgaaggtacaaaactgttactgaagaaaaggcagtctctggttgaacgtactgttagtgaaactgacatcatccctggagatgtgcataacacagttaaggtttttatgaccgagcctcagagtacatttggtaagatacccaaagaagagattataaaaggtgatttgacatcaaccctaaattccctcagccaggctgtaaatcagaaaacagtgacgaaaacagaagaaattataaaaggtaacatgctagccacactcaagtcacttaaagaatcaagccatcgatggaaagaatctaaacagcctgatgccatccctggtgatattgaaaaagctattgaatgccttgaaaaagctacaaatacaaagacagaaattctgaaaaaggagcttctcaaagatgacctggaaacatcactaaggtctttgaaagaagcacaaagaagtttcaaagaggtacataaagaaggtgtaataaaaaaagatgctaaagctgtgatggcaggatcctcgggagagcagaaaacagatattcatcaggttgctgtccagaggaacaaaaatagtcttcttcagccaaagccaggtccatttgagccagcggccaagtggcaagggggagcagatactctcagtcaaactatggggaaatcttgccatggcaatttagtagaagaaagaactgaggttaatcttccaaaagcccccaaaggcactgtaaagattgtcatagatcgtgaacaaaacaatgatgctctggagaaaagccttagaagactatctaattcacaccataaatctaatgttttggaatcaggagacaaaacgggtgtctggactgatactacaggagaacagcatcttagagatgaatatatgagcagacaattaacttcaactgtgtcagttaagaataatctaacaactaaagaatcagacagggcagtgagagagctgaagaaggatgatgtctttaattccatccaatctgctggtaaaaccgttggaaagcaacagacatatgaactgagaaatgaccaccagaaaatggagggttttcatataaagagtcctaaaaagaccaaaaatattaaaatattaactgatacacaaagctccaagcccagtcccacccagcatccagtcagcatgccagttggaggaacttacgacctttcaggggactttcagaagcaaactttgttaaagcaagaaacaaaatattctaataaggatataaagaaaaagaatataaaccttcaaccaatgtggcagcttttgcctgtagagcaagacacatccaatgtaacagaaatgaaagtctctgaaaaaagtcacaatacatttaaggcaaccaacaaaaagcgggagactgatgttcacttgaaaagccaggactttctaatgaaaacaaatacttccacaggcttaaaaatggcaatggaaaggtccttgaatccaatcaactttaaccctgaaaaaaatggtgggttcctctcccttcacctgtccacagagaagataaaggctgactcttgaaagttttccaggcctccctcttcctccacctccagtagatgagaaatctgaaagagaaagttcatcgatgtttctgccgcctcctcctcctccaactccatctcaaaagccagcacatctcctttcctcctctgctccggaaaagcacagtggagacttcatgcaacaatattcccaaaaagaagcctcgaactctcagaattctcaggctaaaatcataacaggaaaaaccggtgtgttgccacctcccacattgcccaaacccaaacttcccaagcatataaaagataataagaacgatttttcccccaaagttgaactggcaacctccctgtcagatatggaatgtaaaattactacctcaaaggatcagaaaaaagtaatggtgatgaccagcagtgaacacacggagacaaagcagaacgttattagtaagagtcttgatgaaagaaaacaattatctattgactctgcaaactgtctctcacacacagttccaggaacttcagcacccaggaaaaaacagattgcgcctcttataaaatctcattcatttccagagagttcaggacaacaaaatccaaaaccttatatgagaaaatttaagacacctttaatgattgctgaagaaaaatatagacaacaaaaagaagaaatgaaaaacagaaacaggagagttcttactacaacatgttaaaactcaaagccaaaatcaacacataacagaggtggaaaaggaaatgccattacaaaaaaccaatgaggaggtttccctatctggaattgattcagaatgcactgtggttcaacccagcccaggctctcaaagtaatgctcggatactaggagtgtgttctgataaccaactctccacaacatcgccagaaacagtcgctgccaagaggctccaccatgttttagcagcttcagaagacaaagataagatgaaaaaggaagttttacaaagctcaagggacattatgcaatccaaatcagcttgcgaaattaaacaaagtcaccaagaatgtagtacccaacaaacacaacagaagaagtatttggagcagttgcacttgccccaaagcaaaccaatttccccaaatttcaaagttaaaaccatcaaacttccaactctagatcatacattaaatgaaacagaccacagctatgaaagtcataaacagcaatctgagattgatgttcaaacctttaccaaaaaacaatatctgaaaaccaagaaaactgaagcaagcactgaatgtagtcataagcaatctctggctgaaagacattatcagttacctaagaaggagaaaagagtgacagtacaattgcctacagaatccatacagaagaaccaggaagataagctcaagatggttcccaggaagcaaagagaatttagcggatctgacagagggaaacttccaggaagtgaagaaaaaaatcagggaccatcaatgattggtcgaaaagaagagagattaataactgaaagaaaacacgaacatctgaagaataaatcagcaccaaaggtcgtcaagcaaaaggttatcgatgcacatcttgattcacagactcagaattttcagcaaacacaaatacagaccgctgaaagtaaagctgaacataaaaaattgccccagccatataatagtctgcaggaagaaaaatgtctcgaagtcaagggcatacaagagaaacaagtcttctctaatactaaagattcaaagcaagagattacacagaacaaatctttcttttcctctgtgaaagaatcccagcgggatgatggaaaaggtgccttaaatatagtggaattcttgagaaaacgtgaagaactgcaacagattttgtcgagagtgaaacagtttgaagcagagccaaataaaagtggccttaaaacatttcagacactattaaatactatcccaggatggctgataagtgaagataagagagaatatgcagttcacattgccatggagaataatttagaaaaagtaaaagaagaaataacacatattaaaactcaagcggaagatatgcttgtgtcctatgaaaatataattcagacagccatgatgtcctccaaaacaggaaaaccgggaaataaacccactagtcttgatgaaacatcatccaaagtatctaatgttcatgtcagcaataataaaaatagtgaacagaaagaaaataaaattgccaaagagaaaacagtacagcaccaagtagcagctcatcatgaagcaactgttcgtagtcacgtgaaaacccatcaggaaattaaacttgatgatagcaacattcctcctccctctttaaaaacacgcccaccgtcaccaacttttatcacaatagaatctactgcccgacgaacagaaaaccctactaagaacgagctttctcagtcccctaaaaaggacagttatgttgaacccccaccaagaaggcccatgtcgcaaaaatctgaaattcacagagcaaacacttccccttctccacccaggagtcgctctgaacaacttgtcagactcaaagacaccactgcaaagttatccaaaggggccatcccatgtccagcagcaaccccggttccaattgtagagaagaggtctgaaatcatcatgtctcctgcaacacttcgtcgtcaaattaagatagaaactcgtggtagggactctccacctacaatcacaataccagtaaatataaatcatgctgctagtggttccttcagagaatctgtggacgctcaagaggaaatcaggaaagtggagaagagagctacttatgttcataaagatggactaaattccactgatcacatggtgcccgacactgaaagttatgatgcagttgaaatcatccgcaaggttgcagtgcctcctcgcctgtcagagcacacacagagatatgaagcggccaaccgaactgttcaaatggctgaaaatttcgtgaatgaccctgaaaatgaaataaacagatggttcagggaatttgagcatggcccagtttctgaagcaaagtcaaatagaagagtttatgcaaagggagaaacaaaccataacatacaacaagaaagtcgtacatttgtaaggaggaatttggattaacatctttaggaaacacgagttttacagacttttcttgcaaacatcctagagaactgcgagaaaagattcctgttaagcagcccaggatctgctctgaaaccaggtctctaagtgaacatttctcaggcatggatgcatttgagagtcaaattgttgagtcgaagatgaaaacctcttcatcacatagctcagaagctggcaaatctggctgtgacttcaagcatgccccaccaacctatgaggatgtcattgctggacatattttagatatctctgattcacctaaagaagtaagaaaaaattttcaaaagacgtggcaagagagtggaagagtttttaaaggcctgggatatgcaaccgcagatgcttctgcaactgagatgagaaccaccttccaagaggaatctgcatttataagtgaagctgctgctccaagacaaggaaatatgtatactttgtcaaaagacagtttatccaatggagtgcctagtggcagacaagcagaattttcataagtcctgcttccgatgccaccattgcaacagtaaactaagtttgggaaattatgcatcacttcatggacaaatatactgtaaacctcactttaaacaacttttcaaatccaaaggaaattatgatgaaggttttggacataagcagcataaagatagatggaactgcaaaaaccaaagcagatcagtggactttattcctaatgaagaaccaaatatgtgtaaaaatattgcagaaaacacccttgtacctggagatcgtaatgaacatttagatgctggtaacagtgaagggcaaaggaatgatttgagaaaattaggggaaaggggaaaattaaaagtcatttggcctccttccaaggagatccctaagaaaaccttaccctttgaggaagagctcaaaatgagtaaacctaagtggccacctgaaatgacaaccctgctatcccctgaatttaaaagtgaatctctgctagaagatgttagaactccagaaaataaaggacaaagacaagatcactttccatttttgcagccttatctacagtccacccatgtttgtcagaaagaggatgttataggaatcaaagaaatgaaaatgcctgaaggaagaaaagatgaaaagaaggaaggaaggaagaatgtgcaagataggccgagtgaagctgaagacacaaagagtaacaggaaaagtgctatggatcttaatgacaacaataatgtgattgtgcagagtgctgaaaaggagaaaaatgaaaaaactaaccaaactaatggtgcagaagttttacaggttactaacactgatgatgagatgatgccagaaaatcataaagaaaatttgaataagaataataataacaattatgtagcagtctcatatctgaataattgcaggcagaagacatctattttagaatttcttgatctattacccttgtcgagtgaagcaaatgacactgcaaatgaatatgaaattgagaagttagaaaatacatctagaatctcagagttacttggtatatttgaatctgaaaagacttattcgaggaatgtactagcaatggctctgaagaaacagactgacagagcagctgctggcagtcctgtgcagcctgctccaaaaccaagcctcagcagaggccttatggtaaaggggggaagttcaatcatctctcctgatacaaatctcttaaacattaaaggaagccattcaaagagcaaaaatttacactttttcttttctaacaccgtgaaaatcactgcattttccaagaaaaatgagaacattttcaattgtgatttaatagattctgtagatcaaattaaaaatatgccatgcttggatttaagggaattggaaaggatgttaaaccttggcatgttgaaacaacagaagctgcccgcaataatgaaaacacaggttttgatgctctgagccatgaatgtacagctaagcctttgtttcccagagtggaggtgcagtcagaacaactcacggtggaagagcagattaaaagaaacaggtgctacagtgacactgagtaaaatatctatggccactgacagtccacacttaggcactgagagatattgatgttctgaaataagattttatgaatttggatacccttttgaggaacttgatgtaaacatggtgttcagaaatctcgtgtctatctcaatgggatatttcttgtattacaccttgtcatttttttcacaatttatttacatctacttttgtttgaactggaatgaagagatgaaacactatggatatgttttccattcaaatggcactttagcatattgttctgttttcctgtaaaacatcatgggtgtgatttttatactgctgctgcttgtcacaattattataacttctctgtaatttcctctgaaataaaattgaatcacctgaggtgcaaaccaaaatacttctgtaacttttttgatatatactgtcattctaagtacatatactccttgtgacttgggaagtattgtcttgaggcaagtatttaccacccacactaaaataatgctggaaaaaataaaatactaaactgaaggcacagtattattagaaagtgtaacattttcattttctcttttactctacattttaaagatacgagggttattgtcttgaaataattacctatattaattatcatagaatgtgtctataaacctttgacgaaaaatgttggttttcctccagaataatgtgaagtccatactcagaaattaactagaaaggtntgncnttcttataatnttccctgnttggtgcggcccggaggggggataaaccaccacagcggggggggccaaaag

SEQ ID NO: 236360 - DNA, 8180 bp, Homo sapiens
  misc_feature (8105)..(8105): n is a, c, g, or t
  misc_feature (8108)..(8108): n is a, c, g, or t
  misc_feature (8110)..(8110): n is a, c, g, or t
  misc_feature (8121)..(8121): n is a, c, g, or t
  misc_feature (8129)..(8129): n is a, c, g, or t
tacaaggtggggatgtaagaaaggggtgctttatttttgagactttttctttagatgagattaaagaagaatctgactatatcagcaccaagaaaacaattactgaagaagtaatacagggtgatgtaaaaagctacagaatgctctttgaaacccagccactctatgcaattcaagaccgagaagggtcctatcatgaagtgaccacagttaaaaaagaagaggtaattcatggagatgtgcgaggaacaaggtggcttttgaaacaaagccattagactctattaataaatcagaaactgtgtatgttattaaatctgtcacacaagaagacattcagaagggagatgttagttctgtcagatacagatttgaaactcagccactggatcagatttctgaagaatcacataatattatgcccagtattgaccatatacaaggtggcaatgtaaagacaagtagacaattctttgagtctgaaaatttgataagaataactatatacgaacagtaagtgtcaatgaaatacaaaagggcaatgttaaaacatctacttggctatttgaaacccacactatggatgaactgagaggagaagggttagaatatgaaaatatcaagacagtcactcaggaagatgtgcagaaaggtgatgttaagcaggctgtgtggcttttgaaaatcgaactttcgattctattatggaagcacataaaggtatcacaaaaatgaccaaggaagaaatccctccttctgatgtcaaaacaaccacatggctctttgaaacaacaccacttcatgaatttaatgaaactagagtagaaaagatagaaattattggcaagagcattaaagaaaccttagaagatctctactctcaaaaagttatccaggctcctggaatcatcattgaagctgatgaaataggggatgttcgaatggcaaaatacaagctaatgaaccaagcatctcctgagatacagaaagaagaaattatcagggctgatctcagaaatataatggtgaacctactttccaaaagggactgtactgaaagagagatttgattagtgaagaagagaagggaaatgttaatttgactaaaactcaattattaaacagatcaactgaatttcatgctgaaaaagaagagatagtgaaaggtgatgtacaacaagcaataaaaaacctgttctctgaggaaagatctgtaaagaaaggcatcttaattcaggaagatgaaaaaggagatattaacatgactatctattgtcttcttcatgaaaatgatggtgacacaattgagcgtgaagaagtaataggtggtgatgtcaaacgtaccattcataatttattgtcttccacatcaaacaataaaatatctgaaagggctaaaattgatgcctctgagagaggaaatgttcagtttttcacaacctgcatagaagctggagctttggattatctgaaacaactccacacagagtcaaatgaaacactgacagctaagaaacaagaaggagagaaagaaatcattggtggtgatgttgaaggtacaaaactgttactgaagaaaaggcagtctctggttgaacgtactgttagtgaaactgacatcatccctggagatgtgcataacacagttaaggtttttatgaccgagcctcagagtacatttggtaagatacccaaagaagagattataaaaggtgatttgacatcaaccctaaattccctcagccaggctgtaaatcagaaaacagtgacgaaaacagaagaaattataaaaggtaacatgctagccacactcaagtcacttaaagaatcaagccatcgatggaaagaatctaaacagcctgatgccatccctggtgatattgaaaaagctattgaatgccttgaaaaagctacaaatacaaagacagaaattctgaaaaaggagcttctcaaagatgacctggaaacatcactaaggtctttgaaagaagcacaaagaagtttcaaagaggtacataaagaaggtgtaataaaaaaagatgctaaagctgtgatggcaggatcctcgggagagcagaaaacagatattcatcaggttgctgtccagaggaacaaaaatagtcttcttcagccaaagccaggtccatttgagccagcggccaagtggcaagggggagcagatactctcagtcaaactatggggaaatcttgccatggcaatttagtagaagaaagaactgaggttaatcttccaaaagcccccaaaggcactgtaaagattgtcatagatcgtgaacaaaacaatgatgctctggagaaaagccttagaagactatctaattcacaccataaatctaatgttttggaatcaggagacaaaacgggtgtctggactgatactacaggagaacagcatcttagagatgaatatatgagcagacaattaacttcaactgtgtcagttaagaataatctaacaactaaagaatcagacagggcagtgagagagctgaagaaggatgatgtctttaattccatccaatctgctggtaaaaccgttggaaagcaacagacatatgaactgagaaatgaccaccagaaaatggagggttttcatataaagagtcctaaaaagaccaaaaatattaaaatattaactgatacacaaagctccaagcccagtcccacccagcatccagtcagcatgccagttggaggaacttacgacctttcaggggactttcagaagcaaactttgttaaagcaagaaacaaaatattctaataaggatataaagaaaaagaatataaaccttcaaccaatgtggcagcttttgcctgtagagcaagacacatccaatgtaacagaaatgaaagtctctgaaaaaagtcacaatacatttaaggcaaccaacaaaaagcgggagactgatgttcacttgaaaagccaggactttctaatgaaaacaaatacttccacaggcttaaaaatggcaatggaaaggtccttgaatccaatcaactttaaccctgagaataatgtaaaagaaagtgagtgcccccttccacctccatctccacctcctccaccaccttctaatgcatcatctgaaattgaatttcctcttcctcctccacctcctttgatgatgtttcctgaaaaaaatggtgggttcctctcccttcacctgtccacagagaagataaaggctgactcttgaaagttttccaggcctccctcttcctccacctccagtagatgagaaatctgaaagagaaagttcatcgatgtttctgccgcctcctcctcctccaactccatctcaaaagccagcacatctcctttcctcctctgctccggaaaagcacagtggagacttcatgcaacaatattcccaaaaagaagcctcgaactctcagaattctcaggctaaaatcataacaggaaaaaccggtgtgttgccacctcccacattgcccaaacccaaacttcccaagcatataaaagataataagaacgatttttcccccaaagttgaactggcaacctccctgtcagatatggaatgtaaaattactacctcaaaggatcagaaaaaagtaatggtgatgaccagcagtgaacacacggagacaaagcagaacgttattagtaagagtcttgatgaaagaaaacaattatctattgactctgcaaactgtctctcacacacagttccaggaacttcagcacccaggaaaaaacagattgcgcctcttataaaatctcattcatttccagagagttcaggacaacaaaatccaaaaccttatatgagaaaatttaagacacctttaatgattgctgaagaaaaatatagacaacaaaaagaagaaatgaaaaacagaaacaggagagttcttactacaacatgttaaaactcaaagccaaaatcaacacataacagaggtggaaaaggaaatgccattacaaaaaaccaatgaggaggtttccctatctggaattgattcagaatgcactgtggttcaacccagcccaggctctcaaagtaatgctcggatactaggagtgtgttctgataaccaactctccacaacatcgccagaaacagtcgctgccaagaggctccaccatgttttagcagcttcagaagacaaagataagatgaaaaaggaagttttacaaagctcaagggacattatgcaatccaaatcagcttgcgaaattaaacaaagtcaccaagaatgtagtacccaacaaacacaacagaagaagtatttggagcagttgcacttgccccaaagcaaaccaatttccccaaatttcaaagttaaaaccatcaaacttccaactctagatcatacattaaatgaaacagaccacagctatgaaagtcataaacagcaatctgagattgatgttcaaacctttaccaaaaaacaatatctgaaaaccaagaaaactgaagcaagcactgaatgtagtcataagcaatctctggctgaaagacattatcagttacctaagaaggagaaaagagtgacagtacaattgcctacagaatccatacagaagaaccaggaagataagctcaagatggttcccaggaagcaaagagaatttagcggatctgacagagggaaacttccaggaagtgaagaaaaaaatcagggaccatcaatgattggtcgaaaagaagagagattaataactgaaagaaaacacgaacatctgaagaataaatcagcaccaaaggtcgtcaagcaaaaggttatcgatgcacatcttgattcacagactcagaattttcagcaaacacaaatacagaccgctgaaagtaaagctgaacataaaaaattgccccagccatataatagtctgcaggaagaaaaatgtctcgaagtcaagggcatacaagagaaacaagtcttctctaatactaaagattcaaagcaagagattacacagaacaaatctttcttttcctctgtgaaagaatcccagcgggatgatggaaaaggtgccttaaatatagtggaattcttgagaaaacgtgaagaactgcaacagattttgtcgagagtgaaacagtttgaagcagagccaaataaaagtggccttaaaacatttcagacactattaaatactatcccaggatggctgataagtgaagataagagagaatatgcagttcacattgccatggagaataatttagaaaaagtaaaagaagaaataacacatattaaaactcaagcggaagatatgcttgtgtcctatgaaaatataattcagacagccatgatgtcctccaaaacaggaaaaccgggaaataaacccactagtcttgatgaaacatcatccaaagtatctaatgttcatgtcagcaataataaaaatagtgaacagaaagaaaataaaattgccaaagagaaaacagtacagcaccaagtagcagctcatcatgaagcaactgttcgtagtcacgtgaaaacccatcaggaaattaaacttgatgatagcaacattcctcctccctctttaaaaacacgcccaccgtcaccaacttttatcacaatagaatctactgcccgacgaacagaaaaccctactaagaacgagctttctcagtcccctaaaaaggacagttatgttgaacccccaccaagaaggcccatgtcgcaaaaatctgaaattcacagagcaaacacttccccttctccacccaggagtcgctctgaacaacttgtcagactcaaagacaccactgcaaagttatccaaaggggccatcccatgtccagcagcaaccccggttccaattgtagagaagaggtctgaaatcatcatgtctcctgcaacacttcgtcgtcaaattaagatagaaactcgtggtagggactctccacctacaatcacaataccagtaaatataaatcatgctgctagtggttccttcagagaatctgtggacgctcaagaggaaatcaggaaagtggagaagagagctacttatgttcataaagatggatttattcctaatgaagaaccaaatatgtgtaaaaatattgcagaaaacacccttgtacctggagatcgtaatgaacatttagatgctggtaacagtgaagggcaaaggaatgatttgagaaaattaggggaaaggggaaaattaaaagtcatttggcctccttccaaggagatccctaagaaaaccttaccctttgaggaagagctcaaaatgagtaaacctaagtggccacctgaaatgacaaccctgctatcccctgaatttaaaagtgaatctctgctagaagatgttagaactccagaaaataaaggacaaagacaagatcactttccatttttgcagccttatctacagtccacccatgtttgtcagaaagaggatgttataggaatcaaagaaatgaaaatgcctgaaggaagaaaagatgaaaagaaggaaggaaggaagaatgtgcaagataggccgagtgaagctgaagacacaaagagtaacaggaaaagtgctatggatcttaatgacaacaataatgtgattgtgcagagtgctgaaaaggagaaaaatgaaaaaactaaccaaactaatggtgcagaagttttacaggttactaacactgatgatgagatgatgccagaaaatcataaagaaaatttgaataagaataataataacaattatgtagcagtctcatatctgaataattgcaggcagaagacatctattttagaatttcttgatctattacccttgtcgagtgaagcaaatgacactgcaaatgaatatgaaattgagaagttagaaaatacatctagaatctcagagttacttggtatatttgaatctgaaaagacttattcgaggaatgtactagcaatggctctgaagaaacagactgacagagcagctgctggcagtcctgtgcagcctgctccaaaaccaagcctcagcagaggccttatggtaaaggggggaagttcaatcatctctcctgatacaaatctcttaaacattaaaggaagccattcaaagagcaaaaatttacactttttcttttctaacaccgtgaaaatcactgcattttccaagaaaaatgagaacattttcaattgtgatttaatagattctgtagatcaaattaaaaatatgccatgcttggatttaagggaattggaaaggatgttaaaccttggcatgttgaaacaacagaagctgcccgcaataatgaaaacacaggttttgatgctctgagccatgaatgtacagctaagcctttgtttcccagagtggaggtgcagtcagaacaactcacggtggaagagcagattaaaagaaacaggtgctacagtgacactgagtaaaatatctatggccactgacagtccacacttaggcactgagagatattgatgttctgaaataagattttatgaatttggatacccttttgaggaacttgatgtaaacatggtgttcagaaatctcgtgtctatctcaatgggatatttcttgtattacaccttgtcatttttttcacaatttatttacatctacttttgtttgaactggaatgaagagatgaaacactatggatatgttttccattcaaatggcactttagcatattgttctgttttcctgtaaaacatcatgggtgtgatttttatactgctgctgcttgtcacaattattataacttctctgtaatttcctctgaaataaaattgaatcacctgaggtgcaaaccaaaatacttctgtaacttttttgatatatactgtcattctaagtacatatactccttgtgacttgggaagtattgtcttgaggcaagtatttaccacccacactaaaataatgctggaaaaaataaaatactaaactgaaggcacagtattattagaaagtgtaacattttcattttctcttttactctacattttaaagatacgagggttattgtcttgaaataattacctatattaattatcatagaatgtgtctataaacctttgacgaaaaatgttggttttcctccagaataatgtgaagtccatactcagaaattaactagaaaggtntgncnttcttataatnttccctgnttggtgcggcccggaggggggataaaccaccacagcggggggggccaaaag

SEQ ID NO: 236361 - DNA, 7336 bp, Homo sapiens
tacaaggtggggatgtaagaaaggggtgctttatttttgagactttttctttagatgagattaaagaagaatctgactatatcagcaccaagaaaacaattactgaagaagtaatacagggtgatgtaaaaagctacagaatgctctttgaaacccagccactctatgcaattcaagaccgagaagggtcctatcatgaagtgaccacagttaaaaaagaagaggtaattcatggagatgtgcgaggaacaaggtggcttttgaaacaaagccattagactctattaataaatcagaaactgtgtatgttattaaatctgtcacacaagaagacattcagaagggagatgttagttctgtcagatacagatttgaaactcagccactggatcagatttctgaagaatcacataatattatgcccagtattgaccatatacaaggtggcaatgtaaagacaagtagacaattctttgagtctgaaaatttgataagaataactatatacgaacagtaagtgtcaatgaaatacaaaagggcaatgttaaaacatctacttggctatttgaaacccacactatggatgaactgagaggagaagggttagaatatgaaaatatcaagacagtcactcaggaagatgtgcagaaaggtgatgttaagcaggctgtgtggcttttgaaaatcgaactttcgattctattatggaagcacataaaggtatcacaaaaatgaccaaggaagaaatccctccttctgatgtcaaaacaaccacatggctctttgaaacaacaccacttcatgaatttaatgaaactagagtagaaaagatagaaattattggcaagagcattaaagaaaccttagaagatctctactctcaaaaagttatccaggctcctggaatcatcattgaagctgatgaaataggggatgttcgaatggcaaaatacaagctaatgaaccaagcatctcctgagatacagaaagaagaaattatcagggctgatctcagaaatataatggtgaacctactttccaaaagggactgtactgaaagagagatttgattagtgaagaagagaagggaaatgttaatttgactaaaactcaattattaaacagatcaactgaatttcatgctgaaaaagaagagatagtgaaaggtgatgtacaacaagcaataaaaaacctgttctctgaggaaagatctgtaaagaaaggcatcttaattcaggaagatgaaaaaggagatattaacatgactatctattgtcttcttcatgaaaatgatggtgacacaattgagcgtgaagaagtaataggtggtgatgtcaaacgtaccattcataatttattgtcttccacatcaaacaataaaatatctgaaagggctaaaattgatgcctctgagagaggaaatgttcagtttttcacaacctgcatagaagctggagctttggattatctgaaacaactccacacagagtcaaatgaaacactgacagctaagaaacaagaaggagagaaagaaatcattggtggtgatgttgaaggtacaaaactgttactgaagaaaaggcagtctctggttgaacgtactgttagtgaaactgacatcatccctggagatgtgcataacacagttaaggtttttatgaccgagcctcagagtacatttggtaagatacccaaagaagagattataaaaggtgatttgacatcaaccctaaattccctcagccaggctgtaaatcagaaaacagtgacgaaaacagaagaaattataaaaggtaacatgctagccacactcaagtcacttaaagaatcaagccatcgatggaaagaatctaaacagcctgatgccatccctggtgatattgaaaaagctattgaatgccttgaaaaagctacaaatacaaagacagaaattctgaaaaaggagcttctcaaagatgacctggaaacatcactaaggtctttgaaagaagcacaaagaagtttcaaagaggtacataaagaaggtgtaataaaaaaagatgctaaagctgtgatggcaggatcctcgggagagcagaaaacagatattcatcaggttgctgtccagaggaacaaaaatagtcttcttcagccaaagccaggtccatttgagccagcggccaagtggcaagggggagcagatactctcagtcaaactatggggaaatcttgccatggcaatttagtagaagaaagaactgaggttaatcttccaaaagcccccaaaggcactgtaaagattgtcatagatcgtgaacaaaacaatgatgctctggagaaaagccttagaagactatctaattcacaccataaatctaatgttttggaatcaggagacaaaacgggtgtctggactgatactacaggagaacagcatcttagagatgaatatatgagcagacaattaacttcaactgtgtcagttaagaataatctaacaactaaagaatcagacagggcagtgagagagctgaagaaggatgatgtctttaattccatccaatctgctggtaaaaccgttggaaagcaacagacatatgaactgagaaatgaccaccagaaaatggagggttttcatataaagagtcctaaaaagaccaaaaatattaaaatattaactgatacacaaagctccaagcccagtcccacccagcatccagtcagcatgccagttggaggaacttacgacctttcaggggactttcagaagcaaactttgttaaagcaagaaacaaaatattctaataaggatataaagaaaaagaatataaaccttcaaccaatgtggcagcttttgcctgtagagcaagacacatccaatgtaacagaaatgaaagtctctgaaaaaagtcacaatacatttaaggcaaccaacaaaaagcgggagactgatgttcacttgaaaagccaggactttctaatgaaaacaaatacttccacaggcttaaaaatggcaatggaaaggtccttgaatccaatcaactttaaccctgagaataatgtaaaagaaagtgagtgcccccttccacctccatctccacctcctccaccaccttctaatgcatcatctgaaattgaatttcctcttcctcctccacctcctttgatgatgtttcctgaaaaaaatggtgggttcctctcccttcacctgtccacagagaagataaaggctgactcttgaaagttttccaggcctccctcttcctccacctccagtagatgagaaatctgaaagagaaagttcatcgatgtttctgccgcctcctcctcctccaactccatctcaaaagccagcacatctcctttcctcctctgctccggaaaagcacagtggagacttcatgcaacaatattcccaaaaagaagcctcgaactctcagaattctcaggctaaaatcataacaggaaaaaccggtgtgttgccacctcccacattgcccaaacccaaacttcccaagcatataaaagataataagaacgatttttcccccaaagttgaactggcaacctccctgtcagatatggaatgtaaaattactacctcaaaggatcagaaaaaagtaatggtgatgaccagcagtgaacacacggagacaaagcagaacgttattagtaagagtcttgatgaaagaaaacaattatctattgactctgcaaactgtctctcacacacagttccaggaacttcagcacccaggaaaaaacagattgcgcctcttataaaatctcattcatttccagagagttcaggacaacaaaatccaaaaccttatatgagaaaatttaagacacctttaatgattgctgaagaaaaatatagacaacaaaaagaagaaatgaaaaacagaaacaggagagttcttactacaacatgttaaaactcaaagccaaaatcaacacataacagaggtggaaaaggaaatgccattacaaaaaaccaatgaggaggtttccctatctggaattgattcagaatgcactgtggttcaacccagcccaggctctcaaagtaatgctcggatactaggagtgtgttctgataaccaactctccacaacatcgccagaaacagtcgctgccaagaggctccaccatgttttagcagcttcagaagacaaagataagatgaaaaaggaagttttacaaagctcaagggacattatgcaatccaaatcagcttgcgaaattaaacaaagtcaccaagaatgtagtacccaacaaacacaacagaagaagtatttggagcagttgcacttgccccaaagcaaaccaatttccccaaatttcaaagttaaaaccatcaaacttccaactctagatcatacattaaatgaaacagaccacagctatgaaagtcataaacagcaatctgagattgatgttcaaacctttaccaaaaaacaatatctgaaaaccaagaaaactgaagcaagcactgaatgtagtcataagcaatctctggctgaaagacattatcagttacctaagaaggagaaaagagtgacagtacaattgcctacagaatccatacagaagaaccaggaagataagctcaagatggttcccaggaagcaaagagaatttagcggatctgacagagggaaacttccaggaagtgaagaaaaaaatcagggaccatcaatgattggtcgaaaagaagagagattaataactgaaagaaaacacgaacatctgaagaataaatcagcaccaaaggtcgtcaagcaaaaggttatcgatgcacatcttgattcacagactcagaattttcagcaaacacaaatacagaccgctgaaagtaaagctgaacataaaaaattgccccagccatataatagtctgcaggaagaaaaatgtctcgaagtcaagggcatacaagagaaacaagtcttctctaatactaaagattcaaagcaagagattacacagaacaaatctttcttttcctctgtgaaagaatcccagcgggatgatggaaaaggtgccttaaatatagtggaattcttgagaaaacgtgaagaactgcaacagattttgtcgagagtgaaacagtttgaagcagagccaaataaaagtggccttaaaacatttcagacactattaaatactatcccaggatggctgataagtgaagataagagagaatatgcagttcacattgccatggagaataatttagaaaaagtaaaagaagaaataacacatattaaaactcaagcggaagatatgcttgtgtcctatgaaaatataattcagacagccatgatgtcctccaaaacaggaaaaccgggaaataaacccactagtcttgatgaaacatcatccaaagtatctaatgttcatgtcagcaataataaaaatagtgaacagaaagaaaataaaattgccaaagagaaaacagtacagcaccaagtagcagctcatcatgaagcaactgttcgtagtcacgtgaaaacccatcaggaaattaaacttgatgatagcaacattcctcctccctctttaaaaacacgcccaccgtcaccaacttttatcacaatagaatctactgcccgacgaacagaaaaccctactaagaacgagctttctcagtcccctaaaaaggacagttatgttgaacccccaccaagaaggcccatgtcgcaaaaatctgaaattcacagagcaaacacttccccttctccacccaggagtcgctctgaacaacttgtcagactcaaagacaccactgcaaagttatccaaaggggccatcccatgtccagcagcaaccccggttccaattgtagagaagaggtctgaaatcatcatgtctcctgcaacacttcgtcgtcaaattaagatagaaactcgtggtagggactctccacctacaatcacaataccagtaaatataaatcatgctgctagtggttccttcagagaatctgtggacgctcaagaggaaatcaggaaagtggagaagagagctacttatgttcataaagatggactaaattccactgatcacatggtgcccgacactgaaagttatgatgcagttgaaatcatccgcaaggttgcagtgcctcctcgcctgtcagagcacacacagagatatgaagcggccaaccgaactgttcaaatggctgaaaatttcgtgaatgaccctgaaaatgaaataaacagatggttcagggaatttgagcatggcccagtttctgaagcaaagtcaaatagaagagtttatgcaaagggagaaacaaaccataacatacaacaagaaagtcgtacatttgtaaggaggaatttggattaacatctttaggaaacacgagttttacagacttttcttgcaaacatcctagagaactgcgagaaaagattcctgttaagcagcccaggatctgctctgaaaccaggtctctaagtgaacatttctcaggcatggatgcatttgagagtcaaattgttgagtcgaagatgaaaacctcttcatcacatagctcagaagctggcaaatctggctgtgacttcaagcatgccccaccaacctatgaggatgtcattgctggacatattttagatatctctgattcacctaaagaagtaagaaaaaattttcaaaagacgtggcaagagagtggaagagtttttaaaggcctgggatatgcaaccgcagatgcttctgcaactgagatgagaaccaccttccaagaggaatctgcatttataagtgaagctgctgctccaagacaaggaaatatgtatactttgtcaaaagacagtttatccaatggagtgcctagtggcagacaagcagaattttcataagtcctgcttccgatgccaccattgcaacagtaaactaagtttgggaaattatgcatcacttcatggacaaatatactgtaaacctcactttaaacaacttttcaaatccaaaggaaattatgatgaaggttttggacataagcagcataaagatagatggaactgcaaaaaccaaagcagatcagtggactttattcctaatgaagaaccaaatatgtgtaaaaatattgcagaaaacacccttgtacctggagatcgtaatgaacatttagatgctggtaacagtgaagggcaaaggaatgatttgagaaaattaggggaaaggggaaaattaaaagtcatttggcctccttccaaggagatccctaagaaaaccatgacacggaccgtgattaccgaaaagaaagggattctcataggcacagagaggccagtcatcgagattcccatgggaagaggcatgaacaggaagataaaccaggggc

SEQ ID NO: 236362 - DNA, 324 bp, Homo sapiens
aacacactgcaacagtaaactaatttgggaaattatgcatcacttcatggacaaatatactgtaaacctcactttaaacaacttttcaaatccaaaggaaattatgatgaaggttttggacataagcagcataaagatagatggaactgcaaaaaccaaagcagatcagtggactttattcctaatgaagaaccaaatatgtgtaaaaatattgcagaaaacacccttggcccttcactgtgaccagaatctaaatgtgcattacgatctccaggtacaagggtgttttctgcaatatttttacacatatttggttcttcatga

SEQ ID NO: 236363 - DNA, 7736 bp, Homo sapiens
  misc_feature (7661)..(7661): n is a, c, g, or t
  misc_feature (7664)..(7664): n is a, c, g, or t
  misc_feature (7666)..(7666): n is a, c, g, or t
  misc_feature (7677)..(7677): n is a, c, g, or t
  misc_feature (7685)..(7685): n is a, c, g, or t
tacaaggtggggatgtaagaaaggggtgctttatttttgagactttttctttagatgagattaaagaagaatctgactatatcagcaccaagaaaacaattactgaagaagtaatacagggtgatgtaaaaagctacagaatgctctttgaaacccagccactctatgcaattcaagaccgagaagggtcctatcatgaagtgaccacagttaaaaaagaagaggtaattcatggagatgtgcgaggaacaaggtggcttttgaaacaaagccattagactctattaataaatcagaaactgtgtatgttattaaatctgtcacacaagaagacattcagaagggagatgttagttctgtcagatacagatttgaaactcagccactggatcagatttctgaagaatcacataatattatgcccagtattgaccatatacaaggtggcaatgtaaagacaagtagacaattctttgagtctgaaaatttgataagaataactatatacgaacagtaagtgtcaatgaaatacaaaagggcaatgttaaaacatctacttggctatttgaaacccacactatggatgaactgagaggagaagggttagaatatgaaaatatcaagacagtcactcaggaagatgtgcagaaaggtgatgttaagcaggctgtgtggcttttgaaaatcgaactttcgattctattatggaagcacataaaggtatcacaaaaatgaccaaggaagaaatccctccttctgatgtcaaaacaaccacatggctctttgaaacaacaccacttcatgaatttaatgaaactagagtagaaaagatagaaattattggcaagagcattaaagaaaccttagaagatctctactctcaaaaagttatccaggctcctggaatcatcattgaagctgatgaaataggggatgttcgaatggcaaaatacaagctaatgaaccaagcatctcctgagatacagaaagaagaaattatcagggctgatctcagaaatataatggtgaacctactttccaaaagggactgtactgaaagagagatttgattagtgaagaagagaagggaaatgttaatttgactaaaactcaattattaaacagatcaactgaatttcatgctgaaaaagaagagatagtgaaaggtgatgtacaacaagcaataaaaaacctgttctctgaggaaagatctgtaaagaaaggcatcttaattcaggaagatgaaaaaggagatattaacatgactatctattgtcttcttcatgaaaatgatggtgacacaattgagcgtgaagaagtaataggtggtgatgtcaaacgtaccattcataatttattgtcttccacatcaaacaataaaatatctgaaagggctaaaattgatgcctctgagagaggaaatgttcagtttttcacaacctgcatagaagctggagctttggattatctgaaacaactccacacagagtcaaatgaaacactgacagctaagaaacaagaaggagagaaagaaatcattggtggtgatgttgaaggtacaaaactgttactgaagaaaaggcagtctctggttgaacgtactgttagtgaaactgacatcatccctggagatgtgcataacacagttaaggtttttatgaccgagcctcagagtacatttggtaagatacccaaagaagagattataaaaggtgatttgacatcaaccctaaattccctcagccaggctgtaaatcagaaaacagtgacgaaaacagaagaaattataaaaggtaacatgctagccacactcaagtcacttaaagaatcaagccatcgatggaaagaatctaaacagcctgatgccatccctggtgatattgaaaaagctattgaatgccttgaaaaagctacaaatacaaagacagaaattctgaaaaaggagcttctcaaagatgacctggaaacatcactaaggtctttgaaagaagcacaaagaagtttcaaagaggtacataaagaaggtgtaataaaaaaagatgctaaagctgtgatggcaggatcctcgggagagcagaaaacagatattcatcaggttgctgtccagaggaacaaaaatagtcttcttcagccaaagccaggtccatttgagccagcggccaagtggcaagggggagcagatactctcagtcaaactatggggaaatcttgccatggcaatttagtagaagaaagaactgaggttaatcttccaaaagcccccaaaggcactgtaaagattgtcatagatcgtgaacaaaacaatgatgctctggagaaaagccttagaagactatctaattcacaccataaatctaatgttttggaatcaggagacaaaacgggtgtctggactgatactacaggagaacagcatcttagagatgaatatatgagcagacaattaacttcaactgtgtcagttaagaataatctaacaactaaagaatcagacagggcagtgagagagctgaagaaggatgatgtctttaattccatccaatctgctggtaaaaccgttggaaagcaacagacatatgaactgagaaatgaccaccagaaaatggagggttttcatataaagagtcctaaaaagaccaaaaatattaaaatattaactgatacacaaagctccaccatgttttagcagcttcagaagacaaagataagatgaaaaaggaagttttacaaagctcaagggacattatgcaatccaaatcagcttgcgaaattaaacaaagtcaccaagaatgtagtacccaacaaacacaacagaagaagtatttggagcagttgcacttgccccaaagcaaaccaatttccccaaatttcaaagttaaaaccatcaaacttccaactctagatcatacattaaatgaaacagaccacagctatgaaagtcataaacagcaatctgagattgatgttcaaacctttaccaaaaaacaatatctgaaaaccaagaaaactgaagcaagcactgaatgtagtcataagcaatctctggctgaaagacattatcagttacctaagaaggagaaaagagtgacagtacaattgcctacagaatccatacagaagaaccaggaagataagctcaagatggttcccaggaagcaaagagaatttagcggatctgacagagggaaacttccaggaagtgaagaaaaaaatcagggaccatcaatgattggtcgaaaagaagagagattaataactgaaagaaaacacgaacatctgaagaataaatcagcaccaaaggtcgtcaagcaaaaggttatcgatgcacatcttgattcacagactcagaattttcagcaaacacaaatacagaccgctgaaagtaaagctgaacataaaaaattgccccagccatataatagtctgcaggaagaaaaatgtctcgaagtcaagggcatacaagagaaacaagtcttctctaatactaaagattcaaagcaagagattacacagaacaaatctttcttttcctctgtgaaagaatcccagcgggatgatggaaaaggtgccttaaatatagtggaattcttgagaaaacgtgaagaactgcaacagattttgtcgagagtgaaacagtttgaagcagagccaaataaaagtggccttaaaacatttcagacactattaaatactatcccaggatggctgataagtgaagataagagagaatatgcagttcacattgccatggagaataatttagaaaaagtaaaagaagaaataacacatattaaaactcaagcggaagatatgcttgtgtcctatgaaaatataattcagacagccatgatgtcctccaaaacaggaaaaccgggaaataaacccactagtcttgatgaaacatcatccaaagtatctaatgttcatgtcagcaataataaaaatagtgaacagaaagaaaataaaattgccaaagagaaaacagtacagcaccaagtagcagctcatcatgaagcaactgttcgtagtcacgtgaaaacccatcaggaaattaaacttgatgatagcaacattcctcctccctctttaaaaacacgcccaccgtcaccaacttttatcacaatagaatctactgcccgacgaacagaaaaccctactaagaacgagctttctcagtcccctaaaaaggacagttatgttgaacccccaccaagaaggcccatgtcgcaaaaatctgaaattcacagagcaaacacttccccttctccacccaggagtcgctctgaacaacttgtcagactcaaagacaccactgcaaagttatccaaaggggccatcccatgtccagcagcaaccccggttccaattgtagagaagaggtctgaaatcatcatgtctcctgcaacacttcgtcgtcaaattaagatagaaactcgtggtagggactctccacctacaatcacaataccagtaaatataaatcatgctgctagtggttccttcagagaatctgtggacgctcaagaggaaatcaggaaagtggagaagagagctacttatgttcataaagatggactaaattccactgatcacatggtgcccgacactgaaagttatgatgcagttgaaatcatccgcaaggttgcagtgcctcctcgcctgtcagagcacacacagagatatgaagcggccaaccgaactgttcaaatggctgaaaatttcgtgaatgaccctgaaaatgaaataaacagatggttcagggaatttgagcatggcccagtttctgaagcaaagtcaaatagaagagtttatgcaaagggagaaacaaaccataacatacaacaagaaagtcgtacatttgtaaggaggaatttggattaacatctttaggaaacacgagttttacagacttttcttgcaaacatcctagagaactgcgagaaaagattcctgttaagcagcccaggatctgctctgaaaccaggtctctaagtgaacatttctcaggcatggatgcatttgagagtcaaattgttgagtcgaagatgaaaacctcttcatcacatagctcagaagctggcaaatctggctgtgacttcaagcatgccccaccaacctatgaggatgtcattgctggacatattttagatatctctgattcacctaaagaagtaagaaaaaattttcaaaagacgtggcaagagagtggaagagtttttaaaggcctgggatatgcaaccgcagatgcttctgcaactgagatgagaaccaccttccaagaggaatctgcatttataagtgaagctgctgctccaagacaaggaaatatgtatactttgtcaaaagacagtttatccaatggagtgcctagtggcagacaagcagaattttcataagtcctgcttccgatgccaccattgcaacagtaaactaagtttgggaaattatgcatcacttcatggacaaatatactgtaaacctcactttaaacaacttttcaaatccaaaggaaattatgatgaaggttttggacataagcagcataaagatagatggaactgcaaaaaccaaagcagatcagtggactttattcctaatgaagaaccaaatatgtgtaaaaatattgcagaaaacacccttgtacctggagatcgtaatgaacatttagatgctggtaacagtgaagggcaaaggaatgatttgagaaaattaggggaaaggggaaaattaaaagtcatttggcctccttccaaggagatccctaagaaaaccttaccctttgaggaagagctcaaaatgagtaaacctaagtggccacctgaaatgacaaccctgctatcccctgaatttaaaagtgaatctctgctagaagatgttagaactccagaaaataaaggacaaagacaagatcactttccatttttgcagccttatctacagtccacccatgtttgtcagaaagaggatgttataggaatcaaagaaatgaaaatgcctgaaggaagaaaagatgaaaagaaggaaggaaggaagaatgtgcaagataggccgagtgaagctgaagacacaaagagtaacaggaaaagtgctatggatcttaatgacaacaataatgtgattgtgcagagtgctgaaaaggagaaaaatgaaaaaactaaccaaactaatggtgcagaagttttacaggttactaacactgatgatgagatgatgccagaaaatcataaagaaaatttgaataagaataataataacaattatgtagcagtctcatatctgaataattgcaggcagaagacatctattttagaatttcttgatctattacccttgtcgagtgaagcaaatgacactgcaaatgaatatgaaattgagaagttagaaaatacatctagaatctcagagttacttggtatatttgaatctgaaaagacttattcgaggaatgtactagcaatggctctgaagaaacagactgacagagcagctgctggcagtcctgtgcagcctgctccaaaaccaagcctcagcagaggccttatggtaaaggggggaagttcaatcatctctcctgatacaaatctcttaaacattaaaggaagccattcaaagagcaaaaatttacactttttcttttctaacaccgtgaaaatcactgcattttccaagaaaaatgagaacattttcaattgtgatttaatagattctgtagatcaaattaaaaatatgccatgcttggatttaagggaattggaaaggatgttaaaccttggcatgttgaaacaacagaagctgcccgcaataatgaaaacacaggttttgatgctctgagccatgaatgtacagctaagcctttgtttcccagagtggaggtgcagtcagaacaactcacggtggaagagcagattaaaagaaacaggtgctacagtgacactgagtaaaatatctatggccactgacagtccacacttaggcactgagagatattgatgttctgaaataagattttatgaatttggatacccttttgaggaacttgatgtaaacatggtgttcagaaatctcgtgtctatctcaatgggatatttcttgtattacaccttgtcatttttttcacaatttatttacatctacttttgtttgaactggaatgaagagatgaaacactatggatatgttttccattcaaatggcactttagcatattgttctgttttcctgtaaaacatcatgggtgtgatttttatactgctgctgcttgtcacaattattataacttctctgtaatttcctctgaaataaaattgaatcacctgaggtgcaaaccaaaatacttctgtaacttttttgatatatactgtcattctaagtacatatactccttgtgacttgggaagtattgtcttgaggcaagtatttaccacccacactaaaataatgctggaaaaaataaaatactaaactgaaggcacagtattattagaaagtgtaacattttcattttctcttttactctacattttaaagatacgagggttattgtcttgaaataattacctatattaattatcatagaatgtgtctataaacctttgacgaaaaatgttggttttcctccagaataatgtgaagtccatactcagaaattaactagaaaggtntgncnttcttataatnttccctgnttggtgcggcccggaggggggataaaccaccacagcggggggggccaaaag

SEQ ID NO: 236364 - DNA, 382 bp, Homo sapiens
atttctcttttaggagaaaaaaagaacacttctagttggatcaaagattttattatctagctgattttttttttttaaatcaacttacatcctgtttgtttctgaatgactgggtcatttccaacctggctgatagtgaaaggaaattgtttctgtcctatgggtcctgagaggctaatataaaatgagccagtggtgtgtctcccatgtataatgggaatacaggagtcctttatagccaacttcattggctgtgtcgtctcagtgaagggtttctctgacagggagtgctacattttgtccttaaaaaatattatattttagtagattatagtgtatgcgaagagttataatttgtactcttaccctgtgtcttaaaaag

SEQ ID NO: 236365 - DNA, 544 bp, Homo sapiens
aagcagaatcccatccacctccacctaatcatacagagaaaggagacaggagctgagggagggcagtgctatgtccaagctctcagcaagcagtaggcagagcccaggcccctgctttcccatgcccaccccttcccagttcagggcaaggccacctctccagggcctttccctcccctagagaggaaactccccaagttcctctgaccagacaggagagtgaacgagagaagaaaattccacttcagcacacacacctggagcctgaggctgaaagctggaatcccagactttgacactcaagaaggcatctccacactttttcagcacctccacctgggacattcatgagcacctggcttccctcccaggggagaggggtgtcccagagacactggggcccttagaaggcactatgagttggcagtgactgcagcagcgtggtgggattgtgggtggtgtaggaagcaggggaagcagatcacagcactcaggatggccagagctgaaggcatcagagtcccctgtccttgttctgcaaaaa

SEQ ID NO: 236366 - DNA, 399 bp, Homo sapiens
tttctgttcctcagcatatgttttaaggacctatgtgcttacctgtgcttgggatgagagttcgtggtaattttttttttttaattcttgtcttggccgagcgcagtggctcacacctgtaataccagcactttgggaggccatggcaggtggatcatctgaggtcaggagtttgagacaagcctgaccaacatgtgaaaccctgtctctatttaaaaatacgaaaattagccaggtgtggtgttgtgtgcctgtaatcccagctacttgggaggctgaggcagaagaatcacttgaacctgggaggcagaggttgcagtgagctgagatcgcgccactgcactccagcctgggtgacagagcgagactctgtctcaaaaataaaaatatacataaaaa

SEQ ID NO: 236367 - DNA, 634 bp, Homo sapiens
ctgaaagaaatgaagatttaacttagctagtctgcacgaacatcagtgcctccaccacatcaggaaatatgttctcaaaaggtcatgtgcacacacatccactgcaaagaagaaaaacagttgttctgggtttcttgacaaatcagaacaaccagtctataataacagcaactgctggcgggcatctgtagctcaacaaaccggactttgtgcacctggcctcccacagaagttccacaaggggacctcgaaatggtgtcagcggaaggactgggcagccacggcagggggaacccaggccccaggctcctcttctatctcccagggccgaggctaaggcaaagcctcattctctctgggttttggtatctttgtgataaactgagaggattggtctgattttggtccgattctacaaaacatttaaaaaaaagatatacatcatgaataataccatgtgggagatagtatttcccttttttacttttttagaaataattaaggtggctcattaaatattaatatatcatgaagcacccccagttgaaacatgaagcttaaataagtattaaaaataactatctattaggctgggcacagtggctcatgcctgtaatcccagccctttgggagg

SEQ ID NO: 236368 - DNA, 408 bp, Homo sapiens
actgctgttaaagttgcaggtgttatgtcttggatccaccaccatcggctaacaccatcagctcgggacaggtaaaccagccagcaagacccagatatccaacccggctaatcctgagatgagaccaagctgctgctgaggacaacagccctgctctggttactctggaggctgaccagtctatgtacggctgaagcttgaagaaacaataagccctgcattagtcatacaccagaagctgagtagtctaagcatggctgaagcttgaggacttgtcaagcaaataatgtagttagaaatcttaggactagtggttttcctgtatactaactgttttactattgttctgtcactgtgctcaatctttttctcaggtaaggacctcttttgtccttgctggatataaat

SEQ ID NO: 236369 - DNA, 1449 bp, Homo sapiens
  misc_feature (778)..(778): n is a, c, g, or t
  misc_feature (794)..(794): n is a, c, g, or t
  misc_feature (798)..(799): n is a, c, g, or t
  misc_feature (806)..(807): n is a, c, g, or t
  misc_feature (810)..(810): n is a, c, g, or t
  misc_feature (834)..(834): n is a, c, g, or t
  misc_feature (847)..(848): n is a, c, g, or t
  misc_feature (1365)..(1365): n is a, c, g, or t
atagactaaaagcaaagacatggaaacagatatttaatgtaaatggaaaacaaaagagagcaggagtggcaatatttataacagacaaaatagatcttaagtaaaaaaactgtaaaaatggataaaaattgtcattatatagtgataaaggggtcaagtaatcaaaaggatatgacaactttatttcagacatttagagagaaggatgtaacaactgtaaatatatacacccccaacactggagctcctaaatatatgaagcaaatattaacagatctgaagagaaagacagattgcaatatgataatagcaggagaatttcaaaccctattttcaataatgaacagatcatccagacaaaaaatcaataaggaaacattggacttgaactacacattagaccatgggtgtccaatcttttggcttccttgggcaacattggaagaagaagaattgtcttgagccacatataaaatacactaacaatagctgataagctaaaagaaaaaaaaatctcataatgttttgagaaagtttacgaatttgtgttgggtcacattcaaagccatcctgggccgcatgtagcccatgggccatgggttggacaagcttgttttagaccaaatggacctgaatgacatatataggacaatatatccaaccccactaaaatacacattcctctcaagtatacacacagaacatattccagaatagatatgttaggccacaaaacaagtctttaaaaatgtagtccaggggcagtggctcatgcctntaattccagcactctnggannctgaggnnggntcctgacctcaagtgatctgcccncgtcggcctcccnnagtgctgggattacaggcgtgagccactgcacccagtcaaatattgctatatttctagcaaacagaatttagaagcataccaaaggatcattcaccattatctaagtgggatttatctctgggatgcaaaaatggttcaatatatgcaaatcaataactgttatatgaaagacaataattatatgatcatctcaatagatgaagaaaaaacataacaaaattcaataccttttcatgataaaaacgtttaacaaattaagtataaaaggaatgtacctcactacaataaaagccatcatactcaatgatgaaaagttgaaagcttttcctctatgaaaagaaacaagacaaggatatccacactttccacctctattcaaaacagtattagaagttctagccagagtaattagccaagaaaaagaaataaaaggcacgcaaaacagaaagaaaggagccagccacagtggctcctactgtaatcccagctactcaggaggctgaggcatgagagtcncttgaacctgggaggtgaaggttgcagtgagccaagatcatgccactgcattccagcctggatgacagagggagactctgtctc

SEQ ID NO: 236370 - DNA, 903 bp, Homo sapiens
acggacgtggacgagatgacaggcaagttcagaacaagcacgcccattttattttttccttttctccaagaaggtagcaggcagccaccatgtgaggaacatcagctttggtgcagcccagatacatcccccacaaaatctgggggtgctggtgaaagccccctgacagtgtcgtcaatagccttttccatgaagaagcatggaaggctgtacccaaaggcactgggataagaggaagctgccttccttctgagaagtgggtctcttccctaggaagatccccaggaggaggatgggaagtgagtgatgaagagctgggaaaaccagcatccatctgtacaaaggagaccccaggaaacaggttgaccaactctccaaagatgtctcattctcttaaagctcatttccattttaaatgagtgtttggataagagcaccaaacctggtgttagtgagcactgactcaccaaagaaggaaaaccccacaggaaaagcctggtggctttactacctggaggaaaagactcaggaggatgccagaagccaaatgctgaaggaaccactgcagtgagggaaagggttggggaaaaatcccctccctccaagaatgcagggaccagttggctgtgccaccccacacctggggagatggctctgtgctgctgcctttcaagttgggccaacctcagaaatccttggggatgccagaaggctggaccacaatgctgcctggagtgtgagtgtcctgagcttcttttagcagacatggggactctgtgcctgaccagcaaccgggatagaagaaggcctagagtgcacattgccatgaggggctcaaatgaagatggctcttcaggcgggtcagtggcaccagccagacagcctcatggtccattcctctgg

SEQ ID NO: 236371 - DNA, 486 bp, Homo sapiens
gtccacggtccctctacgtccaggcccgggctccctccttcctcttcccctcacgttgccctgtgcttcttcctactttcccccgtccaggtcggctgggccccacccagccccaggggtgcctcccctcccccctttcgggtttctgccctggagggtgtggttttctctcccacctcggtgcctgccagtagactggagcttccccgccacgctgtcggtcccatctcatcacctttccgctttcacgcccgtagctagtcttgggactggccctgttatagccccaacttatgcgctctctaacctttcctggcttacccggagtcacagttcagttctacttcttttcaattctgtagggcattggtctcaattgggactcagttttcctccacacccgccgttcctgtagtctggttatatcacagttcattatttaatgtaggtttttgagcgctttgtaaacggcaaagctctctctgt

SEQ ID NO: 236372 - DNA, 481 bp, Homo sapiens
attatagtacagaagagccatgatcgcccttttgcttatagcaagatatttaacctcactttgtttcctcatctgcaaaatggagattctaatccctgcctcttcttacagggatgttgtggggatcaagtgagataatgtgtaagaaggtgctttgtaacttgttgagtgctttacaaatataaggtatgctattgttaaattccggattttacaatacagtgtgattataatgccatcattgggatccatgctgtgaaagcatgttaaaaggaggcccgttgggtatatgtagtaaccgcttattacgagtaaaaacagacttgtgttatatgaaataaccatgttgtaaagagttctgttgtggtggggcatccgtggatcgttaaagactgagggcttcaaaatagttgtttgaagtggtaatagaatgtcaaattgatgccttaacccacccattttagaggatacataggccaga

SEQ ID NO: 236373 - DNA, 464 bp, Homo sapiens
gaagaacaagaggattagagtgagttctttgatgacagagatttttcattgtttgtacagatagtttttcggttcactgatgctgcaactcatcagatttcatctaaaactattttccttctctttctgtttattatgatttctcctcacaactctgttataatactggattgtttctaagagctttgcttggaaaacacaaattcgattttaacttctttaaagactttttatatttacctatcctaatatatatagaaattacagacattataaaggaaatatattcctttccacagaaaacctgtgcatagatttttgggggtttttttgttgttgtttgcttgtttgttgtttttttgtttcatttttaggaatttccaagtggagaataagacattttatactgattaatcattttgaaataaaataaaatttctctatcataatattcacatatgaga

SEQ ID NO: 236374 - DNA, 374 bp, Homo sapiens
gtgactctgtctcaaaagaaaaagtgtagggtactgaagaaattgaaacattaagaataccatatgagtaaattaaacactttggctcttttcggaaaaaaacagatgagctcttatattttaaagtttggttttgacagaaaaaaattcctagattttttggttaataaaaactttattagatagattaaattgtgatgtatggagataaagttctgaaagaagaatagaaagctttttaaaaatagtattctcagcctaggcaacatggtgaaaccctgtctatgctgaggttgaggtgggaggatcacttgagcccatgaggcagaggttgcagtgagccgagattgtgcctctgtactccagcctgggtg

SEQ ID NO: 236375 - DNA, 476 bp, Homo sapiens
tgagatggagtctctctctgttgccaggctacagtgcagtagtgtgatcttggctcactgcaacctctgcctcctgggttcaagcgattctcctgcctcagcctctggagtagctgggattacagatgcgtgccaccatgactggttatttaaaacatttttttgtatttttagtagagacggggtttcaccacattggtcaggctggtctcgaactcctgacctcgtgacctgcccacctcggcctcccgaagtgctgggattacaggtgtgagccacagcacctggactatttctcgtaaatgtcaaggaacaattttatagtgttaatacatttactttaagcatctactctatttagctgagactatgctttttctgctacggtgacaaaagtccatccaaattgctatgcttaatacattctttattaccaaagtcccaataaaagtagtaattcaaaaaaactaaaactc

SEQ ID NO: 236376 - DNA, 201 bp, Homo sapiens
agagacggggtttcaccatgttcaccatgctggtctcgaattcccgaccttgtgatctgcccgacttggcctcccaaagtgctgggattacaggcgtgagccacctctcccggccctaaaatttgttttaatgaagacaaaataaaattgtttcagacaaataaaactcactctttcgccagcaaactctccctataggaa

SEQ ID NO: 236377 - DNA, 1391 bp, Homo sapiens
  misc_feature (1192)..(1192): n is a, c, g, or t
aacattatagaagattagaggatgtttagactcttagatggctgagcatagatcactcataccttagataatgcaaagaatatcttgcttactaatcacctgttaatttttattgatagtatgatcgaagccttttcacatcctgggcataccactcctcaatcaatgcaagtagatacgagttcagaaatttctagtgcacagatttctacatataaagaaaaatcttcctcagttccacttctgatatcaaatggagtcaatgttgcttcacaaccacctgctccaacacctcagaagacccagagaaatgaattcacggctcagttaccagattgttcggagtccgttaggcagatgctgcaagatgaaatgtttaaattagttcagctgcaacagatcaacttcatgagcctaatgcaaatagtaggatcatcctttgctaatctcccagatacacaacaacttgtacagcagtctcagtctgtgcatttaggggaaagccaagaatcaaacctaagaggatgtggtgatgttgaagacagcaacaaaaatcttaaggagagattttttattaaaccacagtcaatgggagagaacgccagagagcctcgcaagaacagcccacactgccatgaaggaactatcccatctggtcaaaatagtactggaaacgtacagaatgttccacatgggagtattcctttatgtcaattaaatggccagccccggaaaaaaggaccaattccatcatctcaaaacttaccatccacttcgttttatccagctcctgctggaaatactcacctctaccttttgtccacaccttctgttgttcagaaggcacctagacttatcccacatgcaaaaacatttagtcctggtgatggctttcctttgcttcaatttaagtctaaacaagaattccagccccttttcttacatacaggaagtattccacaagttcccttcaggcctttgccacaaccaagagaggcttggggattatctgactccttccaacctgctctgccacagagagcagcacaaactactccagcatcccatttgaatgtaagccagtataacactgaagccagaaaaaaagaagttgagcagaagacgtgggcagaaactgtaattacagaaattcctaatcatgtgaacttggatcaatatgttggacaagaanatttgacacctcaacaggactcttcagtgtttataaaaccagaaaaactatttgatgttaagccagggacccttgagatatctcctcaccattcctttggacttccgttactatacctgccacttaaacctcctaatatgtttccatcaacctcaagagcatctattacagttccctcaacacctatccaacctatagc

SEQ ID NO: 236378 - DNA, 1563 bp, Homo sapiens
  misc_feature (1364)..(1364): n is a, c, g, or t
aatcaatgatgatattatttccatcactcataatactaaaaaagaatttatagatattgatgagaatcttttagaagtagaagcatttacagaagaggaaatggatatgcacatatcagactatgaagaagacattgaagaatctgttggaggtttcagaagtcccagtcttgccatttgcatgatgactttaccacagcagttagaagaagagttcacagaagaggttcagtgtcaaagggaagaaccactggagacaattatggaggaaaaatcgactgaacaaaaaggtatgatcgaagccttttcacatcctgggcataccactcctcaatcaatgcaagtagatacgagttcagaaatttctagtgcacagatttctacatataaagaaaaatcttcctcagttccacttctgatatcaaatggagtcaatgttgcttcacaaccacctgctccaacacctcagaagacccagagaaatgaattcacggctcagttaccagattgttcggagtccgttaggcagatgctgcaagatgaaatgtttaaattagttcagctgcaacagatcaacttcatgagcctaatgcaaatagtaggatcatcctttgctaatctcccagatacacaacaacttgtacagcagtctcagtctgtgcatttaggggaaagccaagaatcaaacctaagaggatgtggtgatgttgaagacagcaacaaaaatcttaaggagagattttttattaaaccacagtcaatgggagagaacgccagagagcctcgcaagaacagcccacactgccatgaaggaactatcccatctggtcaaaatagtactggaaacgtacagaatgttccacatgggagtattcctttatgtcaattaaatggccagccccggaaaaaaggaccaattccatcatctcaaaacttaccatccacttcgttttatccagctcctgctggaaatactcacctctaccttttgtccacaccttctgttgttcagaaggcacctagacttatcccacatgcaaaaacatttagtcctggtgatggctttcctttgcttcaatttaagtctaaacaagaattccagccccttttcttacatacaggaagtattccacaagttcccttcaggcctttgccacaaccaagagaggcttggggattatctgactccttccaacctgctctgccacagagagcagcacaaactactccagcatcccatttgaatgtaagccagtataacactgaagccagaaaaaaagaagttgagcagaagacgtgggcagaaactgtaattacagaaattcctaatcatgtgaacttggatcaatatgttggacaagaanatttgacacctcaacaggactcttcagtgtttataaaaccagaaaaactatttgatgttaagccagggacccttgagatatctcctcaccattcctttggacttccgttactatacctgccacttaaacctcctaatatgtttccatcaacctcaagagcatctattacagttccctcaacacctatccaacctatagc

SEQ ID NO: 236379 - DNA, 343 bp, Homo sapiens
cataaatattacctattactatacctatgtcaaaattataaattattgacatttagctggctctgaaggtcccaattatagttgacaatgcctgggaagaggttggaagaaggtgcagaaaaatgcaaaatgcagctgagctaaatttcctcatcctatctggacacagtttaaagctgtcatctcattcttgactttgaatcttagagaaacaagggttacagcagccttttcagaagaacttcaaggctcaacttaaatcgaatgtagacttaatagcaggatgcctaccttcaaatcagcaggtaagataaaagcaaatttaacagactctacagagcaa

SEQ ID NO: 236380 - DNA, 346 bp, Homo sapiens
atattaagtacttcaaagctgcaaaggaaaatacagatagaacccttttagaatattctatatttgtgtaggtacacacttaggtgctattaggccagcactttgggagactgaggtgggcggatcacctgaggtggggagttcgagaccagcttgaccaacatggagaaaccctgtctctactaaaaatacaaaattagccggatgtggtggttcatgcctgtaatctcagctacttgggagactgaggcaggagaattgcttgaacctgggaggcagaggttgtggtgagcggagattgtgccgttgcactccagcctgggcaaaaggagtgaaactccttctc

SEQ ID NO: 236381 - DNA, 358 bp, Homo sapiens
aagatctaaacattttggatctgagcaagcatttccctgccgtgtgattcactgtgctgccctgtggttgctatcatcgtcaaacagaaggctgactgacaaagaggcctctaaatcaaggggagaaaatcctccagaggatacactaattataggttaaatatcagagcacacagtattctgccttggaagaaaatttccattctgcaagacaagactatgacaaacaggcattttctcaaaatgactaatgcctcaaaagaaggcagaatgagaaacttgatgctgtgtatggtatttctgtgaaacatcacccccctgtttggtggaatatttaactgcatttcagttttcctga

SEQ ID NO: 236382 - DNA, 471 bp, Homo sapiens
ttcctctttcattcatagagaaaagtcctcaaaatgatttagtgtggtacctgccattgctttcaacaaggccaaatacagctagttcagccattgcacaagcgagaatttaaaccatttcattgcgtgttgacttctggtggaatactggggtgtaaaggatcagcttattgtgatcaacagcatgtatcaggccctttgtttgagttccaaggcaacaaacaacagaggaacactgactagctgccagatctttgagaatgactttaagattactaaaaacaaagtaacattttcttaataaaaaagatcttaaatattataaagaaaggaccagcagcccaagaaataatggaccaagaagacgaccacaaaatgtttaaataatcactgattatacaatattcaaagaaatttgaacaaaagaaacaataatatatctaaagattggtccattttatacatttggta

SEQ ID NO: 236383 - DNA, 195 bp, Homo sapiens
cgggagcagtcaacaaattccttattcctattttcctcagtacaaacaaatgagaatgagaaggctcccaaagcacagcatgaaatggcctggtctggagaaatcatacaaactgaacagaaggaaacccacaagcaaagaaagctttgtgttcccctgtcttaagaaaatggcagttccactatttggtaatat

SEQ ID NO: 236384 - DNA, 335 bp, Homo sapiens
ttaagcattggctagaaagtacagtgttactgataaaattcttttataagaaatgttatggagcatccaatttttttcttactctattggaatttggataaaatggatgcactgttgaaattacattcctaaactgaaaggtactcatgcaaagggcagcttttgaatcgtagatgagcaagtgagttctgtagaaacacagagtagagagttcgtgatcacctgaactcccttttctccaagtttttaatcttttagcttaggggagaggtgcttttctcttgccctttgtacatggcaaacagcactgtgacccatacttttttggtcatttc

SEQ ID NO: 236385 - DNA, 1226 bp, Homo sapiens
gtaataagtatatcacatcagtggaaggaaattaaaatatatcttttatatatagaaataatgctgttatctatattgaagacataagctaagtttcgagtttattttccaatatttattttagtttatttttaagctttctttttttttttttttgaaacggagtctcactctgtcaccaggctggagtgaaatggcagagtcttggctcactgcaacctccgactccctggttcgagtgattttcctgcctcagcctcttgagtagctgggattacaggcacatgccaccaggcccagctaatttttgtatttttaatagagatggagtttcaccatgttggccaggatggtctcgatcttctgaccttgtgatccacctgccttggcctcccaaagtgctgggattataggcgtgagccactgcgcctggcccatttttaagtttttgtagacaggggtctcgctatgttgcccaggctggtctccagctcctagcttcaagcgatcgtcccatttcagccttccaaagcattgggattacaggcacgagccactgtgtctggccaccagtatttgtaatcagttgctttttgcttgtatttttaaggggcatagtttacgagtggagaaaaatgttcgttgtgtttttaaaaccaacttttctaaacattgatcaagcgcttgtaactggcttcattgagttctttttatgttgacttctcaagctataacagtgaaagattggaagttattttaaaagattgcatactatatatgtactttaaaattttcagagtacttaatgtatacaaataattcttacagatgattagtgacaggcttaaagttggtgtattgaacccatgtataatttatttttacctcctccccaaactccaataaaatgcaatgaattagaaagggttatgtactcacaaggacaaaaatgaagagcagagaagagacagcatctaaatttggtaatttagaacgtttagaaagttgaatggttaactaacctagcagaatgattctaagctttatcagcttggaaatctgagaaacaagctgggttataatggagaatctgtgaaaggctcagaaattgatggcacaagcaactggaagtgaggatgaaagtgaggctaaaaacagaaagactggttaaagtctgttttaagaaggaactggaacacacaagatcgccttccctactctgttcc

SEQ ID NO: 236386 - DNA, 689 bp, Homo sapiens
tttcccttggtttatgatattcaatttggctcctgctgtaatgtacactgaaacctcaggctgctgagctatcttgatggttttaagaagacaatctggtgcctttacctgctagagaagtcacctagaatcctgttgtttaagcagaagattgtgtttccccaccacccccacaccaaacccagggaaaagataagctaacaggcagatcttcctgtcaccaaacacacagatctaccttcaacttcatcctcccaatccaatgaagacttcatctaatgtctcttcggtatgagtgcacacttcctccctggagccttcatatagaactacttaacaatatacatactgatccattgtggaattattaaggaaaatacattgaaataggtggcattcttgtcaaagatatatatggacggctagatggatagataggtgaaaatcatgttccatggaagaagagttagctcagcctgcaactcaaacaagtacagatattcttccatggaatgaccatcatacttggattgtaataaaaatgctttaggcaaacttctcatttcatccttggcatattaaaaatatgtatgtatgtttaaggcttgaaacttaacactgtattttaatgtttcagtaaggtaattcttcttaaataaaattggcatttttaaaaaagccctctctca

SEQ ID NO: 236387 - DNA, 934 bp, Homo sapiens
gtgccctgcccgcagaggtggagcctacagaggcaggcaggcctccttgagctgtggtgggctccacccagttcgagcttctgggctgctttgtttacctaatcaagcctgggcaatggcgggcgcccctcccccagcctcactgcagccttgcagtttgatctcagactgctgtgctagcaatcagcgagactccgtgggcgtaggaccttccgagccaggtgttggttataatttcgtggtgcgccgttttttaagcccgtcggaaaagcgcagtattcgggtgggagtgacccgattttccaggtgctgtccgtcacccctttctttgactcggaaagggaactccctgaccccttgcgcttcccaaagtgaggcaatgcctcgccctgctttggctcgcgcacggtgcgcgcacccactgacctgcgcccgctgtctggcactccctagtgagatgaaccctgtacctcagatggaaatgcagaaatcacccgtcttctgcgtcgctcatgctgggagctgcagaccggagctgttcctattcggccatcttggttcctccctccaagaactacttaacaatatacatactgatccattgtggaattattaaggaaaatacattgaaataggtggcattcttgtcaaagatatatatggacggctagatggatagataggtgaaaatcatgttccatggaagaagagttagctcagcctgcaactcaaacaagtacagatattcttccatggaatgaccatcatacttggattgtaataaaaatgctttaggcaaacttctcatttcatccttggcatattaaaaatatgtatgtatgtttaaggcttgaaacttaacactgtattttaatgtttcagtaaggtaattcttcttaaataaaattggcatttttaaaaaagccctctctca

SEQ ID NO: 236388 - DNA, 694 bp, Homo sapiens
ttccactaactgcccaaagaaatgggcaggttaaggttatcctttttatctgtgggaaaagatgctcccaggtactaggaagcaaacaaaacctgttttgttcaacttgtgtttctatccacttttataagtacacaaaaattatagcaggacacttaaaatacttgtgataacagcctttcttgtgatagcagtctgtctgtctgcctgcctgtcttcctccctccctctctccatccatctatccatccatctccatccatccatctccttcttcctctttgccaggagcaattctgggagaaactaacctaacaaataaatttccattttaatttaagtatgcacacacacacagaataaaagctgtaatgcacaaatggacttaacctttctataaaggcaaaaccagtttaaagctctctgaggttttagagctcaatacaaggtatagtcacagaataaagcactttggcatgaatagaaggttgcttcagctacactgcagtctgcttttaagacacaaggaatggaatgcagggtggaagtttcagggcctgttatcagaccgcttgagacagtgctgctcagagggctaccagtaacatctgtggatgatcagtcaggcccaagattcaggcagaaatctttattcctaaagcaagggatgaaagagtagaggataaaacgagaa

SEQ ID NO: 236389 - DNA, 650 bp, Homo sapiens
  misc_feature (97)..(97): n is a, c, g, or t
gccatttaacctttgggaacaaggcaactagcgtctggcagcaggaatccaaccagtgccctgagttctgaggcagagaggaggacagaagaaacangaggctggagattgtcaaattcagtatcccagttggctcttgattcttggtgaaaccatccctcagctcctagagggagattgttagatcatgaaactaattaccatccttttcctctgctccaggctgctactaagtttaacccaggaatcacagtccgaggaaattgactgcaatgacaaggatttatttaaagctgtggatgctgctctgaagaaatataacagtcaaaaccaaagtaacaaccagtttgtattgtaccgcataactgaagccactaagacggttggctctgacacgttttattccttcaagtacgaaatcaaggagggggattgtcctgttcaaagtggcaaaacctggcaggactgtgagtacaaggatgctgcattctccgtggctacccagacctgccagattactccagccgagggccctgtggtgacagcccagtacgactgcctcggctgtgtgcatcctatatcaacgcagagcccagacctggagcccattctgagacacggcattcagtactttaacaacaacactcaac

SEQ ID NO: 236390 - DNA, 274 bp, Homo sapiens
aaaaaaaaaaaaaaagcacaaaaaaagagtgtcattttccacagatatagttctggtttataaatcacccctaaggacggagtggggaccacaaatggcagaagctggaaaatccaaatcgagcaccagccacccaaccccaggaggtcacttctccttccctgcccaacaaccttcacgctcatttcattctccctcctgcacctttttttttttttgccctgaggccccactggcccatgttggtattttccaccccattttgactctggga

SEQ ID NO: 236391 - DNA, 459 bp, Homo sapiens
ttgagatgtagtcttgctctgttgcccaggctggagtgcagtggtgcgatctcagctcactgcaagctccacctcccgggttcacgccattctcctgcctcagcctcccgagtagctgggactacaggcgcccaccaccacgcctggctaattttttgtatttttagtagagacggggtttcactatgttagccaggatggtctccatctcctgacctcatgatccgcccacctcggcctcccaaaagtgctgggattacaggcatgagccaccgcgcccggctgagacaagggaactttatcttggagcactagggagccatgaatggttggagaccaggggagttctgtgctgtaagctagggcagtaactagtctagagctgtgttttctaaggagtgccagtgcttggtggaactagggagagaactggggcatgagatatcctggggagaggta

SEQ ID NO: 236392 - DNA, 421 bp, Homo sapiens
ggctggagtacaatggcgcgatctcggctcactgcaacttctgcctcccgggttcaagcgattctcctgcctcagcctccagagtagctgggactacaggcacacaccaccacgccaggctaatttttgtatttttggtagagacagagtttcaccatattaaccaggatggtcttgaactgacctcaggtgatctgcccttctcggcttcccaaagtgctgggattacaggcgtgagccactgcacccagccatttttaaacctgcttttctaacttacatttttttctaacttgatttgtttttctcttcttaatccttggactgccgcttctcctcagctttctccccagccctccctgccttctttcctttctccctcttcttcctcctcacctcttattttctccttttccttcac

SEQ ID NO: 236393 - DNA, 1713 bp, Homo sapiens
  misc_feature (4)..(4): n is a, c, g, or t
  misc_feature (39)..(39): n is a, c, g, or t
  misc_feature (60)..(60): n is a, c, g, or t
  misc_feature (62)..(62): n is a, c, g, or t
  misc_feature (100)..(100): n is a, c, g, or t
  misc_feature (116)..(116): n is a, c, g, or t
  misc_feature (146)..(146): n is a, c, g, or t
  misc_feature (161)..(161): n is a, c, g, or t
  misc_feature (235)..(235): n is a, c, g, or t
  misc_feature (250)..(250): n is a, c, g, or t
  misc_feature (259)..(259): n is a, c, g, or t
  misc_feature (263)..(263): n is a, c, g, or t
  misc_feature (267)..(267): n is a, c, g, or t
  misc_feature (311)..(311): n is a, c, g, or t
  misc_feature (337)..(337): n is a, c, g, or t
  misc_feature (388)..(388): n is a, c, g, or t
  misc_feature (424)..(424): n is a, c, g, or t
  misc_feature (434)..(434): n is a, c, g, or t
  misc_feature (452)..(452): n is a, c, g, or t
  misc_feature (547)..(547): n is a, c, g, or t
  misc_feature (555)..(555): n is a, c, g, or t
  misc_feature (647)..(647): n is a, c, g, or t
  misc_feature (683)..(683): n is a, c, g, or t
  misc_feature (800)..(800): n is a, c, g, or t
  misc_feature (955)..(955): n is a, c, g, or t
  misc_feature (1250)..(1250): n is a, c, g, or t
  misc_feature (1441)..(1441): n is a, c, g, or t
attngctgcatggccatggacaagttgttttaactctcngagccaacatttcctcttctntnaaatgggaatattaataatacttagcccttggagacantgttagaatttgaagnacaatgaataatttttaagagagcttgacncatgagaaaaataancttaaatgcatgaatatatatatcaagcatgaatttacctagtgcatatgcattatacactgggtgcataatantttataaaataatcnttgttttanaaantagngtttcattatttggggagaggcattaccgtcatttcctttctgntgacttcccctcttcagagttttctnctcttcccctcccatcccaccaccttgctttgtcacaaaacaaagccaatnggatcaccaacagtttaagactggtttactcaaaangaattcattnttttacatagctgaacanagaaatgataaataatgttctataaatatttgttggttgacagctttggaacaatgtcctctagaaaaagctgaacgtagccacccaccttgtangagagccncaaagaatagccatgtgcctgaatatgtgtcagccgctgtgtgactggaggggctgaggaaggggcgtagagggtgttgtgaggtcccttcngacaagcagtcaagaacgcatagaaatacattacangcagaagttacagacagctgagatgacgtgactgcactccagcctgggcgctagagcaaaatcctgtctcaaaaactaaataataataataacaaaatacaaataaaaaacaatgcngtataacaatgatttacatttacatttattaacagcacttacattgtttaggtattctaagtaatctggagatgaaagtatacgggaggatgtgcataggttatgggcaaataatatgctattttatatcagagatttgtgcatctgtagatttnggaagccatgggaattcctagaaacaatcccctgtggatatcaagagatggctctatacgataagtgtgtaaaatatatatattcagaaggaatcagaaaatcaaaattaatgtctctcagggaagatgggcttgatgggacttgatggaggatggtctgggagactatccccttctacggaaacattccctactaggagaccagcacagctgcagggaaataatttcttcaggcagtgttagcagcttctaaatctcgggaccctatgtccctgggctcctcaaggagatgttngttatttacagtgactcctgattcatttccttagggggtcctctcttccttcagctagggacttgaaggggaaaagtgccagcatttaccaagctccttaaagcgccaggtgctatactgctatgagtttcatatatagtcttttttaatccttgcaaaatctcaggtatggtggcatgtgcctgtagtcncagctacatgggaggctgaggcaggaagattgcttgagcccaggagttctgggctacagtgcactatgccaattggtgtccacactaagctcggcattaacattgtgatctcctggtagcaggggactaccaggttgccttaagaggggtgatccggcccaggtcagaaatggagcaggtcaaaactcgcatgctgattagtagtgggatcgtgcctgtgaatagccaccgcatttccacctgggaaacatagtgagaccctgtctctgggg

SEQ ID NO: 236394 - DNA, 1683 bp, Homo sapiens
  misc_feature (1004)..(1004): n is a, c, g, or t
tattacaatgatgcttctgtcctaagaagcttgagacaccgtcatctttgttactactatgactgtttatgttagtgcctcaccttttggtttccttgtgtgcccaaagctgctctccagagaacgtcatctcagtttcctgatcacaagcaggcttttccctgagatagatccaggcattgaatgcccagagcacatttagtatgtgcacgaatcctctagcttcctctcgcatttgtaaaagaatctgattcaccaggatgtttttggttcttttatgtaattttccatttcctgattgtggcaggtttttttttccattttctattcatctgtaactgctttggctcagccctttgtctccctactttctgccctgcagctaacttcatgagaaagtcccgtgttccctgggtctggaaacttgtcttgtcccaggagacatactctagttttcaagagacgtgaaagagcttcagcaacctcagaatgttctggtggcagcatcaaaatcatgaccatgcatgaataaggggtattgtcatgtgtgtgctgatagagcccggggaccactgaattctagccccatctctgaaatatgtgcccaccagggcagagcattttcttttaagttccgcccagcttctctgcaaagtgggccactttagttctagatttcagagatctctgtataaaccagattacgattttagggtcttgaaggagaaaaaaaaaaatgtcataaatcttattaatactaatggcttttgttttaccagcaagaaataagtaaattgctctcattgggataagataaaccttttaataaccatttcttataggcactgagtagtttgtaggtgggcatcgaatttccaatgtggaaattatgctgaaaaaactgtctcccagcaggggtatttattttcttttctaagccccacaacatcatcaaatgacaagagtcagcattctcatatgcatgtgtgtcctttgtatgaacnttatctgcccagtagtgcccagaaatcaaatgaatataaactaagactttgttttcgatgtgctttttacttttggcatttataaactctctgagtcatccctgggagtggaggccacagcggtgggaccagtacttatgtgaatatacagtcataggttttattgtcttgctgtctcttaaaaaaaaaaaaaaggaagttctacaagtctcatggaaatactggaattggagatacatatttaacatgctaactttattagatcatgatttctacctaatttggttgtgtttcagtaaactacaatccccagtcatgtgacaaacacctgtttttaatagaatccatcatcttcagagaaattggttgtattcatgagctaaaacatgaatatatgggctgggtgcagtggctcacgcctgtaatcccagcactttgggaggccaaggcgggcagatcacctgaggtcgggagttcgagaccagcctgaccaacatggaaaaatcccatctctactacaaatacgaaattagctgggtgtggtggcacgcgcccgtagtcccagctactcgggaggctgaggcaggagaatcgcttgaacccaggaggcggaggttgcagtgagccgagatcacgccattgcactccagcctgggcaagaggagtgaaactccgtctc

SEQ ID NO: 236395 - DNA, 591 bp, Homo sapiens
gtcatgtggtcacccaggctggagtgcagtggcatgatcacagctcactgcagcatcgaaaccctgggctcaagccatcctcctgccccagcatcctgagtagctgagactacaggtgcacaacaccattcccagctaattaaaaacaattttttttttttttagaacaaggggtcttgccatgttgcccaggctggtcttgaactcctggcctcaagtgatcctcctgcctcagcttcccgagcagctaggcttacagatgagcctcaccatgcctggctctctagttttcttgcatttctctactcccactatcttacctaaatcttaaaagacagacaaaggttcttatagttagccctttctcaaaaaccttgaccctgaaatttgaacttcccacaattattcctggtttctttctagttccacaaactttctcctagttcttggatcatggtttgttcctctttcccttcatagataacactggagataacattcatctcagaagttagattcctttaaaaacaaatgctctagttcctggggcactagagagaaaagatttgccaacaaaagggtccagcttgc

SEQ ID NO: 236396 - DNA, 463 bp, Homo sapiens
cattaggcagaagaagactctcttattctggggagggtcagccttttgttctattcagaccttcagctgattgtccacccatgttagggaggacagtctgctttactcagtctacatatttaaatgttcatctcatcccaaaacacctgcacagaaacacccagaataatgtttgactaaatatctgggcacatctatggctcagtcaagttgacacataaaattaacaatcatatgggttaatgggaaaggtggtaactgggggtgctattttaaaagggttttcagaggaggcatctttagggagaggccataagaacagtaatctaaacgaagtaaaagccagaagctgtgaaagaggatctttcccggggaagggcatagcaggtatgaaaccctatatctgacacgagtttaggatatccaaactactgtaagaaactgctaagggtggatcacaaag

SEQ ID NO: 236397 - DNA, 557 bp, Homo sapiens
gactgttccccaaacacagggagaatttgcagaaaataagcccaaaaatcttgccattctttgcaataaaaccccacattacaaactgctgaaaacaggattttagcctgaataggttgttcctctatttgaaagcctttacaatttcggagggaagtttccaaatcaatcagtaagtaccccccactccaggtttatccttatgtaaagtgccccctttgcacatgcaagattgaataaaccttgaaaatattatgctaagtgaaagaagccggtcacaaaggaccacatggtatgtaattccatttaaataaaatgtccaaaatagaccaacacatagaaacagaaagtagatttgtggtggcccaggattaggggagttggggggaaatggagggatatggtgtttacttcagggtaatgaaaatgatctaaaatttattgtggtgatgtttgcataacagtgcaaatatactgaaaaccactgaattttacactttaaatcagtggcttctgtggtatgttatcaatatttctcaataaaacttcaaaaaaat

SEQ ID NO: 236398 - DNA, 444 bp, Homo sapiens
tcttttaacagatattgagctgttaatttgcaccagcactgtgctaagggctccacgtatagtcttatttcatatgcacaacagatgtgcaatataggtgttctaagtatccccatgttacaatgaagaaaattgagactgagaaatgttagggaacatccccaaggccacacaaccaatgtacgcccagggtctttcctgactcaggggtctccctgactcagatgccttacaaacagcacttaaccaacaggctggatgacttcgctagttcacgtcttctcactgcgtgttgttgaaacagatactgtagtggagtgcgttttcttcatgcagtgtgttgttgacactcatctgaattaatgcatacagtgaaaaggcgttaagaatagttgaaaagtactatggtacaaatgatgatatggcataaatacaatgaaacgg

SEQ ID NO: 236399 - DNA, 183 bp, Homo sapiens
aattagtgggatgctgctaagctttactcagggaaatttctagcactaaatatctatgttaaaatatatttaaaaagaagaaaggtctgagtttctaccttaaaaactagaaaaacaagagcaaattaaatacaaagtaagcaggagaaaggaaatagctatcaaaacaaatcagttaaatag

SEQ ID NO: 236400 - DNA, 482 bp, Homo sapiens
atgaacaccagtgccagcaagaaagcaagcagcagagcaagtaagaacgggattttgaaaattcttatggaaaaaagtctgcagcatttccagaaactttcttaattagaagaaaacatgaaaataaccgttgcaaatcaattgtatataaaaatgaatggtcttctattaaaatgtagagggagattttttgccaaagtgttgggattacaggcgtgagccactgcacctggccagttgagctttttaaagataacagaaaggactgctgagaatgagtaaacctatgtccgtaaagagaattgcatgatttactgcaagtattcctgggagtgaagcatcacgtacacactgctggtctcgtgtcctcctgaagatagcccctcacacttcacagtggttggagaaggttctttttctctcctgtcttccctctgggtcccacctggtctagcattttcatctgtgttgaaatttgtttt

SEQ ID NO: 236401 - DNA, 165 bp, Homo sapiens
gatctcagcccaaagaatgggggtgctcccatttcacttgattccctggcatctgatgccagagcgcactttcccagcaagaactcacaggactctgagttggccatgccctgcactgcctctgtctctgccacggttgaccctccataactggaaaccatgatc

SEQ ID NO: 236402 - DNA, 548 bp, Homo sapiens
gcattagaggagcagcaccaggggtctgaacttgatgatttattgtgattcctgattctcctgctgtttgagactgtctgaaaagatgaagaccctgtcacagcagacagcacttggcgggagggctctgtcttacaaagaactaactactataataagcctgggagaatgcaggcccttttgtgcatttttttaaaagcatttcctgaaatttctctaaaagaaactaatatatccaagtacatctgcaaacaacaaaaaaagtgggtggggggaagaaattaatatccaaaattagaatgtgtatttggacatcaacttcaagactgtttcaggtttataaaaggcacaattagctaatgttcctggcttatagtgtcttgttttagaaattgagttgttgtcatgaacaggacagtttttattagtgtgccccagcggctcctgaatttttggagggacttagggcaatcttctgttaggacggtgcaccttgtcctgtgtggaagctgcgtttgtatagcaagcaccctgtttttacttggaga

SEQ ID NO: 236403 - DNA, 607 bp, Homo sapiens
gctggagtgcaggggcgtgattttgttttattgcaatatggaggaattccatgtagacaatgtatgatgttttcaacaaggcatctgacgaattcttcatatctatccttattcctgagacagggtctcactctgtcacccgggctggagggcagtggcttgatctcggctcactgcaatctctgcttcccaggctcaagcgatcctcccacttcagccctccaagtagctggggcaacaggagtgtgctgtcatgcccggctaattcttccatattttgtagagatgggttttccccatgttgcccaagctggtcttgaactcctgagctccagtgatccacccaccttggcttcccaaagtgctgccatttccgggatcagccacccccccaagaaatacctgatttatcgattgtagaaaccctagtgcttgctaactaaaaagaaaacacagttttacctgccctcggattatgaaaaaatgcgtgcccaacagtggtctgattttattgaactaaatttttagtaggagaacaccgggagaaaatgtgtactcccacgatccactcaatttttgttggtaaacggagttatgtttctttcct

SEQ ID NO: 236404 - DNA, 673 bp, Homo sapiens
gctggagtgcaggggcgtgattttgttttattgcaatatggaggaattccatgtagacaatgtatgatgttttcaacaaggcatctgacgaattcttcatatctatccttattcctgagacagggtctcactctgtcacccgggctggagggcagtggcttgatctcggctcactgcaatctctgcttcccaggctcaagcgatcctcccacttcagccctccaagtagctggggcaacaggagtgtgctgtcatgcccggctaattcttccatattttgtagagatgggttttccccatgttgcccaagctggtcttgaactcctgagctccagtgatccacccaccttggcttcccaaagtgctggggttacaggcatgagccaccacgcccagctatccttcattcatttattcaaaaacatttattgagtacttactatgtttcaatccctgttttagatgcttgggatatatgagagaatgagagagagagagagttctaatctcattgaacttaaattctaataggaagaagacaaggagaaaatgtgagctagatgatttttttttttttttgagacggagtttcgctcttgttgcccaggctggagtgcgatgacacgattttggctcactgcaacctccgcctcccaggttcaagctattctcc

SEQ ID NO: 236405 - DNA, 390 bp, Homo sapiens
cagtaattttcatattaatacatttcagcacttcaatactaagtcattctttaaattgtggcctttaataaataaacaaataaaatgaataaactaatatgttgaaagggaaaagatggccaggcacggtggctcatgtctataatctaaccactttgggaggccgaggtggatggatcacttgaggccagagtttgagaccagcctgggcatgatggtgaaacctcatctctacaaaaaatagcttggcattgtggcttatacctgtggtcccaagttaccctagtggctgaggtgggaggatcacttaagcccaggaagttgaggctgcagtgagccaagattgcgccactgtactccagcctgggtgacagagtaagaccctgtctc

SEQ ID NO: 236406 - DNA, 512 bp, Homo sapiens
ctggcactaatctcccccacactaggtgcagcccactccctaccatccctttggctccacaccctttacagtaacaatggcagcttagtcaaacagagaactgaggtttggtagagcaccaagtttcattgtttttgtcaggccagattttggatgtgaaagagttatcagactaagagaaaacaaaggatagtgacagttcagagtagctggagttgcttacactatataacagctaagagttgtttatctaccactttagcattttggtgatacatataaaaatccttagctcctatgtatttccttcacatttatcaacatctataatgtcctccctttcagtggcgtatcatgtcaggtttgcttcaaataaagaaatgtgatcataatgaatattttcactgtgatgtatttaatggagaggctaggtggtggttttgatagttcaattcaaggctaatcagggggtctgcaatgctagtaaccttcatcctaacctggaaaaaaaa

SEQ ID NO: 236407 - DNA, 200 bp, Homo sapiens
gacataagtttacctatataacaaatttgcacatgtaattatgtccatgtccttgtgtagtttaggggaatcatttactatcatgtaataaatccctgcttctccttaccggtgggtctgaaaacagtcttgcccaaatgtgaagcaactcagtgcggatcaatacatgatattcacctgaggtacagccgggagtccca

SEQ ID NO: 236408 - DNA, 596 bp, Homo sapiens
atttttttgtattttagtacagacggggtttcactttgttgcccaggctggtcttgaactcctgagcaatccacccaccttggcctccgaaaaatgttaggattacaggcgtgagccaccatgcccggcccgaccatgttttatatattcgtcactgaattctagaactgaccactgtttctgacatataatagtggttctccttaacactaactttatgcttggaccaaatcaggtttcccgtcagtattatattctacagtatatctttcatagtaatactgtgttcaactttaaaagcttgttaattgtgatcatactcttactaggattatactaaaggttctacttgtgtttgtgaacatacatgacaaaaacacacatattaaaattatttgtttccgagttttatactatctaatgacacaactgtgtaagcatggtattttactgtttaaaattgtaaagtatcctgttaaactttacttttaaatttttcttaagacttcttaagttgcagtaactgtctatcataaattgaccttaacaacatctcctgttaggtagaatgacaaaattaaaatggagcttagttg

SEQ ID NO: 236409 - DNA, 359 bp, Homo sapiens
aaagacagtctcactctgtcacccaggctggagtgcagtgcacaatctcaggtcactgcagcctccccctcctgggttcaagcaattctcctgcctcagcctcccaagtagctgggattacaggttcctgccaccacacccagcaaatttttgtatttttagtagagatggggttccccatgttggtcaggctggtcttgaactcctaacctcaagcagtccatccgcctcggcctcccaaaatgctgggattacaggcatgagccactgcacccggcctattgttgtacgtcataaatctacatgttcaaactaaaacttaatgcagcctcctacccttcctgttccgtaattggctc

SEQ ID NO: 236410 - DNA, 575 bp, Homo sapiens
gcagtttcagaattgtaacagggagctcccggaggggaggaggagagcacaatgggcctagaacccaggctttctgatatgtactccccaaggctttttctgccccagtatgctgccttttgaaaggccctccctgcctcttttaacattttttaatgaatgagcttatctgtttcagcaccataggcaaggaggaatggggtaattacagaagtacacctccctcttatttcttgggtggcagcagttacactagttggaattaagccaagtgtggcttaagagatcgagggaccatttcttttatttagaaaggtagtgggaggaaaaaaactgccccaacgtgttaattttaaagttgacttcctgagaaaagttgacttgcatcatagttaaatttcagtctaagtttgtttagtctctaaacagactatttttaacagttcaatttgattttaccctatcagttgtaagttccaaaaatatttgtaaatattctaatttcagaagaataatacgtatagaaaagtgattattgttgggctctactagagaaatttgcagaatatctttgt

SEQ ID NO: 236411 - DNA, 713 bp, Homo sapiens
agtgacctccagcatcaggtggaggacgtggtgctatgggatggggcatgctgcacctccagaggctccgggcctcagatatcctccatgctggaaaggtgggagctctgagtggtctgttttgagccagcttcctcctgcccctccagcttccccagggtgcatctgcacacacaggtacacacacacacgtccacatacatgcacacgccctgctctcctgtgcactcccaacgagtccgagtaaatgcctttgcttctcttgcttgctctttggctcaggccaggaaccccttttggggtcacaagggaccattacagctcatttggtcaaaaagcccccatccagtgcccccaaccagcacctcgaagacccttcataaatctcaagtgaggccgggcacggtggctgacacctgtaatcccagcagtttgggaggctgaggcaggtggatcatgaggtcaggagttcgagaccagcctgactaacatggtgaaacccccatctctactaaaaatacaaaaattagctgggcatggtagcgcacgcctgtagtcccagctgctcgggaggctgagcaagagaatcgcttgaacctggaaggcggagtttgcagtgagccgagatcgcaccactgcactctagcctgggcgacagagcgagactccatctcaaaaaaaaaaaatctcaagtgaatgacgaatacctcttg

SEQ ID NO: 236412 - DNA, 507 bp, Homo sapiens
acatcctagttcaaacttactctccaaagaaccaagcacagagccaggcatgtcatagaccttcaattgttcgaggcaagtgtgcctttactcacctcagggcttatttccagaacacatttcttctaccatgattaccacccactcccacctccctcctccctcttccaaaccctgattgaaaatataaacaagtacgagttacataaattgatagataaaaagaacgggttatcaatagaagcctgcagtgtcagaggtgcacctgcatcttctgggtactgtaggacttgcattcctttccagaaatgtgccttttaagcctctgcaagctgaaccctgttctctctctggccacctcccagtggctttacttctgcccttcatcagcttagctgttgtcatacagattgcagagacattcttgctgcacagaagccaaatgtagttgtaagaataatttatggatggttccatccatccacattaaaaaatagttccttatca

SEQ ID NO: 236413 - DNA, 720 bp, Homo sapiens
gagtaaacattcgtctcccctctccctcacgcccctgcgatgtattgttttgatgcggatgtatgaacagttaatgtcaggggacgtactttaaaaaaaagtctaattgcaagttagatgtggttaaatgccctcaaaaaccacacatactggtagtttgaactttgttttatagaattaaatgcagccgggatcacaacactaaaaacctactatttgacacagtttgatccaatcttttttgaaaagtatagagattaacattatgctaatttttaaatacttgatttctagaccaggatgtaatcaataaaaacggatattaatatttagcaccaattatttaattatgctagttattttacattgactgcaagccacgtaaaacagttaggccgggcgcgctggctcacgcctgtaatcccagcactttgggaggccgaggcggacggatcaaaaggtcaggagtttgagaccagcctggccaatatggtgaagcccgtctctactaaaaatagaaaaattagccgggcgtggtagcaggctcctgtagtcccagccacttgggaggcagatgcaggagaatcgtttgaaccctggaggcggaggttgcagtgagctgagatcgggtccctaaactctagcctgggtgacagagcgagactccgtctcaaaaaaaagaaaacaccaaaaaaaaagaaaaacaatttgttatttttt

SEQ ID NO: 236414 - DNA, 297 bp, Homo sapiens
cagggactgcagggactgcattgctcttgcagcaccacccgcctccgtggacaccttcagcagtgagacaatgcaggctctgctacaagaggtgcttactgggctctgctctggtgaggagaggcctcgcctggcagccagacagagtcccagcagggcaagatgaaaattcggggccctcgttcaaacagcaagagaaggctctttccttccttccagcgcccctccctgcacctgtgatggtgtttttatttgttatttaacgtcatgtgctcttgggcaaggggaggggaaact

SEQ ID NO: 236415 - DNA, 460 bp, Homo sapiens
tatttcttggctcctctcagctctcagattcagactcccttttttagaaggatgttaggtgtgggactttctctagaaagcagctatcacttattttggaggtgtaatgactgggaacagaaagggggagaaacagatccgaggcacaagagagctcctgaaaaagctgctgaaacgtgcctgggccatctcctgagagaagcctagatgggcggcctccaaggagtccttgtgctgtttgggaccttgagtagctgcctctccatggggccctgtttcccagttcataaaacgggtgatgcagctgagttgtgatagtcaggatgccttcaattgtagacaacaaaaaccaaactagggctgggcacggtgacacatgcctacagtgccaactatttggaaggctgaaataggaggattgcttgagctcagaagttctagaccaagcctaacaatatcc

SEQ ID NO: 236416 - DNA, 402 bp, Homo sapiens
ctctaaagctggaagtggttgcagctactgtaacttggtcgttaaaggtaaatgttactaactgctgtttatggcaatatggtggattagattccctaaccttaccattgctgaatagggaagaaagtaaagaatcatctgatgccaaaagcaaagtgagaataagactcctggaaggtaaacaagtacaaaaggcagcttgtagccagaaaataactgctgattcctgggaaccttgagtttccattttgatgactaggcaataatgatagaaaatcagcttaggggctacaaatggaaagtctaataggagatccttgcatgaaccggaaccccaaagaacaattcaaaagagagttgaaaaaataaaaagggtaagatagaataagtgaaactaatagg

SEQ ID NO: 236417 - DNA, 457 bp, Homo sapiens
caggcaagattagccactaaaaaaggaaaatggcagggtttgcttcagtgtttgttgttttgttcaccagcctgatttttgccagcacctttgtgtgtcagtggctccaaactgtgaaagtactccaagataaaaagaagcagctgcctctattttctttactgccttctatatatctctgaattcctttttgtaaatttgtttggttctgtgcacaggagtcccacaaaaatattagagtcaaagaagggccagatgaagaaagtctatatcacatcctgagctatagaaagaaacaggggcttgaggctcctgagaggtggtagagtcaaattatcgcagcgtgaggagaagaaatgtatggtgaacaaaggttgccttgttatgcagacaaaactctcttaggtaataaaagttgtctgggagcagctcgcttcctgttacagatatccttact

SEQ ID NO: 236418 - DNA, 454 bp, Homo sapiens
cgggcgtcctcccctgaacgaatgtcctggcggggcgtgcccagccaccatccagcttcagaggcaatggccgggcgtcgtgagaaggggagggagaaggaagcggaagagagagagttggaaagactagaggaagaggtggccacgtcttttgccatcccagctttaaactgcagtgtttaaggcctcgtctgccctgctaaggtcaccgaactttttactttatgtgaaaagtgcttcccaagggaggcacagggactccggttctgaaaccgattaatggtcttagagcccccagtaagccgttaccaaagtgtccgggtcacagttgcagaggaagtgagaagcgtgttcgacctcatttgaaacggcttcacagagggtaaacctcaagttgattttgtaaaaaggaaagcctgtggtttggccgagaagaataaataatatattctag

SEQ ID NO: 236419 - DNA, 2864 bp, Homo sapiens
gtgctgacaagagagactacaaaagctacaaggtcagcctatctcggcagacttgttgccaagcacttacattgaagggttgccccaaggccctacaacggcagaagagactgttcagaaagaggggatgcgaaaacaaggcttatttcaatggctcgattctcttcagattgataacctcacctctccagacctgcggctcaccgtgggagcagtgattgtggaggaaatgagagcagccatagagagggagactggttttcagtgttcagctggaatttcacacaataaggtcctggcaaaactggcctgtggactaaacaagcccaaccgccaaaccctggtttcacatgggtcagtcccacagctcttcagccaaatgcccattcgcaaaatccgtagtcttggaggaaagctaggggcctctgtcattgagatcctagggatagaatacatgggtgaactgacccagttcactgaatcccagctccagagtcattttggggagaagaatgggtcttggctatatgccatgtgccgagggattgaacatgatccagttaaacccaggcaactacccaagaccattggctgtagtaagaacttcccaggaaaaacagctcttgctactcgggaacaggtacaatggtggctgttgcaattagcccaggaactagaggagagactgactaaagaccgaaatgataatgacagggtagccacccagctggttgtgagcattcgtgtacaaggagacaaacgcctcagcagcctgcgccgctgctgtgcccttacccgctatgatgctcacaagatgggccatgatgcatttactgtcatcaagaactgtaatacttctggaatccagacagaatggtctcctcctctcacaatgcttttcctctgtgctacaaaattttctgcctctgccccttcatcttctacagacatcaccagcttcttgagcagtgacccaagttctctgccaaaggtgccagttaccagctcagaagctaagacccagggaagtggcccagcggtgacagccactaagaaagcaaccacgtctctggaatcattcttccaaaaagctgcagaaaggcagaaagttaaagaagcttcgctttcatctcttactgctcccactcaggctcccatgagcaattcaccatccaagccctcattaccttttcaaaccagtcaaagtacaggaactgagcccttctttaagcagaaaagtctgcttctaaagcagaaacagcttaataattcttcagtttcttccccccaacaaaacccatggtccaactgtaaagcattaccaaactctttaccaacagagtatccagggtgtgtccctgtttgtgaaggggtgtcgaagctagaagaatcctctaaagcaactcctgcagagatggatttggcccacaacagccaaagcatgcacgcctcttcagcttccaaatctgtgctggaggtgactcagaaagcaaccccaaatccaagtcttctagctgctgaggaccaagtgccctgtgagaagtgtggctccctggtaccggtatgggatatgccagaacacatggactatcattttgcattggagttgcagaaatcctttttgcagccccactcttcaaacccccaggttgtttctgccgtatctcatcaaggcaaaagaaatcccaagagccctttggcctgcactaataaacgccccaggcctgagggcatgcaaacattggaatcattttttaagccattaacacattagtgctgccctcaggcttgcctgtaggatttaatattttttatctttacagatctttatctttaatattttatctttacagatttccctgagaaagggaattatgaaatttttaatacaaaaaataatccatttaggtgctgagttacggtcccatctcttcacaggcatggattctaatcccactgctgacagagatgtaaaaattcatcctaccagagtttttaatctttagcatttagggaggcagtgtcataaagtaaaaagtgtgtgggccttggagtctaagagacgtggttgcaaacttagctctggttattgcaatgagggccttgaacaagtcattttcttcacattctcatctgtaaaatggagataataccttacagattattgcagattaataacaatgtattcaaattatgtaactcgacctcccaaagttgctgggattacagatgttagccaccgatcctggccccccccccaaaagtttctgatataaagctggcaggaagtcagtgacaattattaagtcttggaagaaaaatttctaagtttctcctgagaagaaatttctgaagaaacatcttgtagataatgtagtttcacagtaaagtttttttatttttatttttttaatttgaggcagagccttgttctgtcacccaggctggagtgcagtggtgtgatctcagctcactgcagcctccgcctcccaggttcaagtgattctcatgcctcagcctcccaagtagctgggattacgggcatgtgccaccacacttggctaattttttttttttttttttggagacagagtcttgctctatcaccaatgcactccagccagggtgagagtgagagactgtctcaaaaaaaaaaaaaaaacaaaagaaaaacttctctctagctctgtgacgggcagttcagataataccttcaccagatttacctgttttcagctgaagaatgtgagatgaagccttgaaaccctaaaagtgatatggtaactagggcaggtctttctgtacataaaagtgacttaataaacagtgaatttcatacaggtaaaccctattataccctcagt

SEQ ID NO: 236420 - DNA, 450 bp, Homo sapiens
tgttggtgccagggactggtttcatcagagacagttttccaacggactggggtgggtagggggatggtttcgggataaaattgttccacctcagatcatcaggcattagattctcataaggagtgcacaatctagatcccttgtatgcacagttcacaatagggttcatgctcttatgagaatctaatgctgccactgatctgacaggaggtggagctcaggcaggaatgcttgtccacctgctgctcacctcctgctgtgtggcctggttcctaacaggccacagactggtactggcccaccacctggggttgggaaccccggctatagggcaaatgtagaccaggcttcaggcaggtgactcaggtttgcctagagatggacagtaggactgggaggtgggaaatcacctgtcctgcattcaggcagcccccacccgcccccccccca

SEQ ID NO: 236421 - DNA, 700 bp, Homo sapiens
gagtatggattgaataaaccaaaaattatgtagatgatgtaattactataattaaatcaaaacagattgtgtatgctggaacttattgtattactcacaacataattttgtataacttttttttaaacctgtctcttttcctttctggtctgtgggtttctgaaggacaaacctcttttggcagttgggcctgaagccccagaacttatgctggtcctggcaccaatgaggacagaaatgattgagcacatgaatttggtggaaattgatttttacttctctgcagctaagtatgtggcagtcttggccacatggtgactcagcagaggagcctatgtactggctgtcctgatgctcttcctgattcaactgattctctacacttgatcttagccaaaaggccgagaagcaatgattcaactgattctcaaaaggacaccgctgcaggaataaacccacttctaaatatggtacacttggaaagttgtccagctcgcaatgtcagagtcacagacttcatgcacactcatctcaagtcaatgttatctaacacatttccactaattattggatgacactagcaagaaactctgatatttttcacctaacctttgctaatttaaatgtggccagcccaccctcatactgcattgtgatggggatataaaagccaatgaaagatatcattaattgttaacaa

SEQ ID NO: 236422 - DNA, 668 bp, Homo sapiens
gagtatggattgaataaaccaaaaattatgtagatgatgtaattactataattaaatcaaaacagattgtgtatgctggaacttattgtattactcacaacataattttgtataacttttttttaaacctgtctcttttcctttctggtctgtgggtttctgaaggacaaacctcttttggcagttgggcctgaagccccagaacttatgctggtcctggcaccaatgaggacagaaatgattgagcacatgaatttggtattgagtttgacattattgtgcttcattttttgtgggcctgggatgttttctacgtaattcgtttatcatttattgtttaaggtgtctgcatactcaaaatatctttttaatgtcctccgcctatacatgacataaatactttattaactttgtttaaaaaatcttatcacagtgccatccaacaggaatataatgtgagccatgtgtaatttaagatttactaatagccatattaaaaaaggaagaagaaactggtgaaattaatttttaataatgttttatttagctatattcaaaacattatcattttaacatgcaaatataaatttattaatatctcttacattattttttctagtaactttttaaaatctagttggtattttatatttaatgcacattttaat

SEQ ID NO: 236423 - DNA, 400 bp, Homo sapiens
tcaagaagagtttggttcactatgttggatgctgctgatcaaatgcaataggaaaataattgattattgattttggcaacattgtaagtaatttggtaagagcaatttccacaaatagttgggttgaaagttcaactggaaagtccaacacacaattcatttgtgtgttgaggaatagaagaaaaatgtgaagagagcgactcttaaaaacaacacctgttcaagaagttgtgccatgaagatctcagtaaaaaggtgttacagccagtggagtgaagagtttgtttttgttgtgttgtcttaaactggactactcctttattgatccttagcaccttgtacagagcaaatgttcaaacattgttgagtgtttgactaaataaagtgtttatgtctcata

SEQ ID NO: 236424 - DNA, 376 bp, Homo sapiens
agcccctacctgctgacccaccgcctccgggcgcacgggaagaggactgagagccctgaaaccccagcggggcaggagccagcattctgagcatgtgcgagccagccagggggctagggcggatttggggggtcgactttaggtcgtcgccctaagcgcaaagcgaaagagcggtgagagcaggggcgggcgacactccccggagcggtgcccctgcgcccagggcgcagcgactgcgccctgccctgcgggtgtgggcgagttggccgcgtgtgtgcctcgctgtttgacgcgaagacgagccaatcagggcgggcggcccgagctgccatgtgacgggcaaggcggcccctttccccagcgcggccagagggag

SEQ ID NO: 236425 - DNA, 503 bp, Homo sapiens
cagaagggcttatgcagagccgggatattttttacacaaaatcagaggagggcgaccttcaaactattatttgtttttctcctttggcctggaactaatcagcttagcatggatgcctgggtgtcccggtgagatagcgaacccatctcatttgggtgtttaccttttataaaagaaaaaaaaatccatttcttatgagtacattgttatttattctagaacttccctcataaaccgtcagttcatgctatgtaatcctataaagtagtttatttttaaaaatcgttgaaaggataagcagaagatcgcctcttcctggcatgtgtcaaattgctttatatgtagctattctagagcaaaaatgctgactgtccgttgaatattgtcacttgccaagcagagagctgcgcacccctttcacccatctgtgggtcagtatgcagtgtatttggggatatgacacagtttcttatcgcttcccatcacctgtcctgtgtgaattg

SEQ ID NO: 236426 - DNA, 384 bp, Homo sapiens
gccctatgttattgtcatgaattatatgggaagatactcctccccctccactaagcaccaagtttaagatcatttttatggagaaagtatttttctcctctcttttcaggtccttgctttgtgtaagggtctcctgttttaagagttcctaccttagtggtgggtggggtaggtgtatctcttaaggctaacactacttggatgttctctttggattccttccttcgatgttgtgtctgcagacacttcgctttcttaccagctcaagaaggcttcctaggaaatactagccaatactttgactgttgtttaggttctcctttttatcattgaaataaaaagacctgtttaccttcagaaatttcaaaaaatatctagtttgca

SEQ ID NO: 236427 - DNA, 268 bp, Homo sapiens
gggaacaatcattcggcagccccaggagcctggctctgactggccatatggatgatgatgacaacctccaggtggaagaaggaagttcctgcagggaaaagatgataggctaaaaacaatcacaaaagcattaacagatgtcctttataaaaatagatgttttgtgtgcaaaataaggtatgatttgaaaaataagagaaaatttgaagaaaacttagcaaatggtgtttccagtaaaatggagatagtaaaattaattaactgttga

SEQ ID NO: 236428 - DNA, 1730 bp, Homo sapiens
  misc_feature (466)..(466): n is a, c, g, or t
gacaggaaaggggttctatccatgatcttacaattcctaaacagcaacagcatcatggacgtatttgttcctggcgtcataagcctgcatacggtaggcattcagttaataggtactgattggtctaacagaggaagctgggcttgattataaaataaactaggctatgaaatcatgcctcctaaaagctcattaaaggcagcaacacgggatggggactgtaaggaagttgtctcccacctgcctccctcctcagacacacatcattccgcagatgtgaaaacgacccagactctgcccgcatgtggcctcccggaccgggcagtagggccttgcccctaccctcatgaagactgtcggctgtgttacagaactgctgctctgtctctgactcccctcactcccatgctttgttggaaactcaagttgtgaaaccacaaaacacagaaaggaagtggtcaactantgcacatactcaagctatgtagtctcagtttattccattcttgcaggatcattgtaggaaggcataagagtcctgcttactggtgagccactgaacacaaactcccttctcacctctgccttggatcccgccatgcctgaggtctagggctagaagcgttgtttcatccacattaattccggtcttgggcaacgtggctattttctgacctgtctgtcttcccaccctagtggtgaattctctttctgggatctcaactccttctcctgtcacccagctttttccgagcaaccccagtccatctggcatatcattagaatgttaaacctaaaacggtaagccattctgtgaatacctttaagtaacaggatattaaaatgagacttttcctgttttctcagtgctagctgacatctttgagctgagaaaaaaaaatattgttaaaaatgctcatctattctcaggagatgtcatctgctaaggagtgaccaaaaaaatggtccaataaccctgaaaccatcgctcaaatcttagctacgcaaggggagacttgtaaattaatgaggacggcaaggatttcatgagacagagctttcaggctgctaaaatgcttcctcctcccttctcatgtgttttcccctcatcttacgcaaataagagggggccttcagagaattacttggagagctgacctaggacccctaggctttggggaacatagaatgtattagtgtctattgctgctgaaacaaattagcacacatttaacagcttaaaaatagcaaaattactacctcacagttctgtaggttagaagtccagtgggcgcggctggtgtgtgggcttcaagcctcacagggctgaaatcaaggtgttggccaggctgtactccctcctagaggctctaatgaagcatctgtttccaggcctctgcgccttgttggcggaattcagttcaatttgcctgatggactgaggtccctgcttccctgcgggctgtcggcgggaactgccactggctccttgcagcctctctctgattcttgcacaagggcacctacatctcagagccagcgagagtgtgagtgtgtggaatccttctcacgaggcctcatctctctgactttcgtcgggaaatgttctctgcttttaaaggatcatgtaattattttgagcctacccgataatccaggataatcccctcatctaaaaatctgttaccttaaccacatctgcaaagtccctgttgccgtgtaaagagagc

SEQ ID NO: 236429 - DNA, 160 bp, Homo sapiens
  misc_feature (127)..(127): n is a, c, g, or t
cctcaaatcagcctctcctcaaattcggagtctaaggaattttttggggggggtttgtttttgagacagtgtcttgctttgttgtccaggctggaggttgcagtgaacggagattgcgtcactgcantccagcctgcacaacagaacgagacttcacctc

SEQ ID NO: 236430 - DNA, 545 bp, Homo sapiens
ttaaaatccagtaaggttgaggaacttgacattttaaaactgcagttttatttttaactacataagaggctggtcatgtgaaatgtgcactgctatgttggaatggatatgtatgtgacaattaacctcattaaagctctgttgctgtggtaggcattcagttattcctaatagtttattttaggtactatactgctatcctatttgctgaaattataaatactagcaatgtacaataattctcattctttggctgaataaaaacagaaatttaaaggtgctgtgtcacataaacagttaatgcctcagtactaaagttttgaaaaatattcctaaaaacttcacaggcatgaatttttgaaaagaagaagaaaccacatatacacatagaggaatttttaaagactggcattttaaagtatagctggtaaaaatggtatgtatccttatgtgtagaatttaaacttcttgaaaataatctaagctgcaacaatctatgtaactgctcttccacagttttacataaagataagaatttgtcttac

SEQ ID NO: 236431 - DNA, 84 bp, Homo sapiens
agcgtgtggtctcttgtactactgtatgcttttggaatagacaacagaggacctgaaattgcttcctcaaagttactttcaggg

SEQ ID NO: 236432 - DNA, 343 bp, Homo sapiens
gtattctagagattttgatatgttttgtttctgttttcaaagaattttttaatctctaccttgacttcattgtttactcgacaggagcaagttgtttaattttcatgctattgtgtggttttgagagatcttgttgatatctatttttatttcactttggtctgagagtatggttggtataaggtaagtgtctttagctcaacttaaaaaatgaggtaaaggaagctcagtaatagtaagttccccaaggtcactcaggtatcaagggctacagcaaggattataaatgagtgtttttcactcctaagcatatgcattttttactaagccacattacctttaa

SEQ ID NO: 236433 - DNA, 451 bp, Homo sapiens
aaggggctgtaaggtgccgcaacgtgtgagtcggtgggttctgatgtgtgacagctcggggcactccccccaccgccagggaacaggaatgaggagccccccactcccagtgtctggcaggtaggaggccgccactggactgtgtgcccaggtgccaccagaccccgagggcccacggatacggcacatgacctttaatgaccaacgcctgtgcagcaggtgctgaggggccccagccccgagcaaggctgggttcctggaaccccccctccggtaggaggatttgcagctgaggaattcttaagaaattttttggtagcaaacaaagcatggggctggacggtggacctatgagtgccctcacatgaatgcggatatagacagaaaagacggcaaacatttgtgaacaaaaggaatggctcctgcgtattgaacttccacttaccggccc

SEQ ID NO: 236434 - DNA, 383 bp, Homo sapiens
ttccaatggacaaaaactgtttcctcttctataatgagttaactaaaacggaacaaatgtcaataatgtcaacaaacctttgtaaaatacaccaagcacccagttatttctaatattctccccttgttaaatttcatttgctgacacagtaaagaactggaacacagaaatatgaccttctactttaacaatgcagtgtcttcatagctaagacaatagagttgattccccttaagatgaaaaatgcaagtgatgttcttctcttgtccaataatttctctagccttttgggtaatcatgttccgaaggccatgaatattttatagttgtgggatctgaactaactttaaagcctatgctccttcttaaacagtaaactattt

SEQ ID NO: 236435 - DNA, 443 bp, Homo sapiens
cttggtctctaacccaggctggagttcattggcacaatctcagctcattacagccttgacctcctggactcaagccatcctcccacctcggccgcccaagtagctgaaaccacagctcacaattctctgatgggcttgcctactcatttagcccttcatgaagtccctgagctgcctttttcatctggagtctccatgcacaacggtgaaaagtgcatcttttatctcacctgagacagtgtcttgctgtatcacaaagccagatccagtgctgggatcacagcttgttgcagcctccaactcctgggctcatggaatcctcttgcctcagcttccctagcagctggaactacagaaaaacagacatttgaaaggagtactttgccatcgtttttatttgttaatgttcagaaattaataaataatacttcataatttaaaaa

SEQ ID NO: 236436 - DNA, 119 bp, Homo sapiens
agcagacacagataacttgggcatctctctggcttcaatcactgctcaatctaatatagttcccaccctgggtgttcagagtctcttatttggagttagacccagctggggcttgaaac

SEQ ID NO: 236437 - DNA, 659 bp, Homo sapiens
tttggagacagagtcttgctctttcgcccaggctggagtgcagtggtgtgatctcggctcactgcaacgtccacctcccgggttcaggcgatttgtgtgtctcagcctcttgagtagctgggattacaggcatgtaccaccacacctggctaattttgtatacggcatctttttttaaagcctctccagtgatctaacctgcagggctgagaaccacggctggacagcacctagggccatacggactactctagaaatctcctccacctggctttggtgtagaagctggaggaatttgtgccctgctctagctttcaccaggttgagggtgacactgggccactcttctgctacttcttggagctgagttggaggcaaaagaccagccccagccatgctgctggtgatgacagttctagatgcctccagcctctggggctggtgccctggcaccatcctgggctgggctcacatgactcaggagcctggctccaccaagcctggctaaatcccgcactgggggctgggcctggagcacagccccatgtcccacgccatctggctcacctcctttcctctccaaaagcctgacaatggcattgaataagaggctgttccacctcaggggaagatagtaactcaggaagcaaaaaatgaat

SEQ ID NO: 236438 - DNA, 301 bp, Homo sapiens
cgaatgcagaaattccaaagctaaacgtaactaggaagagttagttttagtaaaaagaaaaaagtcagttaatgaccagttaatattatgaaaattatctttttccagttggatgcatgtgagtgtcttatcctgcacagttttaaagctggtccaacttgttttatgtttcataaatgctatggttaggactgatcttgctaacctcaactttattttctccccacgatattttcatttgcttccaatagtgtcagaggtgcacagattcttttatcaatacattttatacacgtaccaa

SEQ ID NO: 236439 - DNA, 290 bp, Homo sapiens
gggcagcaaacaggaccagaaataaccaaaagaaggggggagccctaaaaataggcctacacttttgcttactcactatctagttatcctgagtacttttctaaattaatttcaaggaatatatctacaaaaaggtgtcttacagtttgcaagtcaggattattttttgcctaaaagtataaaagtttcactataaaattttcccttatacataagaaagtgttactattagttaactccaaggagaggaagtgagggtccaggataggaagtagatttttcagtgtata

SEQ ID NO: 236440 - DNA, 473 bp, Homo sapiens
cggctcccgagctcgccgcgcggggctgttgccggttccactgattccagcgcgcccgagaggagcctccatccccgaggctcgggatcggaggggggaccaaggcgagggcgaaatggcccgatgacaaaggaaatgtgatcccccttctctgccaaggtttcagagaggacggacgtgaggaggaggaggggcgcagggcgcgcgcggagctcggatagcattgcacgacggcccgcgcggagcgggtacatctaatatcttcctgccgatgaataattcagggcggcccgcggggacctgcggccccgcgcgctaagccgaaggggaaggagcgtgcgtgaggcgcccaggccaggcgaggcgggggcacgagggctccgggccgcgtggggcgcgcgtgcgtgttaagcgcgggcagccgcggcccggctgggcaggcgcgcggaagactcgaggcgcgtgggacgcgc

SEQ ID NO: 236441 - DNA, 266 bp, Homo sapiens
agtagagatgacgttttgccatgttggccaggctgggccactgtattttaaaaagtaaagcctaacacgttttcttttcatcccagtggaaactatcttccgattcttcaagaaaactttactaccactggggattccaaggtagattcaaggtctatatattatttatttgcatcagttactggggaattatttgactgatcctcaaagccaaatcctgcccatgaagttaaaaagtgagataccaataaaagtacaaaacaggt

SEQ ID NO: 236442 - DNA, 423 bp, Homo sapiens
gaacagagtctgctttgtcaagttaggtaatcagactgactcaggaataaagcatggaagtaaagccactgtattgttttgttgtttttgtttttggtaaagtttctaaactggcttcaaaattagtaaatttcagaagaattcctggccgggctcagtggctcgcgcctgtaatcccagcacttcgggaggccgaggcaggcagatcacgaggtcaggagatcgagaccatcctggctaacacagtgaaaccccgtctctactaaaaatacaaaaaattagctgggcaaggtggcgggtgcctgtagtcccagctactcggcagactgaggcaggagaatggcgtgaaccccgggggcagagcctgcagtgagccgagatcacaccactgcactccagcctgggcgatagcgagactccgtc

SEQ ID NO: 236443 - DNA, 456 bp, Homo sapiens
tggagaacaaaggaggagaccattggccaaagagaggcatttccattttgttggaacctgctgaccaccaacccatagcattttttccctttcttccttgctaatccaatcgcagattcattgaggaggtgagaggtcctgagatccaggctggaagaggagtgattggtctacctggttctcaagggataatgttgccccctagaggacattttggaaattattaaggaaaattaacgactggttttttggttgtcatctggttctcaagggaacagtattgcttccttgggagaatttggaaacttaccttttttcatcgtcacaatggtgaagggtttgttactgggattagaggacaaggaccagacatgccaagatgttctacaatatagcattcctaattaataatcacctaatgaataaagctcagatagcacttaaaaagtggggaaa

SEQ ID NO: 236444 - DNA, 362 bp, Homo sapiens
caccttgacacatatttgcatatggtactaacaatggcaaagaagataaattacttaatgatattcagagtgaattatttaggaagagaataggatggaaaaggggataagatataaatactaaatcaagtagaaataggactttatgatcctttcaagagacttttcccaagtgagttatattttccaagttctgtgtaaaagatattcaggagtaatatgggagagaaggctaaatatattggctattgcactccaaagcagaaaatcctatgaaatatttaagtctgggagcactgaacaccagcagctaactttccaggaatcagaaacagattctttagaggattacttcctgtgca

SEQ ID NO: 236445 - DNA, 166 bp, Homo sapiens
tgttatgattctgtgaatatactaaaaaccacttaattttatacttgaaaaggatgaattttctggtttgtgaattagatctcaataaagctggtaataaaatcttcaaaactaactacctgggattatttctgctttttacaacttggctttaatttttcataaa

SEQ ID NO: 236446 - DNA, 1937 bp, Homo sapiens
agctgcagatgggacacagggcatcaagtccctagactgcacacagtgtgggaggccctgggcctggccaacaaaaccattgttttctcctgaccctttgggcctgtaatggttggggctgctgtgaagatctctcacatgcccttgagacattttctggggagaaattcaagctagctgcagaaattagcataagtaatgaggagctgaatgttaatccccaaaacaatggggaaaatgtctccagggcatgtcagaggtcttgacagcagcccttcccatcacaggcccagaggcctaggaggaaaagatgatttcatgggccaggccctgggctctcctgctctgtgcagactgcagacttggtatcctgcattccagaagctccagccatgcctaaaagaagccaaggtacagcttgggttttggcttcaaagggtggaagtccaaggtattggcagcttccatggggtgttgagcctgcaagggcacagaagtcaactattgaggttggggaacctccacctagatttcaaaagatgtatggaaatgccggatgaccaggcagaagtttgctgcattgggggcccctcatggagaacctctgctagggcagtgtggaagggaaatgtggggttggagcccccacacagagtccctactgtagcactgcctagtggagctgtgagaagagggccactgtcctccagacccctgaatggtagatccactgacagcttgcattgtgcacctgaaaaagctgcagacactcaatgccaacccatgagagcagctgggagggaggctataccctgcaaaaccacaggagcagactgcccaagactatgtgaacctgcctcttgcatcagtttgacctgaatgtaagacatggagtcaaaggtgatcattttggagctttaagagttgactgtcctgctggatttcatacttgcatgggccctgtaatccctttgttttggccaatgtctcccatttggaatggctgcatttaggcaatgtctctgtacctgcattgtatctaggaagtaactaattttctttttattttacagactcataggcagaagggacttgtctcagatgagactttggactgtggactttttgaattaatgctgaaatgagctgagactttgggggactgttgggaaggcatgattggttttgaaatgtgaagatgtgagatttgggaggagccaggggcagaattatatgatctgactctgtgtccccacccaaatctcatcttgtagctcccataatttccacttgttgtgggagagacccagtgggagatgattgaattatgtgggtgggtctttcttgtgctattctcatgatacttaatgggtctcatgagatctgatggttttaaaaatgggagttaccctgcaaaagctctctgcctcctgccatccatataagatgtgacttgctcctccttgccttccaccatgattgtgaggcttcctcatccatgttgaactgtgagttctccattaaccctcttttgtaaattgccaagtttttggtatgtctttatcagcaatgtgaaaatggactaatacagtcaggcatgatgtttcatacctgcagtcccagctatgtgaaagctaaggtggaagatttgctcaaaacctggccaggcactgtggctcacgcctgtaatcccagcactttgggaggccaaggcgggtggatcacaaggtcaggagttcaagatcagtctggccaacatagagaaaccccatctctactgaaaatacaaaaaattagccaggtgtggtggtgtgtgcctgtaatcccagctactcgagaggctaaggcaggagaattgtgtgaactcaggaggtggaggttgcagtgagctgagatggagccattgcactttagcccaggtgacagtgcaacactcc

SEQ ID NO: 236447 - DNA, 349 bp, Homo sapiens
agtggttccttcctttttattgttgaatagtatttctatggtgtggatgtactatggtttatttaatcatttacctgttgaagggcatttatttatatctataaatacagtccacttactgtatttcattatctctgagatggaaacttgaaataaaaataatttttattttccattcttgtttctgtttttctgtttttactccacccagcccccctaaagtttttaacatgattgcttttctgaaatcaggatggctcttagagtccacagtgtgctattcaggccatgacacaggtgaattacctgtgcaggtgtgaacaaccaaatgaccagtgaacacatgtaa

SEQ ID NO: 236448 - DNA, 512 bp, Homo sapiens
ctgcacctggccagttctcctattttaaatttatttttattttattgtggtaagaacacttgatgtgagatttaccattttaacaaagttttaagtgtacaatgcattgtccagtttctttttctcctacatgtaggatttgggtacttactgagtacactgtgcccaatgctaaattaagtgcttggatagagaaaggagatttgaaaagttagaaggcttgacttttaccttcgaaaacttcatatcgaagaaaggacaccatgaagatgtgacatactcagagaacaatcatcattccaatgaattgctggaagatcatttagaccataagaactggtcttcaaattgcacttggatataagccccgtggggcaggaagttttgttcattgctggattccccaatgcctagaacagtgccaggcatagttggcactcattccttcatatttattgaatcagccaataaagtagtgcagtgttgcttttgagggaaggaatatgaaggct

SEQ ID NO: 236449 - DNA, 502 bp, Homo sapiens
caagttttaataggatattgaacttggtgattcacaaactaaacttgattgggttttatccattgctaagattatattaccgtgaagtttttcaatctcagcacgcactgttgatattttgggctggattatattttgtcattgtaggggtgggggctgtcttgtgcattgaaagatactttgcagcatccttggcttctccccactaggtgccgatagcacccccttctcctagttgtgacaaccaaaaatgtctcagacatagtcagatgttcaatgggaggtaagatcatccccagttgataatcactggcagtgattctcacttcttagaacaaattaaaataatgtatagaattttcttaaattttgatttattcttctatacaaattaaaaaaccctttacatatacatatatacacacatatatatgtttaaaatactgtaaaagaacaagtagccaataaaatgagtaggagactgctagtccctgaaatgtac

SEQ ID NO: 236450 - DNA, 441 bp, Homo sapiens
gaggctatttcagtcgttttaaattaaagagaaaattatactgtattagttcattcttacattgctgtaaagaactacctgagactaggtaatttgtaaagataaaaggtttaattgactcacagttctgcaggctgtacaggaagcatgaatgggaggcctcaggaaacttacaatcatagcagaagtcatagaggaagtgagcacatcttcacatgtggaagtgtgagagagagagtgcaaaggggaaagtgcaacacactttcaaaaaccagatcttgtgagaactcactatcacaagaacagcaaggggaaaaccacccccacgatccagtcacctcccaccaggtccctcccctgacattgagtattatgattcaacatgagatttgggtggggacacagtgcgaaaccatatcattcacaaataacaatacatgg

SEQ ID NO: 236451 - DNA, 491 bp, Homo sapiens
tggcttcctagtcctgttctcttgggggaaacaagactcttatctgactttctctgacttctgtccctgcttgggcaactgaaaatgacaagtaggaaatactggcttgctttgagccccctttggttttgctgggaaggtggaaactttggcagacggggaaggacagatgggaaccccaggaggaagggccattgctctgatggtggagcgcttcctcttctgttcttttgtgtgttctaaaacgaggtatgtgccatgggagagttgatttcttttccagtgttgacactgagatgttctcgggctggaatcccctagccaccatgaccagggctgtagggggcgcaggtgcccaggttctctgtatggtgtcagcagcacctcccggccagcattgacccaggaattccacatcagctggtttagtgggggccgctccctggggctgagggtgaggaattgttttactagtgtctccagtggaaatg

SEQ ID NO: 236452 - DNA, 788 bp, Homo sapiens
taaatataattaaatcttgtgatcaaatatatgaataagtagagaaaagatagatctcctatttagagttccaaataatttaagtagtgggtttttatagtgactttttttccaaaaagtaccacatggaagggggagaagagtttctttacagtggagaaatatgacaaagacacctcagccatgtgaccaaaatcaacattattcaaaaagaaactgaatattaaaacaaacctttccttaatagtaaaaaaaaattaaaattaaaattaacatcatcagtgatgtcatgttgatggtatgcattcttggtaggatgaaaatggcacattacccctgtggtcttcctccacacaatccataacctccatctaaccatgagagaaaaaatcaaatgaatcctaattgaggaacattatccaaaatacatgaccattactcctgaaaactctcagggtcatcaaaaacaagtactgtctgagcgactgtcacagccgagaggagcttaaagaggcatgaagactagggccaggcacggtggctcacgtctgtaatcccagcactttgagaggctgaggcgggagtatcacctgaggtcaggagtttaagaccagcctggccaacatggtgaaacccggtctttactaaaaacacaaaaaaattagctgggcatggtggcagctacttgggaggctgaggcaggagaattgcttgaaccagggagacagaggttgcagaaagctgagatcacgccattgcactccagcctgagcagcgagagtgaaact

SEQ ID NO: 236453 - DNA, 343 bp, Homo sapiens
cggttttgcaggttatatggtcagtggcacaactattcagtttggccagtatagcaggaaagcagccacagacacatgtgaacaaatgtgcatggctgggaagtaggcagagggtcagatttggcccacagactatagttcaacagcccttaacttagaggaaaaggatttaaagccctgttatccaaatttctaagccatatggtcacttagattatctagttggtttttataaattattttcaaattgtaaaaggaaagaagaccagcaagccaagcaaaagtaatgtaaaaacaataaaagtttattgagccactgcacccagctgtagtagccatatta

SEQ ID NO: 236454 - DNA, 259 bp, Homo sapiens
ccccattcttggatctccccatcttcaggggcctcagaccctggtgagggcttctttgtatcacaccatcttgctacagatccctcagcagtgtgcgtgtgtgtgtgtgcgtgtgcacgtgtgtgcgcatgtgtgtgtgcatatcatttcttcaacactcataatcattttaagtgctttgtcttacaagcttctttcattttaattctcacaacaatcccatgaggtaactattattacctcctccgtaataatgaga

SEQ ID NO: 236455 - DNA, 621 bp, Homo sapiens
cattcttaataatttgatgggtattcatttcttccctaaatttatatgtctagaactagagctagagtgtatgcctacatacacacacacacacacccatacatatatattcaaacataatatatgtatatccacatgtattcaaacacagaattatgtttagataattatggttatatgctggtatgccagagccagactgcctggcttcggttccaggccctagttggatagctttgggctactcagcctctttatgcctggacttcttcatctttgaaatgggataataataatacttatcccataaagttattgtgagaattaaatgaaataatatatgaaaagcccttagaacaggcattgacacattgtgaaggtaatgtattagctattttgatgattatgcattttgtctgcaacttgatttttatttaacatatgtgggaaagtagacaaacatagccattttcaatgattccataatattccatagcacgagtataccattgtttatcgaaccatttctctcttgagaaacattgcagattttttttgcagtttctacgattacaaataatgctgcaataaacatctttctacatatagtctttataaatt

SEQ ID NO: 236456 - DNA, 471 bp, Homo sapiens
tctacataatttttatacatgtattatccctgaaaaactctacaaagataagcattcgtaagagaaggtatctcatgtgctcatatctaaaatattaaccttctgtctggagcttaatacccaaactgcagagtcaaccaggggaatcccagacttagcaagatacaagaatatttgttaggtaatatactaggattgaaggcctaaaattaagaatagcttcacaaatagaaagaaggggaaattgtaggttaagtaatccaacattattagggtatagttacagtttagagataaatgagagcatataaaacatttcatgaggcaacagcaatagctgtttagaatttgacaaatctagttagatttcccataccaatttcacttccatttattaatatgtgtcttcagtatattaaaaaaagacatttagtaatcagctttttagagacacatataaaattaaaatta

SEQ ID NO: 236457 - DNA, 687 bp, Homo sapiens
gtagagatgggggtttcatcctgttggtcaggctggtcttgaactcctgacctcaagtgatctgcctaccttggcctcccaaaaggctgagattacaggcatgagccactgcgccaggccttctttcttttctttttttctttctttttttttttgagacatcatttagctgtgctgaggggttcttaaataggcagctcagaaaattgttttcctttgtcagccacataaattcagcagaggctcttggagggtccctgctggtgaggggtgaggccagcagtggaactctgatttggtttttgctgagctggtggttgaaaggaatcctactacatcggggttataatagggaagatacattttagaatatgcccagtggagccatcggatgctgcatcgtccccagagagccaagtcatcgtgggccaagctcccatccccatgtctggcctcaactgcaggcccagatgttgacagctgcctctggagggttatgggagcctgtgaatgccaacatccccattgcctgcagcggctgctcccatcctggcttcctggtgggacttttccatgaattggggaatctgctttctgattccaaggcctattaaaatttctgagcattgcccatttcttttgctttatctgtaggacatgggctgtttttaaagaacctcacaaatg

SEQ ID NO: 236458 - DNA, 575 bp, Homo sapiens
tgtgtcattctggatgccatcaggagagagacatcacacagtcagcaggcagggaaagttcaacataagcattttgaagtgtaacagggaattgaagctgtgatgaactggctagtaagaagtaaataaataaataaataaacaaataaaaatctaaagaatataggactagcagagtcttcaggctgagatggagagcccaaggaagaggccctcacctctccactccattcctgtccagggctgagaaccacaccgtgcaggacaggacatggccacaatgaacagtgtacatttagaagtgagaggaaataaaggcaatcagcaataaccagttcgggttccatgcctctcatccaccctataatccaccctgtgcaaacaaactcatttttcaagactcagttcaaataccaccttttccacaaagacttttcctcttctgcgtctatccaggaaaaaactgattcctcttcctttgtgattgtagaatctgccccctccttgacacacatacctataacctcagtcatacttctactggggtacttgtttacccctacctagggttgcca

SEQ ID NO: 236459 - DNA, 266 bp, Homo sapiens
gtggttgtgatgatttgaaaactgtttcttaaccttgctacaccttggttggtactgtatttggaaacaatttattttcgccttgacaacaaaacttaccattatttttagagaaatttcatttgctagaaagcatcatttgtattattttatactcatgctgcctgggtatatggaatgaaattaaatgcctgatgtttgcattacatatttttactaaatgtgtctcacatgcaatagggtgaaatacagcttttattgcatta

SEQ ID NO: 236460 - DNA, 2874 bp, Homo sapiens
  misc_feature (1535)..(1535): n is a, c, g, or t
aaaaggcatctgactgactgggggcaccattcctttcttgaatcatcttggatctgggagaaggaaaatgcttctttcttatttctgtttctttctcaagagattctccccaatttctttgcaggtatctttttactcttcaaataaagaaggatttggctctaggaaggcttccatgcagtgacaactgtacagcgttgatggtatctcacatcttacaatcagaacttggagactttcatgaagaaacagataggaagcatctggcacaaactcggtacttaccaaaccaagactgtttagagggcaagatcatgcactttcatcagaagcacattggcaggagcccagctgaatctgacattctgctactggacatagcaaggaagctggatatgtatggcatcaggcctcaccccgccagtgatggtgaagggatgcagattcacctggctgttgctcacatgggagtactggtgttacggggaaatacaaagatcaatacttttaactgggctaaaatccgcaagttgagttttaagagaaagcattttctcatcaaacttcatgccaatatcttggtgttgtgcaaggataccttggagttcaccatggccagccgagatgcctgcaaggctttctggaagacttgtgtggaataccatgctttcttcaggctttcggaagagcccaaatcaaagcccaaaaccctactctgcagcaagggttccagtttccgctatagtggacgaacccaaaggcaacttttggaatatgggagaaaagggaggctgaagagcttgccatttgaaaggaaacattacccatctcagtaccatgaacgacagtgcaggtcctcaccagacctcctctctgatgtgtcaaaacaagtggaagatttgagactagcatatggtggtggctactaccaaaatgtgaatggagtgcacgcatctgagccagtgctggagagtaggaggaggaattctgcattggaggtgacatttgcaactgagctggagcattccaaaccagaggcggatcccacattgctacatcagtcccaaagcagttcctctttcccttttatttatatggaccctgtctttaacactgagcccaatcctaaccctgatcccagagacatttttcagagaggagttctctaagctccttccaaacaagctgtaagttttctggtaatcacatgagcatatattctggcctcacaagcaaagtgcgtccagcaaagcagctaacttacacggatgtgccctatattccttgtacaggtcagcaggttggtattatgcctccccaggtctttttttatgtggacaagccaccccaggtgcccagatggtccccaattagagcagaggaaaggacaagtccacatagctatgtagagcccactgcaatgaagccagctgaaagaagcccaaggaatatcagaatgaagagctttcagcaagacctgcaagtactccaagaagctatagccaggactagcggtaggagcaacatcaatgtangtctagaagaggaagacccaaatttggaagatgcatttgtatgtaacattcaagagcaaacccctaaaaggtcccagagccaatcagacatgaaaactattcgttttccttttgggtcagaatttagacctttagggccttgtcctgctctcagtcataaagcagacctgtttacggatatgtttgcagagcaggagttgccagcagttctaatggatcaaagtacagcagaaaggtatgtagctagtgaatccagtgattctgaatcagagattcttaaaccagactactatgctttgtatggcaaagaaataaggtcacccatggccagaatccgcctgtcttctggtagtctacagttagatgaagaagatgaagatgcttatttcaacacaccaactgctgaagacaggacttcactaaaaccatgtaattactttttagcttaaaagtgtgaacctatggacatttctgagccagttccatgttaccgacttaggcagaaaataatgaagttgtagaaaccattttcttggttactacatattcattggtattaaggaaatctcattttggatgcctgccttatgaaagatccagctgttgcctcattccttgagtttcactcttccattacctctgaagggactttagaacatgccctctcctcaccagcactgtggcaaggcaaggtgggtatttgtcatctccactgcatacttcctcatagagacattgtgagtgaaggtcaggctcttcaatgctgaagaatggtgacagtatgggttggcatatggaattagcgtctaatggcatttagtgatttagtagattgtgactgtgttgatctttgtgctcttaaacaacactgaacaaatatttcagtctttactatttgtgtggggcccagtagaaatggtcttgtaatatgctaaatacttccatttttataacatataaaagcagagcatggccctcctacagcctcaggaaggaggtggtggcatagatcctctcaagagaatacaggtttagaattaatctaggacttggcagaattctaaacctaggaaattcatgaattaaatcaatttctagagccagacataaaccagatgaaagtatcatgttgttttacttataacttctatattcttatctactatatctagtaaaagagaaacattatcaggtcagtttgtttatctaatatttcctgccagaatttattttttgtcatagcttcttgcatgtatgcaggccaggaaatgaatgttattgtaataaagtgtgatggaaaatccaggtaattaaaaaataaattataactatgttcttc

SEQ ID NO: 236461 - DNA, 668 bp, Homo sapiens
aaaaaaaaaaaaaaggaaaaaaagaaacaggacggctgtgataaaaagttcctctttttacccgaacagttgagactggttagagccacgacaactgacaaaagcagccaaggaaaggaagacagcgggaagttcaccgcccatttccagaagacatgaatattcttcccctcgctgttcacctccagccccttcagtacagaaaccctacatttagcccctgcccgctcacctgttgagaagttgaactgtgggccaagctcctgcttctcagtccgtggtcactgaataaagtcggcttcggtttcatgtatcggcttcgtgacaccaaacagggaaggaccccatcttttgggcaaccggctttctcagtagcatgtggacaagtctgagagctaaggactcccgggaagacccactcacaggaggtctccatgctcttgtgaattttacttcctggaatgctgccaggttctcacagcgaaaatcagagccccctcagggctctagcagagacaggggagaagggaccattttgaaatacgccagagtgctctgccctctttaggttctcagcaaaccaacacaggaacaggaaaccaaacaccccattttctcactcataagtgggagttgacaatgaaagcacatggacacagggaggggaa

SEQ ID NO: 236462 - DNA, 514 bp, Homo sapiens
aaaaaaaaaaaaaaggaaaaaaagaaacaggacggctgtgataaaaagttcctctttttacccgaacagttgagactggttagagccacgacaactgacaaaagcagccaaggaaaggaagacagcgggaagttcaccgcccatttccagaagacatgaatattcttcccctcgctgttcacctccagccccttcagtacagaaaccctacatttagcccctgcccgctcacctgttgagaagttgaactgtgggccaagctcctgcttctcagtccgtggtcactgaataaagtcggcttcggtttcatgtatcggcttcgtgacaccaaacagggaaggaccccatcttttgggcaaccggctttctcagtagcatgtggacaagtctgagagctaaggactcccgggaagacccactcacaggaggtctccatgctcttgtgaattttacttcctggaatgctgccaggttctcacagcgtcagagcgccagagtgctctgccctctttgg

SEQ ID NO: 236463 - DNA, 614 bp, Homo sapiens
aaaaaaaaaaaaaaggaaaaaaagaaacaggacggctgtgataaaaagttcctctttttacccgaacagttgagactggttagagccacgacaactgacacatgaatattcttcccctcgctgttcacctccagccccttcagtacagaaaccctacatttagcccctgcccgctcacctgttgagaagttgaactgtgggccaagctcctgcttctcagtccgtggtcactgaataaagtcggcttcggtttcatgtatcggcttcgtgacaccaaacagggaaggaccccatcttttgggcaaccggctttctcagtagcatgtggacaagtctgagagctaaggactcccgggaagacccactcacaggaggtctccatgctcttgtgaattttacttcctggaatgctgccaggttctcacagcgaaaatcagagccccctcagggctctagcagagacaggggagaagggaccattttgaaatacgccagagtgctctgccctctttaggttctcagcaaaccaacacaggaacaggaaaccaaacaccccattttctcactcataagtgggagttgacaatgaaagcacatggacacagggaggggaa

SEQ ID NO: 236464 - DNA, 177 bp, Homo sapiens
gtatgctaaactttattttgaagtgtagacattggggaacgcaacaaaaattgaagaaattaaggaatgcaacgaactatggtaaaaactgtaaaagaatggttactgttgctcagtttagtgtgagcttcaagctgtggattcactaagttgggagtggaggggcccaccaaggat

SEQ ID NO: 236465 - DNA, 470 bp, Homo sapiens
tgatccatattttcttctttctcgccttagttttatgcccataagctcccacatacaaaggatgggtatcttgctttgactagtgccatgtagtaattggggcttttgttctggtggctgccatacttattggtaagaggaaatatgactaaggtggaattagggtatgattagaacaacactataatgagatgtataatctgctcagtgattgctaacttgcttattctctgacatttttggcatatggctacatagaggatctcgcctgttgaataatacaattctccactcaggtctcacatcctgtccttctttgacttcatagcacctctacacatctgctttttccttttgtcttagaaactgtgctgtgttaatgcaatggaaatttcatttatcatcacaagtgaaaatatatggctatgtagattcatggaaatatttacatgaaataatttaagtgataa

SEQ ID NO: 236466 - DNA, 519 bp, Homo sapiens
atgctatttttgttaagtaagacctatggctttcaagtccaaataaatatacttgtgaagaaaaaagtatctaatgagggattaagtaaatgcggaacttaaaatgaagtttcagtggggcctcactttgctttctgaaatgaaactatttaatttcccataacatggtttatgatataaaaataaggttctggtattatagtagagaaggactgtccataccttatggatgctttactgttgggatttaagtttagctggtgatttctcactgccttttcacttgatgtcctcccctggggaaggccactgctgctttgtaccctgctctgtacagcagggctataaatccctcatacaaatttcccaacgtggcagggcactttcagttgttatttagtggatactgagtgtggcttggaagcaggaaagagaagttacagcctcttccagcccaacaatgtcttcttctttttcttcttttttttttttgagatggagtctcgctctatcacccag

SEQ ID NO: 236467 - DNA, 637 bp, Homo sapiens
gtggcttgtgtctgtaatcccagctacttgggaggctaagtcaggaggactgcttgaggccagtagttcgagaccagactgggcaacataataagactgcatctctaaaaaaattttaaaaattagctgagcgtgggtaatgtgcacgtagtcccagctgcttgggaggttgaggctgaaggattgcttgagcctaggagtttgaggctacagtgaggtgtgatcatgccactgcactccagcctggatgacaaagggagaccctgtctcttaaaagaattttcttattataatagatacatttatctctgatttactcagtactataaccccatttaagtagtttgaagagattagggttaagtcctactgtttttagtatgactacagtagttgccactttaaacaatttttgaaatactttaggcataaaaaaggatatagaacaatataataaattccatatacctactacctaaagtaataaaaatcacagttattgttgaagcttattgggcaccccttccccatcctagtcctctcccttcccagctgtgaccattattctcaatttgatatttattctctccctgcatttttacaaactttttctgtatatatatatgtatccactgaa

SEQ ID NO: 236468 - DNA, 324 bp, Homo sapiens
atgcttgtcactggatttagggttcaccttgataactcagattgttatacataagatttttttactcaattacatctgcaaagacccttttttccaaataagataacattcacaaactccagggattagggtgtgggcatatctttctgggacccactattcaactgaccacaccaccttaaccaagtcatcaaaattaacatcctcactcatcagacacattgacgttatgaatccactgaagtaatgcactgataaggacaatgtcatttctgtgggtttcttgccaaaaatgtataaccattctaatcatgaaaaaatatg

SEQ ID NO: 236469 - DNA, 447 bp, Homo sapiens
acctcctgggagttgttcctgggtcagaggggcttactgtctacccaggagccttgggcaccctgccctctgcatctgtcaccacccagagctccttcctggtcagcaacacccttaggcgtgagagccctcacacgagctgcagacaaggcgagtcccttctggcagagctatggagttcttcctttttgcagcctaccgctcctgggcaagagctccgtgtcaggacaccagagatggggcaggagcagcttcagcttctcaggtgacatctctctctactagcaggagaggggcgtgcctttagttgtcttggctcattgaaacctgtgccagcatttttttattaagctccaaaaatatgcattaatgagatataaagtgctaccatggagaatgtcccaggtacagtgggaaaagcagtcgtctgccgtataccaacataca

SEQ ID NO: 236470 - DNA, 417 bp, Homo sapiens
taacatataaacatatttttagctgttgtttttaagtaatgtttaagcagttgttttaaagtaatcaattactgaaattattgatttatttggattcattaatatcattttttaaaaatctctttgggccgggtgcggtggctcacacctgtaatcccagcactttgggaggccgaggcaggcggatcacgaggtcaggggatcaagaccatcctggccaacatgaggaaactctgttcctattaaaaatacaaaaattacctgggcatggtggcgcatgactgtaatcccagctactcgggaggctgaggcaggagaatcacttgaaccagggagttggaggttgcgatgagctgagatcgcgccaccgtactccagcctgggtgacagagccaggctctgtctcaaaacaaaaaa

SEQ ID NO: 236471 - DNA, 1728 bp, Homo sapiens
gaaaatatgtactaattaaaagagggaaaagagtaactttacagtggatgaagcctggcaatcatcactttaagcaagtggtcagagttaatattatcagtaatggtcaaatcaaaaccatatgcaagaagactctaaaatgcaagaagactcctgaagtacttcttaccaaagatgtagaacttaaattcagtcataacaatacatgagacaaacccaagttagagcacagtctgcaaaataactggcctgtaatcttcaaatgcatcaagatcatgaaagacaaggaaagagtgaagagctgctccagttggaagagacttaaaactaaatgcaatgtatgatcctagattggatctttttgctctaaggacattaatgggccagttagtgatatttgaaggggatccgagggttccattgtagtaatatatcagtgttaatttttaaatttttattaggttgggattattttggaaaataccattattcatagcgaatacaaagtagaatatttggggatgataatgcatgattacaacaaatgtttcaggagaaatatgatctttgtagtggtcttgcaacttttctgtaagtctgaaattgtttatgcataaaaggttaaaaaaaggttaaattttgtttttataactaataatggattagggtcatgtgaaagtactttagaggaaatgagacttttgagaacatcatccctgaagacgttgaaacactgagttacctcatggataatttaatagggtatgcagctgatttttctaccttaatttcttgtttgcagtatctacccatacttagaattgtctggtgttaaaatatgcccactgggactttcatgaaattcttttgattttctagaaaattcagtttcaaaggattttttaaatagatattttaagtttggtgtcaacttagataaaatctgtttggagtcccagtgtaagttttagtaatgtgtccaatctgtttattgaaatagtataactttagaatactttctttggagagatgaagattggtatgttatagttcaattcaaagttgttctttctattatgatctattttataattcataaaatctatcttatgattgtcatcataagtgcaatttgttttttgccccattctacctcagaaactaagtatctgggcatcaataacaattggtagtagtgtttgctgctaagccaagtttcaccagtacagtgtggaattattttattgttttttctgtgaacattgtatctgctgttactaggttattgtgaggtattgggccttcatagaaattgcctggaacccttgttcactaaagcctgttacactttttattctctgtgcgtgtaatcagagacttattgatactgacacattcaaggggcattattgatcatttagattgctctaagacctaaggagtcttggccggatgcggtgcctcacgcctgtaatcccagcactatgggaggccgaggcgggtggatcacctgaggtcaggagttcgagatcagcctggccaacatggtgaaaccccgtctctactaaaaatgcgaaaattagctgggcatggtggcgggcgcctgtgattccagctactcgggaggctgagacaggagaatcgcctgaacccgggaggcagaggttgcagtgagccaagactgtgccattgcattccggcctgggtaacagagcgagactccatctc

SEQ ID NO: 236472 - DNA, 409 bp, Homo sapiens
gagacactgttgatattgtaactaaattctattgtgtcctattcaacatgaacttagacttatcgttatcacttatacattttatttgtatctattaagttaagaatttttgtttaatcctcttaaaaatctttgggtgatgaaaatgtcctggaattaggtagtggtgatagttcataaccttatgaaatactaaaaaccactgaattgtacactttaagaaaaatcttttcttctttaagtttatagaaaaaaaggctttaaaaaatagttgtagtaaaatataaagaccacaaagaagcccaaaaatgctgaactaatcttaaaaaagatggtttcacataatatgaaataaagtaatagctacacttattttcttttccttgacagtgatacttatgattgaacc

SEQ ID NO: 236473 - DNA, 515 bp, Homo sapiens
tgccgcactgtataaatatgccctgaaagtgaccttgtgtgatttctgagactaagactataagaagcgttgctgctttcacttaggccttttggaaagttctctactgacatgcccactctgtgggaagccacttgtcatgaagaagtcatactaccttaagaccacaatgtgttgaaagtgagtctagccaactctcatctgttccagccatcccagcccagggaataaatatgtgagtaaaggagctagctccacaggagacaccatgtggacaaaaacagaggctccatacatagggctttatttaagttgtcccaattgtcttcagccatttgaatcaccccagctgtgactatagacaacatggagcagagctgaggtatccctgctggatcctgcctgaattcctaacccacagaatcacaagcttgataagtgcttagttttgttttgtttttgagacagagtttcactcttgttgccattgcactctgaccctgtctcttaaaaaa

SEQ ID NO: 236474 - DNA, 2348 bp, Homo sapiens
taatagcaacttatattattttactatttacagagagtgtccacatatgttaacttccttgatcctcacaaacaccctatcccttgggtattttctaccagccccatgaggctcagagagatttacatgactttttgagggtttgaacccaactctttggtctcaaaaacatctcattccagtacacctcattgcctcccaagccctgtatccaggaagacctgactcaccagcatgctttctgtgcgaaaggacaccagagctgagaagtaaatcgacaccacccccaatccctgcaacttcctcttctctgtcctgtcattgagaacaccagcctaagggcacgtttttctccttccacgttctattaaagctcagtagtctaactcctactattgaaaatgagagaaacaggaaggaaagtctcaaattccaactttggaaaccacgttgaaagaaggtgctctcatctggacatgatggttcacgcctgtaatcccagcactttgggaggccgaggctggcagatcacgaggtcaagagattgagaccatcctggctaacatggtgaaaccttgtctctactaaaaatacaaaaattagccaggtgtggtggcacgtgcctgtagacccagctacttgggagtctgaggcaggagaattgcttgaatccaggaggcagatgttgcagtgagccaacatcatgccactacacgccagcctggcaacagagcaagactctgtctcaaaaaaaaaaaaaaaaaaaaaaaagaagaagaagaaggtgctctctcatcattcttctgtacattcatttgttcattagacagatatgtatagagaatctgctgtgtcccaagcactgttctaggtgctgcggttatagtggtagacagaaaggtaaagttcctgccctctcgaagctcacatcctactttcagggggtaatgagcaagtagatgatgaacaaatgttttatatagttctagggctataaggagtgtagagaaggctgatgagatgcagtgtaactggcaggaggggagtgagaactacttgggtagatgatcaggagatactctgcaagaggaaacatacagaaggagcctgacatgagaaaactggggcagcagttttccaggaagagggaccagcacaggtccaagttgaaactcagaatggaattttaggaaattatattcttcatgatggttagatcctgtgggctatcatcactgcagttcaacaatgtggtgcctagtaggaagagttctcccaggaaccctccacgtgtgctatgggatttctgagaaaaccagttctgagttctaggcagtggactcacagttgaacttggagggaaccaagaattgcttccatcatagccttactaagaaatgaccatggcatggcctgagtgcttcggcatggaggaccagaaggggaagccctaatttgccagttgcagactcttgagccttgtgactctaatgacgacaaaaattaggagattttctaggactccacgtttgcgattttgagagtagtgctgctggggttcctggtttgggttctattgattgtttcattgtttctgtgtgcaagttaccctctctaagcttagtttaattaatattatattaagtgaggtagttagattatatgaaccctaaggctccttttattcttaaccttaaaataaaaacattttgtaaacagtttttctttgtgtgtgtggtggccttttctgtgcctctgctttggatgaggttacagggctgagtgcgagtgagtcattagtggttcctttgatataagacaggtgatactattgaacactgttggtggtagaccagtggttctcaaagtgtggtctctggaccagcaatagctgggcttgggaacttgttagaaactctagctgtcagcctccaccccagacctactgattaaaaaaccgtaggagtgtaaccaaaactctgtgttttaacaaagtctacaaatgattctgatgcatgctaaagtttaggaaccactagagtagagtatgtgctttaagatttgggtctaccggccaggcgtggtgtctcatgcctgtaatcccagcactttaggaggccaaggtgggtggatcccaaggtcaggagtttgagaccagcctggccaacatggtgaaaccccatgtctactaaaaatacaaaaattagctgggcatggtggtacatgcctgtagtcccagatactcgggagggtgaggcaggagaattgcttgaacccaggaggcagaggttgcagtgagccgagattgcgccattgcactccagcctgggcgacagggcaagacttgg

SEQ ID NO: 236475 - DNA, 290 bp, Homo sapiens
tgtcctcagactctcatttgtggaatgagaaccaccctccccaggtagtcatgcaggataaaggaggtcaaatgggaattcccacctccaggaaaccacctggttttattcccctgggtctgtctgaatgccgagccctagggaatgagctgacctttgccctttttgtttggcacccacctagggacaatactctgaatcctggcaataaccttgcaagacaggtgtatccagctcctgtttcagttgagcacactggggctggagcagggtggcagtttgctcagagt

SEQ ID NO: 236476 - DNA, 463 bp, Homo sapiens
tactgtgccaggcattccctccaagcattgatgaagaggggctactattaccccattttgcagataaggaaactgaggctctgagaggtgaagtaacctacctcaaacccccagctgaggatttgaacccagagaggcttcagctccaatgctctcgtagtgagctcagaagctttcacttgaagaaagggcttctcacgtatagactgcttaggaagccagagggtcaggcagaaggcagggctccagcattgcagggaggagggctcactcagctcaacactgcccagctctgagtgaggccagagagttatgcctcccttgcctgtgggtccctgtgccaacctagggaccatcctcagagcccccacacctgctgctcacagccagaatgtaggacccgcttagctgctctcagaagagtcctgttcagcaagccgtttaaactcactcctcccatccc

SEQ ID NO: 236477 - DNA, 319 bp, Homo sapiens
tttgtcacccaggctggagtgcagtggcacaatcacagctcactgcagcctcaacttcctatgcttaagagatccttccacctcagcctcccaagtagctgggattactggggtgcaccaccatgcctggctaatttttttatttttagtagagatgaggtcttgctacgttggccaggctggtctcaaattcctgggatcaggggatcctcccacctcaacctcccaaagtgctgggattacaggtatgagccactgtatctggcctgctcttaaaacttattcaacactgtactgaaggttttagtgagtacaataa

SEQ ID NO: 236478 - DNA, 414 bp, Homo sapiens
ctgggactgcaggcgtgtgccaccgtgcccagttaatttttgtattttttggtagacatggggttttaccatgttggccaggttggtcttgagctcctgacctcaagtaatctgcccaccttggcctcccaaagtgctgggatcttacaggcctgagccactgtgccaagcctctattttcatattatattctgaatccaaacacattttataaatttcactgctaccattctagttgaggctaccattatctttgcctggattattgtaatagtctcctaattgatctcccttcttgccatatccccctgccatagggggtatgttgtttacatagcagccagagtaggctgggtgtgtctatgttctactttctttgaattgaattcacttttgagtgtacactctcaggag

SEQ ID NO: 236479 - DNA, 449 bp, Homo sapiens
ttgacttttgatataacttctttagtcattatccacatgccataactcatctttttgaactgtcaacacaaaaaattatctatgatcaataatgtatatatcaatacacaacatatattcctgttattttttcttcatataaattttcactagccaaatttagtaccataacaggctctccctcaagatttttcaaacaggtaaaatgcactacaaaaaacaagggtcatggtacagcttttgttttttcaaaaagtatacgcttcctctgtattaacagatttatgaatgcctgacccttctttcctcaatctctttagactgtcatgaagctaagatggtgtaacatctgttttttggtcaacagaacaaagaaatgaattttcaaaaacattacactgcctactactccatcccaaacaggcgtattctttactctgacttgtaca

SEQ ID NO: 236480 - DNA, 208 bp, Homo sapiens
gaaaatgctctatagtattttcctcaaccattgttttaaaagcttaattggattatttgggtataggccacaatctggttaccctattgattcagggaatgttaaacctctgattcagaaatcagaaacttgttttaattctccccctttggttcctttccaatttctctgtatcttttaacccctattgccactgccttgacttagg

SEQ ID NO: 236481 - DNA, 1251 bp, Homo sapiens
agccaagtccttctggctgcagttaaaagggctcaccagcctctccctgaagtcttggcccgggagcctgtgtcctccaggtagctgtgctgtggggagctggagaggactgaagagctgaggaggcgaaatgcagaaatgataatgcctcacaagctggttgtacagattgaataacaatgtgaacagagcaccgagtataatccctgaaacagcaaaccagaggtcccgtctggctggcatgaatggaagggcaaacgctccgaccaaattgctctgggaatgtcattctaattattggatcctgacccagcagcatgctgataagctctgggttggagacgccctatctcagaggagctccaaacctgctcaaggccttttcttgccctctgcaactttcctgccaagcaattagcctccagggaagaagaggaaattggaacacggacacgcacagaggaaagaccaagtgaagatacagtgagaagatggccaacgacaagccgaggaacagggtctcagaggaccccaaccctgctgacaccttgatctcgggctttcagcttccagcactgtggcaaaattcatttctactgtttaggcctcccggtctgtgacatgttgtcacggtggccactgaagactcagacagcttccttctagctctggttcttctacgggtgtgctttcaggtgctccggagggcccggtggcagggaaagccaggtctccaggctcctggcccagggcgtgtttaggaggcagggccttctctgacacaagtatgaggagcagagaggtttctcttcttcagtctccactaggtcctggcctccatggcttctataggcagggacctggccagggcattcaccagagactttgacagggagtccaggcccagaccccataggcagagccaggagccctgtgccagcttcccagggagcaccggggcccaacgtagagtcaagagctggcatcagcacaggtgcaaggtggggttgggaagggcatggcagcttgggggtctgcagtgcacaggtggcctggcatgaggtaggtgggccggcttgaaggtctagaagatggatagacaccagagacttgtagtctatgtctccttcttgctgtcccctggatgtcacctcccctctgcccccagtgctgaactaacccccttcatcttttacttgggactccatcagtgactcatcattgcttttggtgtgacttaccagcggccgc

SEQ ID NO: 236482 - DNA, 772 bp, Homo sapiens
agccaagtccttctggctgcagttaaaagggctcaccagcctctccctgaagtcttggcccgggagcctgtgtcctccaggtagctgtgctgtggggagctggagaggactgaagagctgaggaggcgaaatgcagaaatgataatgcctcacaagctggttgtacagattgaataacaatgtgaacagagcaccgagtataatccctgaaacagcaaaccagaggtcccgtctggctggcatgaatggaagggcaaacgctccgaccaaattgctctgggaatgtcattctaattattggatcctgacccagcagcatgctgataagctctgggttggagacgccctatctcagaggagctccaaacctgctcaaggccttttcttgccctctgcaactttcctgccaagcaattagcctccaggggtatctgagagcgggagactgggaggagcggggtccctcggggttgaagtggggagggctaacgggctggggatgccccctgttgtgtttccagggaaagcctgtccagattgccgttgccttctttaccttcagtgtcagagttggggtccagcctgtattgtggggagtaggaaaagcttttcttgttgagccctgggcttctgttaggggttgaattatgtccctccccacactccacattcatatgttgaagccctaacccctagttcctcagaatgtcactgtatttggagatacagtctttaaagaggtcattacattaaaatgaggtcactggggtgg

SEQ ID NO: 236483 - DNA, 801 bp, Homo sapiens
agtgtgtaggctacttcctgaagttcttagtgagttcctatgagaaaaagacaagcttctatcatctgaaagttaaaaaaaaagaaaaatgtgtctttgataaaagaagtcctttctcttttggtaactgagagccagacaacactgtactttgcagggttggaaaaaatgagttctctgttacatgatgaaactcattccagcaaagacagagacactggaaacagaatagaagatactactaaaattgggaaggagctggagtctgattttgactcctccaggacagatgacaaccatcctcggggttatcaaaagttgtcactgcagagtgaaagcccaagccacaggtgggagaaggtattgcagcgtgtctaactggtaaagtgctcctatctggaatacacaaacaactccagcaaataaatcagtaaatcacaaaaggacagtcagttcaatagaatagtgagaggaagagattgacagggcatttcacaacagatgacaatgaacaggaaaagtgctcagcctcacctgtcatcagggacatgcctggaaacagcaaggagatcccactatacattctaggagaacagctaaaacctaaaaaaacaactgatcatatcagtgttaatgaatatgtggaactgttggaaccctcatcctctgctggtgggagtataaagaggcccacatactttggaaaacagtgtggcattatctattaaaggcaaatgtatgcatatcttactacaaagcaattccactcctaggtctatgtgtgcgtatgtgtaagaaaaa

SEQ ID NO: 236484 - DNA, 423 bp, Homo sapiens
tcatttttctctctcttaggatgctgatattgagtgttatctatgtgccaagcaccattgtagaatctgagatagcagggagcaaagatccctgccttccaatgggaggagataaaaaaacaagtcaaatatgtgttatgatacataggtgataagtgctatagagataataaagcagataaaggataacaaatcagggcaggggcagggatggaggttttaaatagggtggtacaagaaagtcatcactgaaaacccactggagggattggagcagacaagtgatatgacctgactcacttttaaaaggttcactcttgctgttgggagactatattatagattttgagggacaagaaaaagaaagaaggcctattagagaactattgcagtaatccagatggcctcgtgcataattaaaag

SEQ ID NO: 236485 - DNA, 392 bp, Homo sapiens
tgccacagatcacatagttattaatagaataataaggaaatattgtgcataacattatgccaataaattcaacaacttagataaattggacacatttcttgaaaaatacaacatgtaaaaatctgacacaagaagaaacagaaaatctgaatagccctgtctctgttaaagaaatagaacagggaaaactctgtagtgatagaaactaggtcagtggttgcctatgtagaatgtcaactgaaagagaacatgagagaactcttgggaggatacttgagccttgaagtaaaggctgcagtgagctctgattgtaccactgtgctccagcccgtgctggacagagtgagaccctatctctaaaataaaagataataataattagagtctcagta

SEQ ID NO: 236486 - DNA, 390 bp, Homo sapiens
atgtaactaacactgacggaggtttactgcatgctgcgcacatagctgagtgcctcgcatttactgatgattatgatatgtaaagcgtctggccttaagtccatttttgtcatgattccaaaagcggccgggcatggtggctgacacctgtaatcccagcactttgggaggccgaggcgggcagatcatgaggtcaggagattgagaccatcctggctaatgtgatgaaaccccgtctctactaaaaaaatacaaaaaaattagccagacgtggtggcgggcgcctgtagtcccagctactcgggaggctgaggcagaagaatggtgtgaacccgagaggcggaggctgccgtgagccaagatcgtgccactgcactccagcctgggcag

SEQ ID NO: 236487 - DNA, 422 bp, Homo sapiens
gcacccaggagccggtcaggctgacctgcattacaaatcagcagccagtcctctctcacccagattagcttattggcattcagggcctagaagtccaagggcctgacccagcagtggcccagagaggtctctcacctgctctgtgggcacgatgacctcacttaagctaacacatgtgcataaattaccatagtattatgtcccccagatgggctgcatcccttcacctgttcaacaacccctcttctgaagatgctccgggtcccattacaaatgcctggaaacagcagcaacaaaacacaaaaacctctgccctcatggggcttatattctagtggaggaagagagatgttaaacaataaacacatttcagttagttaggaaacaagtataaacaataaacatacttcagtaacaacata

SEQ ID NO: 236488 - DNA, 646 bp, Homo sapiens
acaataaaaatattgtttcctaggtgctcggtaaagagagctagtgagttagtgatctctgttgtgagcttgtgatctctagtgcttaatgtgttatattttttttagtcctcatgcttccttttattgttaattgcatttttatgtatttgtcatgtatttaatgtcgtagtcacttagcagcaaaaccacgcaattcaacattaggcaaatttataaatattgttttgtatgtaatgtattagtgttgtattatgtttgtctgctacatggtagcaagtttaatatgaaatatctcacatttggacttaacatgtaatacgaaagtttatgaaagctttgacaactttcagcttatttattcttatttttttagaggcaggttcttgctctatcgcccaggctggagggcaatggtgcagtcatagatcactgcagcctggaactcctgggctcaagtgattttccacttcacccttccaagtagctaggactacagtcacatgccaccacaccccactaatttttaacaaaaatttttttgtagaggtgaagtcttaactaggttacccaggctggtcttgaactcctggcctcaagcaattctcccaccttggcctatcaaagcgctgggatcacaggcacc

SEQ ID NO: 236489 - DNA, 202 bp, Homo sapiens
ccagaaatgttaagtaacccatccaaggtcatacagctagtaagtgacagacccaggcagtcaggcgttggagtctgcacatctaaccgctgggctgtgatgttcacatgaatgcagggacagcatttaataaacacttccagaatgagatgtgaattttattttaagcacattcagatatccagtgtgactccgggatgta

SEQ ID NO: 236490 - DNA, 672 bp, Homo sapiens
aaactgtaacaaaattattttttattatggtttattaaatacacctgcatctgtaatattctagaaagtattatggaaaatttttacctttaatctctacgatattaaatgccaggtgtcatttagatacataatccagtatatatgcaaaatgtttcagaatgctttcagagctgctgggtgcaaacaatgcaaattaaaatggtgcaaactatacaaaaataaggaggattcaagcctaaaaagtaaaaaaagcaatccacaaggtgggggtgaataagccacagtttcctggaggtaatacattctgaactatacattggagggggatccatgagtgggcaagcagaaggagaggagcattccagtaaggggcagtttagcctagcctgaaagcctgtcaccaaccagaactagaatggaaaataccagtgtttttctatactattagctattggacctggtcttttggtttttgtttaaatctttttttcagatgagatgggtaatgtgcagacgtcgtaagaaggttcgagtgtggcacatctcacgcttgtgtgtgaacacacaatcatcatgctcatgaactactttgtatagcatgttagcatctacaaggcacttttgatttaatttgactcgattaaataggccacggtgaccttgtctatt

SEQ ID NO: 236491 - DNA, 525 bp, Homo sapiens
ttacatgagtacaatttagtatgttttgctattttctttgttatttaatattttctaatacctttagtttttgagatcaatacactcctcaatatattagttttcagccattcattttcacaaatttgtttatggatgtaaattttcctctaaacacttgatttgtagcattgtataggtattgatataacattttttcattatctttcaattaatatattgtctaattctaattgttattgattctttagaccatggattatttataaatgtgttgttaactttcctaataattacggatttcttgttattttcttacccatttctatgtgctttcaggagtagagacagacaattatctgtaagctttttattctttgaaatttgatgagattagatttaggttctagaacctatatatgttctaggattatttggagatatgtttcacatgaatatgaaaagaaattgctatgcacagtgttttataaatggcaattcaataaaaacttttactttttaaaa

SEQ ID NO: 236492 - DNA, 537 bp, Homo sapiens
agatctgcatggcatcggagatctactgccatatgcaaagatgtgagctatcaggtgacctcagggaacagtggcaaatgatagaagggtctaagactgagacgtgggccctagggttcaggcatagaccttcaattgtaaaagtatttgaagttacctgatagagaaacaagaaagtgaattaggctgcttgagagtgagtggagtggctcagaatttaatgattaagaaacagacttgggccgggcatggtggctcacgcctgtaatcccagcactttgggaggccgaggcaggcagatcacctgaggtcgggagttcgagtccagcctgaccaacatggagaaaccccttctctactaaaaatacaaaattagctgggcgtggtggtacaagcctgtaatcccagctacttggacggctgaagcacgagaatcgcttgaacctgggaggcggaagttgcagtaagccgagatcatgccatcgcactccagcctgggtgacaaagagcgaaactccgtctcagaaacagaaagaa

SEQ ID NO: 236493 - DNA, 575 bp, Homo sapiens
aaggttttgctttgggcttctgccagttgtgtctgcctggcccagccttctgtacagttgactaccctggccctatccctgctgcattattcagggcattcaggcagaagaaggccagagaagaaagaaactaggtcaagcatccttattccgagtgtctcacctgaatcgcctgcccagcctctgtggaggcagagcaattagagcatttaccccatgtgggtaaatgggctaaaaagccactgccattagtagggacggtcagggttacagtaggcagactcaattcaagggacatcctctcttccttcaggttggaaggaaaagttgtggactccttctttgtgaaaatcaagggagaaatcatcttctctggtcaacatctcttggaatctgtgcttggtcagtggaattgaatgtgaacataggagccaccctgtcaccagaaggaccatccaggaccctaccctgcatttacttcaggaatcaagaatcactgtatattctgaaaggttctgtggcttccttaatgccaatggtaatataactagaaatgctgcccccagaatattgtt

SEQ ID NO: 236494 - DNA, 393 bp, Homo sapiens
ttaatgtcctggtcctgttgcttagacagagttattagcaaagagaaaaatattcagttgccagtgatgctgtcagataatgttggggttcaggagatttttaacagagttcaagtgtactctttaaataccagtgaaaattatgctggaatgggaccagccatcctgttttttcaaaacttctataacaatttgggttgttagaagaagaaatagtaatttagctgtatgttaaatatgatttcacatatgattaactgtcataaacctatagatacatagaatgttaaggttggaagaagaaagcttagagttcgtttgctgttgtcacctaattttttaaaaaaagacattgaggtggaggtggggcagtgcaaaaaataaaaattaatt

SEQ ID NO: 236495 - DNA, 574 bp, Homo sapiens
catgagccactgtgcccagcccacagttcctacttctcttctccttccactggtcccgttggagtcatagtgcattgagaattagaattagcatacccaattcttaatgccagagctttttctttcctgtttagagattatcagtgctttaggatgaggggggaggtaggtggcaatatcacagtcaatggaaaagagcatttctgtacacacaccacaatcaccccagattctgatgtccgtgggtgtgtatatggagaggggtaatctgcattttgaagaatctctcttggccaggcgcagtggctcacgcctgtaatcctagcactttaggaggccgaggcaagcagatcacctgaggccaggagtttgagactaacctggccaacatggtgaaacccgggctctattaaaaatacaaaaattagctgggtgtggtggcgtgtgcctgtaatcccagctactcgggaggctgaggcaggagaatcgcttgaacctaggaggcgaaggttgtggtgagccaagattgggccactgcactccagcctgggtgacagagtgagactctgtctca

SEQ ID NO: 236496 - DNA, 407 bp, Homo sapiens
atttttggtcaaggttgtaagaaacttgtataaattattctttacctgtttagtagaagtagccagtgaagtcatttggggttatgcttttcttgtggtagttttatgattaataattgatatggtttggctctgtgtccccccccaaatctcaccttaaattgtaataatccccaagtgttaagggcaggaccaggtggagatcattgaatcacagggtagttgcttccatgctgttctcatgacagtgagtgagttctcataagatctgatggtttcataaggggcttccccatttgctctgctctcattctctctcccgccttatgccgtgattgtaagtttcctgaggcctccccagccatgcagaactctgagtcaattaaacctcttttctttacaaatta

SEQ ID NO: 236497 - DNA, 2241 bp, Homo sapiens
  misc_feature (880)..(880): n is a, c, g, or t
  misc_feature (1177)..(1177): n is a, c, g, or t
  misc_feature (1571)..(1571): n is a, c, g, or t
  misc_feature (2106)..(2106): n is a, c, g, or t
tctctaccaaaaaatgtaaaaaattagcctggtgtgtggcacacacctgtaatcccagctactcaggaggtggaagttacaatgagctgagatcgtgccactgcactccaacctgggtgacagagggagcctctgtctcaaaaaaaaaaaaaaaaaggactgagaaaagaaaggatgaaatgggtagaggtatggaaaacctttgatgtctggatggctgtggagttatccatgatatgaaatagcagctgagctgttgcctgttatgaaaggtaaaagttacctgtcgaatttcaaatgatagatccaactccaggagaactgactcactagatcacctggctacttttggccatgctggttacagtgaggagaaaaaagaagtgtagcccaggtaataccttcagtttttgttctctcctcccggaagaaagaaaaaaggcccaaaaattcccaaagatgagctttggttgggccaaaaatgttaaacatttatggcactctttcctcacaagtaggaggaaaaaaggttgaatcagttctcagggctggagcaaagtaaaaaagggcagaggacatccttcagttgttagcctacctgcacgccctcaaccccattccagatagggtctcctccgcaactgtaatattaaaccttttgctaaatttactgcaaggggtcgaatacatctgcagtgaggaaggtgccgggccagggtggggtagcgggggcagttaatggccttgtattttgcagttattacatctatggatatacgatagaagttgatgtaaaatgttttatgcttgtaatgtcgcagatgcgagggggattagctcagtaaggcaatgctgcaaagaagttgttagtgggacgcancttccttgctttttgctgctgtaggatagacggaaatttaaatcgtttgttgaaagcaaaatatgtctcacagccgatgatatttactatgatttttgcccattggagcctctggaaaaaggaagacatacacttctaaacatttttaaagcagtttttaattgcaagtgagctcatataaaatcagatgtctgaccctagaggctggtgattttctagcctgatgtgcataattttgagtgggtcttagaaagcacttaggaaagctttgctttttgcttggccttggaaacatgnctggcccttcagcatctcagctttactgctgccaaagaaaagtctctggcatattttggaatcctgaattcatagatcctagttgcttggacttgacgcttgagctaaaacttgacattgcctcctacacactatttcagtctcagcacaagctgtgttaaactgaaagagatacaggctcagggaagacgacttctatttggggatcaaggcagattcaggatacccctctgtggggctcttcactataaaaaatggatgttgatggaactacgtggattatcacaggtgtccatgggaaccggcttctctggtgggaccatacgaagtcgaactgctgatctgttctgtatttctgatacagggactgattacattcctaacttgtgattantgacaaaagctacatgttgaggggaaagcatatcactaggactgtgacccctgtgcctacccatcttactctctacctcttaggaaagtttcactgtgtttacttgggacttctggactagctgccgtttgcaacagtggacttaccagtttgccactactctgctacctttctactggtgcacacaccttagtaaggcagtttgattactaaatgcagctgtctccagaaatggaatgatgctataggccacttactaaatgaatgatcaggaggaaagcagtgagtggctctctaaaaccattttgaaatattttgaaaattcaggatttaattctgaccagttctgaaaatggcatgtctttctggttacattatataaaaatattttctggccaggtgcggtggctcatgcctgtaatcccaacgctttaggaggcccaggcaggcagatcacgaggtcaagagatcgagaccatcctggccaacaggatgtacaacaggatgtactaaaaatacagaaattagccgggcntggtggcgcggacctgtagtcccagctactcgggaggctgaggcaggagaattccttgaatacaggagggggaggttgcagggagccgagattgtgccactgcactccagcctagcaacagagtgagactgtctc

SEQ ID NO: 236498 - DNA, 1951 bp, Homo sapiens
tattatagaccataatatgcctgtcataagcagactgtttttgttgactttcttgaccttctggggtaggtagtgccacctccttggaagaaagatccttttcgtgatgccagggcaatgattaacacatggaaaattggagcaaatgaaactgcaattaatactgctcaaacagattgcagagtatgatgaagaacttggatgtcattttattgcagcctctcctggggacaccattattttatcacctttgacttttggatgtatagctccatttgacatctcttgtcttttcctgctttctttctttattcttcccagtgggagttagatgaagaatgtctggcttgcagaagccagacttggccattctgggagatgtgcagactttcagattggctttgacagtcttacagagctgttcccaggatatgaagcacagctgcaaagcaggcagttcggctttgccttctcttactttcaagatgtgtgatgggaggcggggaacatacaacccccagctgcttagactcttctttatccagaattccccttcctttatctttggaggcttcagatatcactcagttgactgattaaatatcaggtgataggaatctatctctatggtggaatatatgaggagatagttttgagcagggacgccttcgagttcttgcttgctctagtttagtgcttctcaaaaggtggtccatccacagatgttgtcaatatcatcttggaacttgttagaaatgcgaatgccccacctcagacgtacccagactatccagggggagcccagaatctattttcacaagctctttggataattcttacccatactacattttgctctagccaatacttttctaagcttccttcagcttaaaccctcctgtcctttacttcctagcttatctgctgcaggcagtagaatccattagatgtaagctccatgaagacagtgatcgcatatgtactgttcactgctcttgtcctcatcataaccaggcacagaagagctgatcactaagtagtcattaaataaacaagtgattggcataagcatttgaacaaggtgaagagaccacactgtctgtttacaaagttgaagaagtcaatgctgtcttagtctttcttggccctgaggcagtattgcatgtggccatggacctagacactactagccatttataggctgtcagttactatgtagccaggaggatccccccagtgtcatctcttaccctttaaactacacgaaaaagctttgaaatgaagtccttgagccagaaaaggataccagccccactgttaagtgatgattgtgtgctaaagcagcctaagagttctatcctaacacaagagcctagaaagtaacttcttaggcagtgtccaaagaatgccagtagtccttggggacttttcagaggtgcttggcttgaatcaatttctagatcccaaagcagagtcttcatgcacattttgcggctgtagtgtacagcaaatggctcttggctaggtttagaatgctgcttttaccattctctgtacctgacccagtttgagtctccttatgacacttggcttcctccagatggaaattttgaagcctttttggacttttattgtacttattcttgattgccacgtctcatttggattccccagactctgattagaggcactgccaccaggagagattttatctaaccaatagtacttccaggaagatcctcacccttgtactttcaagaagcacttgtaattaatgttcagcttcctgaacactgagtggtacttgaaaatctctgtggtttatagccttacagaagctactctggaggctgaggcaggagaatcgcttgaacctgggaggcagaggttgcagtgagccgagatcacgccgttgcactccagcctgggcgacagagtgagactccatttc

SEQ ID NO: 236499 - DNA, 396 bp, Homo sapiens
taagaagagctgaaaactcccagtttaatgaaacattaattaaaaacaataatccaggaagctccacaaattccaagcagaataaacacaaagagatccacactgggttgcataatagtaaaaatactacaagacaaaaagagagtattttgagagcatataaataaatatgcctctttgcatacaaggaaactgcaatgaggttaaccggtaacacagaaaaaaatggaggctcaaaggcaccaggaaaataatgttcaaagtgctaaaagaaaaaaaccatcaaccatgagtcttatgtccactaaaactatctttcgaaaatgaaggtgaaaatataggtataaatatttgttattggctgggcagagtggctcacgcctataaccccagcac

SEQ ID NO: 236500 - DNA, 502 bp, Homo sapiens
ctgcccctcgtcaccagtgtgtcaccagtctgtcatggtggaagcagggctaagactcaggtcttctgagccttattccagaagttttgcctttatgcttgctctcctgccgagatatacaatgggagtaatttggtgtttgccctcccctgggaccctgtttttctatctggagcaacttctgagagaagagaatggagtccttggcatgtgccccttccccatagctctgaaagacgctttgtgccaagttccttggacattccacaggctagttctaggcaaatccatctgccagcaggtcacaatcctagccttcaactctgagctgagatattttgtcctttctgctgttaaatgaaccctttgctttcttggaagctaaagcaaagtgagggaggccaggctcagaggacctggggcaaagcgcttgggctgggctggagtgagctggggtggactgccaggggagatgggtctgttttgcagacctggctcgaga

SEQ ID NO: 236501 - DNA, 598 bp, Homo sapiens
acagaaggacgaattagttttgcagcatgaattggcattctataaaattcattcacaaaataattgcttactggggattttcatcattataactgagaaagaggaggcacatctgtgctcttttgcaatatgagacagtcatttttcaaacaaatcatacatgcaacaatagataggaatatggcgggaaaaagattcagtggttctatctgagcccgtgattccaataccagaggcagaattgagattcaagtctataactgtaccaggaaaagtcataataagggtatagggggttgatacatttaacttctgtctatgacagctttctttggataatttggtagaaaaaacaacatgcaataaaaacatctttagaagtcttagattattactaattatttatgggattggtttcagaaatttgataccttaacatcttaaagaaaaaggaaggccaggtacattggctcagacctgtaatcctagcactttgagagagcaaggagtgaagattgcttaaggccaggagttcaagacaagcctgggcaaaagtgtgagacccccaactctacaaaaaacaaaacaaaacaaaaca

SEQ ID NO: 236502 - DNA, 312 bp, Homo sapiens
ctagtctggggtctttttctatgagtcagggtggtatatcattttgcttttattgtttctgactagcagtctgctgtaattcttatcctcgctcctcggtaagatattatgttttttcccccttggctgacttccagattttctttctctttggttttcagcagttttaatatgatatgcctagatgcatgggtttggggaggggctcagtaaatatactaacctaaaaaatgcctctctcagttataaccattatttccttaattttcttaatttgtgttattttctaaattgtgtttttctgttcttatc

SEQ ID NO: 236503 - DNA, 429 bp, Homo sapiens
gacggggggaggtgctacatgcttttaaacactcgtatctcaagggaacatttaccgcaagaacagcaagcaccagggatggttgctaaaccatctgaaactgccgcctgatccaaccacctcccagcaggccccactcccagcaccgggaatcacaatttgacatgagatttgagtggaaacacagatccaaaccatatcttaccaattttgaaaaatactggaagatgggaaatatggaattaaagaaacataagatgaaagaaaagagtttgaagtgatgaaagatggaatgaggcagctggacacatgggttaagaggaggaaaagtaggaaaggaggaggggaaaaatagacatttgatgtggtagaaaaaaaaacagatggaaatggagatgtcataataaaaataaaattcaatgtttcaca

SEQ ID NO: 236504 - DNA, 248 bp, Homo sapiens
aagagagtttgactaacggcatggccttgggcacctgaccggaccgctgcctggtttctcatggctttacctaccttataggggctttgtgagcatctaaagcatttagcacagagcaggggccctattagtatcagctggtactatcattaatgagacagtctcagttccagcaagaactgttctttttcgcaggagacaaatggaagtaattcgtcttgttggaacctgcggtgaggtagctgggt

SEQ ID NO: 236505 - DNA, 495 bp, Homo sapiens
gatgaaagactgcaaacccctccttggtctactagatcacagttaagctatggcaaagaggattacttggtctggagaatgtaaaaaggacttgcttctacctgccagctttatcacagcactatttctccgtcctaacagggatccttgattctaatagtagcatagggttccattttgcagtttttttcaacctgatttccctcacgatggcccatcaaagttccctctgccagccacctagtgccctaccgccttgagtctgaggtttccagatactttcctctaagccacaaagttttagtaatcctaacttctgttcatccttccaatcctaggtgtagaaactgcttcttcagttattgtctctgtgataccgcaatgtccatttttgtttattttgcttttttcccttatagtttctaatgccctggtaaacaagatattttataaaattttctctattaaaataatcttgactgcttttgtggataa

SEQ ID NO: 236506 - DNA, 576 bp, Homo sapiens
tcttgctatgttgcccaggctggtctcgaacacctggctcgagcaatccttccacctcagcctcgggaagggctgagattacaggtgggagccactgcgcccagccagcagtttcagttacattacagagaaaactcatttggcttgtagactaaacagaaggatccagtagggagagaaagaaggaaatgattgattagataaggtcctagggaaggtaggaggtcacaacaacacgaaaagggatatttataatgttatcagattaaaaaagtattctgaataaaaagtaattgagaggcccagtgcggtgactcacgcctgtaatctcagcactttgagaggctgaggcgggtggattgcttaagctcaggagtttgagaccagcctggccaacctagtgagaccctgtctctactaaaaatacaaaaaaaaaagtaggtgtagtggtgcacgtctgtggtcccagctactcgagaggctgaggcgggaggatcatttgagcctgggaggcggtggttgcagttagctaagatcacgctactgcactccagcttgggtaacagagcaagacct

SEQ ID NO: 236507 - DNA, 863 bp, Homo sapiens
cagcctcccaaagtgctgggattacaggcgtgagccaccgcacctggcctgtttattctcttaagagagaaaatgaggggattaatggactgtagttctggacaaggtggaaaactcttaaagtggaagtattggggcaagtgctctgacaggctaggatggtgcagtcagtcccttcacccagaaatcagtagaatgttaacagttcagactcaaaccttgtgaaaaacaggtggtggaaaggaaatccctcacagcaactggcaccataatcaagacagaatgtttgcagaataaatggagttacctgctttcagccccaggttgtagctattgtctgccctgatgatatgtgataataatttgtgatcctattgtcttaaaatggggtcactcatctccagtagaattaagtccacagtgaagttgtccccccatccccaaagagataaacatatatgaatgaactcacatgataacaactactgctgcctgggatcatgagagacctgaactgaactgataggaagtgaaaggtggctgagataatgagaatagacccatctgcagaggatcataaaaccagcaaagacaagatcttgtctaagatgccttcacaaactttgtccatgagaactctaaggacttctccagacctgttggctgctgctgtgatctctgcccaagaggagcctctgaccaacatccaaagggcttctggacccactggactcctctggaggtaccttggtctcccgatccatggctgtggttttttactccgtttatcactcctgtgtgtagaatgataattgcacaattgatagtgtgaacacctcttgataaatggtaaatctgagcat

SEQ ID NO: 236508 - DNA, 1579 bp, Homo sapiens
  misc_feature (1076)..(1076): n is a, c, g, or t
  misc_feature (1244)..(1244): n is a, c, g, or t
  misc_feature (1394)..(1394): n is a, c, g, or t
ctgtctctggatttgccttctctgaacattttttttttaacttttttttctgggggcagggcaggttgggttaggatggctgccctctggacctgcccctgaacatttataaatgaaataatatagtatgtgttgcctttcgtggtggcctctctcacttggcataatatttttaatgtccatccatgtggtaacatgtatcagtacttcattctgctttatggctaaataatattccattttgtgggtacaaatttaatctatttttttttttttgagatggagtctcactctgttgcccaggctggagtgcggtggcatgatctcggcttactgcaagctccgcctcctgggttcatgccattctcctggctcagcctcctgagtagctgggactacaggcgcccgccaccatgcttggctaattttttgtatttttagtagagacggggtttcaccatgttagccaggatggtcttgatctcttgaccttgtgatccgcctgcctctgcctcccaaagtgctgggattacaggtgtgagccaccgtgcccggcccaaatttaatctatttatcaattgatggacatttgggtttccactcttttggctattatagataatgctgcaatgaactgttgtatgaaaatttttgtgtggtcacatgttttcctttttctttggtatattgctgagttataaactgatttccattttatattccaaccagcagtacatgaagattcaaatttctccacatctttgtcagtatttgtcattgtcttttttttctatttaaagtcaccttatttaattttattgttaattttgttaacattgaactcacaaccaacagcattataattcatgtctgaatgaaacttacctaacacagtattttctctgtaagacacattaaatcgttcttgcacttaggagcactagaccgcacttcagcactacacttggggggcatttttttttttttttttttttgagacggagtcttactctgtcgccaggctggagtgcagtggcgcaatctcagctcattgcaacttctgactccctggttcnagcgattctcctgcctcagcctcccgagtagctgggattacaggcacgtgccaccgcgcccagctaatttttgcatttttagtagagatggggtttcgccatgttggccagaatggtctcaatctcctgaccttgtgagccaccgcgcccggtctgggggggcatttntaaacaacaacatctaggccgggtgcggtggcttacgcctgtaattccagcactttgggaggctgaggcgggtggattactggaggttggaagttcatgaccagcctggccaacctggtgaaaccttgtctctactaaaaatacaaaaanattagccagatgcggtggcgtgcacctgtcattgcagctgctcaggaggctgagacaggatgatcacccgaatccgggaggtggaggatgcagtgagctgatatcatgcccctgcagtccagcctgggcaacagctacactctgtctcaaaaataaaataaaataaaataaaacaacaaaatccc

SEQ ID NO: 236509 - DNA, 868 bp, Homo sapiens
  misc_feature (844)..(844): n is a, c, g, or t
  misc_feature (858)..(858): n is a, c, g, or t
ctgtctctggatttgccttctctgaacattttttttttaacttttttttctgggggcagggcaggttgggttaggatggctgccctctggacctgcccctgaacatttataaatgaaataatatagtatgtgttgcctttcgtggtggcctctctcacttggcataatatttttaatgtccatccatgtggtaacatgtatcagtacttcattctgctttatggctaaataatattccattttgtgggtacaaatttaatctatttttttttttttgagatggagtctcactctgttgcccaggctggagtgcggtggcatgatctcggcttactgcaagctccgcctcctgggttcatgccattctcctggctcagcctcctgagtagctgggactacaggcgcccgccaccatgcttggctaattttttgtatttttagtagagacggggtttcaccatgttagccaggatggtcttgatctcttgaccttgtgatccgcctgcctctgcctcccaaagtgctgggattacaggtgtgagccaccgtgcccggcccaaatttaatctatttatcaattgatggacatttgggtttccactcttttggctattatagataatgctgcaatgaactgttgtatgaaaatttttgtgtggtcacatgttttcctttttctttggtatattgctgagttataaactgatttccattttatattccaaccagcagtacatgaagattcaaatttctccacatctttgtcagtatttgtcattgtcttttttttctatttaaagtcaccttatttaattatggaatttgtacatgactacaccacagntataatctgctgangaactaccaa

SEQ ID NO: 236510 - DNA, 345 bp, Homo sapiens
agtttttcatggctattgctttcactgtattgactgttagactgtttcatataatacataaaacagaaagtcaagtcatttactaatttctgggcttaaattcagaatcttaaaaaatctaagtataaaatgttaataaaactttatagatttctctaaaaatatctactattgttctataaattatatgttgtaactatttaaaactgaatcatactccatgctcataagactgactatatcgctctacctaaaatgtaaggaaaccagctcatttaaaacccagaaatcaaaacatatcgtgtacctaataattatatacaccttctatcacccacaaaaatt

SEQ ID NO: 236511 - DNA, 348 bp, Homo sapiens
caggggagctttggaggagagtggcagtttccaggtagttcagaggcccacccagcttcatatatctgtgtccacagcataccaatcaatgcttagtgcacagcacatttttcactgtgttgttagagtacatttgcttatattttgcacaattttaatttaaccatattgatcaaactgaacactcaataagaccctaggcaccttaggcttattaaaattagtcaacatggagcaagtgagctaaggaagtaatggaaactgtttggagatttaaatacagtggaacccacttaaataaatacctgttaatgaaataaatctattaaatgaatttattttctctga

SEQ ID NO: 236512 - DNA, 270 bp, Homo sapiens
aatataaacaaataaataaaaaaccaagagtccgatccatgtgggtggtgctacatgtcttctgtatccactctccatcctgctctgtgtgtttggagcctgacttaaatgggcaacaccaaaggcttatatacctactagtttcaagctgggtttggccagttgtatacctgggagagaccagaggcagggaggagagtgaggttgggtgcttatgtccccagcttcccttctgcagggtgccttgggttggccactctcctgacctat

SEQ ID NO: 236513 - DNA, 754 bp, Homo sapiens
aaaaaaaggcaagagcaaggaatctggggcagagcaagagcgagaccaaagccctgtgtggggatgaagcttgatgtggaagcttgacggggaggacaaatatgtggcaagagggacagggaagccagttcctgcagctgcttgcaagacaagcagggatgtgtccttccagccatagagcagcaagcgttcactgaaagtatttaatcaggtgacacccaaatggctggctttctacttcaggtcagacttaccttttacaagatttcattccaatgtattaatgagcagttatctcctttcctcccatgcttaatgagaaataaaatactgactttgggcccaggtggtgactgagttggagggtgtccatgattgaagttaaggactaaattagagttggccaagccaccagcagagaggtaccttcatgaacatctgctctcactgtggctacagagggattgtgaatatcggttttctcttctttcattagtggagtatttgtcaatagcattccaagctgtcttttcctttcttggcttgactactagcccctttcccacggtacagtttcacaggcatctgccttatattctgttctgtacttcccttggacattctttgtaaaagagttcttaaggttttctatcttctgccatagaatttaggagaaaatgttttatctctaccccatgatgtctctcttagataaacctgagctctttttctgtttgcctagccaccttataca

SEQ ID NO: 236514 - DNA, 808 bp, Homo sapiens
aaaaaaaggcaagagcaaggaatctggggcagagcaagagcgagaccaaagccctgtgtggggatgaagcttgatgtggaagcttgacggggaggacaaatatgtggcaagagggacagggaagccagttcctgcagctgcttgcaagacaagcagggatgtgtccttccagccatagagcagcaagcgttcactgaaagtatttaatcaggagaatgcatggattaaaaaaactcacgctggctgatccaattaagcttattttgtgacacccaaatggctggctttctacttcaggtcagacttaccttttacaagatttcattccaatgtattaatgagcagttatctcctttcctcccatgcttaatgagaaataaaatactgactttgggcccaggtggtgactgagttggagggtgtccatgattgaagttaaggactaaattagagttggccaagccaccagcagagaggtaccttcatgaacatctgctctcactgtggctacagagggattgtgaatatcggttttctcttctttcattagtggagtatttgtcaatagcattccaagctgtcttttcctttcttggcttgactactagcccctttcccacggtacagtttcacaggcatctgccttatattctgttctgtacttcccttggacattctttgtaaaagagttcttaaggttttctatcttctgccatagaatttaggagaaaatgttttatctctaccccatgatgtctctcttagataaacctgagctctttttctgtttgcctagccaccttataca

SEQ ID NO: 236515 - DNA, 854 bp, Homo sapiens
gcggccgccgcgggccggggcagtgagtccacccgcccgccgaggtccgcccgcccgccgagacccgcccgccgccgctgccatggccgaagtgcgcaaattcaccaaacggctcagcaagcctggcacggcggctgagctccggcagagcgtgtctgaggccgtgcggggctccgtggtgctggaaaaggccaaagttgttgagcccctggactatgagaatgttattgcccaaagaaaaacccagatttacagcgaccccctccgagatctgcttatgttcccaatggaagatatatctatctcggtgataggtcgtcaacgcagaacggtgcagtctactgtaccagaagatgctgaaaagagggcccagagtttatttgttaaagagtgtattaaaacctatagcacagattggcacgtggtaaactacaagtatgaggacttctctggggactttcgaatgttgccatgtaaatctttgagaccagaaaagattcctaatcatgtatttgagatagatgaagactgtgagaaagatgaggactcatcttctttatgttctcagaagggtggtgtgataaaacaaggctggttgcataaagcaaatgtaaatagtaccatcacagtaaccatgaaggtattcaagagacgatatttttacttgacccaacttcctgacggttcatatattctcaattcctataaagatgagaaaaattcaaaagaatcgaaaggttgcatctacttggacgcctgcattgatgttgttcagtgccccaaaatgcgccgtcatgcttttgaactcaagatgttagataaatatagccattatctggctgctgaaactgagc

SEQ ID NO: 236516 - DNA, 804 bp, Homo sapiens
gcggccgccgcgggccggggcagtgagtccacccgcccgccgaggtccgcccgcccgccgagacccgcccgccgccgctgccatggccgaagtgcgcaaattcaccaaacggctcagcaagcctggcacggcggctgagctccggcagagcgtgtctgaggccgtgcggggctccgtggtgctggaaaaggccaaagttgttgagcccctggactatgagaatgttattgcccaaagaaaaacccagatttatctcggtgataggtcgtcaacgcagaacggtgcagtctactgtaccagaagatgctgaaaagagggcccagagtttatttgttaaagagtgtattaaaacctatagcacagattggcacgtggtaaactacaagtatgaggacttctctggggactttcgaatgttgccatgtaaatctttgagaccagaaaagattcctaatcatgtatttgagatagatgaagactgtgagaaagatgaggactcatcttctttatgttctcagaagggtggtgtgataaaacaaggctggttgcataaagcaaatgtaaatagtaccatcacagtaaccatgaaggtattcaagagacgatatttttacttgacccaacttcctgacggttcatatattctcaattcctataaagatgagaaaaattcaaaagaatcgaaaggttgcatctacttggacgcctgcattgatgttgttcagtgccccaaaatgcgccgtcatgcttttgaactcaagatgttagataaatatagccattatctggctgctgaaactgagc

SEQ ID NO: 236517 - DNA, 348 bp, Homo sapiens
tgcctaagtacatgtaattctgtaaggttgaagagagcccaaaagaagaggtaaaatgctggctgggcatggtggctcatgcctgcaatcccatcaagttgggaggccgaggtgggcagatcacttgaggtcaggagttcaagaccagcctgcccgacatggcgaaaccccgtctctactaaaaatacaaaaattagccaggcgtggtggcattcacctatagtcctagctactcaggaggctgaggcaggagaatcacttgaacccaggaggcagaggttacagtgatccaagattgcgccactgcactccagcctggtgacagagcgagactccgtctaaaataaa

SEQ ID NO: 236518 - DNA, 480 bp, Homo sapiens
atctcaaaataactcctttccagtcggccttggcctgccatgggaggagtgaggcgctggttccccatgcacacgcaaggccaaataaagacctctgagccaaccccaggctctttacaccacgggaatcaaaacaccaccacgggcttccagggctccctcccacttgtgagcttctggggttgaggctgagacctgctcagtggtttgcagcccaggcccaggccgcctcgaggggggtctgggtgacacagagatgaaggcagacggcacggaggcctccctggaccatgtcaggagatccttcaggccatgtctctaagactgaacacctgcagcccacaaaaaggcttccatcagccttgccctctccaaaactgactcaaagcctggggtcctgcgaactgcacctcaaggcctgtacttcccgcagcaggggtgtgggggctgcagagatagatgaagcccacccagatgagg

SEQ ID NO: 236519 - DNA, 583 bp, Homo sapiens
aagaattcggcacgagggagaatgatgaagaagactcacagacacttccaagctcctgccatcaatagatggagtctgtttcttcgctacttgagtctgcgtggccttgtaccctgcttttaccaatagaatgtgtggaagttgctgtaggccagtgctgaacctggtcctctagagcaggggttcccaacccccacactacagactggtactggtcagtggcccattaggaactgggctgcaccgcgggaggtgaacagcagatgggaccgtctagttgcaggaaaataagctcataatgattctacattatggatgattaaactccttaagaacaagcctggctgagcctgctagagaatgagagaccaagtggcaaagtgacaagagtgataccaactaagtctccagagactgagagcccggcccagatgagtaaaactagctaagccacttacctgaacaatggctaaccgccaatgcattaagaacccagccaagacgagaaaacttgcctacctgatcccagtttatactgctgaccttaaatagcatgagctaaataaatggctgtttcaaagca

SEQ ID NO: 236520 - DNA, 304 bp, Homo sapiens
ggcttctccagacatattgctttacatattacataacatttgttaactccaaaatttatattttcagtgctgacttattttcacacctccaaatataagtagccagttgttcataagtcatgttaatttgatgacttgtaaacatctcaggacaatatatccaaaccaaacccttaacaactcctacccaagtatgattcatttctgattttccatattttagtaaatggcaacagcatttttctaattgctcagccaaaacactttaaggttatttctcagctctttaccatcacaaccccta

SEQ ID NO: 236521 - DNA, 367 bp, Homo sapiens
ggaaatctgttttaatgctatagatttccttctaaatattggccactaatgaatactttaaaagtactgcatgccaaacagcccacagacttctagtctgtaaagaaagaagaaaaaaagggcgataggatttgaagttaagaaaaggtaaaaaacatgtggcgtgcctagttcgtgggaaaaaaagctggtttgatgatcctgcctttttattttttctttttagaaaaatttttacaactatattgtctttttaagtttttaaatgatttttttctttcctatcatctccttagcctgataccctgccttatctttaggaaaaaaatgctcctgataataaatacaaaatataataaactcattt

SEQ ID NO: 236522 - DNA, 131 bp, Homo sapiens
gcattttgaacaataagcttatgaaagactaaagtgtgttagaagccatcctaatttgattgttcctgaacaaaccctacaccataacagcctgtctgaatgcgaggggtgctctggatcaggaagtcaca

SEQ ID NO: 236523 - DNA, 1804 bp, Homo sapiens
  misc_feature (145)..(145): n is a, c, g, or t
gatgccatgcggtcatcctctttctgtttccagcaactatagcaggggctgggtcctagcagttgcctacgtaatattgctagaattaatgaatgagaacagagtcttaaaaggcaaattctggccaggcacggtggctcatgcntgtaatcctagcactttgggaggccaggctggtctcaaactcctgacctcaggtgatccacccgcctcggcctcccagagtgttgggattacaggcgtgagccactgctcccggccctgcctccttgtttttgttgctcctctctgtagccctgtcccagcaacttgtatgcttcctttttcacagagccatcatgcatgatgaagaaaatggaatgcatcagtattttatagacattattattgtcagaaatacatgcagatttggacagggacaaatacagagatgaacactattattaaggcaggactttttattttttagctttagtgccttttaatcatattttcataatataaaatcataacataaatatcaggaaagctagtaattattattttgtgtgtggactgcctggctatattataaacagggcaaagcttacattttccttccttcattcatgcagtcagggaaatactaagttgcaaaatgatgacaatgatacaaacaagtcatttggcccagaaggcaccaggagcagctattaataaggaaaacaactttttccagctgaggccgagttgattaacttattttcctggaggagagataaagcttaagctataatttattgaaaattaatgaaaatgaattttggtggcactggctatcaaactagaatgaaaataagaatgtgagtatactgtattaaaccaaattttccttcaggactcccatatttcttcagctcttgtactgtcacagaggttcgaatttgaaagcattaatgttgtcattttttgccagtggttctgatggtaaatatccacagagtcttttatctttaatttcttttgatgtgtgtttttagatcaagcttagttagcaatttttaatgagaacttatacatcttggagctttagtgctttgtttcaaaagcctgaccttgcatttgctttttaaacaaatgtctcagagctcttgttgccaaagactaaaatcttgaaattttggtgtgatcatttataaatttcttgatgtccagttatgagactttgctagggggataacctagtgctgtaaccaatgacatactgatagaaaaaactttactgcctttttggttgaaggatgctcgttgttagatcattttttcccccaggatctcaattttcatgaatgttctttccagcctatctttaaggtttatttttatattgcattgcaaacaatgcagtatcaaatgtttgttgttcacatggatgtggacatcaatatgaggaaggaagagccagacaggcatgtgacggtcctctgaaggaccactgatattacaaatggcctgtgaactgggttcccaggcaggttcctcaaggagagacgttgcatcctggcacccagatccctggacttaaagatcaatggccttgatttgtctgaaattacttcacagagaggattcctgttaatgattacagatccttcccaatacactttatttatgggaccctctcaatgaggggatctctgctgtctctagcaccggaaagatgctttctccagaagatgaattggcatgaaccctaccaggcctgggagggtaggagcttctgtagccttttcaagtaaaagggaaaatccagacttgcattagc

SEQ ID NO: 236524 - DNA, 384 bp, Homo sapiens
taagcatttttacatatctccactaaacctgacaacacacagggtatggggctattatcctcactttacaggtgagaaaacaggggaaccctagagaaattggccataattactaatttgtagcagatccatgaataaaacctggatttcattattcctaagtccaattctctttccacatttctccttgtagtccttgggtggtggaatgcaatatacttgacgtgattgagaatgaaatgtactttgctaagaaatacttgaggctggcctggtgcagtgactcacgcctgtaatcctagcactttgtaaggccaacgttgggggatcactggaccaggcattcgagatcagcctgggcaacaaagagagacctcatctcta

SEQ ID NO: 236525 - DNA, 529 bp, Homo sapiens
ctgtagagaactaaatgatggttgttatgcaaaggtaggatttttaacatcacatatgaatagtcttcggaatatttcctgttgttttcatccagatttgtcattactgctagtttttgaggttaggaaaagagagctgtcaccttcatggggcttaaaaaaatacaatgtggagattttcagtcagttttcagtcagaggaaggaataccggctgtccgtctagtttgaattcttcatgatggtatccttagccatgatccattgctcttgttttgattatttgtattttaaagagcagattgatgcaatgggctagtgagggcattctaccctattttgagagtttgagagcttcacttttttaaactaagaatgatagtgagtttaaaaaatattagttgtatttcaaaattaaccttaggtgtgcttgaaattttcttatgtacttcagtaacaacatactgggattgcaaatattgtacttttgtatactgtaaagggggagttgaaaatacattaaatagtaa

SEQ ID NO: 236526 - DNA, 266 bp, Homo sapiens
ctgcgtactatgtactcagaatgaaaatagaagtacaagattataaacaaaatgcaatcaaacttttcttaagcttacctaaagttattttatctgaaaatttcaagcaactttgatcaacattaaattgacaatctaaactaacaggtcttttgaatttatgtatggtagtaaacattctctctattaattttattacctaaggctaaacctaaaatttttaagcaaaattagaaagtcttcacttatcaaaaaataaagtttgt

SEQ ID NO: 236527 - DNA, 743 bp, Homo sapiens
gactctttgtatgatctgagaggtatactgttctgctattctgagaagaagtatttcagaaagatgaattaagagtacagtggactgctcccacctggaaacttttatctatctcacctctggacctgataaattctttatcactcaggaccttgatgacgctgctctctgaaaccctccccagctctctctattaccgtgagaaacatcagaactttggttcccattgcatatcgcaggtacctctgctttcatgccatgctgtaatggagtgattgggtagcatgttttcatctctttccagattgaaaatctgtatttctccctgtatatcttcaacacctaatgcacatagaactttgtaggtacctggaaaatgcaccacagttttcttttctttttgcagacttttcacaagtattaccaacttacaaagaattaattttgtaggattctagaaagacaaatcaggaatggtgccatatacatcttttttgattccctgctctaaagaatattatcaggttaccttcctgcagagttttaaaagaattgcatatttcaagctgactttcaggatgtaaatataaccaaagcaactgatatgtaagggttttacatttaagtctttaatccatcttgagttaatttttgtataggtataagaaaggggtccagttttaattttctgcgtatggctagccagttctcccagcaccatttattaaatagggaatcctttc

SEQ ID NO: 236528 - DNA, 463 bp, Homo sapiens
gagctgtaagactttctttgttaattttcaaagagccccatgaagtctccaccactggaaggtgcctgagaatcagctgaggtgtccggcagaagcaacgatacccaagagtggccgtgatatgcagccctggccacctccaggtaagaaaggaaaaaaacagcacaaccagaaaacacacacatgtaagccatccactggggactcctattaacacctacgtgccaggacagaattgaaccagagaagctgcatcacatgtacattgctggtacatggtggatgcctcccagaaggactaaatttccaaaggattcaggagccctggacttgggcccatggtgagatgacaagcctttatgtgaagctgagacagagacagtttcacatattggctctgccacctatgttccttgatggctgggatcttggtgtgcacatctggaagatggagaccatgcta

SEQ ID NO: 236529 - DNA, 438 bp, Homo sapiens
tctttttaaaatttagtcataaatttaatttgatatcctgccaaaacaccaaataagcttagagagttaggtagtttttaacgtgggctcggagccaggtcacctggattcaaatgtcagctcttccatttcctggctgagtgactttgggcaagtcgtttaacttccctgtgttctagttttctcctccataaatggggatcattcctgtcttacaggattgctgcagggattaaatgagttacatatgcaaagcatttagaatgactcctggcacatagcaatcacttgcttacaagtaagtgcattgctgttattaggctacacaaaaagcactatggtggggtgttaagagttgacactgtagagctagaccacctggatctctgtcatggcaccaccacttccatctctgtgtgctacagttttctcatctgt

SEQ ID NO: 236530 - DNA, 487 bp, Homo sapiens
tgcagtgtcttatggataatgtgagccccctcagtatttctgaaacgttttcattctctgttgaagagagaaaatagtaacatgaagtgggtagagagagaggagaaaagaggaattataagagcatcagtaggggatggatgaaggactgggtgtcatatgacaagtagctaaattggccattacgggtatcgaactccatttggtgtgtaatagtaggtgagcacttggccatatgaaactcatatctatatatcaactttccctaaacaccatctcaactaatgagcactgaatgaggaatggagatttggttgggcagagataacagcagaaaatatgagaaatataagtacaatactgtaattaaaggaaaaccactgtgacttatgacctccatctcaattcctttattctttcttttcctgtcaagcagcataaagcaagaactcttatggaaagtagacagaggaagcaacatttcttt

SEQ ID NO: 236531 - DNA, 345 bp, Homo sapiens
aaactctgtttgacacataggaagcattaataaatgctagttccatgactgtccacttggtctgcagacttcagagggttacagacactcatgtgttcagcaatcattgagcgctctttgaaacatttgttagccagttaattgccttttgcagttcaagtcctctcatctgtaaacctttctaggagactgccgatcagctcaccgcaagcagagtactcttagggctgtggctgcagcagccgagtcacatgatccctgggcctggtaacaccttgcggtcttcataagtctttgcctatacagtagaccatcctggacgaagacccatgactgaatctaata

SEQ ID NO: 236532 - DNA, 545 bp, Homo sapiens
ctttgttcccctctcacagtgaaccctgagctatgtatctactggaaaacccacaccacacacacgtgtctcccctctttgaccatacttctccctcatctcacctctctccacatttgaaagatggcaagctagatggagaactactctacggacactaggattttgttaaaatgctattttattgaagtgtattctagtagtcccccttatccatagttttcctttccaaagtttcagctacacacagggtctacttcatttcaaatatattaaatggaaaactttagaaataaacaattcataagtgttagattgtgcactatcctgagtagtgtgatgaaatctcacaccatcctgctccatcctgcctggtacgtggatcctctctttgtctggcatctccatgctgtagacactccctctccatgagtcacttagaagctacctcactgcaatgagacatgatggtgccactgcactccagcctggacagagcgagaccctgtctctgaaaaacaaacaaacaaacaacaccaccaaga

SEQ ID NO: 236533 - DNA, 630 bp, Homo sapiens
cgacgcccagctaattttttgtatttttagtagagatcaggtctccctgtgttgcccaggctggtctcgaactcctgggctcaagcaatcctcctgccttggcctctgaacatgcagtgattacaggcgtgagagccaccgtgcctgacctgaggtgtgcactttagacataaaatgagagaggccaagttcacattttgttggtgaacagaaatctaggctggcctccttttggttcagaaagagtatttatgatttttacttttttggtttctttttgtcttcttttatttttacccccatgcccctgaattctctcctgtgctcggtcgagaggatcttagcttgcaggattgttagggagctgctgccagccggctgctccttccataaaaggccactctcatgggtctgatatgaggaactctgtcgctggagctcatcagggtggggcggctgcaaaacacacacctcagaaggcgtctgatccaatggagtggatgggtcatttaaggttgactgtgaaaatatcacatccaacttccttttttgaaaagtaaataatggtgagctgtatctttaaataaagttaaatcctcctgcccctgcaatatgctggggccagacctc

SEQ ID NO: 236534 - DNA, 684 bp, Homo sapiens
cgacgcccagctaattttttgtatttttagtagagatcaggtctccctgtgttgcccaggctggtctcgaactcctgggctcaagcaatcctcctgccttggcctctgaacatgcagtgattacaggcgtgagagccaccgtgcctgacctgaggtgtgcactttagacataaaatgagagaggccaagttcacattttgttggtgaacagaaatctaggctggcctccttttggttcagaaagagtatttatgatttttacttttttggtttctttttgtcttcttttatttttacccccaaaaaggactttaaatcttctcaagccctcttattagtaaatgtttgcccctccctgcccctgaattctctcctgtgctcggtcgagaggatcttagcttgcaggattgttagggagctgctgccagccggctgctccttccataaaaggccactctcatgggtctgatatgaggaactctgtcgctggagctcatcagggtggggcggctgcaaaacacacacctcagaaggcgtctgatccaatggagtggatgggtcatttaaggttgactgtgaaaatatcacatccaacttccttttttgaaaagtaaataatggtgagctgtatctttaaataaagttaaatcctcctgcccctgcaatatgctggggccagacctc

SEQ ID NO: 236535 - DNA, 367 bp, Homo sapiens
ctcactttgtgaccatcctgcccctcactggaggtccctagaggcaggtgcctttcagctaagaatatctgggagtctgtggtttgtgaggagcttgctggcacattagtgtaaagggtgtgatccttttaatggccacacttttctgtatgatgtctttgttttcattctctgatgtcagggaggtgaaaagaaggctcaggtgcctcatttctaaatagactgaatgtctgttacctctcctctccttttcaactgagaagcccttggtgtacagcggaaaggggctgtaggggaatgcattttgccactgcagtcatgagctgacccagccttctgtattcttggatgttttcattctaggctg

SEQ ID NO: 236536 - DNA, 295 bp, Homo sapiens
ccgccttggcctctcaaggtgctgggattacaggtgtgagccaccacacctaaccctttttgttattttgtttcttttttactgccttcttttgtgttaaataatattttctattgaaccatttcaattcctttgtggttttttaaattttttttaagttattttcttaggctgggctcagtgactaatgcctataatcccagtactttgggaggccaaggaggaaggatcacttgaggccaggagtttcagaccagtctaggcaacatagcaagaccctatctctttaccaaaa

SEQ ID NO: 236537 - DNA, 228 bp, Homo sapiens
tgatcttagctcactgcaacatctgcctcccaatgccccaaaattgaatccaatccctcaatcactaccagtataaatcaatgtaaatgacagaagtatagtgtgtgctaggacaaaggaaaaacaggtgaagaccttattctacataagctggagagcaacatttcataaataattagaaaatgtacacttaaccatatactactgctaggcttcatccaaagtgac

SEQ ID NO: 236538 - DNA, 2460 bp, Homo sapiens
  misc_feature (1688)..(1688): n is a, c, g, or t
  misc_feature (1817)..(1817): n is a, c, g, or t
gagaattaagtaaaccctatttaaaccctattcaagatggctcccctggtgtcaccaccggacatggtgcttggggctttgtgaatgatcagtggaggacttgcccacgtgaggcaaaatacggaactaattgtcacgggggtctcacatatcagggcggttgcaaattgtggcaaggcaggtgcgaggggacaccttggagtcccttgggcttcccagggcctctgggggcaccgcagcctctacacagacttgcatgtacctgctgagagtccctcccactcccactcactgaccctgtcccacatcttaaagctgtgcctcctgtttcctggccatgctgacaggtgggacaccttctgcttgctgggtggtgactggatcggcacacatgtgtgacccagcggggggtgtggggtgcaggtgccagagccccaggggctgcagagcctgctccctccctgccctggtttcaacttcctcagtctcagcaccacctaacgcaccaccttgccctgcatttccccggctttaacatgtgaagccactctgcagggaaacaacgggtcggagtggggtggagtggggtggggggtgggggtcaagcatgtgcctcttccccacccagcggcagccggaagcagctgggcccacacacctctccatggactccagcgtgccatccaggctgcccaggtgctccggaataggcagcaaggttttgcctttgatcttgccactcatcacaaacatttcattcttcagcctgtggacctgcttcacgatgtcttccgagaccacctggggccatccagccatgttctcactttggtttaacagagaagagaggacctaaaaggaaacacttctgtggttccgccccctgtgccttcaccagctcggcaaccgcacagagccaggtccccggggggttccaaagacccggtgtctggagccctgggaaaactgggtcccgcacagagccaggtccccagggggattccaaagacctggtgtctggagccctgggaaaactggatccttcttccagaaggaggtgtggccggtcatggagtttataccagctgccctgtcctggtggtaccaaagccatccccaagctcttgcacccatagcacacactccttgctaaaagcctaggaggactgtgatgggtcaaactgtgtcccccaaatccatctgctgaagccctaactcccagcaccttagaatgtgactatttggagatagggtctttaaagaggtgagtaagggctgggggcggtagctcatacctgtaaatcctaggacttagggaggccgaggcaggtacatcacctgaggtcaagagtttgagaccagcctggccaacatggtgaaacctcgtctctactgaaaatataaaaattagccaggcatggtggcacctgcctataatcccagctatttgggaggctgaggcaagagaatcatttgaacctgggaggtggaggttgcagtgagctgagatcacaccattgccctccagactggacaacagagcaaaaatactgtcaaaaaaaaaaaaaaagaggtgagtaattaaaatcagattactagggtgggccctagtctgacaggtgtccttacgaggaggggagattagacatgcacagaaggccgaccacatgaggacccagggagaagangtccatctgcaagtcaaggagagaggccttggggaaaaccaaccccgccgacaccttcaacttcaacctctagcctccaggactgtgagaaaatgtctggtgtacaagcgaagcacacaggcccctgtnctgcagatgagaagagtgatgaccaggaaggataaggcacccccattctggaggtccgaatccccaaagtgtgtcccccccacctacacagcacctgccaagggggacagcagagggacacataaaatgacactccattttttcccctttcttaagtcaaagtctcaaaattggagaaacctatctgccagtactcagtccccaccttcccaggccatgggcagcaaccgtacccggcacagcatggcagtctcaatgctgtccagagagaacaaggggatgctcggggcttctcagacttcaagggcacgagcaccacctggaggtcttgttagacagcaggtctgtggccgggcatgatggctcacgcctataatcccaacagtttgggaggttgaggcaggaggatcgcttgagcccaggagtcttgagaccagcctgggcaacaggctattttttggtgagacctcatctcttaccaaaaaatacgaaaattagccaggtgtggtggtgcatgcctgtggtcccagctactcaggaggctgaggctggaggattggttgagcttaggaggttgaggctgcagtgagctgtgctcccaccactgcactccagcctgggaagcagagtgagaccctgtctc

SEQ ID NO: 236539 - DNA, 511 bp, Homo sapiens
tcaattcaatttaatctaataagaatgaaatgagcacccacttcaagcctagatgtgttaaatgtagttggggtacaaagaagtataaatatgattagggtagatcatttcattactcttttgttagggttccttttctaaatgcatttatgttgactttatatgatggcatgaaattgtgttaagccattataaaaattatcattgttttccttttctttctggggaaaaaagtgttctgcaaatatatacattcaaaaaatcatatgaagtatatatagatgtatctcataagtatgtatttattctgatacatgtgtcttattcagaagcatgtatcttatacttttcattctgaagcttgcatcttattttcagaataaatatataatacataaatacatgtgctccttactgataaatatataactctaaggtcatggtaattaatatgttttctattgctgtgtatccaaaacaacttttaggaaaagaagtcgaatagctcaag

SEQ ID NO: 236540 - DNA, 284 bp, Homo sapiens
aatcccaacaacctcctatcaaagcacacttgaagctttgtgtcttttttttcactataaagatttccacttccttacctgacttgagcctctaccaaattcaagtggtggtggctgactcccttgctgtcataagctctgaataagtagcctctgcttgttctaatttgggtggtctttgtttatttctagagattttctggagcttccactgacatatggtctatactgcccagcaccgtggatcccagcctgggtgacagagcgagactccatctcaacca

SEQ ID NO: 236541 - DNA, 464 bp, Homo sapiens
tgggctgcagagtgagaccctgcctcaaaaataaaataaaattacatggctggtttatggctgattccatagttcagtactgttgacaataggcaacacaaagagtggtatttcctaaaggttctagtggactagaatgtaacattttttaataaaattaattcatgtgaaaactggcttggagattgtacccttctaaactgctaatatccaatgttacatcctcctcctctccttaatgggtctggactgcatgcactacagttgcccagtaaaataaaacatcgtcaaatactgcattaggtatcagggaccaggcatttgtctgagctccaacacgtgctttctgggtcttggatttttctctgctcttaaattagaatgattaatttaatcattaaattagatggctgacatgaacgactaatgtcttcgtggagtaccattcttcataaaaattgacc

SEQ ID NO: 236542 - DNA, 399 bp, Homo sapiens
gccgctgccgccgccgctgctcatgatcattattttaccttttaattctttttttttccgctcttgccaaatgctttggctccaagttttctatgtgtatctattgatataaatgtatatatttatttattctagctgtcaggtattgttatgtatttattattattattgttgtctttgagtgaatcggccggtttggggaggcttttgccaccctcccttgtgttgttttggtttttggaaaggaggtggaggagaggaaggaggggaattagggggcggccggagcagagaggacgagacagtgcttggggggtgattcgggctagtctgggggctgtctggccccagaccgcggagaggacgcgcgctcgcgctctcgctctttctgctgctgct

SEQ ID NO: 236543 - DNA, 1937 bp, Homo sapiens
ctgtgggggcgaggagggggcagcgggcgcgcggctggcgcgcgggggcgggccttggggcacgggggcggggcccgcccagcagcacctgggaaacgcccgcgcggtttggggcaggcgtggccgtcggggcggagggcggtggccggccgcggtccgggcgtcaggccgggcggcgggggcggcagggaggcggcgctctggggccgcaggcggacgtactctgtgagcggcgcccgggcgcctgggcaggcgcctcccgagtaccggcgcccattttgcccgcccgctaaggagacccgtgcgcggcctacacgcttgggggacagccctttaagacgacatctccgcgaacgccggcctcttgagccagggggacgctcttttgaaagtcagtcccaaaacagttaaggttttattttattttgttttatttccaagtcacagcccccgaatctcgtacaactctccctggaccacttccggttgccggcccgcgcctcataacttcggttcgagtgacctcggcccgggatgcccctcggctcaccccgggctcacgtcgcgatcctggcttgagtggcccagggtgggagacctggaagttttagcctagctgttctcaaggcggattaattagcccaagaaacattatattcatgcttaggtggagaaaagcagggctagaattggaacccaaagcccagaatggcaggagaggatgtgggggctccacccgatcacctctgggttcaccaagagggtatctaccgcgacgaataccagcgcacgtgggtggccgtcgtggaagaggagacgagtttcctaagggcacgagtccagcaaattcaggttcccttaggtgacgcagctaggccaagtcaccttcttacctcccagctacctctcatgtggcaactctacccggaggagcgctacatggataacaactctcgcttgtggcagatacagcatcatttaatggtcaggggagtacaggagctgttgcttaagcttttgcctgatgactaacctggtgctgggattctacgaagatatgctcctttgttctgttcagtatttggcaatcacttcatccactactgcagtgcacccacccttgggcctggggggagggagtgggttgaaaaactgctcaagaaacagaagtttagcaagggtcatgaagaatactgcaagtgaaactgcagagagaggttacgtaggcagaaagcaagtcaacaaaagcacttagtcaggatccgtaacttgaaattgactcctttggaaattgccatagaacccttaatggacatcatcggctggacctgggatctgatgaatcccacaaaagtcagcaccttctacagaacagatgccctgatcaccaaggacttggtactgatttagagagaagagagcagctcctagcagcatcaacatctatttgtcgcttatttgccctgcagcaattcacctgcctttccttctcccatcctttttctggatatgccgcagaaggatccgtgccagaagcaagcctgtgagatacagaaatgtttacaagccaacagctacatggaatcaaagtgtcaggctgtcatccaagaactgcgtaagtgttgtgctcagtatcccaagggaagatctgtcgtctgttcaggatttgaaaaagaagaggaagaaaacctaacacggaagtctgcatcaaagtaaagttcttctgaagtgctgctccatgtttccaccaaatgaattttttttatcctcctgactcttcaggccaggtagcagcaaatagcaaatgaaaaagtcagctacaaaagttaatgaatatgccatctatgcagaacaggcagaaatataaacacattaaaagacaaatatgtagaatgtaatatactgagctgctaaaataaacctgtttaagagaaaaa

SEQ ID NO: 236544 - DNA, 493 bp, Homo sapiens
  misc_feature (21)..(21): n is a, c, g, or t
tttttttattggggtggttangaagggagatagatagataaaaaaaaaaaactcgttttctggatatgccgcagaaggatccgtgccagaagcaagcctgtgagatacagaaatgtttacaagccaacagctacatggaatcaaagtgtcaggctgtcatccaagaactgcgtaagtgttgtgctcagtatcccaagggaagatctgtcgtctgttcaggatttgaaaaagaagaggaagaaaacctaacacggaagtctgcatcaaagtaaagttcttctgaagtgctgctccatgtttccaccaaatgaattttttttatcctcctgactcttcaggccaggtagcagcaaatagcaaatgaaaaagtcagctacaaaagttaatgaatatgccatctatgcagaacaggcagaaatataaacacattaaaagacaaatatgtagaatgtaatatactgagctgctaaaataaacctgtttaagagaaaaa

SEQ ID NO: 236545 - DNA, 478 bp, Homo sapiens
gaagaacaagtttgtatcagctatatataattcacatctattttctggatatgccgcagaaggatccgtgccagaagcaagcctgtgagatacagaaatgtttacaagccaacagctacatggaatcaaagtgtcaggctgtcatccaagaactgcgtaagtgttgtgctcagtatcccaagggaagatctgtcgtctgttcaggatttgaaaaagaagaggaagaaaacctaacacggaagtctgcatcaaagtaaagttcttctgaagtgctgctccatgtttccaccaaatgaattttttttatcctcctgactcttcaggccaggtagcagcaaatagcaaatgaaaaagtcagctacaaaagttaatgaatatgccatctatgcagaacaggcagaaatataaacacattaaaagacaaatatgtagaatgtaatatactgagctgctaaaataaacctgtttaagagaaaaa

SEQ ID NO: 236546 - DNA, 548 bp, Homo sapiens
  misc_feature (40)..(40): n is a, c, g, or t
  misc_feature (42)..(43): n is a, c, g, or t
  misc_feature (46)..(46): n is a, c, g, or t
  misc_feature (49)..(49): n is a, c, g, or t
  misc_feature (65)..(65): n is a, c, g, or t
  misc_feature (522)..(522): n is a, c, g, or t
ccgccactgcactatcccgattttcgcattttttattacnannaanaanattttatgggaaactnttttctggatatgccgcagaaggatccgtgccagaagcaagcctgtgagatacagaaatgtttacaagccaacagctacatggaatcaaagtgtcaggctgtcatccaagaactgcgtaagtgttgtgctcagtatcccaagggaagatctgtcgtctgttcaggatttgaaaaagaagaggaagaaaacctaacacggaagtctgcatcaaagtaaagttcttctgaagtgctgctccatgtttccaccaaatgaattttttttatcctcctgactcttcaggccaggtagcagcaaatagcaaatgaaaaagtcagctacaaaagttaatgaatatgccatctatgcagaacaggcagaaatataaacacattaaaagacaaatatgtagaatgtaatatactgagctgctaaaataaacctgtttaagagaaaaaaaaaaaagaacatggcctngttggcctcattggtggagtctttct

SEQ ID NO: 236547 - DNA, 639 bp, Homo sapiens
  misc_feature (550)..(551): n is a, c, g, or t
agttataacagtttatatacattaaaagtaaggttttactttaaaaaaaaaagtcttgggaataatagctaccatgtattggagtcctttccaggcactattgtatgtactttatatactttatcacatttaatcctcctgtcaatgctttgaggtaggtatgattcccattttatatatgagtaataaaaaaagctcaaggagtttaatcatttatcaagggtttcttctgcgaatgatagagccaggctgcgccgtcggctcctctagcctaacgttggtttacagtattcaaaaagagttgattgaattcaaggttttttttccatgtaaagctatttatatcttccaagcctaatgaaatggatattataaaaatacagttgattcatcctatgtttgggaagagtatttttagtgtaattattttccagcaattgtaagggcatatactgcttgtctcagaagaaaattccacgtagaggggctttaaagtctttatggaaaaaagaaaaataaaaatcatttttcttgttttagaaaaaaaaannttgcatgcggccgaattcgagctaacttggcaatttggctataggagccgattacaattcactgccggcgtttacacgtcgggactgg

SEQ ID NO: 236548 - DNA, 978 bp, Homo sapiens
agttataacagtttatatacattaaaagtaaggttttactttaaaaaaaaaagtcttgggaataatagctaccatgtattggagtcctttccaggcactattgtatgtactttatatactttatcacatttaatcctcctgtcaatgctttgaggtaggtatgattcccattttatatatgagtaataaaaaaagctcaaggagtttaatcatttatcaagggtttcttctgcgaatgatagagccaggctgcgccgtcggctcctctagcctaacgttggtttacagtattcaaaaagagttgattgaattcaaggttttttttccatgtaaagctatttatatcttccaagcctaatgaaatggatattataaaaatacagttgattcatcctatgtttgggaagagtatttttagtgtaattattttccagcaattgtaagggcatatactgcttgtctcagaagaaaattccacgtagaggggctttaaagtctttatggaaaaaagaaaaataaaaatcatttttcttgttttagttttctggatatgccgcagaaggatccgtgccagaagcaagcctgtgagatacagaaatgtttacaagccaacagctacatggaatcaaagtgtcaggctgtcatccaagaactgcgtaagtgttgtgctcagtatcccaagggaagatctgtcgtctgttcaggatttgaaaaagaagaggaagaaaacctaacacggaagtctgcatcaaagtaaagttcttctgaagtgctgctccatgtttccaccaaatgaattttttttatcctcctgactcttcaggccaggtagcagcaaatagcaaatgaaaaagtcagctacaaaagttaatgaatatgccatctatgcagaacaggcagaaatataaacacattaaaagacaaatatgtagaatgtaatatactgagctgctaaaataaacctgtttaagagaaaaa

SEQ ID NO: 236549 - DNA, 1144 bp, Homo sapiens
  misc_feature (1118)..(1118): n is a, c, g, or t
ctgtgggggcgaggagggggcagcgggcgcgcggctggcgcgcgggggcgggccttggggcacgggggcggggcccgcccagcagcacctgggaaacgcccgcgcggtttggggcaggcgtggccgtcggggcggagggcggtggccggccgcggtccgggcgtcaggccgggcggcgggggcggcagggaggcggcgctctggggccgcaggcggacgtactctgtgagcggcgcccgggcgcctgggcaggcgcctcccgagtaccggcgcccattttgcccgcccgctaaggagacccgtgcgcggcctacacgcttgggggacagccctttaagacgacatctccgcgaacgccggcctcttgagccagggggacgctcttttgaaagtcagtcccaaaacagttaaggttttattttattttgttttatttccaagtcacagcccccgaatctcgtacaactctccctggaccacttccggttgccggcccgcgcctcataacttcggttcgagtgacctcggcccgggatgcccctcggctcaccccgggctcacgtcgcgatcctggcttgagtggcccagggtgggagacctggaagttttagcctagctgttctcaaggcggattaattagcccaagaaacattatattcatttttctggatatgccgcagaaggatccgtgccagaagcaagcctgtgagatacagaaatgtttacaagccaacagctacatggaatcaaagtgtcaggctgtcatccaagaactgcgtaagtgttgtgctcagtatcccaagggaagatctgtcgtctgttcaggatttgaaaaagaagaggaagaaaacctaacacggaagtctgcatcaaagtaaagttcttctgaagtgctgctccatgtttccaccaaatgaattttttttatcctcctgactcttcaggccaggtagcagcaaatagcaaatgaaaaagtcagctacaaaagttaatgaatatgccatctatgcagaacaggcagaaatataaacacattaaaagacaaatatgtagaatgtaatatactgagctgctaaaataaacctgtttaagagaaaaaaaaaaaagaacatggcctngttggcctcattggtggagtctttct

SEQ ID NO: 236550 - DNA, 999 bp, Homo sapiens
ggagggggcagacaacccctacggctaggtacgaggcctggttgtcgtcggggcggagggcggtggccggccgcggtccgggcgtcaggccgggcggcgggggcggcagggaggcggcgctctggggccgcaggcggacgtactctgtgagcggcgcccgggcgcctgggcaggcgcctcccgagtaccggcgcccattttgcccgcccgctaaggagacccgtgcgcggcctacacgcttgggggacagccctttaagacgacatctccgcgaacgccggcctcttgagccagggggacgctcttttgaaagtcagtcccaaaacagttaaggttttattttattttgttttatttccaagtcacagcccccgaatctcgtacaactctccctggaccacttccggttgccggcccgcgcctcataacttcggttcgagtgacctcggcccgggatgcccctcggctcaccccgggctcacgtcgcgatcctggcttgagtggcccagggtgggagacctggaagttttagcctagctgttctcaaggcggattaattagcccaagaaacattatattcatgagacgagtttcctaagggcacgagtccagcaaattcaggttcccttaggtgacgcagctaggccaagtcaccttcttacctcccagctacctctcatgtggcaactctacccggaggagcgctacatggataacaactctcgcttgtggcagatacagcatcatttaatggtcaggggagtacaggagctgttgcttaagcttttgcctgatgactaacctggtggctgggaatcctacgaagaatcatgctcccttgctctgtcagtatttgggcagtcaacttccatcctctactggagtgcaccaccctgggcctgcgggaggagtggggtcgcaccctgtgcccgcaccacgctctcgccacggcccctacaacactgcgtgacactcgccacaggctctcgcagagcaccc

SEQ ID NO: 236551 - DNA, 1099 bp, Homo sapiens
ctgtgggggcgaggagggggcagcgggcgcgcggctggcgcgcgggggcgggccttggggcacgggggcggggcccgcccagcagcacctgggaaacgcccgcgcggtttggggcaggcgtggccgtcggggcggagggcggtggccggccgcggtccgggcgtcaggccgggcggcgggggcggcagggaggcggcgctctggggccgcaggcggacgtactctgtgagcggcgcccgggcgcctgggcaggcgcctcccgagtaccggcgcccattttgcccgcccgctaaggagacccgtgcgcggcctacacgcttgggggacagccctttaagacgacatctccgcgaacgccggcctcttgagccagggggacgctcttttgaaagtcagtcccaaaacagttaaggttttattttattttgttttatttccaagtcacagcccccgaatctcgtacaactctccctggaccacttccggttgccggcccgcgcctcataacttcggttcgagtgacctcggcccgggatgcccctcggctcaccccgggctcacgtcgcgatcctggcttgagtggcccagggtgggagacctggaagttttagcctagctgttctcaaggcggattaattagcccaagaaacattatattcatttttctggatatgccgcagaaggatccgtgccagaagcaagcctgtgagatacagaaatgtttacaagccaacagctacatggaatcaaagtgtcaggctgtcatccaagaactgcgtaagtgttgtgctcagtatcccaagggaagatctgtcgtctgttcaggatttgaaaaagaagaggaagaaaacctaacacggaagtctgcatcaaagtaaagttcttctgaagtgctgctccatgtttccaccaaatgaattttttttatcctcctgactcttcaggccaggtagcagcaaatagcaaatgaaaaagtcagctacaaaagttaatgaatatgccatctatgcagaacaggcagaaatataaacacattaaaagacaaatatgtagaatgtaatatactgagctgctaaaataaacctgtttaagagaaaaa

SEQ ID NO: 236552 - DNA, 1020 bp, Homo sapiens
ggagggggcagacaacccctacggctaggtacgaggcctggttgtcgtcggggcggagggcggtggccggccgcggtccgggcgtcaggccgggcggcgggggcggcagggaggcggcgctctggggccgcaggcggacgtactctgtgagcggcgcccgggcgcctgggcaggcgcctcccgagtaccggcgcccattttgcccgcccgctaaggagacccgtgcgcggcctacacgcttgggggacagccctttaagacgacatctccgcgaacgccggcctcttgagccagggggacgctcttttgaaagtcagtcccaaaacagttaaggttttattttattttgttttatttccaagtcacagcccccgaatctcgtacaactctccctggaccacttccggttgccggcccgcgcctcataacttcggttcgagtgacctcggcccgggatgcccctcggctcaccccgggctcacgtcgcgatcctggcttgagtggcccagggtgggagacctggaagttttagcctagctgttctcaaggcggattaattagcccaagaaacattatattcatttttctggatatgccgcagaaggatccgtgccagaagcaagcctgtgagatacagaaatgtttacaagccaacagctacatggaatcaaagtgtcaggctgtcatccaagaactgcgtaagtgttgtgctcagtatcccaagggaagatctgtcgtctgttcaggatttgaaaaagaagaggaagaaaacctaacacggaagtctgcatcaaagtaaagttcttctgaagtgctgctccatgtttccaccaaatgaattttttttatcctcctgactcttcaggccaggtagcagcaaatagcaaatgaaaaagtcagctacaaaagttaatgaatatgccatctatgcagaacaggcagaaatataaacacattaaaagacaaatatgtagaatgtaatatactgagctgctaaaataaacctgtttaagagaaaaa

SEQ ID NO: 236553 - DNA, 1120 bp, Homo sapiens
ctgtgggggcgaggagggggcagcgggcgcgcggctggcgcgcgggggcgggccttggggcacgggggcggggcccgcccagcagcacctgggaaacgcccgcgcggtttggggcaggcgtggccgtcggggcggagggcggtggccggccgcggtccgggcgtcaggccgggcggcgggggcggcagggaggcggcgctctggggccgcaggcggacgtactctgtgagcggcgcccgggcgcctgggcaggcgcctcccgagtaccggcgcccattttgcccgcccgctaaggagacccgtgcgcggcctacacgcttgggggacagccctttaagacgacatctccgcgaacgccggcctcttgagccagggggacgctcttttgaaagtcagtcccaaaacagttaaggttttattttattttgttttatttccaagtcacagcccccgaatctcgtacaactctccctggaccacttccggttgccggcccgcgcctcataacttcggttcgagtgacctcggcccgggatgcccctcggctcaccccgggctcacgtcgcgatcctggcttgagtggcccagggtgggagacctggaagttttagcctagctgttctcaaggcggattaattagcccaagaaacattatattcatttttctggatatgccgcagaaggatccgtgccagaagcaagcctgtgagatacagaaatgtttacaagccaacagctacatggaatcaaagtgtcaggctgtcatccaagaactgcgtaagtgttgtgctcagtatcccaagggaagatctgtcgtctgttcaggatttgaaaaagaagaggaagaaaacctaacacggaagtctgcatcaaagtaaagttcttctgaagtgctgctccatgtttccaccaaatgaattttttttatcctcctgactcttcaggccaggtagcagcaaatagcaaatgaaaaagtcagctacaaaagttaatgaatatgccatctatgcagaacaggcagaaatataaacacattaaaagacaaatatgtagaatgtaatatactgagctgctaaaataaacctgtttaagagaaaaagcagaacaacaaacaccacaa

SEQ ID NO: 236554 - DNA, 557 bp, Homo sapiens
atatatgtatatacatatatatttaattgagtgtttatttctacagagacacagtagaagcccagtggttaaacacacaggctctacagatagactacccaggttgatgctccatcctttaggatccatatgaccttgagcaagtgacaacttctctgcattttaatctataaaatgggaacaagaagagtatttacctcataaggctttgtgaggaataaacacataaagcatttagaacaatggctggcacataggcaagctaaacaatattagcgattatttgtttttaagtgtttattatcccttgtaaccttctctgcaaaaagcaggaaccttgtctggttggttcactgctgtatgcagtgaacatgctggatgctatctgtagatcataacctggcatgtagtagggactcaatttgtacttactgaatgaatttgctgaattaataaagaaactaattcagtggtcagctgttcttcagggaagtgttccatgttgtatgataggcctttgccctgttggacacgtttttttcaaagatttgcataaa

SEQ ID NO: 236555 - DNA, 1976 bp, Homo sapiens
  misc_feature (1645)..(1645): n is a, c, g, or t
  misc_feature (1785)..(1785): n is a, c, g, or t
cacagttcatggtaaagcccaagactgtacctgcccatccactgccttttccatgtatcctggaactgagcatagacctcttcccaggcagagctgacagcaagtaaaggagatcataatcaggggaccaaacaactttgtctaaagtgtgaatgtcacctaaggagaagctgtgagatcagaagggtggggcagaggagcagacaccatgagggagagtccttgggggtacatctgccagactgacactgtctggcctgggcagtggaggggctagcaggaaccacaggtactggtggtgtggctactaccgttacaactgcctgtgcttggacatggaccctctgcaatatgcggcagtttcattcattgccccctacattctacaccaagtagaaatggaaggcaattggatacttcacagacaagatctaagtggagaaggaatgcgtcctgtggctgcagagatccttggagcttggaggggagagcttgagccccactgatgatgacctcccacagctcgccaactcagccctccctaagtccccatcgggggccaattctcactctggggttggggggactccaccatagctcatccatcatagggatgttggtatctactgtgggttgggtagggccgatgtgctgaggatggctcccccacaagcaagagatgtggatttggggagcttcccatcttgtgttgaaggaacataactcagaataataagagccaactataacaaacccacagccaacatcatactgaatgggcaaaagctgcaggcattccccttgaaaagtggcacaggataaggaagccctttctcaccactcctattcaatatagtgttgaaagtcctgatcacagcagtcaggcaacagaaataataaagggcatccaaataggaagagaggaagtcaaactatccttgtttgcagacagtatgattctatatctagaaaaccccatagcctcagcccaaaaggtccttcatctgataatttcagcaaagtttcaggagacaaaatcagtgtacaaaaatcactaacattcctatacacagtcgccaagccaagagccaaatcaggagcacaatcccattcataattgccacaaaaaagaataaaatacccaggaatgcagctaaccaaggaagtaaaggatctctacaatgagaatcacaaacgctgctcaaagaaatcagagatgacacaaacaaatggaaaaactttccatgctcatggctaggaagaatcaatatcattaaagtggccatactacccaaagcaatttatagattcaatgctattcctatcaaactatcaattacatttttcacagaactagaaaaaacttaaaattcatatggaaccaaaaagcctgagtagtcaaggcaatcctaaacaaaaagaacaaaggtggaggcatcacattacctaacttcaaactacagggctaccatgaccaaaacagcatggtactggtacaaaagcagacacacagaccagtgggacagaatagagagcccaaaaataaggccacaaacctacagccatctgatcttcaacaaagttgacaaaaacaagcaatggggaaaggtctccctattcaataaatggtgctgggataactggntggccatatgcagaagatcgtaactggaccccttttactatgtacaaaaattaagatggtttaaagagttaaaacccaaaattataaaaatcctgaagataacttaggcaataccattctggacataggaactggcaaanatttcatgatgaagacaccaaaagcaattgtaacaaaagcaaaaatggacaaattggatttaagagctttttcatagcaaaataaacaacagggcagacaatctaccaaatgacagaaaatttttgcaaactatgcatctgacaaggggctaatatctagcatctataaggaatttaaacacagttacagg

SEQ ID NO: 236556 - DNA, 290 bp, Homo sapiens
actcaataattctcagtcacattccctacaaagccaattctacataattccctttcttcaaatcctcctaccaccttgcctcaggtcaagatatagctctttcaacttccccagtttctcctcaaaatatctttaaatttttgtccatttctcttctttccttcccagcacagagaatggttcccgctttccataccttatccatcccattccccttgagcatccctatcagctatcagtccacaggactgttccctttctccttctccactgagtcttccctctcagcc

SEQ ID NO: 236557 - DNA, 2049 bp, Homo sapiens
  misc_feature (772)..(772): n is a, c, g, or t
  misc_feature (834)..(834): n is a, c, g, or t
  misc_feature (1072)..(1072): n is a, c, g, or t
  misc_feature (1875)..(1875): n is a, c, g, or t
cctgttccttccatctaactgtatgttttgaaccattaaccaacctctctccataccccgcctcccagcctctggtgaccatcatatggttctctactccgttagatcaactttttttttttagctaccacatttgagtaaaaacatgcgatatttgcctatctgtaggaccttcttaagactgtgaaactgtacctaggaatccaacttacaagggatgtgaaggacctcttcaaggagaattaaaaaccactgctcaaggaaataagagaggacacaaacaaatggaaaaacattccgtgctcatggataggaagaatcagtatcgtgaaaatggccatactgcccaaagtaatttatagattcaatgctgtccccatcaagctaccatcagctttcttcacagaattagaaaaaactactttaaatttcatatggaaccagaaaagagcctatataacgaagacagtcctaagcaaaaacaacaaagctggaggcatcatgctgacttcaaactatactacaaggctacggtaaccaaaacagcatgattctggtaccaaaacagatacatagaccaatggaacagatcagaggcctcaaaaataacaccacacatctccaaccatcttatctttgacaaacctgacaaaaacaagcaatggggaaaggattccctatttaataaatggtttgggaaaactggctagccatatgcagaatactgaaactggaccccttccttacaccttatacaaaaactaactcaagntggattaaagacttaaacataagacctaaaaccataaaaaccctagaagaaaatctaggcantaccattcaggacatagaattgggcaaagacttcatgactaaaacaacaaaagcaatggcaacaaaagccaaaattgacaaataggatgtaattaaactaaagagcttctgcacagcaaaagaaactaccatcagagtgaacaggcagtctgcagaatgggagaaaatttttgcaatctatccatctgacaaagggctaatatccagaatctacaaataaacaaatttacaagaaacnaacaacaccatccaaaggtgggtgaaggatatgaatagagacttctcaaaagaagacatttatgcggccaacaaacatgaaaagcagctcatcatcactggtcattagagaaatgcaaatcaaaaccacaatgagataccatctcacaccacttagaatgatgatcattaaaaagtcaggaaacaacatgctggagaggatgtggagaaataggaaagcttttacactgttggtgggagtgtaaattagttcaaccattgtggaagacagtgtggtgattcctcaaggatctagaaccagaaatatcatttgacccagcaatcccattacttgggtatatacccaaaggattataaatcattctgctataaagacacatgtacacatatgcatactgcagcactattcacaatagcaaagacttggaaccaacccaaaagcccatcagtgatagacgggataaagaaaatacggcacgtatataccatggaatactatgcagacataaaaaaggatcagttcatgtcctttgcagggaaatggatgaagctggaaactatcattctcagcaaactatcacaaggacagaaaaccaaacaccacatgttctcactcatcagtgggaattgaacagtgagaacacatggacacagggaggggaacatcacacaccagggcctgtcagggaatgggagactaggggagggatagcattaggagaaatacccaatgtagatgacaggtcgatgggtgcagcaaacaaccttagcacatgtatacctatgtaacctgcacgttctgcncatgtattccagaacttaaattataataataataataataatagactgaaactggccaggtggggtggcttatgcttgtaattccagcattttgggaggctgaggcaggagaattgcttgaagccaggagttggagaccagtctgggaagtatagtgagaccttgtccctattt

SEQ ID NO: 236558 - DNA, 534 bp, Homo sapiens
aaataaacggagagcctcatgggtgccaggcatggtggctgcctcctaggcctgcctatttctgaaagcatggttgccaatcatctgcttcaggagcatctggaaggagggtgttagaaatgggaggtgtgccccattccagacccctgaaacagaatctctggaggtagggtccaggaaacttatatttttaatattctcaggggatccttatgcacgcttgtgtgtaaaaagcactacctggggctctgatattgaatgaaagtgtgggatttggagttaggctctgctgcttactgattacgtaattggcccagacatttaatattgctgagcttccccggaggtcgaggctacagtgagccatgattgtaccactgcactcagcctgggtgacagagagagaccttgtctcaaaaaaataaaaaaatattgctgagcttctgcatcttaatttgtaaagtggaaaaaacacttttcggggctggtgtgaaaattaaatgaaataataaaagtgaaaatgtttaaaaagct

SEQ ID NO: 236559 - DNA, 452 bp, Homo sapiens
attaaaaagccttattccacctgtttcggggggtggtgaagggatggaggcaaatttattaatacatctcaaaagcctttaataagaacatcatctctgaccttcatgctccactcccagtttcattcttttaatcaaaatacatatggaaggctacatccttaatttggtgctaggtactcatcagtatataagacatgtcctttccttcacttgctgcatctctaagtgactaacctgttccaatatgagtatgtcaaatatttgaggaagttagacttaaaaacaatatgattcctcctcattcttggcttttcaaaatgtcacccaaacctgaagtaagtgagattatatttcacatgatatgatggacttttaaaaacaacaacaaatggtatctaagatttcttccaaaaataaaatttgaagatgttaatgcaactactagcaca

SEQ ID NO: 236560 - DNA, 345 bp, Homo sapiens
tgagacggagtctcgctctgtctcccaggctgaagcgcaatggcacgatctcggctcactgcaacgtctgtctcttgggttcaagagaatcacttgacctgggagtcagaggttgcagtgatctgaggtcacgccattgcacccagcctaggcaacaagagcgaaactctgtctcaaaaaaaataaataaataaaaagtttgtgctgttagtttaatagggttgggagagtgaacaagttgttttcatcaaataattctagagttttggagtggggtgcttaggaacctcatgttttctgacattgtgacttactcccgttgagctgctcttcccgaagcactga

SEQ ID NO: 236561 - DNA, 258 bp, Homo sapiens
gtgattctcatgcctcagcctcctgagtagctggaatcacaggcatgcaccaccacacctggctaatttttgtatttttagtagagacaggatttcaccatgttggccaggctggtctcaaactcctggcctcaagtgatctatccccctcggcctcccaaaatgccaggattataggcatgagccagcgcacccagcctgttcctgctcttaaggttcctaatgagtaccaccagattacccttctgtcgtcttctc

SEQ ID NO: 236562 - DNA, 418 bp, Homo sapiens
ggtttcaaagctgtggagtgagaagaaagacgtgctttcgttagtcactttttatatgggttacctgttgaaggggcaaccccctgttcctgtagggcctcggctctcacttcctgacttggaccccacccgccaagccctagtgtgcgtgtcctgggcctgtgcttcctgcctggtgggagctggtgcttagccagggctcaatggagagagcagagatgatggcaggggtatgtgtgcacgcgtgtgtatgcgtgctcgtgtgagtggggatttctgcctagggtgtgggaacgtctgagccccgtggggactttgggtcattatttaaatttgggctaagttctactaggtcttctgtcacctgctggagttattttctttctgccacattttagaaaataaaatgcaccgaaca

SEQ ID NO: 236563 - DNA, 480 bp, Homo sapiens
ggctggtctcaaactcctgatctcaggttatccacccgcctcagcctccgaaagtgctgggattacaggcttgagccactgcacccggccaaatttttattcttaaaaagctaactgcataacatcacccatgctggagaatgtgaatatgtaatgagtccagtgcagagaacgctgggttcctgtttccatctactccaaggcagccacatccctcctcgtgctaccacggtattcagtgggcaacaggtattgctgcacgtgcacggtttactgccaacaccaaatctcactgtaaattcagactaaaaaaatacgaggaactctccactggttttttgttctgaatcaatataacggtgtaaaatagttaccagggtacccggcatatacaaagagtccttaatcgttcattacaataatcattactgttcagtggagactttgccatgcagaataaaatttactttgacagtatca

SEQ ID NO: 236564 - DNA, 166 bp, Homo sapiens
tccccggcgccaccgtgagcaccgtccttccctctctgtttggagggtttgttcttgatatgctttgactgcactttttctcctcttgcatctgcctataggatctttctactccacactcccaaacttctctcaaataattacaattatgggaacaggcgaaatt

SEQ ID NO: 236565 - DNA, 468 bp, Homo sapiens
tgtggttttcctatacttaaactgtacttatgtaaaacatcatttattaaactctccgactaggacggtgacaaatataattccttctcaagatgggcagtattagccaccgtagaagctccattcttcttgtctgtcattggttcaataaatatttgttgtcatgtgattccattctggccattaaatgaggttagaattctgttgactagcttctgaagaaatgtgtattgactcataaaaaaattacaagaaaaaaacagtttcttttctcctctggacattgtcctgtctgaatgtggaacctggaatttctgaatcatcttcctatcagcttgtggatgaagtcattccaaagtgttccttcagcattgacagatggaagtgaatgggtggagaggaagaaggcaaagggctggactctagagaacttcaacacctggtaggtggcgtgaaaagaggaatttc

SEQ ID NO: 236566 - DNA, 2504 bp, Homo sapiens
  misc_feature (454)..(454): n is a, c, g, or t
  misc_feature (1285)..(1285): n is a, c, g, or t
  misc_feature (1507)..(1507): n is a, c, g, or t
  misc_feature (1856)..(1856): n is a, c, g, or t
gtattttaatctattaaatgttttctgtatttctaagcagttttcagaattctgtggttgaataatagtacatttggttgaaaaaaattttttatagttatgaactacctaataacgaatgtgattacatggcttttttttcttcgtgactgtattctgaggaagaaatttgaggaatctgagtactgaagaatgatggtagttgcaaaagcagcagccaatttgtattatctcttactttgtgtgggacattgtctttggtgatttatgcctgtgcggtcatctcagcttctcagcaacaactcatgacatacagatgcccattgggatctgtactttacagagaaaaaaaaaagctgtaaacactttaaatttggagccctgatttcttttttggaattccaagtagacctagacactagttttccaattagggttgttgtaaggtctaganttttgtatgttgtggagatgtatcatagctgagtttaggatgacaaaccaccctcccgaataggttacattgtttctttctttttttcttaattatactttaacttctagggtacatgtgaacaacctgcaggtttgttacatatgtatacatgtgtcatgttggtgtgctgcacccattaactcatcacatgtgtcatattggtgtgctgcacccattaactcatcatttacattaggtgtatctcctaatgctatccctccctgctccccaccccacgacaggacccagtgtgtgatgttccccaccctgtgtccaagtgttctcattgttcaattcccacctaagagtgagaacatgcggtgtttggttttctgtccttgcgatagtttgctgagaatgatggtttcccgcttcatccatgccctaccaaggacatgaactcatccttttttatggctgcatagtattccatggtgtatatgtgccacattttcttaattcagtctatcattgatggacatttgggttggttccaagtctttgctattgtgaatagtgccacaataaacatacatgtgcatgtatctttatagcagcatgatttataatcctttgggtatatacccagtaatgggattgctgggtcaaatggtatttctagttctagatccttgaggaatcaccacactgtcttccacaatggttgaactagtttacagtaccaccaacggtttaaaagtgttcctatttctccacatcctccccagcacctgttgtttcctgactttttaatgattgccattctaactggtgtgagatggtatctcnttgtggttttgatttgcatttctctgatggccagtgatgatgaacattttttcatgtgttttttggctgcataaatgtcttttgagaagtgtctgttcatatgcttggcccactttttgatggggttgattttttcctgtaaatttgtttaagttctttgtagattctggatattagccctttgtcagatgggtagattgtaaaaattttctcctattctgnacagcaaaagaaataaccattaaatagacaacctacagaatgagagaaaaaatctgcgaattttgcatctgacaacatacacggaactcaaatcactaagaaaaaacaaataatcccattaaagagtgggcaaaggacatgaatagacagttttcaaaggatgatttgcaaatggccaacaaacatgcagaaatgctcaacatcactaatcatcagggaaatgcaagttaaaacgcaacaagatactactgtaccccagccagaatgaccattattaaaaattcaaataacaatagatgttggcatggacagggtgaaaaaggaacacttatacactgctggttggaangtaaattagtataacttctatagaatacagtatggagatttgatccatgaattccactactgagtatctacccaatggaaaggaaatcaatatataaaaaagacatatttatcacagcacagttcacaattgtaatgatacggaatcaacctaaatacccatcaaccaaagagtagataaagaaaatgtggcatatgtatattgtagaatactactcagccataaaaaagaatgaaataatgtcttttgcagcaactgggatggaactggaggctattattctaagtgaagtaattctggaatcaaaatctaaatccaacatgttctcatttacaggtggtttctaagcttatggatatgcaagggcatacagagtggtataatgtacattggagactcagaaggctggcaagcaggagagaggtgagagatgaaaaagtacctattggatatagtgttcaggtggtgggtgcactaaaattctagacttctccatggtaccgttcatccatgtaaccaaaaaatcactcatacccctaaagctactgaaataaaaaaaaatttttgaagtacattatgtaatgatgaaagggccaattcaccaggaaggtatgacaatgataaatgtacatgtactttacagcagaa

SEQ ID NO: 236567 - DNA, 469 bp, Homo sapiens
tcagtgtccaggaactgggacaatgagataaaagtcaagagacccagcccggggacaaacttagaaggtaaaaatatcaagaaatactgaagcccatgtcccaaaacaacagtcctttaggtggatcacacattctccactacgccaagctctactcagaaactggatgaagcatgagtggaaccagttgtcttggactggctgaaatgagaggtgaggataaaggaacatcagaagctttgagatggtgcatgagatgtatttgatacagtccacctcttgaacagctcagctatgcttttgccttctaagttcaaacaatacacagtctccttcagcgtggtagccaccacaatctctgcaaagacttcatgcaaaggcgttaatgaaccaggttaccatattacttacagctggtcctgaggctgtgattgatattcaataaatttctctttcaccaaccagtcta

SEQ ID NO: 236568 - DNA, 471 bp, Homo sapiens
caaaggttaagattcacagcttcagttagagcagtggttctcaattgagagtgattgtactccccagaggacatttcacattatctggaggtatttttggttgtcggatctggggcatggtaggtgggagcattcatactgttggtgtctagtgggtagaaccagggatggtgttgaccatactgcaatacacaagacagctacctacaagaaataattattcagtctaatgtgtcaatggtgccaagcctgagggatatagcatagtttgagcactgcgaggctcatctaattcccttaacttaaaaatgaggatacttagacccacaggtaggcagtagcaggagtacaatgcttaatttgatatagcaaaatataaaacatatatgctagatgtcatggggcagtgggtgatagtagttttgtaaattcttttttaaaaagcaaaagaaaaaagcacatgacagtaag

SEQ ID NO: 236569 - DNA, 250 bp, Homo sapiens
tgtggaaactgtgagctgcaggagactcaagggagcacattttggctatatcccactggatgctgtttattgacctttgttcctttcctacctcttattgcttccatgtaaaggaaagcagcagtgccttcagttcaggcatgtgggtacacctgagaaagaaagtttaaaactctcctttcaggatatatgcttaggtgagtgtagatagcataatgcgaattgttatttaaacaacaacagcaacaac

SEQ ID NO: 236570 - DNA, 348 bp, Homo sapiens
ggaagatatgataacaattctctacaatgtcttccaaaaaatggagacagaatacttcctagttaatcctatgaggctggtataaccctaattctaaaacccaataaagacaggacaagaaaggaaaactacagaccaatatctgtcatgaaaataatgtaaaaatattgaacagaaagatttatataccattatcaagtgagatttattctgtgtatacaaggctggttcaccattcaaaagtcaattaaggtaattcatcacatcaacagcctaaagaagaaaaatcgtatgatcatataagtgaaggtagaaaaagcattagacaaaatccaacacccattcctc

SEQ ID NO: 236571 - DNA, 128 bp, Homo sapiens
ggtagggggaaaaaaaaagtcttaactcctgagcccctgaatgtgtactgaaccttacagagttcctcagagaacccagactcatttagcacaactacctgaagaaagcttatgggattccactggga

SEQ ID NO: 236572 - DNA, 411 bp, Homo sapiens
aacaacctgggtgctttgtcttgtagaatttctcttgtttggattcgactgattatttactgggtgcgttaacatatttttgtgtcccctgtttcctataaattgttctttagcttcagagccttgattaggttccagtttaatgtttttggcaagaatatttcatataagatagtgtgtactttcagctgcatcacattcaggaggcacttgatgtctggttggctctgtgatgttaaaattggtcagtgggttaaggccttgttgcgcttataaattgttcccatcggattttgatgaaagacctaaagattttggcagccattgatgatcattgcctaaattcattatttttgtttctagtaaaaggaccacccctatctgttaaacatgaagcccagaaatatattc

SEQ ID NO: 236573 - DNA, 318 bp, Homo sapiens
cttgccttgctggagaaggggctcaaggcacaggacttgcctcggacttgccaaggaggcttgcaggaggctctttgtctactcctctgtcctcatccaacaaatggttgttccagaaaaaatgcagcaacacctgaactcttctaaagaaaaagaagacaaaatgatctagtgcatctctgccatcctgttgaagatcctatttgaaaaaagggagacacagagaaaggtttttttttttttttaaagtgatagaataatccaaagttaaaaattcaacacaatggaaaatattaattcaatccatgctgcaaacaa

SEQ ID NO: 236574 - DNA, 214 bp, Homo sapiens
caaagtgctgggattacagacgtgagccactgtgccccggccatacacaactcataatggattaaggtccacctaatgacctcacttaaccttaattacctctttaaagaccctgtcagaaaatatagttacatctgaagtacccggggttaggatttcaacatactggaggtgggaggagcacaattcagcgcataacagaagctaacacaga

SEQ ID NO: 236575 - DNA, 445 bp, Homo sapiens
tagttattcccgaaggacacatcatcaactcagcattctcgtagaaaggacaacccaataccaccgtggcctacagggtatttgtgcaaattagaaaaagacacacctctctctcaagacgcttacatctcgggaaattgtctactcaagtggattttattaaaataagtattcccatctgccctaaaactcccagaaggaatgtacagttctgtggtgtcttagctctgagcggcgctccctccaaggcactgccaaccacgacttgcactactgctcggtcccctgcagtggctgtgtgcaggcttggtcccctgcagtggctgggtgcagcctctatcccctgtgatggctgggtgcaggctcagtcccctgcagtggctgggtgcaggctcagtcccctgcagtgactggcagagcccatccgttgttttccataaccccc

SEQ ID NO: 236576 - DNA, 466 bp, Homo sapiens
tctgttgataccgggttcaaggtgttgagtcccagtggtcactctgtgtttgtactttttggatacacactccatgattaactgggtgcagggcattacacagattagaaagggtgatagccttcatccagagatccacaccaaaaagtgaatctcatgccattcataacattgcacacaaacaactcagaaaccagttgaaaagggagacattgaacgaaacattcagtttcaaaatgtgaaaatcaaatttggactttctgggttaaacacatatagggcaagggttgaaagactacctgttgcgctctatgctctctacatgaataacagaatcaatcgttccccaaacctcagcatcacacagtatacccatgtaacaaaactgcacatgtaccccctgaatctaagataaaaatagaaattatttttaaaattgtcaaaaaaaaattaaagatgttatctt

SEQ ID NO: 236577 - DNA, 530 bp, Homo sapiens
cctcgtgatccgccccccctcggcctcccaaagtgttgggattacaagcgtgagccaccatgcccggccaaattttgcttttcttataacatccatatctaattgtaattcatggtcaagatactttaatacttaagtcatctgttgagtgaagggtactaacagtaattaaacagcctgtcatttaggggtttagcatgcacctaaaagtattttagaagtgtgtcaccgaaatgaaagacatttaggtggcactagcttcctgaagactgaaagagtaaccctacccacgggaactgccttgccttgggtagatggtaggtggcagcaacagaccagaaattatggttaactagagcgctagacatgttctttttaatgttattctatcatttttttccaaaataaaataatatagctgcaaaccaagtagatagtaaaaataaataagcatgatgtgactaatttgcataatacaggctacctaagcctttatttattctataatctttcaacagcaatttattttt

SEQ ID NO: 236578 - DNA, 277 bp, Homo sapiens
tctctttccaggaatgtagtaagactgcacgtcactgtcccctttgaagttaggtttgaccatgtgactcactttgactgatgaaatgtgtgcagaagtgacctaagtcctacctgagtgaaagctttaagagccacaatatgctacattctcctttactgctgccttcgagattgtgtgagcagatgtcaagatgggtcttgtcagcatgcttcccccagtgatgctgacgagcagagcaacagagtgcaagcaaaaataaaagatttgctgggtg

SEQ ID NO: 236579 - DNA, 290 bp, Homo sapiens
tgatagtttcttgacaaattttttaaattgtagttttataggaagttatcttttaatgaaaatctgttttcaagcacttagaaaattaaatgtttcagtatcaatttaaaactattttcttagaactaatttagagatacagtttctacttgcattgggaaatgtaccacgttttctttttatgacttgataaagataaattatgtttatttcagatagatagagctttattcttcagtttctggaaataaacttatgaagaattaccttggatgttcttaacagatgtt

SEQ ID NO: 236580 - DNA, 365 bp, Homo sapiens
catttagtttcaactccattccaattaagttttacttccttttataagtaggttgactccagtcatgagaagtccacaggcattttggtataataaattgtattggttacctttagtctttctagagggaataaaagagtaaagacgttagacaaaccagttagaaaactgataatagacccatgcacataccctcagttggatttgtttttattgtaccagggaacattatacagaaatttatctagagctgggcaaggtggctcttgactgtaatctcagctgctctggagcctgagatgggaagattacttaagaccagaagttcaataccagccagggcaacataccaagacccagtctac

SEQ ID NO: 236581 - DNA, 150 bp, Homo sapiens
tatggagcagagacatgagaattcttattgtacagaagcaataacaaagctttattataagttacacagaagacagagggcccttggtttatttcactccagtcctgaagcaggtgggatactccctgctgcctacagttgactctcctc

SEQ ID NO: 236582 - DNA, 455 bp, Homo sapiens
gcctcccaagtagctgagattacaggttcaagccactatgcccagcagtcaggctacaagtaatagaacacagtactaagagagatttaaacaacaggagatttgtttttttcacttaacaagaaatcccaaggttccagggttgattcagtgcctcaagaggtttttggcgctgggcgcagtggcttacgctgtaatcccaacactttgggaggccgaggcatgtagatcacatgaggccaagagttcaagaccagcctggccaacatggcagaaccccgaatctattaaaaatataaaaattagccagacgtgagtggtacacactgacaatcccagctactaggtaggatgaggcacaagaatcacttgaacctgggaagcagaggttgcagtgagctgtgatcgtgccactgcactcctgcctgggtgacagggtgagactctgtctcaaa

SEQ ID NO: 236583 - DNA, 239 bp, Homo sapiens
agaaacttagccacatcctggtttgtgttttgcctaacagaggggtttcactttcctctttggtaagatgaatatgcttgataatagaatagcattaaggttggcttttttctccctcaaatgattaaactgtagtttcatatgtaaatgccagtaaattagaatcattctagtagggaagataaagtaaataagtaaaaatatagtatgttagtaggaaatcgtgctagagagagaga

SEQ ID NO: 236584 - DNA, 619 bp, Homo sapiens
ccataatgaatgggtttgtgtatatgtatcatgccatgtatgagtatttctgtaggagaaattcttagaagagtaaccgctgggtcagggtgtatatgcattttgaattttgatagatttgtccaaattgccttcccaaaagcctgtactaatttacactctttaatgttgtgcgagagtgcctatttttccacagttatgccaacacgtattatcaatctttgtaattttagccaatttaaagggcaaaaaaatcgtatgtcattgttttcatttgcatttccctgattactggcgaaattgatcatatttttgtttgtaaataggcaaatatcaatagtttatataggcagttttcctatctataagcaataagcattttgaaattttaataataaaaaacctgttcgcaatagcaagagaaacgaataaaaatacctagaagtaaactataaaactttattgacgaataccataaaagaacatctgcatgaaaagagaaggaatactatgcttctgaataagaaggctcaatattttagtgatgtccatttttcctatattggtttatacagttgatgcaatttcaataaatataccaagtttttttggaacttac

SEQ ID NO: 236585 - DNA, 421 bp, Homo sapiens
tgatgtgtgttatgacccattttaagcctcccacgatcacagtttttaaaataaaattaaggactggtccttttctaggtgacacaagtaaggtaatagctagaacagaagaaagaggggcccccaaaaatgtaaccttaaaatttgacacttgtgctgctattgatagtaagcagcatggaataagatgccgttctgtaaactaaaaaaaagttaaacagttaaaaaaaaaaagtatatctgtcaaaaatcatatttatgtgagatgtgtcaatactggtcttgtgtcatttaggctacttgaaaagaggattaaaaaaagatcttgtttggctctgcaaaggaaaaggcagcccctcctgcatgagtgggagctgcaaccctttaaaattagtaatcacaaacccctcagacccaaaat

SEQ ID NO: 236586 - DNA, 464 bp, Homo sapiens
cgcaaatgtctgtacaatctacagtcctccgctctaccagctgagctatcgaagggtgcacgctgcaagagctggatcactggactttccgcaaatggaggaagccaagtccttggaacgctggagtcaacacacttagagttgattggaacccgccttagaagagaaccttgcgctggttgccaccgcgcacctctcagggtggagcaaatcctccgagtgtggtttcctcgcgtcccagagcgctgatagccacaatccaggacgggaggctctcgcctgtggccttcctccacctgtgcatctctgtttttacaagtgaggatgacagccctcagcgaaagaaaacaagagggtgagagggctcggtcagagggatgggctaggtggatgggtggatcctgtgggacaggggttgcaggaggaggaaagaagaactcggaaagcttctgggtgggcggccg

SEQ ID NO: 236587 - DNA, 549 bp, Homo sapiens
ttgccagcaaaaccagcagcagtgccagccccctcccaaatgtcctcccaagtgtaccccaaaatgtccacctaagtgtccccccaaatgcccaccacagtgcccagctccatgttcccctgcagtctcttcctgctgtggtcccagctctgggagctgctgtggtcccagctctgggggctgctgcagctctgggggtggtggctgctgcctgagccaccacaggccccgtctcttccaccggcgccggcaccagagccccgattgctgtgagagtgaaccttctggggcctctggctgctgccacagctctgggggctgctgctgacctgggctgcagaagagctctggtactgaatggtcaaaaacctgctacagcctgatgcttaactatttccccttcctttcattccactcatgggtggacagggaccacaaagactcatggggcttccccagaactttgtgcttgatggagcaccccagatggaagccttctttttctcctttacctcatattgtaataaagctctgatttctgactcttta

SEQ ID NO: 236588 - DNA, 457 bp, Homo sapiens
acatttgtcattgaaaataatgtctataattttaatgagaatattatttagctaacaggagcaaaggtaaaattatatacacaattaacataaattttactgttagtttctttgttgtacaacaatctcagtaaaatattagaatttctaaaaagatttagaatgtgatcatttcagatatttcaaataaagaaaagtagatgtttacaggctgaatactgtcaatgactaacaattacactgcgtggaaactgctccgttgctctacattatgtaaagttctccaaaaaagcccattccctaagagatatatataattcaaatggcaaaagctgttacaaactactttcaataataaatgtattaataagtttctataattattttaataaaatgtattgctggtaatgttacatattatttgcttattaaatgtcttagacaattgatatttaca

SEQ ID NO: 236589 - DNA, 2376 bp, Homo sapiens
gcggggaatgtaggcggggcttaaaggccggggtaccggggtggggcgcggcgcgtgggcggggctcagggcccgggatataggggcggggcgcagggcgtggacggggttcagggcccggggcccagatgggcgggggagcggccggacgcgggcggggcgggcgcctggacgcgagcctagggcgcctcggtgcccagacggcggcggcgtggccgcacgcgcggcccggcttctgtcctcgcggcgctccggctcctggccccccacgccatgcagccgtccccgccgcccaccgagctggtgccgtcggagcgcgccgtggtgctgctgtcgtgcgcactctccgcgctcggctcgggcctgctggtggccacgcacgccctgtggccggacctgcgcagccgggcacggcgcctgctgctcttcctgtcgctggccgacctgctctcggccgcctcctacttctacggagtgctgcaggacttcgcgggcccgtcgtgggactgcgtgctgcagggcgcgctgtccaccttcgccaacaccagctccttcttctggaccgtggccattgcgctctacttgtacctcagcatcgtccgcgccgcgcgcgggcctcgcacagatcgcctgctttgggccttccatgtcgtcaggtgggtggcggtggcgctgcttttccaggagcccccgacacaggccgacccctcccggtcttgccctcccagaggccgcgtctaggttggacaccccctacccacagcaagcagtgcctgctggcgcccccgaggctgtcctgggccagcgggaggaggccagccttgcccgagattcgctccctcccgaaggagccccgctgtgcctgccccagggcacagccccttggggtagtggggacagagttcgcccccagagccgggccctgtttccttggacggggctggggaggacactctgagccccttgtgacctgcttcactgtgtcctggctgtctctgctgcccatggggaaacaggctgggagacgagttaggtaactgtcccgggctggagagccggcaactgccagtcccacgccaccaccccaccccaagccacagtgagcttggtgcactccgccactcccgagctgccgtgtctctgctgtacagtttacaaaggactgtgctttttattctgtctttggtcgtttctagcctcaggccccagccccttgtatttctgttctagatgatcttgactttccagagttcagcaattctgagattgagggcaggggcggagggctggtctgggagtctcggagtcctcctggagtctctctgagagtggggaaaagccaagaccttactttgcgattcaagcgtctttcaagtaagcctcgctgaagagggtcggcccttccctggggaatgtcaggttttgaaaatctcatggcgtcctgtgctgtgctgaactgagggcaggaatcctaggggctgttttccttttctccttctcccagatcagagcatcagatactgccctaattataggtcctttctattaaaaacttaagtgcattccaaggactgcgagcacagtcagcactttggcagagacaggtcacctgggtgtcacacggcaaggctacagggctgtaagagtcgcttgaccttcagttgtgcactgaggccggctggtccttgagaaactaagtgacctgcttctcagctgtacaagtaaaaaatctttgcaacacatcatccaaaccgaggctcagatgctgcagatggaatagggccctgccttgccttgccttcccggcagcatcccatctgaccctgtctgggtcccgtgatggctggctgggtgtgggccccgagtacacgggagatcgtgtgtacttggaaggagtcgaggctgtacctctctttgcaagaacctgttctctttcccttcttgtctttaaaaatattgaatacagtatttttttaatggtaacagaacctggtccagcttctgtggaaaagaaggattgcccagcaaacctgagttgggggtttttctgttcggttctcattacggaccctctaggggggtttctgtgttgttcaggaagggcttctttgataaagaagtaggcccagtgtggtggcttgtacccgtaatcccagcactttgggaggccgaggcgggagcatcgcttgagcccaggagttcaactggccaacacggtgaggctttgtctctactaaaaatttaaaaattggctgggcatggtggcgcatgcctgtagttccagctacttgtgaggctgaggtgggaggatcgcttgagcctgggaggtcgaggctgtagtgagctatgactgcagacagagcaacaccctctctc

SEQ ID NO: 236590 - DNA, 514 bp, Homo sapiens
ctcgcggaatagactggcatttcgggacgccttgtcgccgcagcctgggccctgcaacggggtaaacttcatggtggccctgcgatctggggaggggcgtgcgccacggtgatgccgggcatctcccgcagctcgtgagcggccccgctccccgctgccccgggtcccactcagtcgccagggagagcgcggggcagcgcacgtgtgcggccagcgaggcccagagtgaccgcgccgcgactcgcaggagccagggcgcaggctgcagtgcagcccggactcagacgcacctggcctggaccgcgcgcctctagagacctgcgcgaggctgtgaggctccccttcctcccctccaagcggttctcctggtgatcgccccttcgccacctctctagcctgggcaactgggggcgccccggacgaccatgagagataaggactgagggccaggaaggggaagcgagcccgccgagaggtggcggggactgctcacgccaagggccacagcggccgc

SEQ ID NO: 236591 - DNA, 588 bp, Homo sapiens
tgcctcatccccgtaagctaaaactgttaaacaaaatgaaaatatttagagcatataacagcctcttttgctggaaggttttatagaaataaagttgccagcatatttttagaagagtaactgctccctgacaccagaatggcttattttgaaaaataagccaaaacaaatatacccttagataggtgtctataatattccagcaaagggattgggataggaaattcctacccatccctgtttttgctttggatgaaaacagtcttaagaggtttcaattgatggaaaagattagtatacatcatttcattggccagacgtggtggcgtctgactgaaatcccagaactttgagagccccaggcaggcggatcatgaggtcaagagatcaagaccagcctggccaacatggtgaaacctcgtctctactaaaagtacagaaattagctgaatgtggtggtgcacacctgtagtccagctactctggaggctgaggcaggagaactgcttgaacctgggaggcggaggttgcagtgagccgagattgcgccactgcactcagcctggcaacacagcaagattccttctc

SEQ ID NO: 236592 - DNA, 486 bp, Homo sapiens
agcttcaaaatccttactctgacatatactcacagccagaaattagcatgcactagagtgtgcatgagtgcaacacacacacacaccaattccatattctctgtcagaaaatcctgttggtttttcgtgaaaggatgttttcagaggctgaccccttgccttcacctccaatgctaccactctggtctaagtcactgtcaccaccacctaaattatagctgttgactcataacaatcttcctgcttctaccactgccccactacaatttcttcccaatatactatccaaattagtcttttcaaaatgtaagtcatatatggtcacctctttgttcaaagtcttctgatagtttcctatatcatttataataaaaccaaatccttacaattctctacaatagttgttcatgcatatattatgtttattacagatacgcatatatatagctctcatataaataaatatatatatttatgtgtatgtgt

SEQ ID NO: 236593 - DNA, 978 bp, Homo sapiens
  misc_feature (569)..(569): n is a, c, g, or t
  misc_feature (688)..(688): n is a, c, g, or t
  misc_feature (697)..(697): n is a, c, g, or t
  misc_feature (700)..(700): n is a, c, g, or t
  misc_feature (710)..(710): n is a, c, g, or t
  misc_feature (731)..(731): n is a, c, g, or t
  misc_feature (752)..(752): n is a, c, g, or t
  misc_feature (755)..(755): n is a, c, g, or t
  misc_feature (772)..(772): n is a, c, g, or t
  misc_feature (781)..(781): n is a, c, g, or t
  misc_feature (785)..(785): n is a, c, g, or t
  misc_feature (814)..(814): n is a, c, g, or t
  misc_feature (831)..(832): n is a, c, g, or t
  misc_feature (844)..(844): n is a, c, g, or t
ctcattttgatgtctagaatcaggggatccaggatcatcaccaaggtcattttcccagacagatgtgctgaggctgtagaaagtgctttttatttggttgggagcttgtgcataaatgcgagaggggctgcacatctgacggactagaggtgactcatggctgaaccggaacaggacatcggggagaagccagcagattcagaaccccaaagaaaatgacttcattgaaattgaactgaagagacaagaactgagttaccaaaacctactaaacgtgagttgctgtgaactggggattaaaccagaacgagtggagaagatcagaaagctaccaaacacactgctcagaaaggacaaagacattcgaagactgcgggactttcaggaagtggaactcattttaatgaaaaatggaagctccagattgacagaatatgtgccatctctgacagaaaggccctgctatgatagcaaagctgcaaaaatgacttattaaatactcccaggaatggccgcgcatggtggctcaccccctgtaatcccagcactttgggaagccaaggtgggcngatcacctgaggtcaggagttctagaccagcctggccaacatatagtgaaacccagtctctactaaaaaaaatacaaaaattagctaggtgtggtggcgcacacctgtagtagtccccngcctcccangtngctgggactncagtgcccaccaccacacccngctaatttttttttttttttngtngagacagggtttcactntgttggccnggcnggtcttgaactcctgacctcatgatccgnctgccttggcctcccanngtgctgggattncaagtgtgagccaccgcgcccggccaattccactgattctaaaatggccttaagtgaaattaatcacgtaccaaaatgccatcctaagaagtcccagaactatttaggttaaaataaaatatgaaatgacctag

SEQ ID NO: 236594 - DNA, 887 bp, Homo sapiens
  misc_feature (613)..(613): n is a, c, g, or t
acgcctatttacggtgttctgaatgaaacaggacactaattactattggaaccatttttctctgttttgaacagttggataagggaagtcttgacgtgctgcctatgtgtccgctgcccttcatcaaagttgagctactgagaaattggagttgaaggaacagtggctaatggcatgtgctgggatgcaagtaagacattatgcttgggcataaggagttctggtattttatgtatacctattcagaaccccaaagaaaatgacttcattgaaattgaactgaagagacaagaactgagttaccaaaacctactaaacgtgagttgctgtgaactggggattaaaccagaacgagtggagaagatcagaaagctaccaaacacactgctcagaaaggacaaagacattcgaagactgcgggactttcaggaagtggaactcattttaatgaaaaatggaagctccagattgacagaatatgtgccatctctgacagaaaggccctgctatgatagcaaagctgcaaaaatgacttattaaatactcccaggaatggccgcgcatggtggctcaccccctgtaatcccagcactttgggaagccaaggtgggcngatcacctgaggtcaggagttctagaccagcctggccaacatatagtgaaacccagtctctactaaaaaaaatacaaaaattagctaggtgtggtggcgcacacctgtagtagtcccagctacatgggaagctgaggcaggagaatcacctgaacccaggaggcagaggttgcagtgagctgagattgcgccactgcactccagcctggcgacagagcaagactctgtctctcaaaataaataaataaataaataaataaataaataaataatc

SEQ ID NO: 236595 - DNA, 2778 bp, Homo sapiens
  misc_feature (2504)..(2504): n is a, c, g, or t
ctcattttgatgtctagaatcaggggatccaggatcatcaccaaggtcattttcccaggtatggaggggtctttctgcttctttcttgtcatgcacagctgctgaggaaggggctgggagtaaagacagtgaaatggggaggaggagtccattcaaaccgagaaacaaagtgtttggtttttcttacccctggtgtagaagctaccaaccttttccaagaaagagggcctggcccccttctcgggtctggctgggtgcctgctgtgcctctctggcctcccctccgaagggcaccattccctcgggtgagtactaccggcctgcaccgtcttccagtggggacagcctgagaagagagtctggggccttacttcagtaccttccttcactggcctcaccctgtgcaaatcatgccacacgctgcagcctccttttccctatctataaaataaaaatgaccctgctctatctcactgggctggcaagaacacactgttgttgccttgcagacagatgtgctgaggctgtagaaagtgctttttatttggttgggagcttgtgcataaatgcgagaggggctgcacatctgacggactagaggtgactcatggctgaaccggaacaggacatcggggagaagccagcagccatgctgaactctccacagggccctgtgaaaagctcttcacctcctctgccctctggatctagtgaagcctattcatccttcagatgtcagctcaaataatcaaccttcatggaggcctcccttgacccctaacatgctttcaaagtactgtgtatttcacattcatcatgccccgacaactgtgatttcccatttattaatatctgtctcttctgctggcctgcaaactccaggagcacagagacatctttgggatttttgaacatgatttccccagggcttagcccagtgcctggtgcaaagcaggctttcaacatgttcagtggatattgtaagaaagaaagaaatacacaaaaggcctggcatatgcaaagcactctaaatattcactcctttcccttccctctgggtgagaaaatttctccttataaagacaccctcctaactgtatctctgctagagaactgaagacataaagcactctgtgccaaaaatatttaagtaaaaacttgagctaagcacagagattataaatatttcttccccagattacgcaccatttaaaaatactgtctcagctccttttcatgatttgggtggtgattaaagaaaattactcttcaagactgaaagtcattactgcccttttcctgacttgccttttcccttgagaaggggaggataagctgcagggcaggaagtggaagtggggcatccttgtcctttgtctggcagacagccaactggtcaggtactgctccttctcaactctttcctgattcccaggtgaatataaacaagaaggcacaaatccacacttgccaacaacggacccaagtgataacaagaaacccagtgacacctgtctaggtgaagactcagcccctatgtgaccaggttgcaaagccaaactgaccatctgctttccatttggacttttagttcatactgtatcttctcaggacagttaagttggaatacaatgccactgtcctgaaagatggtagaattatcctatttctggaggagtgggggtggtgggtaggaatctcaagagcgatttgctcctctgcacaatagcttctttaaggacaccagggcccccagggctatacatttccctgaagctttccagataagcaacaaggtatgagcacctgctatgtattgcccaagggtgatgtgtttaaatatccattgcatattttaaatccttggctggcttaaagctgcaagctttctgtcttcagtggatataatgggggcatacatcccagagcttgcccaacactccaagaaaagaaccctcagctaatgcaaagtgtgtatgtgcccatgaaagctccatgtctacttaacattcagtttttaggattatttatgctgtaataatagatatgaaaatctctgacaggtattttgtttcctttacaaactgtatttgaatttatgggtgatttagagcttgtgtttaaagtcagaattcagaaccccaaagaaaatgacttcattgaaattgaactgaagagacaagaactgagttaccaaaacctactaaacgtgagttgctgtgaactggggattaaaccagaacgagtggagaagatcagaaagctaccaaacacactgctcagaaaggacaaagacattcgaagactgcgggactttcaggaagtggaactcattttaatgaaaaatggaagctccagattgacagaatatgtgccatctctgacagaaaggccctgctatgatagcaaagctgcaaaaatgacttattaaatactcccaggaatggccgcgcatggtggctcaccccctgtaatcccagcactttgggaagccaaggtgggcngatcacctgaggtcaggagttctagaccagcctggccaacatatagtgaaacccagtctctactaaaaaaaatacaaaaattagctaggtgtggtggcgcacacctgtagtagtcccagctacatgggaagctgaggcaggagaatcacctgaacccaggaggcagaggttgcagtgagctgagattgcgccactgcactccagcctggcgacagagcaagactctgtctctcaaaataaataaataaataaataaataaataaataaataatc

SEQ ID NO: 236596 - DNA, 642 bp, Homo sapiens
gcttaccaccccttccgccgtctggccatcttgcctgcttcagcaccaccagccacctcaaatcctgatccagctgtgtctcgtgtcatgaatatgtctgccatcctgccactgcctgggcagagtgtggagcggctctgtgtggaccccagacaccgccaggggccagtgaacctgctctcagaccctgagcaaggggttgaggtgactggccagtatgagagggagaaggctgggttctcatggatcgaagtgaccttcaagaaccccctggtatgggttcacgcatcccctgaacacgtggtggtgactcggaaccgaagaagctctgcgtacaagtggaaggagacgctattctcagtgatgcccggcctgaagatgaccatggacaagacgggtctcctgctgctcagtgacccagacaaagtgaccatcggcctgttgttctgggatggccgtggggaggggctccggctccttctgcgtgacactgaccgcttctccagccacgttggagggacccttggccagttttaccaggaggtgctctggggatctccagcagcatcagatgacggcagacgcacgctgagggttcagggcaatgaccactctgccaccaggtgacttggcacaagcaga

SEQ ID NO: 236597 - DNA, 741 bp, Homo sapiens
aaaaggaaagtgcatgtcctggtgatggatggtcagcagcaacattttaaaacagagacagcacattttacttagatgacatcactgagagtatgaatataataccaacttggctttagaactgctctctctcctctgtccaatgactacagtctgcaaaccatctaaattccccacttcaaggaacttaaagtctagcaggggaaattttacttacacgtgagtaattaacaaataacttagaattggcttaataccagaaaagggtggtgcagacctactgctatagcggtaccttaagagaaaagagaaatagtagagccttggatgatcagaggatcaggaaagtcttcatgggttgaagtgaattaaatcagtctcagagactggaaggattctgataggcaaagagaaagccacataaaggttcagctaagaagtgctcatctactgtttggatacatggtgaaagatcatgaagaaacttgaatgtcagacagtgagatctgtttctgatctgttaatcatttctctttcttacattctccatatctgttgccccgagtccccttccaggaaatggtctgtttcctgggtactaaaaggattgtcaactaaactgagaaaaagttttctgtgcaagtacaatttttcctcttccaaaggaatttgccttttagctccggcccccattagataattatgaacaatttggaaagtttaagaatataaaaaggaaaa

SEQ ID NO: 236598 - DNA, 90 bp, Homo sapiens
ctgagtgaaaaggtcagagttcctgtgtgccccctgccagcccccagcttcccatctgttgctgtcaatgaaccagtatcggtgctcaca

SEQ ID NO: 236599 - DNA, 446 bp, Homo sapiens
caggaaagggaaggcatttgaggacacttaacatgtgatcctgagtgacttgtagataggctgggcaggagggcccccatctaattgacattagacacatacctgctgcaggtcagcctgggctgtgacacacaatagcctcgataagtgcagatagggctgggtgcgatggctcacgcctgtaatcccagcactttgggaggccaaggtgggcagatcatataaggtcaggaatttgagacgagcctggccaacgtgatgaaaccccatctctgctaaaaatacaaaaattatccaagcgtggtggtggttgcctgtaatcccagctactcaggaggctgaggcaggagaatcactcgaacctgggaggtggaggttgcagtgcaccgagatcacaccacagcactccagcctggttgacagagcaagacactgtctcccaagaa

SEQ ID NO: 236600 - DNA, 501 bp, Homo sapiens
tcattagttattagagaaatgcaaataaaaaacacaatgaaataccacggcccaattattatattatataaaatgagggagatggatgataccaagtgttggtaaagatgtgtcggaggtggaactctcatatgctcccggtgagaatgcaaagtccaaagcgatgcaaccatttgggaaacagttcagcagtttcttgatgtgttaaatacatacctaccatattctacagcgattctattcctaggtatttatccaggagaaataagatcatatgcatgccaccatttgtacatggaatattcatagcagctttataaaaactggaaaccccaaactggaagcaacccaaatacccatcaacatttgaatagatttttttcaaagttgtagtatattcctaaaatggaatactacttagaaatacaaaggaatgaaccactgatatgcctacaatatggatacattgcaacataattatggtgagtgaaagaagccaga

SEQ ID NO: 236601 - DNA, 1762 bp, Homo sapiens
aattaaaatatccagttagtctttattttcaagttcaaaaccttattgcgtactgaaaatgcatgaactactggacacttttacaagcttactttcacaggagtctggtaagatacgtgctattctcatatttttctcactagagggaaaacataaggcatagagagagaggcttgctgagtctggcccagatcaggcgcgttcattcggccgacccttgtgctggctgtaccctgcactgtgatgctctctctgcctcccacatggctgccagagtcgcctttctgagatacagatactgtcatatttcaacttaaaaccatcactgtctccaccatggaataaaggccgctgtctggagcatgcattctcggccttgggcagggccccagcgtcctcctccggagttgggagctgctggccctgcaccgtgccggccctgggctgcccctgctgcttgcccttggagtcctgccctgctcaggctcagcactcagctgcctctgcagatgccctcctcaggggccctactctcctggccacttcactgaagaattggccatttcccgccttgtctgcaatgctttattctcagccctgtgagcctctgccagggcctggctgacaatgcttgcatctggcccctagcatctctcacagcgtcttgaaccccggtgctcaactgcctgagattgaactcagtcaaaccaactcagcctcaaatccaagtgtccagcttctttatgggaaaagcaaaaccactggttctgtggggacacatattctctgcagatacagtggatggttcgaggtctaagggcatgcgaggcctccgtgctgctctccctttagtggatgccagccacctgctgtagctggagcccagggtgggcaatggctggccactgcctgacttgcagacctcccaaggtatcctcaccatcccaaggtcatgacaacctcgcacacttctgcccaggcctaagcaggaggggggcctgtgtgggagagagggcctagcacctcactcatcagagctgtgtacatgaccacactgctgtgcttcagggaggcccagtggctggatgttgagctttgcagacaccagtcaagaatgatgggtagttgggcgcgacaggagaggattcagaatttgccatccaaagccctgtgagacacaagactaaggcccagtgcctggtgcagttctgcctttgacattgtgaggggcgcaccttgggaacttggagcacagggatcttccctggaaatagtctcaggtgtcacttgtcaccctgcattgggacttcatgagactgtgaataactacagtaaaccagatgtgcaagaagccagagtctaggttatagttacttcagactctgtatttaaagattctctcttttttttcttttttttttttttgagacagagtcttgctctgttgcccaggctggagtgcagtggtgcgatctcggctcactttaagctccacctcctgggttcacgccattctcctcaactggaggattctacgcctcccaagtagctgggaatgcaggcgcccaccaccacgccaggctaactttttgtatttttagtagagatggggtttcaccgtgttagccaggatggtcttaatctcctgacctcatgataccccggcctcagcctcccaaagtgctgggattacaggcgtgagccaccgcgcctagcccaaaagttctcttaattaaaaaaaaaaaaaaaaaaaaaaaaaaca

SEQ ID NO: 236602 - DNA, 460 bp, Homo sapiens
tgagaaataacttagttcagtatctttaagatttattcaccttgtatttgcactgatcacatacattgaactgcaaactggagccaagaactgtatttctgaagctgagctggtgatagacagactgtctctcagtccttggagtcaatccagccatcttaaatattgaaatgtttctttatgatgctctagagacattttcatcatgctgtattctttaggagcagctgaacctaacaattgcatctgaatgtttttctaagacaggtaaattctcttagtaaaaattacttgaaatgctggtatgaatgactgacagaaaacacctacatggacatttaagaaatataaataaaatacacctggtgaaaaggggaaatatgaatattttaacttgacatatctgtataaaataaaaatattttattagataaaataaaatataaatattttaacttga

SEQ ID NO: 236603 - DNA, 781 bp, Homo sapiens
agccccggttcccgcccgcgcctctccctccacacttcgccgcaagcagagggagccggctccggcctcagctggcccagagaggggctccctcagtgcagtggcgagctgaagggctcctcaagggcggctggagtggacgctgaggccgaggagacgccaagagcaaacgagggctgctagtacattgtcacctctcactggtaactacagttgctgtcagtttaactgttgatattctggaagcaagatcttggaaggccaaggacaggtcatttcttaggactgtgcaaaagagaatcagtctttacagtaagctatttgattctagtagttctttcatctcagtcttttgaaagcaacttcccctctttaaccaacacctgccatggcctcttcatgagccgaagaaggaaagacaggacagattcttatgacctgaaacagcacctcaactcttaccttggatatttctacatgaagaatctgctctgaaactatagcaaacaatcacagagtgtttgagtgtgagtccagactggttcgggaagaccaagaagcaatgatgatgtctgtttttgtcaaatgtctgaaaactatttttatttttctaaaactttgttcagaagtctcaatattgtagtgtatagagatgtacactaatttagtgatatgaagatgaagggctttaagcctgtgttccttgcaggcatctcagtacctaggaactccaaagaacaaactgttgctcgtgcaaaattaaatttcataaaacagcaaa

SEQ ID NO: 236604 - DNA, 370 bp, Homo sapiens
aataattattgtgtttattttttcaaaaattaaaaaaagcaaaatggcattagactacattaggaactagaggtgctacttgcatgctgtatggacagttcacttctctttgtctctgtttattgaactctaaaatgaggtacgggagagaaagtatcctaacgtatcttcactgcctaagagtctattatcatatgtcaacatctatagcaatttgatcctacctagtgacagtaccactgtggttgtcaactctacaatattacagataaagtttaggaagaactttaagaacattaagttggccaagttaaagatctgctgagtgtatgtgattaacaggatgccttttgaaataaaaagatacttc

SEQ ID NO: 236605 - DNA, 408 bp, Homo sapiens
tttattgagtgattgtgtatggattataagttgtgaattgggaaggttgtaggaaagaaagtctggtcatttctttagagaaagattttacttctgatttgtgcgttcttgaatgggttcctaggactattaggatttattcatacaaaaatagaaatgctagacttaggaaaaagaaatttttatttgtttgtttgtttgtttgtttatttgacagagcgagacccgttctcaaaaaaaaaaaaaaaaaaaaaatccaaaaattagctgaggttgtggtgtgtgcctgtagtcccagctactcagcaggctaaggcaggagaatctcttgaacctgggaggcggaggttacagtgacccgagattgcaccactgcactccagcctgggtgacagagactctgtctca

SEQ ID NO: 236606 - DNA, 489 bp, Homo sapiens
gctttgaccttcttctctttgtctattcatggagaaattcaccttgggcttttgggacagtatctaacgtatagaagcaagaatggagagactccagcaagctctttgccttatgaggtccctttcataaggggtggaatacaatttaaatgagctaattgatatttcagggtatgattgcctataaaatatgggttgtgcactaaaatgaagaggactttgctttcgtaagattaagaatcactgagttagataaagttagacaagtctgttgcaggacttctcagagccttcattacgcttacacacattttagtctctatggagtgaatacggtacatactgtttctcaacttctttcaaccacaaaacacctttctcatggagtatcttctaatagctccccaagttattgttctgtggaacaaagtttggaaacattagtctcaaataataatactctctatattatttccattccccccagcc

SEQ ID NO: 236607 - DNA, 449 bp, Homo sapiens
tctgcaggcataggaggttgggcttcatgcagaccacaatcaaatccttgctctgctgctttgcttgctgggtggccctgggcaaatcacttaacctttttgagcctgggtgtcctatttccaaaaccaagtcagaaataagaaagttactatgggcctggcatggtggctcacgcctataatcccagcagtttgggaggctgagcccagaagatcacttgagcccaggagatcaacaccaacctgagcaacatggcaaaacccaaactctactaaaaataacaaacaaaaaaaaaatatggggcatggtggcacacgcctgtagtctcagctacttgggaggctgaggtgggagaatcagctgagcccgggaagtcgaggctatggtgagccatgatcacgccactgcactctagtctgggcgacaggagtgagaccctacctcaaaa

SEQ ID NO: 236608 - DNA, 471 bp, Homo sapiens
agtgcctgttttctataatgtcagagatttaaggaatttaaagcttatttctatttgggtgccacatttgttttcaaaacacccaatactgaggcaagagcagtatttgccaagtagcaaattcaagagcaaaatgttttggcagtcatattgcctggctttgcccagggttggtaccactgtccccactccaggaatggacaacctgttataacaaaagtaactgtgtgcttattaagtgtcaggtcttatggtaagtgctttaaaatgcattagtctttcaagaacccagtcagaagggttttgtcattactattttctgatgcaaaaaaaatgaaattaaagaagattaaataatttatccaaaataacagttagtgggtgtgatgaggtgctccctcagctatcaccctaaaaaatctaagaatgccagttcttctcagctttcagtttggagtaggcaaacatgta

SEQ ID NO: 236609 - DNA, 290 bp, Homo sapiens
gagacggatcttgccttgctgaccaggctggactcgaactcctgagctcaagcaatccaccctcctcggcctcctagtctagtcattttttttaaatcctaaactcaatatggatcttggctcaaaaaccacatatcagcagttaaatattcctatccaggaccatcttgcagttcatctgctagcagagtaacagagaaaaatattgaccttctaaaataataacgtgcctcaaaatccgttactctttccacaacaattgagggtaatggtgttcagttttcctttta

SEQ ID NO: 236610 - DNA, 492 bp, Homo sapiens
ctccactttatatatccatctgatcactttgtggggacactagacctgcatatgtgaggacaaagaccccagacagtggttttcaaaataaggtgtgactgctctgtgtgactctggcagaaaatgatcagctggcctccctagtggacaatctgttcctcatagctacaagtgcaaaaacatcttctctcaggccaaaaaaagaagaggagaaaccaagtcattcctcagaaataaggaaaggatcacaacttggaaatcatgggagtaagaggagagaggaaaggaggactggcccctgatgggagagctcagaaactctcgatggagtcttgttggatttttcaccctgctctttaaactgctttctctcccttaaatgtaccacatcaaaaacatctgccatttaaatttaccacatcttggtctatatgcacatcaaaaacaaacaaacaaaaaaaacaaaaacaggtaataaatacagtggagtta

SEQ ID NO: 236611 - DNA, 441 bp, Homo sapiens
tttaggggactaaggttggctttatggaaccaataaagtaccatcttggaaaaactggctctagggttcccagacttacagtccttcaaactgaaactggatgacttgacataagcttcagaaaaattaccacaacagcttgtgtgtggcccatctttatggcattcaaactgcaaactaatccaatgcctcttctcactccagctgaagatactacaagcccagcatctagaaatcttattgatcagctgccctctgggctcagaaactgtctttatagttcgttccaactattaatcttttttaattttatttttatagaaactaaacttcccacattaaaggcctgatagctcacactatccaggaaatatcctctgctaccaagtcccaacagatgattcaactggttcttaatgaataaaaggtgatcaaacaaga

SEQ ID NO: 236612 - DNA, 1687 bp, Homo sapiens
  misc_feature (1068)..(1068): n is a, c, g, or t
aaaaaaaaatggctcctcccagccttgtgctgtcctcccctggccaaggcccggcttcaccatggagctggtgccgtgctcacgggccttcccagttcccacacctctcttctcatagctagtggctccagtgcccctgcaggccaacccgtaacaactcagctcccaagctgacccttacctgtctgtaaaagccttcccttccaatcagcatccggtgtttataaccacatcctgagccaggtgtggtttccccagaaatgctacccccttgacatgctctatccaccttgatcacacccctcaccggctctttgacctcctcaaaacctccctgcagaactcctccttgtcttctcactctggcagccacccctgtcttcacttccttctttacctggctccactgagagacctgagccctggggaatgcaggtgttgtgcccccctctgccctcccactggcccagcccttggatgcatcattagagatgggtgccagctcacatgaggacccactaccttggctcggccctcttcctgcattcatccttctaggggccccagtgagcacacaggttcttcaggaaaaatgcagctccttacccctcctcttcagcacctgcttttcatagagaaccctccttctatcttgcatgcatgacaggggtcccgtggggccatgcacccagcttccctcctctctccctggccatgttccagcctgggggtggaagaacctgcccatttcccatctcttccagagtctccttcccccaggaacccccttccctccctagtgcatggtttctgctgtcccttttgctccttcccttcagtctacaagttgcccaaatccctgaatttctttcttcctttttcttttttttttttttaaaacaacagaaggagccctccccagaacactgagagggatgcattattattcctttctatggatggggacacagtggcttagtggggaaatagctacccaagctcacaactatctgatgaaagttggaggcaggttgggagctcagccgcctgactccctgcacatgcctncaactttgagtcaaaggcggggaaaagatgcagcccttcctgggtgtcccatctttggtgcagggttaaggaaggagccttgggaccaaatgaagtgactgccagtgcaagtcatctgaggctttaagctgcttaactctcaactcctcggtattttaggtaccatctgtcttcccatctcaattatgaattctccagggactgtcacttcattttttttttttgtctcttaggatgctttgtgcatagctgatgcttagtaatgggctcttattcatctagaaattttttttgcctttaacttcaacctggaaggcttttaaaaaacatgattagccaggcgcggtggctcagcctgtaattccagtgctttgggaggctgaggtgagaggatcacatgtggccaggagtttaagaccagcccaagcaacatagctagaccccgcctcttcaaaaataaggatgaaaaatttagccaggcatggtggtacatgcttgtagctccaggtactcaggagactaaggtgggaggagtgtttgagcccaggtgtttgtggttacagtgagctatatcgcgccactgaactccagcctgggcaacaggatgagaccctgtctc

SEQ ID NO: 236613 - DNA, 471 bp, Homo sapiens
ttggtagttgtgcagccatgtgaatgagtggatcctaccatcctagtcaaacctctgataactgaaggtcccacctatatttgactgcagtcttccaacagaccccacccaagctgctctaggattcctgacctacagaaactgtgagggataagatatgcttgttgttttaacccactaagttttagagtgatttgttacacagcaatatacaacaaatacacaagtcatcacaagtaatatttttattaaatatttgcatagtacaaacctgggtctccatctttgtaggctttgatttttgttttttaccaatcactgactgttaagccacatattttaagtttttgttacaatcacacctaacctcaatgtaccaatttctgtaaatagataatgctaggtaccgtaaccgataaatcttgacatctgagtggattaatacaataaaagtttatttttcatctcatg

SEQ ID NO: 236614 - DNA, 988 bp, Homo sapiens
aaaggatcaacaaaatgaaaagttggttctttgaaaaggtaaactaaattaataaaccagttgtgagactagccaagaaaaaaagagagaagactccctcctccaaaaaaaatcagaaacgaaaaaggaaacattacaactgataccatagaaatacaaaacatcagaacattgcatacctgtatcaaaacatctcatgtgctccatcaatatatatacatatcatgtacccacaagaattaaaaaaaatatataatcagagactattatgaacaactatacactaacaaactggaaaactgagaggtaatggataaattcctagacgcatataacctacaaaaataaatcacaaataaatagaaaacctgaacagactgataatgagtattgagattgtctgagtaacacaaagtctttcaacaaagataagtttaggaacagatggcttcactgccaaattctaccaaagtttcttttctttacataaaattgttttgagacaaggtcttgttatgttgcccaggctagtgtcaagttcctgggctcacaagatcctcctgtttcagcctcctgagtagctgggacttcaggaacatgccacatgcctggctcaaattctaccaaactttcaaaaaagaactaacaccaatttttctgaaatgattccagaaagtttaagaggaagaaattctccctaactcattctatgaagccagcattaccctgataccaaaccacacaaagacataacaaaaaaagaaaactatgggctagacctacccaacattcctgatgaaagtagatgcaaaaattatcaataaaatactagcaaaccaaatccaacagcacatcaaacaaacaaaaaatacactataacaagtggaatttcttacagggatgcaagggtagttcaacatatgcaagacaataaacatgatacatcacatcaacagaatgaaagacaaaaatcacatgatcacctcag

SEQ ID NO: 236615 - DNA, 135 bp, Homo sapiens
ccacccccccactctccgaggaggcgccgccagccccgcccctcccggcccggcgggtgacgtggccgcggctctcccgcgggtgggtcacgtgttggcggcgcctggttgccttggcagcggctgcggcggccg

SEQ ID NO: 236616 - DNA, 257 bp, Homo sapiens
caacattttatccctggctgaggaattcatcctgggagtgtgggctccttcagaggctgagttgccttgtccaggtccccctgcaccccgacttcttgcctcaggtgtcatggtcctaagtggcctgacagggtagagctctctggatggtacagaagcctgaaccccaggcacggtcttgcccacaacactctgcagacctgagtcatcccctcatcccctactccgggctggcaggtgaccaatgtagggggcca

SEQ ID NO: 236617 - DNA, 235 bp, Homo sapiens
ggaaattcagatggcattgtcttaagaacagcccagacacgtttatatagcttccgtgctttatgttaatgtaagaatgaaaaacaaactgtctcgccattttcagtctcaataccaaattgtgtaacactgaacactcacccttgggtttctataacatgagaaccaaggagtggaagggacacataggagagagtcgcaaaactcaccaccaaattgcaactattctgatgcc

SEQ ID NO: 236618 - DNA, 528 bp, Homo sapiens
tcttgggtccaccttccttgctcattgcatgccacatcaccacgccctacttgtttctgtgttccatccagtcctctcttagtgccctggtgtctggagctcagagggtgcttcctccctgcttgctgaatcggattacaggcagcaggggtttttgctgtaaggaaaggaaagggagactctccttcagtgccttggtgtaggctgagacaccgaggccccctgggaaacacctacggatcaggacctcctgcacaggtgtgatatttatcctggaagcaatgtgtacatggaatgccctacaggcacaggaggcatccctggagactgaatggtgtctgggaagagtagggccacagagctgagcccctatggactgcagcagagggcctggctccaatcctagcctaccatatcccagtcccatgatcctctggtcccatggagtcttgtttgagtgcaagtgaactgaatttcccaattcctcaaaaagagcaatagtaataaaaaccataatagtgacactta

SEQ ID NO: 236619 - DNA, 385 bp, Homo sapiens
aggacagggagggaggtcaggctgttgatttttttaaatctgtgtttaaaaaaattaaactgggctaggcacggtggctcacgcctgtaatcccagcattttgggaggccaaggcgggcggatcatgaggtcaggagttcaagaccaagaccagcctgaccaacatggtgaaactccgtctctaccaaaaatacaaaaattatctgggcatggtggcgcacacctgtaatcccagctactcaggaggctgaggcaggagaatcgcttgaacccaggaggcggaggttgcagtgagccaagatcacaccattgcactccagcctgggtgacagagcaagactccgtctcaaaaaaaaaaaaaattaaactgatttttgatgatcaa

SEQ ID NO: 236620 - DNA, 443 bp, Homo sapiens
aattgtgtgacaatgttcaattccgagtttaaaactgacttcattttacaggccttgggggaagaggaggctgtgacatccagcctgcaccattcatagaagatgctttgttctgtgtgatttgggaaggtgttttataagcctggtgctgtttattgtttagcatctctcacagacaactctctttcaaaccccatttctcaagcgtatcctaattcgacaccacctattggttatgacttaggtgttgacagtcctgtttagtgtccaattttgattccttttcctgattcttgttttaggttttgtcttttgaaggccatatgtaagtgcaaggaaacatgctgtattctaatgaaacttaagatttacattcattttttcaagtgttcatttgacgtccctcctacaataaaagtcttcatctttttatgtgacacttc

SEQ ID NO: 236621 - DNA, 1458 bp, Homo sapiens
gcacctagcagatcccaagctggggaatgccagttctggcaccaaccttcctgctccctgctggggcctctgctcccccatctctcaggagtcgaaagtgagaaagcaagacatcaaggagggacctgtgccctgctccacatcctcccacctgccgcccgcagagcctgcaggccccgcccccctcgtctctggtccctacctctctgctgtgtcttcatgtccctgagggtcttgggctctgggacctggccctcagcccctaaaatgttcctcctgctgacagcacttcaagtcctggctatagccatgacacagagccaagaggatgagaacaagataattggtggccatacgtgcacccggagctcccagccgtggcaggcggccctgctggcgggtcccaggcgccgcttcctctgcggaggcgccctgctttcaggccagtgggtcatcactgctgctcactgcggccgcccgatccttcaggttgccctgggcaagcacaacctgaggaggtgggaggccacccagcaggtgctgcgcgtggttcgtcaggtgacgcaccccaactacaactcccggacccacgacaacgacctcatgctgctgcagctacagcagcccgcacggatcgggagggcagtcaggcccattgaggtcacccaggcctgtgccagccccgggacctcctgccgagtgtcaggctggggaactatatccagccccatcgccaggtaccccgcctctctgcaatgcgtgaacatcaacatctccccggatgaggtgtgccagaaggcctatcctagaaccatcacgcctggcatggtctgtgcaggagttccccagggcgggaaggactcttgtcagggtgactctgggggacccctggtgtgcagaggacagctccagggcctcgtgtcttggggaatggagcgctgcgccctgcctggctaccccggtgtctacaccaacctgtgcaagtacagaagctggattgaggaaacgatgcgggacaaatgatggtcttcacggtgggatggacctcgtcagctgcccaggccctcctctctctactcaggacccaggagtccaggccccagcccctcctccctcagacccaggagtccaggcccccagcccctcctccctcagacccgggagtccaggcccccagcccctcctccctcagacccaggaccccagtccccagcatcctgatctttactccggctctgatctctcctttcccagagcagttgcttcaggcgttttctccccaccaagcccccacccttgctgtgtcaccatcactactcaagaccggaggcacagagggcaggagcacagaccccttaaaccggcattgtattccaaagacgacaatttttaacacgcttagtgtctctaaaaaccgaataaataatgacaataaaaatggaatcatcctaaattgta

SEQ ID NO: 236622 - DNA, 352 bp, Homo sapiens
cccagtagctagattgttataatagtttattcccgttcttaaaaaaatacaatcaggccaggcgcagtggctcacgcctgtaatcccaacactttgggagactgaggtgggcggatcatgaggtcaggagttcgagaccagcctgaccaacatggagaaaccctatctctactaaaagtacaaaaattagccaggtgtggtggcgggcacttgtaatctcagctactcaggaggctgaggcaggagaattgcttgaacccgggaagcagaggttgcagggtaccaagatcgtgccactgcactctagcctgggtgataagagcgagactctgtctcaaaaacaaaacaaaca

SEQ ID NO: 236623 - DNA, 367 bp, Homo sapiens
gggtctggaggagtggtcttcattgctgtccctactaatccacgctagctccaaagagagagcccagctggggcaacacaccatgcagacgctgctcccggcccacctcaccacacccgcccccggctgtgcccacagtcccacccgatgcagacactgctcccggcccacctcaccacacccgcccctggctgcgccacagtcccacccgatgcagacactgctgctgacccacctcacaatgcccgccgctggctgcgcccacagtcccacccgatgcagacactgctcccggcccacctcaccacgcccgcccctggctgcgcccacagtcccacccgatgcagacactgctcccggcccacct

SEQ ID NO: 236624 - DNA, 314 bp, Homo sapiens
tctgggcggagtttttagtgtggtaatgaggagagtttgccaaagttcatctccaactgaggcctctctggatctaactggcttttgtttcaccagcactgggcttcttcctggaacttttcttaaacaacaactcaagatgcaacagttaaagtggatactttttacagtatatgcctgaaaacctgaggacattgggttgcagcttattagctttatctctgtgttttcagaggttgctttaggatttgttgtatatttccttaagctaccatagtcatctgcaagtaatatcataccagttcacatataat

SEQ ID NO: 236625 - DNA, 1741 bp, Homo sapiens
atatagcaaatagaagagaactaatttgtctcagatttcttaaatgtgaagccttttctttcaaaataaatgtttagatgaggctggttgtagactttcataaagtacctgtgaaactatttttgttttcagaaagtgattactattaatataaaccaagatttacttgtaaaaagcagtgttctcagggtttatattatggaacagtagcttcaaatactttgtcttatgacagtaattcacttcctttctttttcacagagtaagttcctctcagtttatacagagtgattttacttattttatttggtggtagtggtggaaggtgggagtattataaataagcctggaaaaatatatagtgccacattaatagtggttatctctggataaaatttataactctttctcttacttacagtgaatatattttgtaataaacaaatcaagcttataagattacaggtcttcagaataagaccatagatacattggtaaaagattaataatttctctaaactaggctattgagaaaattaataaacataaaagacaaaagcattcagctcttcgaagtatattaagctgattagaaaaatctgaaataggtggcgccaagatggccgaataggaacagctccagtctgcagctcccagcatgaacgatgcagaagatgggcgatttctgcatttccaactgaggtaccaggttcatctcactggggcttgccagacaaataggtgcagcccatggagcagggcggggcatcgcctcacctgggaagcgcaaggggtcggggaattccctttactacaaaagggaagccgtgagagactgcacctggaaaatcgggatactcccaccctaatactgcacttttccaatggccttagcaaacggctcaccaggagattatatcccgcgcctggctcagagggtcccatgcccaaggagccctgctcattgctagcacagcagtctgagatcaaactgcaaggcgacagcgaggctgagggaggggcatctgccattgccgaggctcgagtacataaataaagtggccaggaagctcgaactgggtggagcccacctcagctcaaggaggcctccctgcctctgtagactccacctctaggggcagggcatagctgaacagaaggcagcagaaacttctgcagacttaaatgtccctgtgtgacagctttgaagagagtagtggttctcccagcactgagtttgagatctgagaacggacagactgcctcctcaagtgggtccctgacccccgagtagcctaactgggaggcatctcccagtaggggggcgactggcacttcataaggctgggtgcccctctgagatgaagcttccagaggaaggattaggcagcaacatgagctccttgccagcagcggaacaaagctgtatggagaatgactttgacgagtcgagagaaggcggcttcagacaatcggtaataacaaacttctcccagctaaaggaggatgtttgaacccatcacaaagaagcttaaaaacctttagaaaagagtagacaaatggctaacgagaataaacagcatagataagtccataaatgacctgatggagctgaaaaccatggcacaagaactacgtgatgcatgcacaagcttcagtagctgatttgattaaatggaagaaagggtatcagtgattgaagatcaaatgaatgaaatgaagtgagaagagaagtttagag

SEQ ID NO: 236626 - DNA, 501 bp, Homo sapiens
ccgggcagagccgggcagggtcccagccactgcatccagcactgcccaccccctgacaggcagcagaaggcccaagattagagattctaaccccaaggggaagccctgggaagcttgtcagctcagcttccaaaatcaggccctgggggaggcagatatttgataatgaatgattcctgtctgatggctgccctgggtggcagaatcccaggctcttattaagagcggctctggccaggagccagcaggcctggtttcaaaggttgccctccagcagctgtgccgtccggggcaccactgccctccccacgccccaggcccacactgttcaccatgtttagagcaggtgcccacagcaggtgcagcccgggggccttgagctcagcctgtgcaccatggcgaggcagcgccccagtcccccagccggccggctcccgcctgcgtcctccctgtgagcagatgtgcgagcagatgtgcttcaagctcggcggctgcggccgc

SEQ ID NO: 236627 - DNA, 439 bp, Homo sapiens
tattctaagacttgattctccttatgctgctgaccagtaagttgctgaaggctattctattaatagaagggtataggaagtacttaacaattattgtttctgcggcacttcatgtgcacaaaggtgtttgaagctactcctctggatttttacagggcttctctatggaagcattttcacatttttattcctaaatctggtagttctttacagtaatcctgtgatctcaagcccttgctttaacttttgtattgttagtagtgacatctagtggttctgttgcaagtatcttgcattctagaccattggagctgaaagtgattttagtgaccaccaggtctcattttgtaaattattaaaaataaactgaaaactcacatgtattcctacattcaaatcaactctatataataataaataaaacctatagctgtgtaat

SEQ ID NO: 236628 - DNA, 436 bp, Homo sapiens
agaggctgcagtgagctatgattgcatcactgcactccagcctgggtgacagagcaagatcttgtaatcttgtaaatacatagaaagagcacattctgtggctgagcccaagaactattatgcacaaggaataacttgttgggacgagccattaccacattggcagggtcgtcccggtctctgcttgggtatttttatctgtaggcctatcagttagtatgcttttggaaaaatctgggatttactagagaaaaaggtaaaggtctagggtcgatgttaattgtgtcccctccaaaaaaagatatgttgaagtcctaacctcccagtacctctgaacatgacatcatttggaaatagggtctttgtagctgtaattagctaagatgaggtcatactggagtggaacagattcctaattcaagatgactggtgtccc

SEQ ID NO: 236629 - DNA, 688 bp, Homo sapiens
gtaagagtctccaaaatatccttatactatagtcacatgcacgtgtccagttatttccttagggtaagttccaagaagcagaatttctatatcaaagtgtttactggaaatttttgccattctgataggtaaaagtaccagagtgtttaacttgtatttctttgagtctaagtaagattgtgcatctgtttatttgccatatgtttattttccacttttgagaactgcctgtgtactttatccattattattatttaaattagtcaagatattagcccttaatcatgaactgaaaataccccctccaacctttttataaactttatggtatcctttttttttttttttttttttttaaggattttcaatttttatgtagtcagatctgttggtcttttcctgtgtgtgtgtgtgtgtgtgtgtgttaacttcagtgatgtctcagttttggtcattcctgcactcctgcctgccccctcaccccaaggtgacttgtgagatgagagttcaaatacaagtagtttatttccaggtacaaagaacaaagggaagctaaggaagaaaagatagtcaataaaagatgtctcatctgggcttagtggctcatgcctataatcccagcactttgggaggctgaggcagtcggagattgcttgagctcaggggttcgagaccagcccaggcaata

SEQ ID NO: 236630 - DNA, 461 bp, Homo sapiens
tctgaatagtggttgttatgggaggtagggaaagattggcagaggtagctttctggaaaagttttatatcttgggggggatgtggataacatggctgtaatacctaaaatatgtatttttattatgcatcatttatagtgtaattttctaaatgaaacaaaaagcagtaacagacactgcccaggttttgagtagtaaatgcacaagatgagcatctttttatcccaggtagcaaggaagctgacaaatactactggtagcaaggaagctgacaaatactactaaaaccatgtcacaaggacttggaaactggcttgaagaggctctcactcaccaaaatggcccaatctgaatatcagtaaagaaaattttaaaaaaagaaaataactttaatggattgaaacacataaattatatttaaatgcatatgttcataatgacaaaatgcactttgaccaccc

SEQ ID NO: 236631 - DNA, 434 bp, Homo sapiens
aaggttggcccttggctggtgtctgagaacttggactttgggacggttcctaccattccctgataagaattccctgataaggtacttacactgtacctaaattgttggcacaacaatttgttttttgctgaatatctgctttctttcttggattctggaattttggtgcatgctaggtagagggtgcctacgttactgcctgcagagaaaaaccctaaatgcctaggctccatcgagcttctttggtagattacatttcaaacatgacacaacatgttgttgaaggaattacatacatcctgtttgactccactatgagaggactctagaagcttgcacctggtttcctctggactttgcccttttgcctttgctgattttctttgtgtttattcactgtaataaatcggccatgactatggctatatgctgag

SEQ ID NO: 236632 - DNA, 442 bp, Homo sapiens
ttctgaaccatatgtaggccagtttttatcatttggcttgtcaattggtgttttgatatttaattctttttttttaggttgtctcataattttttattaaataacaggccttatgtattaaaaacagaaattttaaatgatcttcctaccaaaaagttttgtttctttttttctggcagtcacacagaatataagcggtaaaccttgattaattggagcccctcaaattttgccttctcagttgttttatacattttatctaaattttataattatctttttgtaggtttctttcatctgatacaagttgcaatgctatgactaggattggctttattctggctttgttctccaacaaactaaaattgggaggttatatagtgaggaaggaatgtagctatgtgcaggcagaaatgtagctgtgtggggagtgtaaaccaaa

SEQ ID NO: 236633 - DNA, 406 bp, Homo sapiens
ggaaataggctaaaaagtcctaagtacagtgctattttctcatttgtttaggaaaaatggctcagagaatttggctcgcctcgatttaatttactttatatttcaaaaagtgatagatgagtcttccaccttcactttcctgagttgatatattaacaattaccctagactctgcaggtttgaggaactcttatgaccagctacatacactagatttccttgactaacccaaatctaaaatattaagtcccaaagtgttcatcaaagtgttagagacctggtgatatttattgaccaaaccacaactctcagatttcatagtcagtggtgcacaaaccttcgttagatgatgtattcatgaagtctagtcaccaagattgttctctaaatctggtctctggccttc

SEQ ID NO: 236634 - DNA, 352 bp, Homo sapiens
ggaaataggctaaaaagtcctaagtacagtgctattttctcatttgtttaggaaaaatggctcagagaatttggctcgcctcgatttaatttactttatatttcaaaaagtgatagatgagtcttccaccttcactttcctgagttgatatattaacaattaccctagactctgcaggtttgaggaactcttatgaccagctacatacactagatttccttgactaacccaaatctttgaccaaaccacaactctcagatttcatagtcagtggtgcacaaaccttcgttagatgatgtattcatgaagtctagtcaccaagattgttctctaaatctggtctctggccttc

SEQ ID NO: 236635 - DNA, 622 bp, Homo sapiens
ttgcaagggccactcttagttcttgctgtttggccactggctaccacccatattatcactctaagatataattctgagatgagctaggaattccaaagacgcctcaagctgaggtgtcagactccttcctctgtcaggctgcctgtcattttgaggcctttgtcttttctccctattgaggctgtgagcctgctgcccaacactggctggctctgtacctagcagcaccttggtagacgctgatgccgagggacacagctgacccctctgagtctcgacacccagcgcccttggtttgtgctggcggctctgctagcctacaggattctttggtgtgtcaaagcagaactgtctgcctggggaacgcagcatggtgtagtttcatgcaaattaaaggagatcatcttgatttctgaagcagcacccaggcatctcacacatgtgacctgggaaagacggggcaacaatctacatacacttcaaactggttaatgaaccagggaatggggcagaggaggacacagggccatcctgcaaaatcaaaagctgaagtcaacggaccctaccattctgactctagaaggatgtggatagcgggcgctcgtgccgaattcggcacgag

SEQ ID NO: 236636 - DNA, 480 bp, Homo sapiens
actctctttgtaagggcatggtagggcagtgctgatgggacagccgatgaagacaatggtcaatgtagatgtgccaggacaaaaatgtttccatgtgctttgttccttttctgttacatagatttggaaaatgagggtactacctctggtttgggttttttttgtttgtttgtttcttcatttcatattgagctactacaagagtgctcttatgcaataacttctttgttcacttattttctctgtattttgctccttgcccattttaaaggtcttcatggaaatttgccttaaaatccatggcaatgaaacattggttcactgtatttgtctaaatcatgttacttctttgcagatttttccttgagttttcaatggtgactggctgttgaggataacgagttatggcattccctattctgccttaggtagaggatgtcaagtagctaattactttggaactcgatctttcctaaaaaa

SEQ ID NO: 236637 - DNA, 955 bp, Homo sapiens
ggggtcctcacctgctgtgcctcttattcaattttttttctgcctcctccatagtcaattgacctcttcagatcccatagtctagccagccatctccctttatgccttgggtcccactgttccttcatctcatcccccattccctcagtcccggagtggctgcagccagcagaggatggactgagagcaagagaggaggtcctgcccaggaacccatcctagagaaacagcatcctgcctgggagctagtcttccagttcagcttttataagtcttgtagactcaaacccacttgacccacctgaaatggtattgacagtaatactattttcatggttgtttttcattgtaaatgcagagccttttagctacacaacgagtacagagagtaagggggctggcctgggaatgatatcatcttggatggcatttcctccttggagaaatatatgttagttccaactcacatattaatatacaatcctatagagagagatacagagagctagagagacataggtgtatttgtatgtgcataaaaaatctataagacacacttcggtattctggtcctttcttaagcacatttatatatgatctcagtttttatatggagcattgatagggtttggctatgtccccacccaaaatctcatcttgacttgtaatctctataatcctgataatccccatgtgtcaagggcaggaccaggtggaggtaactggatcatgggggcagtttctcccaggctgttctcatgacagtgagagagtctcctgaggtctgatggttttgtaagtgtctggcatttcccctgcttccacttactctgtcctgccgcctgtgaagaaggtgcctgcttttcccttgccttctgccatgattgtaaatttccagaggccaccccagcaatgtggaactgtgagtcaattaaaacatttttctttgtaagtt

SEQ ID NO: 236638 - DNA, 1008 bp, Homo sapiens
ggggtcctcacctgctgtgcctcttattcaattttttttctgcctcctccatagtcaattgacctcttcagatcccatagtctagccagccatctccctttatgccttgggtcccactgttccttcatctcatcccccattccctcagtcccggagtggctgcagccagcagaggatggactgagagcaagagaggaggtcctgcccaggaacccatcctagagaaacagcatcctgcctgggagctagtcttccagttcagcttttataagtcttgtagactcaaacccacttgacccacctgaaatggtattgacagtaatactattttcatggttgtttttcattgtaaatgcagagccttttagctacacaacgagtacagagagtaagggggctggcctgggaatgatatcatcttggatggcatttcctccttggagaaatatatgttagttccaactcacatattaatatacaatcctatagagagagatacagagagctagagagacataggtgtatttgtatgtgcataaaaaatctataagacacacttcaaaatctataccggttcctccagaggtatgtgtttggcagaaggtagaaggagggtattctggtcctttcttaagcacatttatatatgatctcagtttttatatggagcattgatagggtttggctatgtccccacccaaaatctcatcttgacttgtaatctctataatcctgataatccccatgtgtcaagggcaggaccaggtggaggtaactggatcatgggggcagtttctcccaggctgttctcatgacagtgagagagtctcctgaggtctgatggttttgtaagtgtctggcatttcccctgcttccacttactctgtcctgccgcctgtgaagaaggtgcctgcttttcccttgccttctgccatgattgtaaatttccagaggccaccccagcaatgtggaactgtgagtcaattaaaacatttttctttgtaagtt

SEQ ID NO: 236639 - DNA, 402 bp, Homo sapiens
aagccctcttcttgcaggagtccccgctgagctcccttcaccaggggctaggtgaagggagcgaggccaaccagaagccctagtggagagcccatccagggcaggggttccaaggaggacaaaaaagccggttagtgaaggtgcgctctgcgccagggactgtgccggcagacacaggcactactgacaccgcccccagcccttcggaggagtcctcggctcctcatctccagctccagcccctttccagccggctggtgggcggctgggagtggggacactggatcggaggggacccttcacgggagtactcgctgccctcactcgtctcggaacgcggctggacccggagtccccgaccgcagcccgcgcacgacccccgggagcctgtctccgcggccg

SEQ ID NO: 236640 - DNA, 685 bp, Homo sapiens
aaaaaaataaacagtagagcttgtttaatgtacttgtttgccacatacagggaagataatgccaaatacaaactaaaacatccaaatctctgcttcagtttgagcagttacctcacgtcaagactgaaagaccttcaattaataaagtctgacaagaaagttaaactgaaacgaattgccaaaaatttgccaaatatgtacctgtagttttcattccagcacttctgcaaaacctatcttcttatatattccctgacttggacacttcaaaattgtttaacctgcatctgtagacctttttatactttatatattaagcacagttacaagtgtaatgacttcagaatacaaaataatacaagtattaacagatgtaatacatcgtatgtgtctacacatcattacccttcctcgattctctaaagtagccttcccacctaaaacactaattcaagcatgctactggggtctgttcaattgcatctattcttctatccgtgcagctgaagcttaagactgtctaagtaaaacaaagttcgggcgatgcttctcccggggactcggtcctggcatccagtctcccgttgctccttttaaaaactgacacacaaacaaggcgaaaggagagggaagagggcggctggcgctccgggccccctccccgcctgcagccaggggcggccgc

SEQ ID NO: 236641 - DNA, 368 bp, Homo sapiens
agactcattagacctctgtattccagccttgattagcacaagaaaccataatggagcatctgcaaacaagaatcaaaggtactacaagtgataactctgattgagttgatctgaggtggaatctgggactccatttttttaaatgttgtcctagtaattttgataatcacccagattcaaaactaccgagttggatcacttactaaatctaaatagcaacttctgccccttatttaccttttctattgttacaagtatttcctctgttgtatttactgaagcgcatactatattcacctttgtatacttaattcctaaccccttaatggatatacttcaaatattcaataaatatttgttgaactaaa

SEQ ID NO: 236642 - DNA, 97 bp, Homo sapiens
cagcatgcatgcagtttattcgccacatttcccccaggaactctctctggttagggaatgaaagaattgaaggaatgggggatgtacaggtggaagt

SEQ ID NO: 236643 - DNA, 748 bp, Homo sapiens
taagctaagccttgatcttggtaacaggattgacatggacagtttcaatctgacccatatgccctttgcccaaagcactgagccagcagcatcagttatgttttaatgaaattgaagccccaggacctgccactatggctctgaggaggactcagcttcactagcttggaaattacatatttggagggatgagagcccatgagtgtgggagatagggtaggctcagtgtcagtgtttttgtttcttccttgttccatacacttgagtagggatacatggtattaacctctttaaacaggtctctaatttcatctcattaattcacagttgcacagccatactagggtctcttccataaaccataagattttattcaccaaagctctagagacaaggtactcagatctctgtggcatccctcattttctcaactgcttctctacaaacttctcctcactttgagagtttctaatgctcaggctgggagactttttagggggtgtttttggtttttatctcctagggttatgtctaatcactcttgtggcatcctgtcctgggatttgtgctcctaaggatagaggagagtatttctgggaggagtgttcccatgatactatttgattatgtcatccttgagatggtattgtatcttctacccttatatcctactcatcgcctggcacacagcttggaatgtagtggtgcctaccacagtttgaataaataacactacacctttcagagc

SEQ ID NO: 236644 - DNA, 715 bp, Homo sapiens
ttttgaggtagggtctcattctctcacccaggctggagtgcaattgtgcaatcacagctcactgcagcctctacctcccgggctcaagctatcctcccactttagccccaagtagctgggaccacaggcatgcaccaccacgcctggataattttatttattttttgtagaaacgaggtctcattatgttgcccagactagtctcgaactcttaggctcaagcgatccatctgctttggcctcccaaagtgctgggattacaagcatgagcgactgagcctggccagtaactaatatttttgatagaataagttgcaaatctggaacatacttattttaaaagtaaaaaagtcttttaaattggcaaaatctacaattctaggtcttaaatgaaatttagctgggcataaacaaaggctgaatttcattttgagtcactgataatctaagttaagggcaatgtcccttttcttctgttgtaggatcacctctactttgtgttagtctgggaagtgggggtgctgtgtaagaagtactaacaggtaaaagatgttgcagtaggctttagtcttttgactggtctcctcacctctattcttgttccttacaatttatacagatattgccactggaaccacttttttaaagctagttgaatcttatggataaagtgttaactttatagcttggattaaaaatgatttcctgtccagtc

SEQ ID NO: 236645 - DNA, 423 bp, Homo sapiens
ggctggagtgcactgtcgcaatgttggctcattgcaacctctgcttcccaggctcaagagatcctcctgcctcagcctccagagaagtgggactacaggcatgtgccaccatgcctgactatttttgcatatttttttggtagagatggagtcttgccatgttgcccaggctggtcttgaactcctgtactcaagcgatctacccacttcagcctcctaaagtgctcggattacaggggtgaaccactgcaccaggcctccagattaaattttaaaggggaaaaagatatttatgaaatggaaactagataagagaaaatcattcaaaatatgaagtatttggattagggggtcagagtgtctaggctggtaggtaaaaaaaaaatccctgatcattacattagaaaagtatggagatgggaa

SEQ ID NO: 236646 - DNA, 220 bp, Homo sapiens
ttgagcttgagtttaataactgatgcacagagatcactgagttttttgataagaattagagtaggaagaaatggccacagagaacaatttatatctccaggtgaggactcaggagataattctgcgaacagaacttcctgagaactgagatggggtaaatcgctggtattagaagagtgaaaatgtcagtaattaaggctacgactgtgctcttagaggc

SEQ ID NO: 236647 - DNA, 622 bp, Homo sapiens
aagagaggtgagcaccagtggagccccaaggcgttggaggataaaactgaggccccttcagacagcagggccactcagcctgcctgttctttctccctttctgctgagaaaatttcagacttcctgactgtggccactttcatcatgtggatcctggctcctgcctcattagtagacactgattcagctgacctgtttgccagaccctccaatcctgactgcccctgtacttacccccccccatcagatattgatcatgaaacgagaagccctacttataattctccttctccctttaggattaataataattgttagtccaagctgcaccattttgcaagtccctgccatttcacagaccctggtcagaatgaaagattccatggggccctgggctgtgagaaacatcctgcccagccacctgacttccttatcacatcctgctgggcaaaggcccaaggaacatctttatcaacatcctcctgggcagcaagccatacgggcccagacccctcctgcccagacctgtaattaccccagcctgtaagcagcagtgagctctggcaccaagctggtcccctctctgcaagttgtactggcaataaacctgtgttgctgtaga

SEQ ID NO: 236648 - DNA, 646 bp, Homo sapiens
aagagaggtgagcaccagtggagccccaaggcgttggaggataaaactgaggccccttcagacagcagggccactcagcctgcctgttctttctccctttctgctgagaaaatttcagacttcctgactgtggccactttcatcatgtggatcctggctcctgcctcattagtagacactgattcagctgacctgtttgccagaccctccaatcctgactgcccctgtacttacccccccccatcagatattgatcatgaaacgagaagccctacttataattctcctttcaccattcttgctgaatctccttctccctttaggattaataataattgttagtccaagctgcaccattttgcaagtccctgccatttcacagaccctggtcagaatgaaagattccatggggccctgggctgtgagaaacatcctgcccagccacctgacttccttatcacatcctgctgggcaaaggcccaaggaacatctttatcaacatcctcctgggcagcaagccatacgggcccagacccctcctgcccagacctgtaattaccccagcctgtaagcagcagtgagctctggcaccaagctggtcccctctctgcaagttgtactggcaataaacctgtgttgctgtaga

SEQ ID NO: 236649 - DNA, 378 bp, Homo sapiens
ctgattcttcctgctcctctgtgagtaataaatttggtttgcctgacttactgtgtgagcattcttctgtttctggcagcttggtttatataaaaaacctcctactagacctatgaatctatgcaatgtggaagtgtcatagaggtaaataagaagcaacttaactgagctaaaaactaacatacataacaaggggccactgcaccaaggagcaaaatgatcctgccaaaaagtcacatgtgaccattccagacatactgtggaagaagaaggatgctgaaactcacagagatctgaagatcttacccaagccaacaggaggctaataaagcaagagaattccactgtactttgattcgagaatacaagcttcatctc

SEQ ID NO: 236650 - DNA, 431 bp, Homo sapiens
ctcaataaaccatatattaacattgtttgaatccaagtttatgttatcttccagttggctacaccattttagaaaacaatttgtgtttgttgaatagtgtatcttttccctgcagattcaagtctgtgcctttacacatattgcattttcggagtatatggctctataccttgacgttatctactacatattgatttgtcagcctataagtataccaatgcctcactttttaaattatcttcattttataatatattttcatagctagtaggataatctcaccatactactactttataatgtttttcttttcatactcaatgctaaaagactgaaagctttccccctaagatcaggaacaagacacgaattcctgctttggctatttcaactcagcatagtattggaagttctagccagagcaattaggt

SEQ ID NO: 236651 - DNA, 810 bp, Homo sapiens
acagtcctaaatatatatgcacctaatactggagatcccaaatttataaaacaattactactagacataagaaatgaggtagttggcaacacaataatagtgggggatgttaatactccgctggcagcactaggcagatcaccaagacagaaagtcaacaaagaaacaatggacttaaactataccctagaacaaatggacttaacagatacttacagaacattctacccaacaagcatagaatatacattgtatacatcagaacacgggacattctccaaaatagaccatatgatagggcacaaaacaagtctcagtaaatttaagaaaatcagaattatatcaagtactctctcagaccacagtggaataaaattggaaattaattccgaaaggaacactcaaaagcatgcaaatacatggtaattaaataacctactcctgaatgattgttgggtcaacaatgatatcaagagggaaatttaaaaattctttgaactgaacgataatagtgacacagcctatcaaaaactctgggatacagcaaaagtggaggtaagaagaaaattcatagcattaaatgcctatatcaaaaagtctgaaagagcacaaataaacaatctaaggtcacacctcacagaattggagaaactagaacagtccaaatccaaacccagcagaagaaaagaaataacaaaatcagaacaaaactaaatgaaattgaaacaaaaaaatacaacagataaatgaaacaaaaagctggttctttgaaaagataaataaaattgataagcattagcaagattaatc

SEQ ID NO: 236652 - DNA, 635 bp, Homo sapiens
cagtgagctgagatcgtgccactgcactccagcctgggtgacagagtgagactccatctcaaaaaataaaagagtcactctggatactgggttaagaaaggagtgtgcggggagagcggtgaggacaaaggtggaagcaggggagcagataagcagattctgcagacgtatccacccttccgtgactagctctagccaatggagaaagggcaagacctttcatacatgaccagggtgtatgagaacatgggtgttaccatttaatttcagggtctgtgtgcctcctgcagttcccaccggagaagtgactcctaggtttcaggctgggcttgtccgtatcatatgagctggcagtttctgtttactcattggcaaactgacatataccttgaggtagatgctggagcccacaatgtggagcaaaaagcaaaggaggtccctgggccaaactactgtttgcaccaaatgggaagggctaacttgttattggatttctctttgctctgcaaataggatttcatcttagtaactaagagtacactgtcagcccaccagaaaagccacactgctgtgattcattgatattcacctgatactgccctttcactcttggatttcttggttgaccctccgta

SEQ ID NO: 236653 - DNA, 689 bp, Homo sapiens
cagtgagctgagatcgtgccactgcactccagcctgggtgacagagtgagactccatctcaaaaaataaaagagtcactctggatactgggttaagaaaggagtgtgcggggagagcggtgaggacaaaggtggaagcaggggagcagataagcagattctgcagacgtatccacccttccgtgactagctctagccaatggagaaagggcaagacctttcatacatgaccagggtgtatgagaacatgggtgttaccatttaatttcagggtctgtgtgcctcctgcagttcccaccggagaagtgactcctaggtttcaggctgggcttgtccgtatcatatgagctggcagtttctgtttactcattggcaaactgacatataccttgaggtagatgctggagcccacaatgtggagcaaaaagcaaaggaggtccctgggccaaactactgtttgcaccaaatgggaagggctaacttgttattggatttctctttgctctgcaaataggatttcactagaggcaattcttctaatacttcttcagccacctgtccttcctcatctcttttcttagtaactaagagtacactgtcagcccaccagaaaagccacactgctgtgattcattgatattcacctgatactgccctttcactcttggatttcttggttgaccctccgta

SEQ ID NO: 236654 - DNA, 768 bp, Homo sapiens
cgccagcgcctttgcggagcacccgggccacgtctccttcggtccaggggaactcctccagctcggggagccgcggacagcgcgagaagaggtcggccacttcggggtcctcgggcagcaccgtgttcaccgtgtcccagctgttgtggcggctgttcatggagccggagtagcaccaccaggccgccccgcggtgctgctgcgccgaagagttgagcgcctgcgagttggacttggaggacgagaggctgagcgagcggcacgagtccccggccccatacccggagtccaaggtcaagtcctccagcgtcttcagagtcgagctgtacgtcccggccatggggagcctgccgagggcggcgtcgccgagcgaggggcactcacaactccatgccctctttcccaagtgggcagaaacaagctctaggccctccgggccaccctccttcctctctgcgtcgcggggctcggcggccgcattgcctgcccggaggccgcgggaaggtggccgagatccgtggccagcaggagccccacgctcccggcgtcccgactcgcagctgccactggaaagaaccccgtcgctaccccccggcactcccccttgtccacctctaattcccacaagcagagagtcagtcctccacagagaaggaatcccgggagaacagggcggcggcggcagaaggaggaggcggcggcgcagggcgcagggcgcagcgcgagtccgggaccagccggcgagaaagcgctccctcgtgccaactt

SEQ ID NO: 236655 - DNA, 393 bp, Homo sapiens
actgacacatgagagatgggtggtcacaccattaaaaaccaaatgaaaaaggcatttcaggaagaaaagagtgatagacaacaccgagaaattctacaaaacgtatctgtcccaaatagataatctgcaatctcatttaatatcttttagactttaattggtttgaaacttaagaaaaacagagatacaggcctcttcaacagttaactaacaaacctcaacctgcccaaattggatctatcatcaaacatttctaacattttaaactatggccaaggatggtctgacacaatggctaatgcctgtaatctcaacactttgggaggtggaggcaggcagaccacatgatctcaggagtttgagaccagcctgggcaatatggtgaaaccacgc

SEQ ID NO: 236656 - DNA, 844 bp, Homo sapiens
gagtgcagtggcacgatcttttctcactgcaacctccgcctcccaggttcaagcgattcttgtgcctcagcctcccgagtagctgggattacaggtgcccaccaccacacccggctaatttttttttgtatttttagtagagtcggggtttcaccatattggccagggcgaacttctaacctcaagtgatccacccgcctcagcctcccaaagtgttaggatcacaggcatgagccaccgtgcccactgagaatttaatacactttatgtaagttaattttttatgatagttatctagctttgccagaccaattttgttagtaaatttaaaacattaaaaaattttgaatcctcctaattctgtgtctctaatttagtaattttaagttttgatccttgtttcattctatcattcttttatttaaaaaaattgtcattggcttttctaaaagtgaatcgtgaatcatgattcatgtgaaataattaactctaaaacagcaaagataccttttagaaccttcattttttataaattgcattaacaagttatgcagtgatgtgaagatacaaactaaggtcattaagttttctttaatttataatttatattaacctattcattgaacaaggatttgatagtttgtgattaaagcaaaacaggcaaagaccattaaaaacaaagacagaaaatgagcataaatcacttgagaaatatgagcagaatgggggaatgggaagaaatctttataccagtaatctgaggccagatagttcctgggtttggaccttaaatttagctctgagcttcctggcaagcaagagaaaaaaggaaacagggtgactt

SEQ ID NO: 236657 - DNA, 433 bp, Homo sapiens
aaagaatgttattcagccttatggagtcagtataagattatatgctgataactccaaagtctgtatattctggccttcaactacctgctgaatgtccccactgcgtatctttttctgaaagttctgcaggtacctcaaggtacatcaagattgatatatcttaaatgaatctaatcttttttcttaagcttgtttttcttcctggtttctctgatattaatcactggtgtcatcatcctaaactatcatgtctcctaaacaaggaacttacgagcttctttagccttccttccactcccactttaactttcattagcaatgtctccattttgcctcccttcctcatggtcacaactgcggcatttcccaagttcgctctcttcatttctgtttcatttatctgattcatactatctctacacaggactgttta

SEQ ID NO: 236658 - DNA, 575 bp, Homo sapiens
aaatacttgtgtcatcctcaactgtatagtttttatgacttttcctgtgttcatctggttggcagatgaatgcaaaatgccttttagcttcatggaaggcacacatgaatcatggctatgtgataaacagaagaagccacgtttcggagggtttctggtgtgtgtacgtgtgcacttgcatgtgtgtgggcacacccttgtgccaaatggaccaccagtttaaatcgattttcaacagggcagatttcatatgcttctttagtgtggcccaagtcaatctatttttagaaggggaaagtagagcatgttctgaaagttcttttcttctgccatcagggattgtagtactttttatttatagtaatttcaggtctctaaatacttcaagcaaaattaatgaggcaaacaaaaagaattaggtaccagataattggatcatgtgttattttatagagagctttatttatcttgcctttggaaagtataatttgtatttttcaaaattatgattagatctaattctttttcaagatttacttaaaataaatatttctgcctaggcacaagactgtgta

SEQ ID NO: 236659 - DNA, 346 bp, Homo sapiens
tcttcctgctagggtctccggtgggtgaggcggggcctgacctagactcactagtggcctgggagagccgtcgctacagtgacctgctgctctgggacttcctcgacgtcccattcaaccagacgctcaaagacctgctgtgctgacctggcctgggcctctggggccggcccctggctcagcccctccttccaggtcttgatgggagggaggagggcccagaagctggacaacttaagccactccttggcctcccccagccaggggcctgggcaggaaagatggggtggtggactgtttttgcctactttttgtttttgaaaaacatgcactccccactctgagg

SEQ ID NO: 236660 - DNA, 531 bp, Homo sapiens
gaaggtggctacccagcctatgcaagcgggggtggctacgtcattgccgggcgcctggcaccctggctgctgcgggcggcagcccgtgtggcacccttcccctttgaggacgtctacactggcctttgcatccgagccctgggcctggtgccccaggcccacccaggcttcctcacagcctggccagcagaccgcactgcggaccactgtgctttccgcaacctgctgctggtacggcccctgggcccccaggccagcattcggctctggaaacaactgcaagacccaaggctccagtgctgactctcattggggagggcggaggtgctgacctggcctgggcctctggggccggcccctggctcagcccctccttccaggtcttgatgggagggaggagggcccagaagctggacaacttaagccactccttggcctcccccagccaggggcctgggcaggaaagatggggtggtggactgtttttgcctactttttgtttttgaaaaacatgcactccccactctgagg

SEQ ID NO: 236661 - DNA, 2426 bp, Homo sapiens
cagccacgtcctcatggccctgctgctcttgctgttcctgggcctcctggggctctgggggctgctctgcgcctgcgcccaagacccctccccagctgcccggtggcccccggggcctcgcccgctgccgctcgtcgggaacctgcacttgctgcgtctgtcgcaacaggaccggtccctgatggagctctcagaacgctacgggccggtgttcaccgtgcacctggggcgccagaagacggtggtgctgacggggttcgaggcggtcaaagaggcgctggcgggccccgggcaggagctggccgaccggcctcccatcgccatcttccagctcatccagcgaggtggaggcatcttcttctcatctggggcgcgctggagggctgcccgccagttcacggtgcgtgccctgcacagcctgggcgtgggccgggagccggtggctgacaagattctgcaggagctgaaatgcctctctgggcagctggatggctacagaggccggcccttcccgctggccctactgggctgggctccctccaatatcaccttcgcgctcctcttcggccgccgatttgactaccgggaccccgtgtttgtgtccctgctgggtctcatcgatgaggtcatggtcctcttggggtcccctggcctgcagctgttcaacgtctacccatggctcggggccctgctccagctgcaccggcccgtcctgcgcaagatcgaggaggtccgtgccattctgaggaccctcctggaggcgcggaggccccacgtgtgcccgggggaccccgtgtgcagctatgtggacgccctgatccagcagggacagggggatgaccccgagggcctgtttgctgaggccaacgcggtggcctgcaccctggacatggtcatggccgggacggagacgacctcggccacgctgcagtgggccgcacttctgatgggccggcacccggacgtgcagggccgggtgcaggaggagctagaccgcgtgctgggccctgggcggactccccggctggaggaccagcaggctctgccctacacaagcgccgtgctccacgaggtgcagcggttcatcacgctcctgccgcacgtgccccgctgcaccgcggccgacacacagctgggcggcttcctgctccccaagggcacgcccgtgattcccctgctgacctcggtgctcctggatgagacacagtggcagaccccaggccagttcaaccccggccatttcctggacgcgaatgggcactttgtgaagcgggaggccttcctgcctttctctgcaggttctgaaggcggctgtggtggctgctcctgtgctcccctggggaggtccccacccctcccctccaggagcaggcctggtgcagcccactctgtgcctggacatcccccgcaggccgccgcgtctgtgttggggagcgcctggccaggaccgagctcttcctgctgtttgccggcctcctgcagaggtaccgcctgctgcccccgcctggcgtcagtccggcctccctggacaccacgcccgcccgggcttttaccatgaggccgagggcccaggccctgtgtgcggtgcccaggccctaggagctcccccagcccccaggtcctcctgaccactcccctcccagccctgggtcctcccaccctctctcctcccaccccacagctcggactgctctgggagggccctgaggactcccaccctcacccccacccccacagggtcagcaactgcttccggttacacccaggactacccctgcccgaccctgtgggacccccacccctctgatgctgtctgcagctcagtccctgccagcccccaggagcgcctccagggccccgcccactctcccacccctgaagctgcactcccacccacctagctccccccagggccccccagcacctacagctggggctgcagggagacaacgggtggctgcaatccagccagagacaggcgcaggtgggtgtcctcagcgtgcgagccctgcaccccccaggtcctgggactcctgcagaccccactccattcccgctcctggaacacttcctgcagctgtgcctggaggcagtcggcctgcagtgccagactctgagccaagccactggggccatgcgtatgactggtgcagggaggcaaggcccacattctccttcagagacaggcactggcgccagaggcttccttggggcggggggagggcacctcagcccctgaagacaagcagcactgcagtggcaaaaatggaaacactgacccggtgcggtggctcatgcctgtaatcccagcactttgggaggccgaggcaggcgaatcacgaggtcaggagttcgagaccagcctgcccaacatggtgaaaccctgtctctactaaaaatacaaaaaaattaaccgagcatggtgg

SEQ ID NO: 236662 - DNA, 2529 bp, Homo sapiens
cagccacgtcctcatggccctgctgctcttgctgttcctgggcctcctggggctctgggggctgctctgcgcctgcgcccaagacccctccccagctgcccggtggcccccggggcctcgcccgctgccgctcgtcgggaacctgcacttgctgcgtctgtcgcaacaggaccggtccctgatggagctctcagaacgctacgggccggtgttcaccgtgcacctggggcgccagaagacggtggtgctgacggggttcgaggcggtcaaagaggcgctggcgggccccgggcaggagctggccgaccggcctcccatcgccatcttccagctcatccagcgaggtggaggcatcttcttctcatctggggcgcgctggagggctgcccgccagttcacggtgcgtgccctgcacagcctgggcgtgggccgggagccggtggctgacaagattctgcaggagctgaaatgcctctctgggcagctggatggctacagaggccggcccttcccgctggccctactgggctgggctccctccaatatcaccttcgcgctcctcttcggccgccgatttgactaccgggaccccgtgtttgtgtccctgctgggtctcatcgatgaggtcatggtcctcttggggtcccctggcctgcagctgttcaacgtctacccatggctcggggccctgctccagctgcaccggcccgtcctgcgcaagatcgaggaggtccgtgccattctgaggaccctcctggaggcgcggaggccccacgtgtgcccgggggaccccgtgtgcagctatgtggacgccctgatccagcagggacagggggatgaccccgagggcctgtttgctgaggccaacgcggtggcctgcaccctggacatggtcatggccgggacggagacgacctcggccacgctgcagtgggccgcacttctgatgggccggcacccggacgtgcagggccgggtgcaggaggagctagaccgcgtgctgggccctgggcggactccccggctggaggaccagcaggctctgccctacacaagcgccgtgctccacgaggtgcagcggttcatcacgctcctgccgcacgtgccccgctgcaccgcggccgacacacagctgggcggcttcctgctccccaagggcacgcccgtgattcccctgctgacctcggtgctcctggatgagacacagtggcagaccccaggccagttcaaccccggccatttcctggacgcgaatgggcactttgtgaagcgggaggccttcctgcctttctctgcaggtcagcagccctcggggccggggtggggcggcacctccagggctccaggggtgggacggccccagctccgcctgccgcctctgcacccacctcctgatctcaggttctgaaggcggctgtggtggctgctcctgtgctcccctggggaggtccccacccctcccctccaggagcaggcctggtgcagcccactctgtgcctggacatcccccgcaggccgccgcgtctgtgttggggagcgcctggccaggaccgagctcttcctgctgtttgccggcctcctgcagaggtaccgcctgctgcccccgcctggcgtcagtccggcctccctggacaccacgcccgcccgggcttttaccatgaggccgagggcccaggccctgtgtgcggtgcccaggccctaggagctcccccagcccccaggtcctcctgaccactcccctcccagccctgggtcctcccaccctctctcctcccaccccacagctcggactgctctgggagggccctgaggactcccaccctcacccccacccccacagggtcagcaactgcttccggttacacccaggactacccctgcccgaccctgtgggacccccacccctctgatgctgtctgcagctcagtccctgccagcccccaggagcgcctccagggccccgcccactctcccacccctgaagctgcactcccacccacctagctccccccagggccccccagcacctacagctggggctgcagggagacaacgggtggctgcaatccagccagagacaggcgcaggtgggtgtcctcagcgtgcgagccctgcaccccccaggtcctgggactcctgcagaccccactccattcccgctcctggaacacttcctgcagctgtgcctggaggcagtcggcctgcagtgccagactctgagccaagccactggggccatgcgtatgactggtgcagggaggcaaggcccacattctccttcagagacaggcactggcgccagaggcttccttggggcggggggagggcacctcagcccctgaagacaagcagcactgcagtggcaaaaatggaaacactgacccggtgcggtggctcatgcctgtaatcccagcactttgggaggccgaggcaggcgaatcacgaggtcaggagttcgagaccagcctgcccaacatggtgaaaccctgtctctactaaaaatacaaaaaaattaaccgagcatggtgg

SEQ ID NO: 236663 - DNA, 791 bp, Homo sapiens
agcttccacccgtcctagccagggtgagaccaccctgcctgctggtggagccaggcaggcccagagcccacctggaagatggaggctgcacggcactgcgtggtccggggcagccccagggcagcagagcattccctggccttccctgctggtgccagctccttaccacagagacgccgcgtggaactcactactggcgatcgcggacgccccaggaaggcgagtggcacgaggtgtggcggggctgccacaggcagtcacggagcacccgctggtgccaggctcacccctcagatacagcctcgtgggctggctcagtggcggccctgactctccaaggtctgaggtctgctctgtcttccattccatgactcacaggaggttcaaggttacttccactgtggcagctgcctccctcctccctctccaggatggaaggaggtcctgctgtgcaaacctgcctggctgtccccttccgggacacggacagggggtttcctggcagttcctggtcctcccttgagggctaagggtccccccgttctgtggccgcctccagcacatccacccagagtccctgggcgtgaacacagccgctggggacgatcaccgcctgcccagcgtgcagccctggggctgcgtccttatctccgctcctcctgcctcctgcccagctgttcaacgtctacccatggctcggggccctgctccagctgcaccggcccgtcctgcgcaagatcgaggaggtccgtgccattctgaggaccctcctggaggcgcggaggccccac

SEQ ID NO: 236664 - DNA, 275 bp, Homo sapiens
cccttctcttcttcttctccccttcccccatcacctggggcccgattcagctggcccagcccttactctgagtgcccacagatgagcctccatgtccatgctaaagcctccaagtgtcatgttggagagaatggtggtcacagtagataagcccaaaatgccttacagtttacaggctggagtcaggcctcgccacgtgctggctacatgacttccctgagattccatttcctcctcagtaaaataagtggtaagattttaggatccccagcact

SEQ ID NO: 236665 - DNA, 369 bp, Homo sapiens
gaataaatggcagctcactagtccccgagggtaagggacctcaccttgccctgcctgtttactactctgtaaaattgaaataacgcagctgggtgcagtggctcacgcctgtaatctcagcactttgggagtgcgaggctggttgatcacctgaggtcaggagtttgagaacagcctggccaacatggcgaaactccattgctactaaacatacaaaaattacctggatgtggcggcatgtgcctgtagtcccagctacttgggaggctgaggcaggagaattgcttgaacctgggaggcggaggttgcagtgagccgagatggtgccactgtactccagcctgagcaacagagtgagactccgtctca

SEQ ID NO: 236666 - DNA, 2481 bp, Homo sapiens
  misc_feature (1012)..(1012): n is a, c, g, or t
  misc_feature (1022)..(1022): n is a, c, g, or t
  misc_feature (1082)..(1082): n is a, c, g, or t
  misc_feature (1086)..(1086): n is a, c, g, or t
  misc_feature (1730)..(1730): n is a, c, g, or t
  misc_feature (1959)..(1959): n is a, c, g, or t
  misc_feature (2209)..(2209): n is a, c, g, or t
  misc_feature (2353)..(2353): n is a, c, g, or t
ataaattaaactttatcatgggtatgtatataggaaaaaataatagtttgtataaggttcgaatagtttgtataaggttcggtactatccacagtttcaggcatacaccgggggtcttggaacatattcccctcagataagagagaattcctgtgtatggaagagactcctcagatacagcttctcttcaactgtaaacctatgaattaaaaaaaagttattggtcctatccacccccgcacatacaacctacattgttatggcaaggatacgatgtcacatgaattgactaagtttacaagagaggaaattgaaggcatgtagcaatcccatggcagttgtgaaatccatctgcctatatgtcaccaattcccccaattccaggggtagggaacatttgattagtctactttggttctctgaagttggctcccttttctttttctcagttcttgacttttttctttgagctgtctttccttttccatgagaaatgtcctctttttgtagctttctcagcctgcttctaggctctgtcccaactggcacagttatccacactggcacaacttctttaaaaagctttgtggactttcaaattataaaccactcactccaccagagagaagccacacccacaaatttcttcaagaagtcctctatgtactttgaatgtcaatcagggaatgataccctttagagtcatatatgtcttttgtctacctgagagcgtcagctagacactggcttaaatctttctgaagtacaggtggtcgtccacttatgatggttcaacttagaattcttttactttaggatggtatgaaagctatatgcattcagtagcaaccatacttcaagtacccatacaaccattctattttttacattcagtacagtattcagtaaatcatgaaatattcagcacttcattataaaataggctttgtgttagattactttgttcaatataacataatgcaagtgttctgagcacatttaagcaatgacnggttaagctntgatgtatggtaggttacgtgtactattcaacttaatattttcagcttacgatgggtttntcangacataaccccattgtaagtcagggagcatctgtagtagtaacaaggttgtattgcatgtgctttattttatcttgatcctcagaccataatcttacagttaacaccctggatttttttttttttaacttcagaaccttttgctgaagaagctggtaacgagaaagttttattttgtaaccctgcaagtcccaggttgaaagtattttcctctaaattctgcttgaaactgagcagttccttgtttagttcttctctcttttaatacctttctacaggtgttttttgaaaaattgcttatcactttcagcatttttcctggaaaccttagccagatctataacttcaataggtactttttctatcttccaagatactgtctcacttgttttgtcagtagattacatggcttctgtccagcctgaaataccaatttcctcagtggttttccagcctccgttagtagtctctttgctgctcttccaccaaatgtctataacccagtccccaaactagtgctacatgtcttaagtttctgtcatggcaatgccctgtttaaataccaaatactatttcagttatctttttctgcctaacaaatcaccccaaaatttactaccttaaaacaaaactattctttgcttnagattctactgtctgaactggactcagctgggcatttcttctggtctcacctggagtcatttatgcaactgcagacatgtggggactccaccaaagatggctttactcaaatgtctggggcctcaactggggtggctgcattagctctggcacagctgcagttccctctccagcagggtcctgggccatttcacatgatgactgagggctccaagagggtgaaagcagnagcatctgggctaggcctcttagagcctgtgcataaaactgaaacagcactacttcatccatgctgcctttcaaagcaagtcccggggcctgctcaaaattacaggcagggaaaatatcctctacctgatggtagtgacaaagaatatgtgtcccatcgttaattcaccagttgccttcacagttgcaacaatgagactgttagcttttaaacagaaatgataaaaactagaagccggccgggcgcggtngtcacgcctgtaatcccagcactttgggaggccgaggcgggtggatcaggaggtcaggagattgagaccgtcctggctaacaaggtgaaaccccgcctctactaaaaatacaaaaaattagccgggcgcagtggcgggcgcctntagtcccggctactcgggaggctgaggcaggagaatggcgtgaacccgggaagcggagcttgcagtgagccgagattgcgccactgcagtccgcagtccggcctgggcgacagagcgaaatccgtctc

SEQ ID NO: 236667 - DNA, 497 bp, Homo sapiens
tcaatccaagctggctcatgacttgcttcaatgaataggaaatggcagaagtgatgctctgaggcttctgggcctagactttaagaggtgttgcccctttcctttttccctcttgggatccagcctaccacatagagaagtttgggttgacaactaaatgtgagagagagacagacagagagaagagggagagctgattcagctagaccttagtcattccagccatcctagctgaagcactagcatgtgaaagaagccaccttctaacctatcaatcagagcccccaattttactgacctcagtcaacaccatgtggaacagaactaccccagggagcccaaccaacccatacaatcatgagaaattaaaaactgatgttgtagcctcctgagttttaaggtagtttgttacacaaaaatactggaattttgacccaccttcacctccaatgccaacctagtaaacctggatatatctttcaaaatttggctcaagt

SEQ ID NO: 236668 - DNA, 354 bp, Homo sapiens
caactgaattaccagaatgggcagaaaaaggaagtatcaaagaagggtctgctgatagaaaattaaataaagaagaagatgccatggaaacgtttttagtgcaaatacactattgctcatggctgaagacagaaagaagactatgtgtgacttccagatgaagttcaggcatagaggcagggctaaataaacaagcacatagacccgagaattctcgttgattgatctttggaaattcggtataaatatgatcagttcaaccatgccttagctactggatcaaaggagacatctaccggctttgggagataggaatctggaaaattgacagactgaaaaaaccaaaaccaaaga

SEQ ID NO: 236669 - DNA, 442 bp, Homo sapiens
tggacggagtttcactcttgttgcccaggctggagtgcaatggtgccatcttggctcactgcaacctccgcctcccaggctcaagcaatcctcccatctcagcctcctgagtagttgggactacaggcacacatgcaccaccatacctggctaatttttgcattttttgtagagatggggtctcaccatgttgcccaggctggtctcaaactcctgggctcaaccaaactgcctgcctcagcctcccaaagtgttgggattacaggtgtgagtcaatgcgctcagccaacctttcttgagtgaacaaattccccccaatatccgcaagcccttttgattcttctaaactccaaccacccactggtcggctctgcagcctccaagctgatcacagatcacagcctccatcccttctgccacagacactccagccaccttctcc

SEQ ID NO: 236670 - DNA, 480 bp, Homo sapiens
ccaccaattttttaataaaactataaatttctctaaattgactatgatgtaacacacacagtggtttatcagtgttcattatgttcctgtaaatagaaatggcttagaaattgcttctaggcaaaaatttgctatttcccccctacatgcttttgtatctaacaagaataccattattggtctgaccaagttgctgttacaaggctgtattttgatgaaatagcctggaaagttttctaaactctctaaagttttagccatgtttgcgggttttttaatttgttgctttatttatttgttgttttgttttatgtgcattctattatgtcctttgtatgttcattattattctattaattttatacttccttaaggcattgatggacttttctgcctttctattagtacttttgagtttctgagttacaccattttatatgtatttcttctgtgtgttaaataaactcaaattcaatccta

SEQ ID NO: 236671 - DNA, 2047 bp, Homo sapiens
  misc_feature (1909)..(1909): n is a, c, g, or t
  misc_feature (1926)..(1926): n is a, c, g, or t
  misc_feature (1936)..(1936): n is a, c, g, or t
aaaattaataataaatgtctaagctattctgctgccacaatgtggccttactgctccctgatatacggtgcctttctcctcccttgtttcattctcttcactttcttcttccagatgctcgtacacccagtccccctacctgggaaatcacaacctcattaagagctcagctatcttaagtcctatttcctcatgaagtctaactcaactgctgcaacttccgagtagcaattaaatcagctccagcataacctcttttttcccttgtctcctgtgttagtattatgtcactaactttgtggggacaaggtcatataacactctagagcatatcagaatgacagaacatcttcagctataacctacctagataccaatatttgcccccaaggcaatgtttgatttttattccccattatgagaaacaaactcacccctccaaacccaaagaatggactcagagacctggagaacagcgaaagtgagacttttaatgatgctcttgtaatattgggtgtctggcagcaggcacacccagcacagtttcaacaagcaatttatcccctagtgcacaggtgcctcccccagttcctcatgggctgtgtattatggggtcacaatcttcccggacattgcctattggtcgttgggtaggggcttcgggtgttttctttagggttgtcctgctgcgttttgttgcagcccacaatgcattgcaatcctagttagctcaggggctcttcaggtatttgacttatgacttaagtagctggggcaggctgataagaacaggcaacacgagctattttgcagctagtaaactttcatcttagactaaacttctttggttcaggtgagggtaactaagggggttgggggggggtgacaagcaggcattggctgtccaagcaggagcctactgtatcctgttttcttctgtagtctactgacctaagttgatttaaggcactttgtcttggaaatggaccactgtatacatttccttcacccagctaagttttaaattttttttgtagaggtggggtctcactctgttgcccaagctgctcttgaactcttggcctcaagtggtcctcctgcctcagcctcccagagtgcttggattacaggcatgagccacctgttcggccatcattgtttaaacaaaaaagtttagaggactcccaactaggaactattgcaataatctgggccagatattattctagctgggttgaaacaatgaccaaaataaaaaggaggaagatggggaaaggctgggaggtgtacaaccgacaggacttgcaagtaagcagatctggtggcaaaggtcagagaaaaccaaagaagactcccaggtctccaggtgatgaggctagacatggtacatggtagtgctggcagacagagtgggagtgcataccactacacagttggcccacacactctggctgcaaagggccagggaccgtgtggtctccagcttgctgcctgaatttggacaacccactcactctcactgcctgtcttcacaatttgaaaatgaagctaaaacaaacccgtctctagcttgttttgtttttgtttttttctgagatgaagtcttcctctatcacccaggttggagtgcagtggtgcaatcttggctttctgcaacctccgactcccaggttctagcgattctcctgcctcagcctcccaagtagctgggattcaggtgcccaccaccatgcccagctaatttttttgtatttttttcagtaaagatggggtttcaccatgttggctaggttggtctcaaactcgtgaccacaggtaatcctagcactttgggaggccgaggcgggcggatcacctgaggtcaggagttcaagaccagcctgatcaacatggagaaaccccgtctctnctaaaaatacaaaattngccgggcgtngtggcacatgcctgtgatcccagctacgcgggaggctgaggcaggaacttgcggtgagccgagattgcgccattgcactccagcctgggaacaagagctaaactccatctc

SEQ ID NO: 236672 - DNA, 548 bp, Homo sapiens
aactgatagtaaggaaaaagaaataggaagtaaatgagtgaactaaatctttactctctgtagctgggagccaacaaatgatatccaaagttgataaaccaagaaaatgtcagtaaaatcatgttatttggagtcatctgtgtaaataattgtgagaaaacaaacatttaacctctggaaaactggtttaggaatggaaaagaacagagaagggaactttgctttttgttttatgtcattatctaacattaggttttttccccatgcatgtgtatatattgactttttttagacaaatatggtagataaatagatagataataggaaggggggaggataggatggagagaggaacacctacatacctagaggttctcactgcatagtgagatatcaggtgattttttcttcattatatctttttgtatggcttggatattttacaaagagtaggtaatatttttataaacataagacgaaaataaactgtttcccctttgtaaaaaaagaaaatcttaaattaaaacaaaaatcaaccttaaagagta

SEQ ID NO: 236673 - DNA, 556 bp, Homo sapiens
ccaggctggagtgcagtggcacgatctcggctcaccgcaacctctgcctcccgggttcaagcgattctcctgcctcagcctcctgagtagctggaattaacaggtgcccgccaccatgcccagctaattttttgtatttattagagaccaggtttcaccatgttggtcgggttggtcttgaactcctgacctcaggtgatccacctgcctcggcctcccaaaatgctgggattacagccgtgagccaccacgcccagtctgcagcttgcttttttaagttactatgccctgggctcccttccatctgggtacacaggtatctactgcttccttatttagagtctacatagcacttcatggttatgaacacccttctatcagacacagattctttctagtttttcactaccgtaaataataagccaatagagggatgttagttcaatggcttcttttcaaagcaagttatcttatcatctcatttgattttcacagaaaacttgccagagaggtgatatcttttttttttttttttggaacagagtctcgctctatc

SEQ ID NO: 236674 - DNA, 441 bp, Homo sapiens
gagaaaaaacaacaaaaaaaagaagcatgagctacccttccacaaaagattaaaggtaaaagaagcaaaaagtagaactgtgtggccctgagaaacaaaagagaaccaaaaactggaaattttatacccttatctacccaccctcccctcaaaaaacctaagaatcagaattttgctacactgacaagagtatatcgaatgacaaattttatgaaccataccaataatgcaaatatgaacagaaaaatacatcagtgaatctatacagttttattataactaatcagaaaattatatcaacaaaataaacacttatgaagcagcagaaaactgtaaggctacaatgcaaactacattaaatacactcagccaagcatttaggaatataaaaactaccttgaattagacatgcaatattaaaagaaagcaggactgacaaaa

SEQ ID NO: 236675 - DNA, 176 bp, Homo sapiens
ggaattttttccagtatatttgaattcgatttccgtatgaaataatgctaaaatgttacacttaaacatgatatatttacatatttactttaatagattggaatatgccagatgtgcaagtgtagaatcatactaatgtggatgttttcatttcctgtaaatcaattcataaaggt

SEQ ID NO: 236676 - DNA, 412 bp, Homo sapiens
ctctcctctcccgatcccctcggagctctctagctctccctgtggccctctctccctttcgcattttggtccctactctccccttcccttggagcgcctctcgggtctctcggaccccggcccccaccccatttccgaatctcggtctccgcgtactcagtctcttctttcctctccctgctcccgcccggggtctccgcggccccgcccccttatgccccgcccacctcgaggcgcccgcggcccaattaggcgccggccccgcccgcagccccacccctagagagcccagagccgcgcggagctggcggggcggggcccggccgagggggcggtggcccggctcaaggaggcgggaggagtcaggcgggaggctgcaggcgggaggcgggaggcgggaggcggcggccgc

SEQ ID NO: 236677 - DNA, 723 bp, Homo sapiens
  misc_feature (5)..(5): n is a, c, g, or t
tgtcnaaccttacgaccgcagaactcagagaaggatcagatagctcaataagaaaagactttactctttctcatgtctatttgaaaaacaaaagagttaaggatgatatatttcgtattttgtactttgttgcagtaatatttttactttcatggtaattcaacaatatttcagcttaatgacagtctaattattttgtaaacgtcacaaatacttgagtcaagggtgacattcggtcttttgatattttatatttttttgcccagaaaaacagagtttgcaccattaaatattgcctcttgaaacattcttaatagggagtggggccagaaatcctatgttaatatgagaaatgaactatcaaataaatcataactttaatttttcaaaaagcatttttacaatttaaatatatttttgcatttatttttatttctctgtggtattataaaatcttttagaatgtactgtaactcacttaatcgctagtatattctaagcagcccttctgggaattcttaacagaaacagcatgaagtgggtgctgagaacactgcagcttgctttataatttacaatgtaggtgtaaatcctttctcttaagaatagcacaaaattgccatttaattcacttcaggaacatttaagttaggaacacttatactttaaaataacactgtgttttcctcaagtcatagccaagtgaaatgttcacccaaagta

SEQ ID NO: 236678 - DNA, 466 bp, Homo sapiens
ggttcatccatgttgtcacaaatgacaggatttccttttttttttttaaaaggccgaataatttccattgtatataccacatcttctttatccattcatctgtttacagacacttaggttgtttcaataacttggctattgtaaataatgctgcaaagacaataagagtacagaattctcttcaacatactgatttcaattccttcgaatgtatacccagaagtggggttgctggatctagtgtataaataattctgtgccatatggtcagacagtactttctactactagtaacttttgataatttgctgcttattagtgattactaatcttaaaaaatcaatttaatgcactgaagggcaagttggtaatatatatcaaaacccttaaaaatctgcatgccctgtgactctataattccatttctaagtgttaatcctaaataaataataatggatgtatacca

SEQ ID NO: 236679 - DNA, 416 bp, Homo sapiens
ctcctggcctcaagtgattctcccacttctgcccctccaagtgctggaattacaaacatgagcctctgtgcccagccaaaagtaccttgattttatttatgatattgctaaggaaaggaggcagagaaattctgggcagaagagggtgggtccccaatgagggctccccacctggagctgaaaagcctgatactatggcccaaagtgagcatttacatccctgtttgccctcttgaaagttgccttttccataactacccatggcccaccccccatcctgtgcccatgaaaaccccaggctcagctgggcacagtagcctgtaaccctagcacttttggaggccagggcgggcagatcacttgaggtcaggagttcaagaccagcctggccaacatggcgaaaccccacctgtact

SEQ ID NO: 236680 - DNA, 421 bp, Homo sapiens
tgggtacagagtttctgctttgcaagataaagcgagttctggagatgggtggtggtgactttgcacagcacaatgcgtgtatttcataccactgaactgtacacttaacaaacagtgaagctggcaaattttatgttatatatattttactacaattttaaaagctgggggaagaattgcaaattttggctgcacagcctttacatcagaggagatggcccaggtgcagccatgtgcggtggctgcggaggcaacagtgaagatgacaatgattgctgacatttaagaagtccccagagacagcagggataatgagtaggaaaaaactctgagggcaggggctatgtcataccctcctctccatacccagcaccaagcccatagagtgcagtggcgggctctcagccacagcggctgagga

SEQ ID NO: 236681 - DNA, 504 bp, Homo sapiens
gagaggttaagtaaacctgcccagtgtcacacagcagcaaggtcgtggtactgggatttgacccaggtcttcccgcccgcacagctttttgaatatttctttgctcgtgcttctgaaacttttgtaagagtcactgaaggcgcttgttgaatgtattagattagcgtgcacgtaactcttatatgatggcccacactttcagaaacaccactctgcctgctcccaagccttgctctttggccagtcagcaagagtgactgtcattagaccgggctgtgggatttcctggcccctgttcaccagaagcctgagcagggacaagagcggcaccccttacacaaatggcctccgtgtcccctgagcgaggcctccaccacatagccctggtggggctcaacagttttaagcctttgcacagataccacttcctgttattactgagcccgtaactcctgtagcctcctttttagaaatacttatgcctcaggagaaatacagtttatt

SEQ ID NO: 236682 - DNA, 721 bp, Homo sapiens
tatgtattttattttcctcatctttaaaatggataaatgttacctttcctgattcaaagattctaggcaaagatcaaaagaagtcaaagtttgtgaaggaactttgaaaattatatatttctctgcaattgtgttagggtacttttctgtctttgatttatgttggttcttggagtgatactttagatgtacaaatagtaggtcagaacaaacctgtatgtaataaattctggagaattgagttcaaactttggttttgcttatatttggataaattatcatcaactttgttgaggtgtaatttatacacaattaaattcacccatttcaaatcttccatgtgttttgactgtttagataaattgacaaataattatcttagataacagttggtatttctacattaaagaagggagaaagagcaccctcttttggcaaaagtttctcctgtgtgggctctccggtccccctgtctcatttcaaaatcagatttgcatcctgctgttggagtacacttgagccctttcatttatactggtgcaggttttgtagtctcttagagattcagtatgtcagtcccatgtctgagagcaaaggagaaggaagagggtaggaaagagcacctgaattgaatagagaggagggagcagagaaggcagaacagtgagatagtatccatttagtctgagtatttccaaattttccaataaaatgtcagtgg

SEQ ID NO: 236683 - DNA, 514 bp, Homo sapiens
tgagtaaataatatatgagcatggtacaaaggtaagaatgttcaaaaaggctgatggtaaatggtaggacggtctctcattcttgcacttgccacttggtttctttctccaaaggcaattgctagtataaggttcttgtgtgtcctgatactcatgtacactatgcacatgcaaaaacatgtgtatatgtttgttattgcttaaaaaaccaaatgttggaaatctgaactaactctttcacactctggtatttttagtttaacaatatatgtgttgtgtcttggaaattagttcatatcaattcatattgagctgtctcattctttttttaatggtcatatacagtagtattcaattataagaatatatcctaatactttttaaaaatttctcattgatagttctttacatagcttccaaaggattgtttttacaaacaaagctttaatgaataaggtgtacatcattgacatgtttgctgtcatatatgcagaataaagtaccaaaagtaaaa

SEQ ID NO: 236684 - DNA, 617 bp, Homo sapiens
gtagcgtgcacctataatcccaactatacgggaggctgaggcaggagaatcacttgaacctgggaggcagaggttgcagtaagccaagatcgtaccactgcactccaacctgggcgagagagcaagattccgtctccacaaaaaagaaagatacagagatgaaaaatacactgaagactgtcagaataaacattgcacaagtaaagatttgtgattttgaagacttaaccatagaaactatccaaaatgaagcagaaaaaaaaaagaaaccctgaaaaaaatacatgaacacaacatcagtaaagtgagggacaacatcaggtagccaaatgtgtgtggaattggagtccctgaaggaagggagggtatgagggaccaaaaaatatatatagagagagaaaaaaaaatggctgaaaaatttccaagtgtaatgaaagcagtaaacacacagatccaagaatttcaaggaactccaagcacaggaaacatgaagaaaaactatatactaaggcacatcttaagcaaattgcttaaaaccatggtttaaaatggccaaagaaaaagatacattatatacttaagatcagggtgacaccagatttctcattggaaacaat

SEQ ID NO: 236685 - DNA, 730 bp, Homo sapiens
agtttcaccttgaacacttctgtggtgagactgtttagtcttgtagctctaaactccagccagactctgtctcaaaaaaataaaataaaataaaaataaagtttagtaaaataaaaaaaatcagtaaaatacaaataaaatttagtaaaaataaagctgattctaaaatgcatgtgcaacagaggatctagagtagccaagatcgtaccactgcactccaacctgggcgagagagcaagattccgtctccacaaaaaagaaagatacagagatgaaaaatacactgaagactgtcagaataaacattgcacaagtaaagatttgtgattttgaagacttaaccatagaaactatccaaaatgaagcagaaaaaaaaaagaaaccctgaaaaaaatacatgaacacaacatcagtaaagtgagggacaacatcaggtagccaaatgtgtgtggaattggagtccctgaaggaagggagggtatgagggaccaaaaaatatatatagagagagaaaaaaaaatggctgaaaaatttccaagtgtaatgaaagcagtaaacacacagatccaagaatttcaaggaactccaagcacaggaaacatgaagaaaaactatatactaaggcacatcttaagcaaattgcttaaaaccatggtttaaaatggccaaagaaaaagatacattatatacttaagatcagggtgacaccagatttctcattggaaacaat

SEQ ID NO: 236686 - DNA, 427 bp, Homo sapiens
ccataaaataaaaagtaaaagcatctaaaatggagcacaagtctagaatgtttgagctataatgcaaggattttctagccaaatcttcttttacagatgaagaaactgagacagggttatctaataagttttctagtggcaaactgaaatgcaattctcagggtggttaatgagatacaagttttgaaattagttgtacttataaggtgtgaaatcacaattttaccactgacttagaatgtaacttggacagcttgacttccctaagccttagtttgttcacctgtaaatttgggctggtgaagtaaaggatctattgggctgtagaagtaaaggagttgatacatgtaaaatgcttagcatatttttgtcacgttgtatgcactcaataaatgatacctccattattactattatttttagctgt

SEQ ID NO: 236687 - DNA, 599 bp, Homo sapiens
ttcctcacacagtacagcctcattcctcactatcttctgggcacatctgtgagctgcctgctgatgccatcggctctttgttccaggaagccatctaattcccatggtggggaaccacagccagctcccttacaggactctcgcagtggaatcagcatgatagtcagtctaaccctgttttcttaagatgtatccagctctctactttctccactttgaggttaacagtaagactttggatttagtcaatgagggtttggattcagttccctcacttactaggtgagagacctcaagcaagtcactaagcctctccaagcctcagtttccttgtatggaaaatgggtacaatactgcctacctctataaactagtgtgaggattaagatgatgtgtacagagccagcacagggctgggaaaagaataaacccctaataacccatagctaggaggataaggagaaggttaacgtcaacattagcagtactaccagaattttatcttctctaagacaggcaaaggaaattctcactggtccatctttgagttttgaacttcgtatcttttgcatttaataataaaatagattactgccaaa

SEQ ID NO: 236688 - DNA, 347 bp, Homo sapiens
aaccgggtctgacatctagtggcctcctgggcccgggcagggcgagggcggggcagggaagaaggtggagggcagaatgggaggcgtggagcgagaaaatcaggaagcgcgggaccaagccggggaagggcggcgggtctcgcccctggcacccgctctcctcggggcccgtcccatcccccaggcctggccgaccccaggtccttccgtgcgcagtcggggctcgcaaggacgaatcccgcggccctcgaggcaggcccgggggagctcccggccctccacccccgcaggccgcagatcccacgcacccccgatcatgggggccccggagggaggtcgcgaggccg

SEQ ID NO: 236689 - DNA, 516 bp, Homo sapiens
acatgcttgccactgagcaggtgcttagtttgtatttgttttgttttgaactgcccaactattttgcttgagagatctagaggtaaggaatctttgaattggattgtagtcctcactggccataggaccttcaccatataatttaacctctttgagccttaagtatttcatctttaaaatgagggttgtgaaaaattattatttaatatttcttttgacaaactaactcccaatttacacaaaatatacagaacagaatatgaattttagattaagactgctattttcttaggaaatagagaaggcttatgacttacaatttaaaaaatcaagatttaattagtactgccagaaaggtctctgtatatttccacagtttcccatgcagtgctttataattatttaattgggttaggttgatagactatataattagatagtgaagtttaaatattccaaaaaaattcagaatcaatttttaaaaaaagagaatcaatatgttatggtagaatttct

SEQ ID NO: 236690 - DNA, 378 bp, Homo sapiens
atcgtagttattgacaagctttaagatgtttaacctaattattaaatagtattgcctgttttttaaaaatctgctttattaaggtatggctagcatttaaaaagctatagatatttaatgtctacaactggatgtgtttgaacttaagtatatatattattatcactgtcaatgccacaaacctatccatccatcagctccaaaagtaccctcctcttcttttccttttgttgttagagaacttaagaggtaccttattagcaaatttaagaatataatacagtattattaatctgtacagatctccagaactactttgtacagatctccagaacttatttattttgcacaaatgaaactttgtaccctttgaccaac

SEQ ID NO: 236691 - DNA, 366 bp, Homo sapiens
agatttcactccagacattacgaccacctcatgctcagatgccactccgggttcagcaattgttctaagaatgtctttaatcaccagggagctgatatatgtgggcatttcctacccccttattttcctaaatatatacgttatggtgttctatttgtcccagtggtagatctgtatatttttggaaatatggaaagtgatctaaattgatgtgattatttttattgcgtgtaaatctgcaatcctcactaacatgttggaaaagtttaacattttcatcctgcatttggattggttcatttttgccagttcagattttgtagtctgatgtagagcaaaagagaaatctttcatcagcattgaaaa

SEQ ID NO: 236692 - DNA, 426 bp, Homo sapiens
tgttcttaaaagctgctggcaaagatagacaaatctagaaagccttgatgttgcataaacaatattattttcattacatgtatttctacacattcccatgaaaaattaaattttggctccttctgagagccaaaggtgagtgtgtgtgaagtgagggagatttatatgaaaggacacaatgcaaaagatgaaaataattctatcctctttcccttagacaaatggtttgggtttaactgcccttgtttttgttggatgtgaatatgttaatcttctttttcaaaacatacagacttacggaaatggaagtgaacatctgttcaactgtcaagtcaccagctaaattcaagtctgagaaaagaagacaatctgtttaaatgaaactttgtgtgaatgaaggccagagtttttggcacttgtgtttgc

SEQ ID NO: 236693 - DNA, 504 bp, Homo sapiens
aatatctgattgccttcagtgcgtcaaaggcacattcctggtacccatggctgaggccaagaagatggtacccccgtggcccagtagccccaagcacttcttcagcaggactacagggaatgtgtcaaagatggggctggccctccaggtcgatttagaatgaagagtaaagactctccgtgaatttacatacttgcaacacaaggtcatcttgtaacaggagaagaatttggatttgaagttagacaggtttgaatttgactcaccctgaggaaaactagtcaagctacctctctgcattttagcttcttcatctgaaaaaaatgagcttatagatagtagcaccaactctttagagtttcaatgaggattaaatgcagttaaatgaaataatgtatgaaaagcacctatgtggccaaggttatgttaggggctgtgagagtacaggagatacatagcatatgtatttgtcaataaacgttcattagaacttagtatatttga

SEQ ID NO: 236694 - DNA, 375 bp, Homo sapiens
cactgggactctttttaccctgagatatgaagaaaagtggctttttttttcccacaaaggtgtggccttcttacccacttgaaacagcctaaactgtggaaggaagctttaatttaaattgtgtccaagaattagatcttttctccatatgggagggaaaatggcccaaggtccattatatacaagatttctttgccctatgagaaaacccagacctttgcaagcattgcacaattcacccagcccttctagcaatcatatcaggaaggcccaaagggaatgattccccaagactagaaaagcaacttccagagtgtattagtctgtttttcacactgctgataaagatgatatacccaagactaggcaatttac

SEQ ID NO: 236695 - DNA, 563 bp, Homo sapiens
ctgtctcaccctccctgtctgtggcctgtggtccatggagagagtgcttgggagaggctgggtacttcactggagctctcgatcccagggagcttctataacaacttgtgcagcagccccagggctcagagaaagaccctgaccccaagggccctggagagtgctccagccttcagattgttgggagaggcacaggtgtcagaggccagccaagtcatttctacctcttctgctcaggacaccttaagccaggtcataaaccactgtttcaacttctgtctttgaaagcaagccctcttgctctcacctggctgaatggtggactctcagaccccgtggtggtggggacattcctggtctcttttggtggcttgactccgatctccccctcacgcctcccttgtggctgctctccacccctctctgcctctgcccaccccagaacatgcagccgccttcccgttactgggaggacaaatggccttattcagggacaccctgccagagctgtctctctaagacaaagctgtgcgcagctctgcgtgaaaaacagctcgcggccg

SEQ ID NO: 236696 - DNA, 405 bp, Homo sapiens
ctttcagcaaggcccgggaccgtgcggtgcaccagtaggccccgtccgcctccccagccgtgcgtttctcaaaggcagggtgagcccagcagtgtgtgtgcgtgtacgcgtgcgcgcgtgtgctgggggcggggtttgcaaaactcccgcgagcccgccctccctccaccctcaggctgcaggcccccgcggctctaacagccggtgccctgctggacacaccccgcctcgcggaagcggccttggcacgaaggccctggcgacccccaggcagcgcaacgggccgctcccctctcacccccgcccgcgcgaggccccgcgggaggacgcggacagaggctgttggctgtgctgcctggccccacgcctcctgtctgcgcggcgggaacactccgcgggcggccg

SEQ ID NO: 236697 - DNA, 2374 bp, Homo sapiens
attgcatttaagttgtgccgaaatgagggaaagttttattattttgatgcccaaatatcagtaggtacagtcatatggacctcccaccataattctttatggagatttgttgaagattatttatacttgaggtaacacatacctgagtgctaacctctagtctgcattaaaaaagaatcaatgatcttcataaaaataattgagagccaagcaatattaggtctaaatttatatcctacactgtcactgtttttttttaaacttatactcaaacatacacaacagtaaaggaaattatatgaaaagaattataggaagctagatgaattgtttatctaagttgtcaatgcaaagcaaagtttgttttatctgtatcctgtattattttgtaacaaaccctgaacattttgtttcattcataaatatttcattaggtatctttgaaagataaggattttttaaaaatataactctaatgtcatttatattttcaaatatagctagtcagtgttcagattttcctgttagtctcaaaattctttcttatggtgtgtttattgtaatcagggtccaaataatatctatatattgcaattggttgatatgtctcaagtgttttttgatccatagttatccattctaattttctttcaaaatactaatcgaagaaactgggttgtcttatagtgcttcccatagtttggattttgtaaactatgtttccatgtttagcatgttattttttcacctatattctctgtaattgatagttagttttaaaagcttgattagctttaaattttactttttaacaagagcacctaatagacagtggtgtgtatttcagtcaagaagcatgaaaagtctctcttttgatgattagcagccatttaataattgctgtctagatttatcattaattgtgggctacaaattatgatactctaattctatcccacttttttacttattcactggaatatttctatgaattgatgtttccctataacaattatttggtcaccctttgaaggacaattcttacaagattagacaggataaatgctagattcttttcctttatttagctgttttcaaaataacgaattggaaatctagcatcctccaaagataactgatgaatttttaaagatattataaatacatggatttatatgcaaagtgttttaagttctttctttttaatttttatcaatgttcaaattgaattatcatttgtaggaacctcctcaagttcattcttgagtctttttgacatgatttcctaagtagttattgacagttttcttactttgtgttatgacaggatgtttatagtatgcatttcctaccccagacctgtaatctgccatttgtctagggagccctactttcttttagtaggaaatagtatttagaaatccatatgggtagtaggcatgttcttgctactggattggccattatttctaggcttttgtagtggacagaactgggaaataattttcttttttaagtgactttgatacatcttaaggaaaagaagaggaaaaagtcctatattgtttgtattaataatattgttctgagacaatctgtgtatgttgtgggataaaacaagtgaggaattatgttagtgtcattagtaatcacagttttcagcctgattaaaaggagacgcatatgtaagattgaagaagtgaaaaccatatagtcttgaatttaaatggaagtatcagtatgacctcagtttttctcccccacaacccctaccataagtcgccatttaaaagttttagtttgtatctatctatccatccatctatctgtctgtctctcatcttagataagtgttagcgcactgtacatactgttctccaccttgctgtttttaccttaaaatatactctggatattgtacatgcgctacagcatgcattctcaatgggagatactaccgcaagagggcaaatgttgactcttgaaaggtgaaaaaaaatcttgaatataacaatggtttttgacccttcaaagggccatagtacataaacagatatataatacatttgtggcattaaagtttcctaggggtggctgggtagcgtggctcatgcttataattccagcactttgggaggccaaggcgggtggaccacttgaggtcaggagctcaaaaccagcctggccaatatggtgaaaccctgtcttttactaaaaacacaaaaattagctgggtgtggtggtgcatacctgtattcctagctacttgggaggctgaggcacgagaattgcttgaacctgggaggtggaggttgcagtgagctgagattgcaccactacactccagcctaggcaacagagggagactctgtct

SEQ ID NO: 236698 - DNA, 540 bp, Homo sapiens
gatggcgtcgtccttgttggcgcagattgtgttggggggctggttgtttgtgggcgcctttaatattcaaaggggagaatactgttctgattgaggcattatgcccgctgagttgtgatattacatccatcatcttgttcaaataaatagcgccgtatctatatgtcggaatgaataaataaaagtgctgcagcagggaggttgggctggaaaccagaggcccacgatgctctttgctggctttgaaatgcccttgcaaagaagtattgaaaatttaccagcccacaatgagtcttttaaatctccttttccttgctaccaccaacccctgcaccaaccaagaatacgttgccagcagagttctttatttagttggcattggtttttattgaccctgattgaatttgaaattgtaaggctgagagaggatttgcaaaacatttgaatacattttgctcacggtattgttttgtaacttggaggaatttatctttttagccaatcaggttaaggtcaataaatttggtttttaaaaaaatg

SEQ ID NO: 236699 - DNA, 2021 bp, Homo sapiens
  misc_feature (707)..(707): n is a, c, g, or t
  misc_feature (927)..(927): n is a, c, g, or t
  misc_feature (1001)..(1001): n is a, c, g, or t
  misc_feature (1121)..(1121): n is a, c, g, or t
  misc_feature (1257)..(1257): n is a, c, g, or t
taactaatacatgtacaaccaatcagacttgccatggtatgggatctatataatcttccaagcccccttaagtgggcgataatgaaaactttatcattaggaggaggtttagagagttgtttttattgacatcttgtcttgattcctcttctgtgtgacccactggattcagaggtccccatgagcaccctcaggttcaatgattcatgagtagaactcagaggtagggaaaactgttatatgcacatttagcatttattacaacaaaaggatgcagatgaaaagcagcaaatgtgaaaggcacctctagagagagtccaagagagcccaggcacaagcttccagtggggttgcacagtcagcatctaatcctcccagaaataatgtttaacaacacgtggagtattgtcagccaggaaagctcatccaagttttggtgtccaggggatgtttgggggtatggagtaggtatggagtgccttcatggcctgcatggctaaacttagttattcagtctccagtccctctagaggtcaagctgatactgcacgacctaaggccccaccataaatcacattgttaacataaactatctgtcatggcacgaagccccaggtacaagagacactcatcaggcaggatattccaaggatttacaggggattccccaggagctggtcaaggaccagatgttcctctgaaaggtncaggatttgagctcatctgtggagtacgtctgtggagtcaactttcttctgcatccccacatactgatttgccaccttcattgtatcagattcctttttcactatattcaggtttgcggttgctccagtatccctatctatgctgagtctccacgtagagcatgtgtgccctctccagtggctctgcacggaccccttatttctcattaccagggacagnttttctcctgatgtgcctggtgctccttctccactctcttgccttaggactctgctgggccatgagtatttttnttacccttttgtgacctagggctgcccttgggtgaggaaagtcactttctgttcatcatctaagtagaaaacagtttctgccattggaagacccctgagttccctggcactcctgtgaancacaaggtgcctggggaggtagaacttggacattggagagaggagcagccagacatttctctttctaatcatatgcagaaagatttctttttattctccagaacacttgaaagactctccaagttatgcaaatgtnaagctcataaatgtatattatcatgacttttgcaaagatgaagaggatacagcaaattttctgggaggcaaagggacttctacctggataggaaccaagcaaactcattaagcatggattaatttgattcaacccttgcgtggatattaattaaggacctttgacaggagagggtcctcaaggttcctcaaagagtaacttatcatcaaggaaggtgaagaatggatggatggcttgggcccaagactggggctattcacttgtggggaaacccatgtgaacccagttaccccatactttgggaataatgactgagcatgactataatctttaagaagctcaaatgcggaatacctctgaggcttatgcaaggatctggcctagcatcaaggacaaaggctcagaggactccttggggccagttttctacagtcataccatcagccacaacagcagcaaaggcagaaggaaaacagggcccaggagtggctgacgactgcctggagtccaactggtctcctggagttcataagaggtttgaccccttctgagctgaatgtgtcctgatttaggggatagctagggcaataagaaagcctcagggggtgctactgatctggaactcctactaattagtgtgtatgtatgtggccaccagtggttagcagatgaggtgaaagagatgggacagtgactgtatctgttctgatgaaggagattgtgcagttacatgcgtaacgtcattaaacttcattcttccaggt

SEQ ID NO: 236700 - DNA, 347 bp, Homo sapiens
gttgcaaagaacatgaaaccccaagtgtgattcctgtggtatgacagtggttgcatatcccagaagctggccctgacctcagacctcttttatcaagctttccctgaattaattacaatcttctcagtgttcccaaagcacttcttacttttaactgcagcacttccttgcgtgctcagcatatacattatgtctagccctgaggatggtttcttcaagaagagaaccttgtctcagtcatgtttatatcctcaacagaacctgagttttatatatgttgtgttcaattaagaatgaaattcaatctaaagaaaattttttaccttaataaatatttttaagttaaa

SEQ ID NO: 236701 - DNA, 868 bp, Homo sapiens
ttgtatctatgtgatggtaagtttgatgtgtcaacttgtctagactattagtatcagttatttaatcgaaccctaatctaggtgttgtcatgaagatattttgtagatgcggttaacatctacaaatcaagagattccacttgataatgtgtgtgggcctcatttgatcagttgaaaggctttaacattgaaaattggtgtttcctggaaaagaaattctgcttcaagactagtgcctaaactcctgagtttccagcctgttggcctaccctacagatttcatacttgccagtcccttcaattgtataagccaattcctaaaatctatttatacattttatatttagatctctttatacatgtttatacagaatgctacggttctatctctctggagaatgctgactgataacaatactcaagtaagagacctgccagttttataacaaacagtatagaaggcagagagtcagaatagaagggtttaagggacaatgagaaaaaaacaattatgagtttagagcttgggatgaaggcaagtgctgtcaaaaataattcaaagtctgaactgaagttaaatgattgtttgatgaagacagtggtaggtttgagcaaaatttggtggttttgagtggaacatacaagtaaatttaaaaactaacaaaaatatcagaaaataataatgcagaatccatgaagaatcattaatttttattagttaaaaaccagtattggccgggtgcagtggctcacgcctataatcccagcactttgggaggccgaggtgggagatcacttgaggtcaggtgttcaagaccagcctggcccaacatggtgaaaccccatctctactaaaaatacaaaaatt

SEQ ID NO: 236702 - DNA, 461 bp, Homo sapiens
tatccaataggataagtaaaaacaaatctcttacaatgtctttgtgaaatagcagaaaactgaaaagagagaatacttttataatgcgcctgatagaaaagacatatttaccgatcaaagaaaagtaatttgaagggcagccgatgttttcaacaacagccaacaatggaagccagaagacggcaaccaccttgaacaaacagggaaatatacacacttcaagatagacaaaagctgcttcccaccaatacttctaagataatgtttctaaaacttgcctgatgatagggctggaatactcaatgttgctggtcaagcatacagatcaacaatcaaaatgcataaatacaaaatgataagagacttctgctttccagtttcacataagtcaggagcttggaagttgccactctacctaacaacaggtaaaaagctgaataaactgaaaaaccaactcttct

SEQ ID NO: 236703 - DNA, 972 bp, Homo sapiens
aaatgtttgaggcattgattttatttaaaatgttttatctttgatctaagggttttagagttattgttcaaagttacttcacttttatgattgaatttttaaaaactgagtgtgtaattttttggctaataaaagactacaatgtctactgttacatctgttgaaaatgagaaatatttatgcatatggtttaaaggttaaatatacagtttgtatcttaccatgggttagttatgacattctcctttcgatattagaacatcaaaagctggggctctttggcataaataacagaactgttaaaacctgtatttaaaaaaagtttaatgttgatttaacctgtatatgtacaagatgcctttatatggggaaactatacaggttgagcatccctaatctaaaaatccaaagtctgaaatgctccaaaatctgacactttttgagtaccaacaaccttggggtcgtgatcagttgtgaagcatgttgtaagtaattagatactaaccagaggtgacaaatggttttacttttttattttcagtaataaaatataatagattcatggatatttttatatatctctctattaatgcgttcctataagcttttttaagtgaaagagaagggtagaattttaaggagcttgtctaattgcaggactttatctttgaaccaatgagaacatcacaagtttaaaagtcatccattaaatgtactgaggtttgtaaaaagttgcgaactgctgatctaaagcccttacctagtgaagtttatacaatacaaatatatgaccatctaaacccaacctaaagcagtatcaaaaatcaacattttctttcccttttttggccagaagggaacgacttaactatactttctttcatattatttatttaccgttgttatttctttataaattgatggataaaatattttgtccagttttttataaacattggattattttatagt

SEQ ID NO: 236704 - DNA, 544 bp, Homo sapiens
cgaggaaacgcgccggaagccagggtggcggtcgtcggctggccctcgctccctaggcggccagcacccgggccggcgccgcccgaggccgcagccagagcgcccagccggcgggcggtctcgggcccacgagggggcgagcgcagggcgggagccgggcgagcgggtcgcgctttctttccccgggctccactcgggcggttcacgtggcgcccgcagccgcagtgagcccggcgcggccgggggtgggggcctggggcgagggtggggagaattggtagttggtggtggagggtgtgtttgggtagggggtggcgttaggaatggaggcgccgccagacagcgagttcatttccctggtaatcaacagcaagctgctatattcagagaatgctgtccctttaattgaacaggctaggtaattaaatggcacttttccaataggacgtgctaggtaaatctaatagttggttatttaatatcactttgaagtctgcccactcaagcacaatgacagcacaggagcatgtgaactattagctag

SEQ ID NO: 236705 - DNA, 402 bp, Homo sapiens
gcatcctgggccggctcccagaccagaaaatgacatcaggtaaaaactaaaggaagctgaataaatggtgggctttagttataacagtggatcagcatgagttcattaattgtgacaaatttgccattctaatgtaagatgttaagaggagaaaccgggtgtggggcatataggaactctgtgttagcttggcaattgttctataaatctacaacgaatctaaaatgtaacaattattggaaaggaggactgaaaagattcaagagaaagtgataatattgaagacaggggaagaaactgacatacagataataggagtccctgaagaagaaatccaaagtgaatagaacagtgaaatttgtaaatcaagaaaagtttcctgaaataaaatttgaaactaca

SEQ ID NO: 236706 - DNA, 600 bp, Homo sapiens
aatgaatctgccagctttgtaatattctctataatctgtactaggaaagtttttatgtatgtataaatggcatgatttatttttttgtcatctaatttttaaaaaatataaatctgacttgtttgttttaaatggaatgattagagtattccaaatggtgcctttgcatgtgtttacagtatctatattgtagaactttgactagtggtctacttttgtgtagtatggcttagtccacagctcttctgtttcgcctattggtgtctgagacttagggactctttactttaggaaagtatgcactttacttgtaactatgcttctgctggtaatcttaggcctcttcacactagagtagctccatgggaaggccagttgggcaagtagaaaagataacagtggcttcttccttcctagttctcagtgtactaaatatagcgaatacttgtcaaagcattatatttctttaaggttgtttttcttaatactggaaatattatattggatttcttattttttggcagaggggttgttcaacaatcagtcttcttttaagaaggtcttagttttcatttttattcattaaaccctctgcccctg

SEQ ID NO: 236707 - DNA, 438 bp, Homo sapiens
caaaagagatgtggggttttattgggggcttacatacaaaggagagggtacagtggcagtgggctggacgggagaactgccttatatacagtccagtggcagtgggctgggcagaagaaccacaactgcctgccataggcatgcagtttatatagcatttccacttagcacttccacctagcaacctccacctggcactctttattctacccaaaacttggagcctcagtctcctgtagggcttgtgttccaagagacaggttgggggctcagatgtccttatagacaaggagggaatctctgggttggccactcctgaattccctagctcagaacacacattcaggtgcatctgccatacaaagtcattctaaggatatgcttaaattattgctgtcaggtatgtttactataaccatattatttctctttgaaagc

SEQ ID NO: 236708 - DNA, 144 bp, Homo sapiens
actttccaagactctagggaaatctttccagacgctagacccgagttaaagattagatgttgattgaatgaaacactcctgcttgtaggtgcaatcccacatggagcttaagatatatataagcactagaaaaaaaaacttgta

SEQ ID NO: 236709 - DNA, 349 bp, Homo sapiens
ggggatggaagagtgcctcagatggatttgtatcaagaggctgtgctctgaatccccttatggggtcttgctaagctggaatcccacatgaagtcacccacctctgggcaaggtgcaaaagcccaagattcacgttcatgtgttgcaagcacaaaaagaagatcctgtggctggagtagagtgaggaacagtgagaatggtaggagcagagggcagagaaagtggcaaaaacaaggtcgcatgaggccttgtaagccatggtcaagaggtgatattttattttaaatgaatccaaagtaattgcaagtttttgagcaagtaagcaaaatgctcctttgcaaaaaacaaa

SEQ ID NO: 236710 - DNA, 529 bp, Homo sapiens
tattttttttaagatgaaaggagagacccaatcttgctatgctgcccaggctagtcttgaacccctgacctcaagcaatcctcctgtctcagcctcccaagtctctgggattacagacacttccaataagaagactgagccaccaggcagatgttataagcaatgtgagcttgtgctggaagaagagagaatccaccagtgtcctgggccctccaaggcctctctgagggaaagacatttggacagagatgccaaggacaaggaagaggcaggtcacccacctctgggcaaggtgcaaaagcccaagattcacgttcatgtgttgcaagcacaaaaagaagatcctgtggctggagtagagtgaggaacagtgagaatggtaggagcagagggcagagaaagtggcaaaaacaaggtcgcatgaggccttgtaagccatggtcaagaggtgatattttattttaaatgaatccaaagtaattgcaagtttttgagcaagtaagcaaaatgctcctttgcaaaaaacaaa

SEQ ID NO: 236711 - DNA, 485 bp, Homo sapiens
atacggtatttgactttctgtttctgagatgtttcacttaagataatgacctccagctccatccacattgctgcaaaaggcatgattttattatcttttatggctgaatactgtctcatatatatataaatataaaaaatatatatatatatataaatgatgacacacatgcacacgcacacacacacacactacattttctttatccagcttcagttgatggtcacttaagtcaattccctatctttgccattgtgaatagtgctccaatagacataaaagtgtaggtctctttttgatataatgatttcttttcctttgggtatatacccattggtgggattgctggatcagacggtagttctgttttttttccccaagtaacttttgtttgtgaaggtttatattgactatatcagaaatgaaaactgacaaatttaaaaaaatatttaccaatcttttaaaataaaccaatttcatgctaa

SEQ ID NO: 236712 - DNA, 231 bp, Homo sapiens
ttgctcccatctgctcccatccccactaacagtataagtacctttgcctgtcctattgtatcctattcttaattgctgttcattgtcagtgttccctacttgactgtaacctccacgaggtcagatctcatcttgtatccccagtgcttgaagagtgcttgctacatagtaagcatgcagcagatgtttgctgacaaaatcaaataaaagaggaattatttttcactgtct

SEQ ID NO: 236713 - DNA, 386 bp, Homo sapiens
gtccaagtgatgggagtttagcattcgggtcttacttttcgtctcttgaggttttggttattttattgtcatgtctaagaattatttgaagcatcttcgtgttaattaaaagttctgcttctttttagaactcagcatattgaagggattttatactgaaaacctcagacctggttatgtatgatgcttcttttgttttgtgtttgttgtaactcagttatctcttttatgctgcattcatttcccactctcgtgttactgaccccaagttaaattaggttctgtgggagacacaaaggtgaatgagattccgttcaacccttaaggagctggtattattggagggtattatagatccagtgtattgtgactgtatccctcggaga

SEQ ID NO: 236714 - DNA, 195 bp, Homo sapiens
ctgtctcaaaaaaaaaaaaaaaaatttttttttgcacattatttacagttagtaatattttcctttcaaagtatctaaaatatctgtaatagctgaacatatatcaaacagatctatagagactagcacatgtaaaattttttttaagtttcttgtttgattcttctgtatttcatctttcttcatataaaatca

SEQ ID NO: 236715 - DNA, 784 bp, Homo sapiens
gcaactgcagatgggtgtctctgccctgacactaatgcatcatctcagatgtggaaccaggcccctattctgctattttccctacagcatcactcccacagggtatttgcacatgtggtctattttaatgaaggtttggagcacagtgaggctagatctggccagcagatgtgtttagttcacctgtagagttacatacagacgaggatacttcccttaaacatttactatcatggttaaggtagacactgaagccagactgcctggacttatggtctggtactgcttctcacaagctgtgtaaccctgggcaggttgctttgcctctctgtgcctgttttctcacctgcaaagtggagagaatatcaaagtctacctcagtggttttcagtttgctcccagaccagcagcatcaccatctcctgggaacatgtttgcagtgcaaattctcaggctctatcccagccctctgggagcccttgctgggattctcatgcatgttcaagttccagcaccactgatttacctcctagggttacccagcggattaaatgagctaatgcacgtgcaacactcggcacctggagcagtcagtgatccccacagttagctggtattaggagttgtgttgccaggcatggtggcacatgcttgtaattccagctacttgggaggctaaggcaggagaatctcctgaacctgggattcggaagttgcagtgagctgagattgcaccactgcactccagcctgggtgacagagcgagattccatctcaaaaaaaa

SEQ ID NO: 236716 - DNA, 450 bp, Homo sapiens
tagctgggactacaggcgtgtgccaccatgcctggctaatgtttgtatttttactagagacggggtttcaccacgttggccaggttggtctcagactcctgacctcaggtgatccgcccaccttggcctcccaaagtcctgggattacagacatgagccacaccgcacctggccctcttcaatttttttaatcagtgttttgtagttttccttgtagagatctttcactttcttcgttaaatttattcccaagtattttattttttataggtattataaatgagattgtcttcttgatttctttctcagctaattcattttcattgtatggaaatgctactcgggaggctgaggcaggagaatggcatgaatccgggaggcggagcttgcagtgagccgagatcgcgcccctgcactccagcctgggctatagagggagactccgtctca

SEQ ID NO: 236717 - DNA, 470 bp, Homo sapiens
aatttcttaactcgggaaaagagggcttgctgaatttcagaaggtatgggagacacagattatctccctgttcatctcttattcatctctgtcccctttgcttcaccgttctgtgtctttatctctctggctgaccagctttgtttttctccaggccacacaacaagaggaaaatgcccatgtgacactgctcctgattttatacatttgacttctttagccacctagataatagattcctctctttttcattatctcagttccagatttctagggacgggaatgttttcagagagtcagggtcacaaaacagaaatgtggctttcaggagccacctctgggagcctatgaattgggttgtgaggagctttcaagcaaaggttgagggtagataacccacaagtgccctctactttctactccagcctgggtgacaaagcaagactctgtctaaaaaaaaaagacaaaaa

SEQ ID NO: 236718 - DNA, 485 bp, Homo sapiens
gatgttatttgtacatttgaagtacgacatctttactcctctgtcatcatgcagaagtaattaagaataatcaagtgggtgttaattggatataatgaaataatctccagtcagcccgagcctaatatttgcttcctactagtaattatgaacactaaacattcgtgctaatctccttcttcttacagaagctaaacagagatacagtatttactcagctgatggcttgttttgtctgcaatttaggctgttttaagctaggaaattcataatttgccaagctgtcaccagctgctgggcccagatcagggatgtggagtttctagtgacaacggttcagtgtatgtcatctgagaggaaaggacagatattaattaaactgacctctagttgcaactgtacctgaacgtgtaaatgccaaaaaaaatcgaagttttcagatccactattgtggatcacgaactcatcatacgcggagagtgtca

SEQ ID NO: 236719 - DNA, 359 bp, Homo sapiens
gttaagcagttgctgtctgttccacagggaagctggcaaaaacttgatacaaacattctccaactgcactgggaggaataagtgaaggtaacacctttttaagaagggcatacaaagagataaaagatctacctagggacttactcaaacctagatgctaccattgtacaaaatgttaccaagtctacctatatctaactatagttctgataaagagggaagtgatgttttaatttgggaaaacacacttaatcaaacatgtaaatgagattctgaattaaaattcatatgtattttctctcactatctatcaacgtgctagaaaaataaaattgccttctttggaaggacaggggcaa

SEQ ID NO: 236720 - DNA, 540 bp, Homo sapiens
gttgctttaattgtgtgctaactgcagccaaggtttgccttcttagttaagggtgcggttagttccgtgtgtccccaggccttaccagttgtgaagctggcaagtcaatatagttctgaaaacccaaaaagcagtttgtaacctcaaaacacttagcaaaccttgcatctgacctgcattatttagcctacctatttacattttgataatacctgcatttgaccaatagtttttaagactgtttctatttcttaaagattaaagtcatgtgaactgaaaggtaccagactttatcttccctttaaaaaatattagattcaagcacttgtctttctttaggctgtattaattagagttctcttgacaaacattacgtacagtacacacacaggcaggcagaagaaaacccagttgctgggtggggccctttaagagaaagggctaggaaaacatgcagacattgaatcttacagggttcatcctctcaaggctttgctaaacaaatccttgccacaattaccagccatgccctcaggatat

SEQ ID NO: 236721 - DNA, 809 bp, Homo sapiens
attaacaaaagctaactcaatattcagacaatattaccttgaatctaattgatttgccattcatttgaggtttccggggggaaaattcaggagacagaaatgaatgtaaagtatgaagttaatgaaaacctattattttaactttttgcctgagctgttcctgaagacctaataatgctacttttggcaaaggccaaatttgatgattttggtttaatgtaaaaacctgtgagaaaggagcctagaatggggaagaggcaggaggctttgagcctaggagactgagcacacgaaaagcttaacagagtatgaataatgataggaaagaggcaattgggagaagaacctggctgtcaggaaatgtcacagttggtttgggaagatgcctgcagaggtgcctagaagccagtaagtaaggatggtgagccatccttttccgcttcctgtttcgttagagctgtggagcctccgtgttctgatgtcccctgagtagggaattgtgagtccataaaaggaaaatgtgttaggcaggatgggaagtgtgattaaggcatgagttaagattttggtcaagtagaggagtaagctaggatgggtttgcctgttttagacgcttgcatagagaatggaaagggactttctgaaggaaaatgacattaggtcatggttacctattgtccaaggatgatttaagacatgtaaatgtaatttagggcatcagctagtgaattttctcatggcttttaattatattgtctatttcgagacttgcctcttatctctcagtggtcagttccagatattggtat

SEQ ID NO: 236722 - DNA, 203 bp, Homo sapiens
tagagtcaatgctggagtgcaaaaggagaagctttttgtggtctctgagggctcatttatcttcatatccccattgcctacatagtaccaagcactctgaatcaactttaattgcacttacttccatttgtaatcatgtttctatttttgcttatgtggttgatatcatgaagacaaggatcacgtgcattttgctatgtatc

SEQ ID NO: 236723 - DNA, 408 bp, Homo sapiens
aactgagtggagtacactttattttgcaagaattaaaaaacattagttttgtactggaagcaccttcacacacaagcatatctcttttaagcaatgatttataagcatggctcagaagcactgaaaaaagcaattgcagggattctgaaattcctcatcacatttcattccaagttttgtgtgtagttttctggaatcagttactggattgattgtcccaacaaaccagaagatgtgacatcaccaaattcagcttttgataaatagggtaagtgggaagttatatgaagaagaaacataatttatgtatacatgcatatgtttatgtaaattcattcaagtagaaaaatcctcatgtggcatctgtgaaagccaaaattgtagttttaaatcttacctcccctcctt

SEQ ID NO: 236724 - DNA, 356 bp, Homo sapiens
gtgggcctggcaggtattaggggtagtaggagctcagtaaacatttgctgggctgaagagaatgacctggtgttcatgggcatggctctcatagcagggccttcacttcactgctagatggaggtagcatggctctcttgccactagaggtcccatggctctgtggaaaagctcaagagtgtttgtactggtggcaggaactttcagagaaatcagatttttacactcctgtccctgactcctggcctgatgtggaccttgtctcccaaggccatctgattttctcattgatccccaagagcaaatgcaggtaggcatgatctctagagctgtggaattaaaggagattctgaata

SEQ ID NO: 236725 - DNA, 257 bp, Homo sapiens
aagttatttaggaagttactctgagttcttgtctgttttaacagttttgaacagagttgaggagcatatttttaatatatttaaatttaattgcttcttagagtttagatttaattgtttcttatttaatcaataaactttaaaatagctctaagtaaccttgttatttaaaaatggcaatatataatctggtatttttaatatgaatactttacatttgtttcattttatctcatttataaattaactaaaatgga

SEQ ID NO: 236726 - DNA, 498 bp, Homo sapiens
gactgggcgacagagtgaggccctgttaaagaaaaaaaagtttttaataaaagaatttaataaaaccacattcaccactcttaggtatctaaccaagagaaatggaaatagggtcacacaaaaacttgcacctgagtgttcacagcagcattatctgtaagaactaaaaagcagcaacgacccaaatgcgcgtcgacagatgaattgaacagacaacatgtggtccatccacgcaatggaatattgtttggaaggaatgaagcgctgacacatgctgcaacatgcttgacagcattatgctccgtgaaagaagccagccgcaaaaggccacatggtgtatgattccatttacgtgaaatacccagaataggaaaatctacagagacagaaagtggttgccaggagctggtggtggggtgggggctgcaggagaatggggaatcactgcaaatgggtatatggtttttttttttttagacgacagagtgaggccctgtt

SEQ ID NO: 236727 - DNA, 878 bp, Homo sapiens
ctttgcccatgcagtgctgctggtggcaacagcttccatgtcatacaggagggaacggaggctcggaactgccaaagctccacacggatacacccttgtagagagactcccccatggaagggtcacctcaaccactttctgctggttcccttgcagacatttcaaactttgtcacctattcaaagatggctttctacggactacatgagcaaccaacaagctaacccattgggtgccatgaaaaaacatgaagcaacagccacataggagaggggattccgcacttggagatgctggtcctacctgacggatgaagacccctggtgggaggtcacctggctcccatctgtcgagggctgtcagtcctacacctgtcctctcacaggctaagccaatctgcaagcccatttgaatgaaggtgtcatgtggtgaaccactgttttacatgccattcaatgttgtttgtttggtatatgccatgggctccgtgttccatgtccccatcctgaaaatggaggtcctggggatgagggatctttaggcaaaaagaaccaggccagattggtgtgcacagtgccatgtggtaaaagaggctttccaagccctgtgggcaaactctggggaaaacaggtcaccaaaggccctatgcaggcttcaaaataaaagccttctgagagggctgtgctggggtggctggcagagcaacagggcaaggcctggggaagctggggagagaaaggaaggaaacgggacccaggggaagaaagcgctttccagagggaacgttggagctgtactagttgttaaaacgtggacgtgcatctgtagcacttggttccatccactgcctcccagcacctgtgctgcccctccccctc

SEQ ID NO: 236728 - DNA, 397 bp, Homo sapiens
tgatgaatgtgcctctccaagattatgtagctgtttccatatcacctggggagaggaagccaagattatagtctaggtaagtgattctcaaatgccagtggtctacgaatctcttgagtagcttgtgaaatgtagactccttaccctcagtgagtctgactcagttactctggaattgggcctgaagtctccacactttcccaaacaccccaggtgattgcgatatagatggtcagtggaccacatttccagaaacactaacaggcaattcaattctgctagccatcaggtcagtagatatggcagctgggggagactgtagatttagacagtttcaggcaggtgggaggaaggattcagcgtcatgtggttggatggatttcgaacactcaagatt

SEQ ID NO: 236729 - DNA, 405 bp, Homo sapiens
cctttcatcactttgaataaaacatctcatgtactctggccagtgagttttctgctaaacattctactgagagttttatggaggtttatgtgacagattggttttctcttattgctttaaaaattctatattttatcttttgccagtttgattttagtgtgtcttcatttggattcatctcatttgatgtacttcgggatttgggatttggatatccgttgcctttccagatttaggaagttttcagctgttatttatttgaataatctttcttgatttttctttctctcttattttgagattccatgatgcctttacttgtctgcttgattggtttcatcattctcttaaaatttctccaccctttttaattcttttatttttaatttttactctctctttttt

SEQ ID NO: 236730 - DNA, 217 bp, Homo sapiens
agcgtcacgtgattgacggtgctgtccaagaactcccttgtgggtgttttggagagggggctgtgacacaagacggtgagtttgttctcacagcactggggcagggctgctgcctggtaggatccctcccccgggagccctgcctggtgccttgggcacttgggtgccatttgccttttttttttcttttgagatggagtctcattcctgtcaccta

SEQ ID NO: 236731 - DNA, 372 bp, Homo sapiens
actgagaactgaagcaatacatggccaagaagtcttgtctctgtcctcccccaattcacatcaaaaaagtcattttaaaaagataagagctgggccggtcgcggtggctcatgcctgtaatctcagcgctttgggaggccgaggcgggaagatcacaaagtcaagagatcaagaccatcctggctaacacgatgaaaccctgtctctactaaaaatataaaaaattagccaggtgtggtggcgggcccttgtagtcccagatactcggaaggctgaggcaggagaatggcgtgaacacaggaggcggaggttgcagtgagccaagattgtgccactgcactccagcctgggcgacagagcaagactccatct

SEQ ID NO: 236732 - DNA, 300 bp, Homo sapiens
tattagcccagcctctgcaaggagagagactgcaggtcagccacataggcagtatgcaatcaagccccaatgcaaactccatacaaggactggatgagcttccctggttgggaatactttacacctgttatcacacatcatggcagtgaggaagtaatgccaaccaggattccacaggaagaaaaggagcagaatctctgcatttcaactcctcctggactctgtcctatgcatctctttctttgcctagctctaatttgaattctttccctgtaataaattatcactgagtgtaataac

SEQ ID NO: 236733 - DNA, 157 bp, Homo sapiens
ttgctctcccaaaatcttttaaggctcgttgcatccctgtcctcttctctccctgggcactccaacccatctgctcaatctgataaacaaatacataacaacaagatatattaagagatcttttcatttttttcctttcatttttaatttcaaaggg

SEQ ID NO: 236734 - DNA, 426 bp, Homo sapiens
cagtatcatgaatctttgctgctttcaaagtggattacttatttatttttagagacagggttttactctgtcactcaggctaaagtgcagtggcgcagtcacagctcactacaatctcaaactcctgggctcaagcaatactcccacctcatcctcccaagtaaccatcacgcccggctatggtctttttgtttgttttatttcattcttttaagggacggaattttgcagccttaccaacatggtgaaaccccatctctactaaaagtacaaaattagctggatgtggtggtgcatgcctgtaatcccagctacttgggaggctgaggcaggagaattgcttgaacctgggaggtggaggttgcagtgagctgagatcacaccattggactccagcctgggcaataagagtaatactccgtctca

SEQ ID NO: 236735 - DNA, 469 bp, Homo sapiens
tgcttcatcttcccgaatagctgggactacaggtgctcaccaccacgcccagctaacttttgtatttttagtagagacggggtttcaccatgttgaccaggatggtctcgatctcttgacctcgtgatccgcctgcctcagcctcccaaagtgctgggattacaggtgtgagccactgcgcccagctgaagattacactttttaagtgtcggagatgttgacggtggtactcttactagaaatacgggcaaggaggtacgtaatgagatcagttttggatttgttgacttttttgtatacttgccaaacgctggaaatgtccaaaggcttttggaaatgtggatttgtggttaaggggagaggtcaggactaggcatatattaaacatgggtttagtgaataatacaaataggtgtactggttgaatctgtgtaagaagatgaaagtgccaagggagaatgtagagggg

SEQ ID NO: 236736 - DNA, 415 bp, Homo sapiens
agcggggaccgcgcgcagcacctcgcgggcgccccagcccccgcaccctgcggagcagagccgagcgcccaggacgccgcgggccccagcggtcctccccaccccctggccgcgccgccgccctgcccggggcggagtaaacaagagacgcgcaagatttgacctggcgcgacccggctttctggccggggttccccctgagcaggtgactccgtgggaggggtggaaatgagtctctggaattccgggccaaagacaataactgtggttctgcttttaaagcaggtatttcaccagcaactgcggaatgttttgtgtctccagtttcaaatttcgcggaaagggaccaaatgtgaggacatataaaatatccccttctcttttcattaaaaatgagtgcattacaaaggaaggg

SEQ ID NO: 236737 - DNA, 488 bp, Homo sapiens
gatcacaacgaagtgttgagtatgtctaaatgtatgtggatatgtttgtgtctaagtgtatttccactagcatgctaaggtatgtttgtgtgtgagtatgtttcctccagtatgctaagttttgacacatgcaggcatctaacttgggtgttatctgtccttcctttgcccaaagcatagattataattgttcattctcaaaaatgcaactcttatctatttcccctttatttgaaggcagctgatggttactctgcaaggtgtaagtttctcttttaaaaactaagcggtcgagcatggtggctcatgcttgcagtcccagcacgtgggagtctgaggcggaagagttgcttgagcccaagagttcaagaccagcctaggcaacaaagtgagaccccatctcactttggaactcaggactgcagtaagccatgatcataccactgcacttaatcctgggtgacagagtgagaccttgtctcttaaaa

SEQ ID NO: 236738 - DNA, 698 bp, Homo sapiens
gggcagaggcagggtaaaggacaaatctggcaagtgtcatgcatgggggagtcatccaggaatctctgagccaaagaggtggtggccctgctttcaggggagacctcatctctgcctggagtgacttctggattgtagcctttcagattaaagattcctcaaccctatcatgggctgctctgaggaccctccttcagacacttccagtatagacacagtatccactgcttggggaagtcagactggtggtcagctggaggggtggcttacatgctgcaggaggaggctgtcccacaggggcaactccgctccccacggaaatgtgcggaccctcactccctgccagcgtcttccccattcagaatgcacctgtacctcagcaaaaagaatccctgcccatgttctaacgaatccccaaacccccattgccccttggatgtccacccttgagtggagtataaggcgtgcgggtgacctacatcagaaacagggtgtgatcatttcagttcatcacatctggggcctctggtcctggcacaagctcaatagctagtgcctgacagcattcaagtagatcacatgacacccaggaggggttgtgaggactctggggaagaaaagccatctccagtggggcagggaagccttgaggtctgagaggtaggtatgaggatgctaggggtatgacccaccttgtg

SEQ ID NO: 236739 - DNA, 332 bp, Homo sapiens
gtatatatcttttgaatttattctgatggaataaggctagctaacatttattgagcacttactatgctccaggtactattctaagcatatatcatttaatcctcatggcaatactatgagtttggtattgttatcaatatcactttagaaatgaggtaactgaacttagaaaagttaaataacttgcccagggtttcataattagtaagtggcagagttgggacagaaattcaggcagtcggactctcaattatgacactatgtgccaacatgaaaccaaagatgaatggcagacataaaggtacttattgcagcattgctcattataggaa

SEQ ID NO: 236740 - DNA, 485 bp, Homo sapiens
actgttatttcttcttcagtgctcttcacaaaagtcacatggatgatggtaaatcttcgagctgatgccagataaactctgaaattttaaagtatttgtttcatatgggcaaagcttttcctttttttcccctttttttcttctctccctttaccctgtgggaaaatgaacttattttcagtcacccctgacatctgaccactcaactgatcacgaggacactgtggcaaaccacaactcaacttgaaattgtctcttttaggctcggttcctgtactttggatggcaccatccttgctacccagcattagctttttttctatggaggttccatttttactttcttccatttactcaaagtaagtggtcttgctgtaaagtctctcagttgggcttgtcctcaaaataaactgaatgcaaaaatgacaccaacttttcagccaaaaccccaaaagtggcccatttacacagtgtgtccttctttt

SEQ ID NO: 236741 - DNA, 534 bp, Homo sapiens
ttttccctaggcctggtgttaacagtttcaacctagaactacccttgtgcactgtaacacactcataattcactttctttcagactaagcacagcacatattcctcaaccactgaggcctaaaagttctttagtgatgatatgttgtctctaatcaaactcttgcctcagctgacccttttaactgatgcctctgaggccaccactatttgcatgctccctgttcttcatgcacataaactaagcacaggtcaagatcacagtgctgggacctgtacccacaggcagtctacaaatttgttgggactccaaaagccctcttcacatttgttggggtgtccttctatataagctatcacagaactctggccagtgtcacaataacctgcagtaacctgccatggtcaaaatagtccaaagattcaaagattcaaagtccctagaccatgccacacattcataaagccaactccacaatgaaaaaccagctgcactgtgtaatgcaggtggcaagtcactaagattaaaaaaaaag

SEQ ID NO: 236742 - DNA, 795 bp, Homo sapiens
ggtgtggtggctcacacctgtaatcccagcactttggtaggccgaggcgggcggatcatgaggtcaggagttcgagaccagcctggctaacatggttaccactagaatcttcaaaccagtacaacacttgtacatactttgttttcaagtacacacatgaaggcccaacaatgataaggtttgggatcaaaaatcactagaatgtctcactttttttttttactactacttaattcaagtgactgtcacttaatatgaataatggtaaacacagctaaagtaatttgagagaaactccagtcaatataattttctaaaggacaaggtcaatctttcctgaacattaaaactttgtacccatatcaagtttttcctcattttctaaaggaaaagatctgaaaccaactcaaattattgactaaattgaattaccttggaaataaacaccatttaaacatatccactcccatctacttttccaaataacaaaatattgtactatttctgttcagaacttataaaagtaagtcttttaattttgtccaagagctttataaactcttatagatcattaaaggaaagcataaccaatgctaatgatcctatagatcattagaggagagcaaaaccaatccaagtttaaaaggctggtgtgctctatcatttttttttttgaggcttgacaaaggtagcttaggaattttagatagatagagcaaatgatgaatgttggaaaaacatgggaaaccaaatggctatccatagaaccaaatgcaagcttttcattaggaactg

SEQ ID NO: 236743 - DNA, 190 bp, Homo sapiens
agtgaccacctgaaaaatcaattctcaaaacttttgagagtgtgtgaaagtggcatgaaagcaaagcaaaccttaacaagtttgtgggtttacattctacatcacctagcaacctcctgactcagccagatctcttgtctacccttagttctgtttacagactattcaaacggcccttcgaaaccatgaa

SEQ ID NO: 236744 - DNA, 187 bp, Homo sapiens
ttgcaacccgaatgaaggcactgatttgggaaaaggccgttggcagttgctgaggcatccggggacctggaggcagagcgtttgcgggcgctggggcatctctgcataggtttaccaccgacggctctgcactcacctcttcagacaagcgattgccctggtgctccatgccaccccatcgacgcct

SEQ ID NO: 236745 - DNA, 459 bp, Homo sapiens
agatgcctccagtggagcagacaaatctctgaagtgagaaagagtgagatttccctgcaccgggcctctgcgtgtgagggtaggagggtgtaggagggggtgggcgggggccatcaagggagaagcctccggcctttccctgtctctcaacactagccctccccggccgcctccccttccccaatcctcaactagccgcgggaggggggccccggaggctggctgggccaggaggctcggcctttgtggctctgtccccgacggtggcgcggaggcagagggggcggggacgcgggccggagaccctcagccggggcttgacccccaggtgcattgtccggcgggacccgtacccttcccccagggctccgacccggccgccactggccccctcccagcgtctccctccgccggccgcgccgacctccctggcccagaccaagggccagatgtagaaag

SEQ ID NO: 236746 - DNA, 337 bp, Homo sapiens
ctctccactaagaattaatctaaaaacaattagtaggcaaaccaaacattcctttaaaataaatggaattttaaaaatatcccaactccttggttcttttcagagtcctgtaagttgccagtgcatcaactctaagtaacttaggagctgatttttctgtctgtcattttttaaaaccgcttgattttcccttcctcctggctgctgccctgttttgatattttcagcatcattctgtttgccattatttattactgctgtgattatttctatcattatcactgtcatttacgcttcagtcagtcacaagaaactagaattgtctagcctagtgcaa

SEQ ID NO: 236747 - DNA, 117 bp, Homo sapiens
gacacagttaactccattactttggctttttatgaaaacaaggaaacaaaactttctgtttgcccattaattcatttatactattcttagagctcacttttatcatttgactaatgc

SEQ ID NO: 236748 - DNA, 412 bp, Homo sapiens
gggtaatattgacatcctaacaatattaaatatttccatccatgagcaccggatatctctgtttatttaggttttctttaatttctttcaacaagattttgtagttttcagtgtgtaaatcttttacttcattagttaaatttatttctaggtattctttattgtaaataaaattgctttcttaacttcctgtgtatttatcttataccctatagctttgtgaaatttatttattagctattatttccttctttttcatttttattttttgagacagaatcactctgtcacccaggctggagtgcagtggtatgatcatagccttgaactcctgggtgtttatgtgatgctcctgcctaagcctccgaagtagctgggactttagccacacaccgccatgcacagctaatta

SEQ ID NO: 236749 - DNA, 460 bp, Homo sapiens
gtaaagctggaaagaaaaagtaaatttgggtctagatctgaagagatgatttaggattagagatgttgaattgagacttaacttgcatagaggtgttagctgaagccatagaagtcactaaaattgctaagagaaacagtttggaaagaaggcagagaactggataacagggagcacgttcttttaggaaggtgaagaggcgagggagaagtaagaaaagggaggcgtacctagccaggagagagcttttttaaagtttgtaaaaaaccgcagtgacagtggtagttaaaactgtaaagtgtttcgcattctactaaaatgggaactagtaagagaagaggataacttgtaagagctatgaatgtggttgctaattcgtatctactgtagtttttatgtatttgtgaagctgattatttctaaatttcaaacctagatttataaattatgagaaccctgg

SEQ ID NO: 236750 - DNA, 495 bp, Homo sapiens
aatattctcattaatattttattagatcatttgaaacttatgattactgggcagaaataggattatgatctttctcttatagaagaagctgaaactcagaagctaagtgacttgctcaaggtcacagaatatggtatgtatcagatttgatgcccaatttagtgctctttctactcagccagtggttctcagctgggtgtgggacggtccctgcaatctggttgggggaaagattgggagacagcctttggaatttttttttttccatgactagggaatgggactggcatttagtgggctggaagcaataatgctgaatgttctgccttgctgaggacagtcccacataatgaattgtcctgctccaaatgttaatagtggtccccttgagaaataccgagctaaattaagccaaagaaaattacacactgactcagaactgagaataaggctgtctcataatgatactcaataaatgttaataaatgatatcac

SEQ ID NO: 236751 - DNA, 523 bp, Homo sapiens
ttagacatggcaaggtgagagccatcttgttgaactcactcgaagaggagacccatctggtcaacctcagacatggcaaggtgagagccatctgatcgaccttagacatggcaaggtgagagccatctggtcgaccttagatatggcaaggtgagaatcatctggtcaatcttaaacatggcaaggtgagatccaacttgaccttagatatgatgaggtgagaaccaactgttcaatcttagacatggctaggcaagtgccatctggtccaccttagatatggcaaggcgagagccatctggtcgaccttagacatggcaaggtgagagctgtctgttcatcttagacatgacaagctggcagctaaatgcgatgcatgcagtcgacatccatctcaaaataaatgaaccaacagtaaatatataacaataacaaggaaataatagtgaacaaccctaaagaccaaataattaagtaggagtgtacaataataaaaggtaattaatgtcgcaatttaaaaaaa

SEQ ID NO: 236752 - DNA, 409 bp, Homo sapiens
ccctcaaaataagtagaggcctttcctacagggtccgagaaggccaccgcagtcatttctttcgttctgtcagacataattcctcagtttagccttcccaccttaatacagtctgataacagatgagcctttattagtcaaatcagccaagcattttttcaggctcttagtattcagtgaaacctttatatcccttatggtcctccagtcttttaaaaacacacctcaccaagctcagccaccaacttaaaaaggactggacaatacttttaccactttcccttctcagaattcaggcctgtcctcgtaatgctacagggtacagcccatttaaggtcctgtatagacactcctttttattacgccccagtctcattccagacaccagaccaacttagactgtgcctca

SEQ ID NO: 236753 - DNA, 431 bp, Homo sapiens
ccctcaaaataagtagaggcctttcctacagggtccgagaaggccaccgcagtcatttctttcgttctgtcagacataattcctcagtttagccttcccaccttaatacagtctgataacagatgagcctttattagtcaaatcagccaagcattttttcaggctcttagtattcagtgaaacctttatatcccttatggtcctccaagaaaagtagaatggactaaaggtcttttaaaaacacacctcaccaagctcagccaccaacttaaaaaggactggacaatacttttaccactttcccttctcagaattcaggcctgtcctcgtaatgctacagggtacagcccatttaaggtcctgtatagacactcctttttattacgccccagtctcattccagacaccagaccaacttagactgtgcctca

SEQ ID NO: 236754 - DNA, 435 bp, Homo sapiens
tacaaggctattgatacatgtgaacattgagatgacagagatgttagaattatctgacaaagattttaaagcagctgtcatgaaaatgctccaagaggcaattataagcatagtggaaacaaacgaaaaaggtaaaagttttgacaaagaaatagaagatacaaagaataatcagataaaattttagaacagaaaaataaaataattgaaattatcaaaaactaagaggatgtacttgacagcagagtggagaaggcagaagaaagaatcagtgaactggaagaaagaataatggaaataacttaatctgaacaacagaaataaactatacttaaaaacagagacttaggcaactgtgaaactataacaaaaaataaaacatttgtatctgtgtcactagaatcccagaaagagaggagaaaaagggcaatgctt

SEQ ID NO: 236755 - DNA, 311 bp, Homo sapiens
ctcctctcccagctctcggttcactgagtcaaagcttatctctgtcctgcctactagacccaccctgggattggtatgggagctccaatccccattggaaccccatctggaagttgccagagacctggtagcaaaatcaatcaaaaccagagaacccctacctggcccagctttctttggatgccaaagaaagctgtgtctctttggagggctgggccagtgccaagccccagtgctgggtgtctgagcgatcagaacacagggggccaattgatgcggtgtgggcagagctccagcatgaggccgcaggg

SEQ ID NO: 236756 - DNA, 499 bp, Homo sapiens
ctttgcagttttagtcaaatattgccatctttctagtggaagactttgacatgtaagttctagattatactttcatttataaataactgtgtagcttaatgagatggcccctgttagtatcttaggccatctattgaaggtttactaaattcttccaaggcacgtgagtctgctcctcagcaaagcagtgacaaacctgcttttccctggtttccccaactatgtaaaaccttattaaagaattcctgaacaatataaagttccctcagcaagacggaacttcccaagctcttgtctcaggagagaatgtggattatagaaagattgtgggtgtgagtggagtgggaagttatttaggtagtaagattttcaggctcggtgcagtggctcacacctgtaatcccagcactttgggtggccgaggcgggcagatcacaaggtcaggagatggagaccatcctggctaacagggagaaactccatctctactaaaaataca

SEQ ID NO: 236757 - DNA, 611 bp, Homo sapiens
acaagaatttaaatccctgtgtgcttaggaaactcacagatgtagttactgatacagtataatgacagaacagatttattctcactttctaaaaatggacatttaattcatctttgtaatagagtaaaatttcaagtactaattgtgaatttttgggtttttttgttgacctcatgtaatgtaattgggtttttttgaaggccagaatatcatcaatttttaagaatttaaagttcttatagcaagtagacacctggagaaacttgaagattttaatgatgatttacaggtcaggtcattagttatatgctgggctgtggtttagtttttgcctattctgtagaaatagatgagctttgccaaggaatatacacaacttaggagcagttaggattttattattagttccttttcataaataataaagtatactatgtactactataaataatgcctaagagtatgatacataaatctgttatgttaaattttttttaataaactttttttttgctttctgggagcatacactcaagttgccctgaatatacattccctatttttaatttttaaaataaaattgtatttattcacaatttaaaacttctttt

SEQ ID NO: 236758 - DNA, 393 bp, Homo sapiens
aattttttttttttatttaagaggctgcaactgcggaacatgtagtgtcattgtggatatctctgttgccctggaaagtatcttcatattataacataatttaatagtgggtaaaagttatagagactatgagttgtaaagaatgtgctagattatgttcagcatatatttcaagttggggaaatagttgaacaaacagcagacagttataaaatacagactataatgtattttgcttgtttgtttttttgagatggagtctcactctgtcgcccaggctagcacgcagtggtgcagtcatgtcttgcagcattctccgcctcctaggttcaagtgattctcctgcctcagcctccagagtagctgggattataggcacttgccaccatgccc

SEQ ID NO: 236759 - DNA, 412 bp, Homo sapiens
tgaggtgtggccaatcagagtccagaattccccagagccacggtgattggctggatttggacgtgtgaaggcccacctcaaccaatcagagccctcctctgggtagggctgtcagcagataggtgacctgaggagggaggcgggtccttcccgactctttgagaaccccaatgcaggcacgtggcgcacacgcgagccacccaactggggtgagcaagtgcattctcttgtgggcttaagccacagtcagttggtcccaagcctgtccggtgctcctggtgcccatgcgctgtgtttacagcctgtctgcgccctccagcagccccaacatgggcctcccttggacctcagtttctgtaaaaacagatgtaccttattagctaataaagaacatcatggttttataactcta

SEQ ID NO: 236760 - DNA, 484 bp, Homo sapiens
cttccatgctgagaaaaagttgtctttaagagaatgtgctgaacaatcagggcccagaaaggcaacaacgaatattttgcatgccaagaaggaggcaaaagaggaagtggaattgtacccaaataatgcttataataggtgttatttagctgagctgtaagctccaggagggcagggtattaatatattgaggtgttggctgagcactgtggctcactcctataatctcaacactttgggaggccaaggtgggaggatgacttgagaccaggagttcgagaccagcctgggcaacatagcaagacctcgtctctacacataatttaaaaaaataggcatggtagcgtgcgcctgtgattcccaactactcaagaggctgaagaaggatcaccggagactgggaggtcaaggctgcagtgagctgtgtttgcaccactgcactccagcctgggggacagagcatgaccctgtctcaaaaaaaaaa

SEQ ID NO: 236761 - DNA, 638 bp, Homo sapiens
ttgaggcagagtctcactctgtcacctaggctggggtgcagtggcacgatctgggctcaaagcaacctctgcctcccaggttcaagcgattctcctgcctcagcctcctgagtagctgagaccacaggcgtgcgccaccacacccagctaatttttttgtatttttactagagatggggtttcaccatgttggcagggctggccttgaactcctggccttaagtgatcagtctgctttggcctcccaaagtgctgggattacaccacgcccagccacaatactggaaacttgctgaatgaatgaatgaatgttctctctctgaaaattaggacataattccaatttaagtcccgataaaaggagccacgaagaggcaaaagaattaggcaggaaaggttggggtagtggttacactagatgctttacaggtatttatagggcaggacttaaactcttggtttgataaaatatatgaaggagcatataactgacagctcagctccgttttgcaaagtgtcagccagcacttctctctacacaaaacagattagtaacatctcttcctgccagagggcttacatgttgcaattctcttgtaaaaagtttctgaatatttaatagttgaagttgaatgact

SEQ ID NO: 236762 - DNA, 3200 bp, Homo sapiens
  misc_feature (2)..(3): n is a, c, g, or t
  misc_feature (5)..(5): n is a, c, g, or t
  misc_feature (9)..(9): n is a, c, g, or t
  misc_feature (2073)..(2073): n is a, c, g, or t
tnncntatntaactgtgctcatattaatcttagttatgaaacagatcatttagaaggtaacattggaaacaaaaggctaaactcagatacataatttgccaggcctcataaactgtgctttgatgttctaacaacttcccaatagaagccatctgttaaacaagcaattcattcagagtggaggtattaacattaaactgtctttcatatagttagtcattagttattatactatctgtctctcatatagtatagttagtaattactgaaaataagataatcctattaatggccacaacatgattctgatggttagtatattctctagccacaaaaacccagacctaggcctccccaattctgccattcacactgcagcatgtgccatctgtcctaagaggagacgacaggctctcctcttcctccatagatttcatttgaactgtgagaaccaagtttgccaaatgacatttgtgctagaggaagcactcacatgaggccaaccacccaaagcaatacaatatttaaccacatatttcagtgctggcattcgtacccacacaaatattaaccaatcaaaacttatagtctccttgccaaattctcagaagaatggctgaagaagtatcacatggtctgaatctatacaactttacccagattcctgtgtaattcaggggaattctctagttttgtttagtacgagtgagaaactcaaagaataagaaaattgttggggacaggcacagtggctcatgcctgtaatcccagcacattaggaggccagctggaggactgcttgagtccaggagttcgagacaagcctggccaacatagtgagaccccacctttacaaaagacaaaaataattagtaaggcctggtggcatgcatttgtagtcccaggtacttgagaggctgaggcaggaggatcacttgagcccaggagtttgagcctacagtgagctgtgatcacaccactgcactccagcctgggtgacagagcaagacctcatctttaaaaagtaaaaaaaagtcttgagggctatagtaagcacaagaaattatttccttaaactccttttttttcttcctacgctattaaaaaggaaaagatttggggaaaagagaaagggtgtgatataagcaaatgctctatatcggcaaatctctctgtaactttcaccactactatctctgtcaggcgagcataaagtgaaaatatttagctcaacatttgtgtaggaggatttgcgagggttccaaattttctccccacaattttgcaaaatccagttgccaataatcaggtaatttttacttgagtgctttagagcaaccccaaagactgaattttatttatctctgagtctctttagggggtgaaaaaacatcaacataaacaactgaaggaatatcacctggtaaaatcattgaccccacaccgggactgactccatgttccctccccaagccatattggctttctataacaacttctgtcttttgtatgaagtaagatggattttgatccgttgatccccttatctttctttggtgtaacaactggaaaactggcaattcatgtgaagtactttgccaagaggatagtaaagatccttttaatgttttaagcatcctttgttgagttattgtgtgctggaatgggcctaaggtccattgtgtggttcatgttggagcctggatgggtacatctggtaaagacagcaaagaagttaaagggggaaatgttcctcaagacagattcttttctgtttttcagttcctgggcagttctttgtatttttccacacagggtgaaaaacacagtcataaaaccccgaacagtagaacagtcagaatgaaattagtttgttttcactgaagcatttgtgcttgtttccttcagaagctgatcttgatgacatgattgattgtccctgtggatccttcccctttatgctttccatatcccccaactgctcagagattgaccgcgtgccaatgcaggcagaagggacacgggttaaaagctgccaaggcgtactcgctgccctcagcccaacacagggangcagtcctaggagcttgacttgacttcagggttcacagttgatatgtgcatctggtccggggagaaagagggaaactttccttcaacctgacccaaggctctaagctcacttgctgcctcactcttttcctctcataacacaaagttgtgccatgctgagtggagcctcctggctctgaaaccaatgtggtttgccatctagatcaatgcagacttcattgtgcactgaatgccagcaagagaggggcatctggtgtcatctcaaccatggaaagggtacattagccctgctaattgtcctcaccactatgccttaaaaatccccactcacccttcccaggtggctgcaaaggatcactcatattcactttgtgtctgatcctggtatttaatgccatttgtattcatcagactaatggaaatatcaattaagcccagtcaagactagctcttagagcaataatggacacttgtacctgagctcagagcagagggaagaaaggcatctggaggtaaatggtgaatgacggtcaagtgactatgaaacctgcaagtgaaccaataaagttaaagtattggtacaaatttgtacacatttatatagccttaccaggtatagtcatcagtgtacaggcaaatgatttttttttttttgcttgagtgcattagagaaagtccaaaaatgcagtcttataaatcttggaaaactgcaatttaaaataagctgtggaagatcacctagcctaataattgaaccaacactgggatctagccccaaattctatcactgtgagcacacaggctcactccaacataggcggaacctcggggaatgatttctaaatatcccattaccataaaatctctggtatttgaatctcactaattcaatctggtatttgatggatgcagcagggggtggccgagacattcataaagtttgaaggtactttttcttcattgtttcctagttttccttgaggaatcagatgatattttgcatagttcagagtgccctccaaaagaaaatcaacagtttaaggagttttctgcattactgagatgaagtaagcttacaagctttaacttgctgcatatgtctctcattaaagaatcttccaaccttc

SEQ ID NO: 236763 - DNA, 440 bp, Homo sapiens
aaaaatggcaaaaactctgaaggtgctgttatgagtgattgaagttcagggaacactgtggcaatgccaaaatgtggcgaatcactctagagagctgtgtattctatagagtcaaagggaatggaagggttgagtgatgcataaaaagaggatgtagaatctaagatgctagtgggggtaaagacgtgcacttttgggcaattcacttatctttgtctttagacagtaaaatccccactaactagggttctggtcagtcggcttttctaattgaaggttcacttgtattgatgaaaatcatttctaatggcacaggagtcccatttccactatagtaagtcagagttgagggagaaattgactatcattaatgaatgaaggttttcaggttgttttaagccattgtggatcttgtaatgttgattagcagtaaaaaaaaa

SEQ ID NO: 236764 - DNA, 1132 bp, Homo sapiens
ttttccagtaagatacattcaaagcaacaaaataacttttactaacacttaacttttcaacgctaaaacttacagaaattgtttacctgacttgttagcagtacagtagtccccccttacccgcaatttcactttccatggtttcatttacccgtggttaactgtggtctgaaaataagtgtgtgcagtacaatattgtgatagagaaaggcctcaatcacataacttttttttttttttttttttttaagagacagggtctcactctgtcacccacagtggagtgagtgatgcaatcatggctcactgcagccttgaactcctgggctcaagtgatcttcccatctgtctcctgaatagttagaactacaggtgtgtcccaccacgcctagctaatgtaaaaaatatacatttgtagagatggggtctcactgtgttgcccagactggctcaaactcctggcctcaagtgagtcttctgccttggcccctcaaagtgttggtattataggcgtgagccagtgcacctggcctcacatgacttttattgcattatactgttataactgttctcttttattattagttgttaatctcttaccgtgcctattttataaattaaattttatcatatgtatatatgcataggaaaaaacatagcatatataaggttcagtagtatacacagtttcaggcatccactgggggttttggaatgtacccaacacaggtaaggggggattactgtaaatacatttttaaacgtaaaagtaagatatttctgacagtacaacatagttcttaaagatttaagattatatagttgacacacagcagaaataaaaagaatgaaattctactggagaaataacttgtttccatctatgttatacctgagcaccaccatggcaggtaaaactgcagcgactacaccaataaaaacaaatatatgaatccaaagcagttaagaatatgaactggatgaaagaatgaagtacagtatataaaagaatgatcatgttttctctcccatgagattaaataaattaacagaattaagagaaagaaaacaaaatgaagtctgcaagtataccaaaatgaggccaaacagataaagacttatacagacatac

SEQ ID NO: 236765 - DNA, 416 bp, Homo sapiens
aggtttccagtttgcttggggaaagagcctttctccgtatttccttattgccagcctcattcctaaaaggatttgaaatgtctgacaaaagcacaaatgtgcagcaaaggaggacacccaggcaggggaaataaaggcaggaaatgtgaggcaaagccacgtgaggctctcatacaaaaggctgattgatattcacttgctaatttgattctgcgttttcttgaaagaaggaaacataatcaacaattcccttcacagtgtccatgagataaaagcaaacgagttgtttgggagaaagttctgaagtgccagatgcatctctggtgggatgcttattcttttaaggatgtgagcaacaccctcaatcatgatgagttttatgagccatacaattattaaaaatttttaactttctt

SEQ ID NO: 236766 - DNA, 302 bp, Homo sapiens
ctcttttattattcttatttcctctttttgcaattgtgttctttgcccatctgtatactgatttttaggtgttctttataatttagggagctaagtattgcatacattttgtcataaatgttgaaacattcccccccaatttttttttgcttttaaattttattttctaatgtacagcagttttatatagacaaaccaattgatctttgtctgattttgatttcatttatcatttttaagttttaaaatcctttctcacccagagatttaataaatattatattatttttcttctagttttt

SEQ ID NO: 236767 - DNA, 542 bp, Homo sapiens
agaggtgcacatttttactgataagaaaatacaaatttaaacatcagtgagacatttcagactctaaaaattaaacttgaggttttggaggacaggaaataggaaatctttgtacctgtggaacagaattgatggaagcacttgggagagcaatttagcaccatgtattaaagttacagttgccttttcattttcagacagctgtcctataggactcttgtacatgagcttaagtatatgtagtgtgtgtatggaggtgtaaagcataactgttaatatttaaaagtggaaaataatctcattgtcaatcagtagaggaatgaataaactggtttctttgaataatccaatagtatgtaatagctacaatgaacatattaataatttttaaaaactattgagtgagaaaatccagttttcaaagaatgcacagtatatcacgtatgcaaattgaaaagcagaacaatactgtattgtttatgatgaatatatacctttggagtaaaaaatcttaaaatatgtttggcaaggaaaccatgctg

SEQ ID NO: 236768 - DNA, 387 bp, Homo sapiens
aaaaagaagaaagtaatacattagagcccaatactttttaatcaagatatgaggacttaattatttttttccagtaaagtcgagcatttttataaatggtttatgctccttgagtggtactatttggaagaaggaggaggagtatttataaatggattttcttcatcataaaatataccctttggttaatttgttaacataaaatttgtaattaaaataaagttagtgaactggaacactcaaagtacgtaaacccagaagcacaatcgaatagcctcagaactgtatttcttaggtaagaaattttaatttttgattcttagatctactgggaaagagtcagaaggaaaggtaatttgaagttatcctagaaagactctgaattct

SEQ ID NO: 236769 - DNA, 146 bp, Homo sapiens
caggaacttcccatcttgttgtaacttatgctctgtaggttttacagctgagctggaactcagtaaaaacctcaatgataactcccaggagaactaagtgatattaagacacactcttgcctcactgcctttcaatgagttgactg

SEQ ID NO: 236770 - DNA, 557 bp, Homo sapiens
cacatcctgtgccaggctccctttcattgtctatattccagtcaagctggccttcaaaatttcagcacattgggtctttctgccacaggcccttgcacatacatgcttttccctctgtacatgtgattttctttcatccccgctttccaaagctaactctgactcatccttcagactgcatcttaatgattacttccttctggaagactcccctaattttcacaactagatgagctctcccttatatgttgaaaacaagtatttcttgtgtgaacagaaatgtttaatgtctgccttcccaactcagccacaagctctgtgaggatggggactcagtctttgcatccctcagagcctagcatagtctcagttaatacgtgatagctggagcgtgacatttcattaggaacagtgaggctagttgagaaattatacctcaccagtatataggagagtaccattaggaattcttaatgggatgaaaacctgaattcatgtctagaccctgccacctgctggctgtgctgttttaaataaattgcagatcctctcagagc

SEQ ID NO: 236771 - DNA, 384 bp, Homo sapiens
tgcttactgggcgtatggaggaaactgtggggtgtatggaggaaaccggggcgtatggaggaaactggggcatacggaggaaactgtggggcgtacggaggaaattgaggcatatggaggaaactggggcatacggaggaaacgcgggtgtacggagcaaactgtgaggcatccctcagagcctagcatagtctcagttaatacgtgatagctggagcgtgacatttcattaggaacagtgaggctagttgagaaattatacctcaccagtatataggagagtaccattaggaattcttaatgggatgaaaacctgaattcatgtctagaccctgccacctgctggctgtgctgttttaaataaattgcagatcctctcagagc

SEQ ID NO: 236772 - DNA, 372 bp, Homo sapiens
attttgttaatattggcgttgttgatattctgagcctctcactgagagctgagtaaacagaatttaatcacaatatatgtctgtcagtgcatagttggcaaaggtccctatttggttcaagttttctgtcaagtctgctttctggttgcaataatatatttgtaatgggtagtctataaatagagtaaagtagtaggaacatttggaaggtcaactaacttttgactgttcaagttaaattatcaaagaagttgagagtctaattaccagaatgatttaaagcagcttctgtgtttgcctctctctcaggaaacaaggtaagcaatgagaaaatctggtttatctaagacttactgaggcatatggccactt

SEQ ID NO: 236773 - DNA, 531 bp, Homo sapiens
tgagaccagtattctcccaaggatgtgagttctgagttcacattatttaggttaaatctttacttcacatagtttctcatttatattttcacatttcccaagtgacttcatgtgctgtgctctttataactttctatcaccattttcatttcactttcaaatgccctaaatagcaagaatgatgatgtgccagtcactgtgcaaagcattttataagtgtgattccattggattctcatcacgattctgtgaaataggtatcattatggtccccattttacagaagggcatatagaaggttcacatgggtaattttcctaaggtcacacagctagtgcatggcaaagtctctttctttttgcttggtacatcagagactaccctgtttccatttaaggcataccaacaaaatagcaaaccctttttgtcccagtcagtgctttctgagaaactcatcctatggcattatgccttcagacaaggagcaagtgttttcggtatctttagagatgcatttttgtgcagcagaaa

SEQ ID NO: 236774 - DNA, 475 bp, Homo sapiens
aggcaaacactggagtgtatactactcctattcctaacagactgaggattgttcctgggggtagtaatttcccagcatttccagccttctctgtctttgcatatgttcatgggcagtgtatattccttagaaaaccctaaggaagggaaaggcttaggtggaagccatagacgtgtacaggagccatccagcaaagcccccgttgagctccagtgtaagcttagggtagagaaggatactagaaacatgtgacagcttctccactagatatcaaattgaatatttaattaaataaatcacaacaaatcccaaatattaaaagatgacaaatgtggtcatttcatactcaccaacatgaaggtcggtatgacagaggagaagtcaggagaggtgtgataacaggcctaaatgactgctgccaagaatcttattgttgcaatagtaaaataataaagataatgacaataatacctta

SEQ ID NO: 236775 - DNA, 507 bp, Homo sapiens
acagtgatgggaggcagtgacagatcatcaggcattagattctcataaggaacatgcaacccagatccctcaatgtgcagctcagaataaggcttgaggtcctatgagaatctaatgccgggtgaagcttgggtggtaatgtgggcactagggattggctgtaaatacagatgaagctttgctggcttgcctgccacccacttctgtgctgtgtggccagttacacattacacatttacaataaatgtgtaaatcccaatacatttacacatttattgtgtaaatcctaaggttatagaaaacctaaaccttaggatttacacaataaatgtgtaaagacattctatttagattacatagaaaatctaaaatgtattgtgtgacatcttttttaaatcccaatactgctgcaactacaattctcagatagtcccatttgtttaaatcacgcattttctttcttttttttgaggcagagtctcactctgtcgcccaggctggagtgca

SEQ ID NO: 236776 - DNA, 493 bp, Homo sapiens
ccatgttggccaggctggtcttgaactcctgacctcaagtgatctgcctgccttggcctcccaaagtgctgggattacaggcgtgagacactgcaccaggccagcgatttttactgtggtgttcctatggtgattttctggttcattcatctcttctacatttattaattggaatttttttgtagggaagatttgccaaatatttacttattcaatcatttatttatatcagtgttcactcgtggatatttatttgagcctttgggtgataatccaatatcttcattgttacggatttggtagctcaaatggtttcagctttggacattggctgctcttttgtttggcttctatgtgtttttgacatgcccccgcccatccgtccatctgtccatccatccatctatttacttacttatttttgagcacttccttactttacggcaccacaaaacactgcagccttgtcttatttttttccctgccccagcta

SEQ ID NO: 236777 - DNA, 456 bp, Homo sapiens
acggtaaggacttcaactgaccttcctcagactgagaactgtttccagtatatacatcaagtcactaaggtaggacaaaagattgctacagtcctattattttatggttattataagtgtaccaggactctaaaagaaacttgtttgtataatgctattctatccaaggtatgtagcccaggaaataaccaacctgatgcgcgttatgacccattttaagcctcccatgatcacagtttttaaaataaaattaaggactggtccttttctaggtgacacaagtaaggtaatagctagaacagaagaaagaggggtccccaaaaatgtaaccttaaaatttgatgcttgtgccgctattaatagtaaacagcatgggatagaatgcggttctctagattgagaaaaaagttacacagcagaaaataagtacatctgtcaaaaatcatatttatgtga

SEQ ID NO: 236778 - DNA, 393 bp, Homo sapiens
ttatagttaaactttgaagcaaggaaaactgaatcccctcttgctggagactaatgctgcattcataacacaagattagaattatggttggggcttgaacttctatacattgctttctgctccaaagtcacatgagaggtcataagatttgtaactccccagctactcctatagataacataactattgtgaaacctaaagaactggtctttaagatatttttcagatttagcatttcaacaaagagataccacttggttctgagaacaccctttcccccttccctgggaagacttagctgtgtgaagacaatttagacacctctgtgatttcatcttcagccaatcaattgtttcagtttccccactacctgcctaccaatttacccttaaa

SEQ ID NO: 236779 - DNA, 573 bp, Homo sapiens
gcggccgcccggaggacactgatgcttctggagctcgcgaagggtcccccgcgggagaggaacaaggccgcttgcgctccgcagaggcgcaggcacggggctggggcccggggcgggggcgcgggtgggcggacccctcccgcaagcccatgatggccaggccaaggccgctgggaaaggcaggacgctcgcccatgcgctgccagctgggcttttctccttcgcccgccctgtgttccagggcgcgaccccgttcggtccagccgctggctccggggctgaaccccaggtagaactggaagattttgctgaaagattggacatggcattcagagaaacagaggttttaatgacaaactccaagtttttggctggagcaactggaagaatgaggttgccatgaaccgaaaagagagattgcagaagtaaccaaatttactcacgtaggccaggaatttctatgacgtgttccaaattcagcctctcactgaacacttccagagcaaggcaacataaacatctgcaagaagaacattgtgtgagaaatatcaagtgagagtggaagagtctgcg

SEQ ID NO: 236780 - DNA, 298 bp, Homo sapiens
ctcaagatggcgaaacctcggccgccgcggctatattcgccgcggcgtcactgccttcctggcctggtggtgagaggaagtcgggccgcgaaagcttcctgaggagaaaatggagggcccttctctcacaccgacgagaaaagttcgagggggaaatacgagttcctttctgaagggacaggacggctgcttttccacagccgcgacgtgattgagaaatggtggctggcaagggtaggcctgccttcgcccctccaaagtaaaaatcgggagttgagaccaaaggaacatctcttta

SEQ ID NO: 236781 - DNA, 150 bp, Homo sapiens
tatacggctgttagaagacgacagaagggacaggacggctgcttttccacagccgcgacgtgattgagaaatggtggctggcaagggtaggcctgccttcgcccctccaaagtaaaaatcgggagttgagaccaaaggaacatctcttta

SEQ ID NO: 236782 - DNA, 376 bp, Homo sapiens
atagtggaaaaaatggtaagcagtaggaataaatatgtaatgctagaaagaaccgagaaatttttaaggagtggggctgctggtagcaatattccttgtctgtatttggacaaaaatgtttgtgtttttgcaaggctgggtttgctttatttaaatataaacaaaaacaaaacaaaacaattaaaaaaataataaataaatataaacagcaactatctacataaactttcacatacctgttggaaagaggacaatttctctagaattatacatcagtcaaaaaaattattgtgtaatataatttacctgtctgtttaagccatcccattgcaaagcagggacacagtccttgtgaataaaaagcagactaaaacaa

SEQ ID NO: 236783 - DNA, 463 bp, Homo sapiens
gcatcggccctgctctctctatggaccggctctggtcctgtcctgcactggccataccatgccttgccctgactcagccctgactcagctctgactcagccctggctcagctctggccttggtgttgcccatggtcctgccatgtttcttgccctgtccctatcctggccctggccctgacccttaccctggtctggccctgctcttgccctaatgcagcccctggacctatcctggccctggccctggcccttcctggcttgagaccttaccctggttctgccctggccctgaccctgtcctgaccctgaaatactggccctaccctgtccttgcactgctctggtccttgccctgattctgaccctgtcactatcctagccctagcgctgttgctggtcttaccatggcccagactctgccttggccctgccctgacctgtcctggaccccggctgtgcca

SEQ ID NO: 236784 - DNA, 406 bp, Homo sapiens
  misc_feature (4)..(4): n is a, c, g, or t
  misc_feature (9)..(9): n is a, c, g, or t
tcantgacncccttcctggcttgagaccttaccctggttctgccctggccctgaccctgtcctgaccctgaaatactggccctaccctgtccttgcactgctctggtccttgccctgattctgaccctgtcactatcctagccctagcgctgttgctggtcttaccatggcccagactctgcctggccctggcccttcctggcttgagaccttaccctggttctgccctggccctgaccctgtcctgaccctgaaatactggccctaccctgtccttgcactgctctggtccttgccctgattctgaccctgtcactatcctagccctagcgctgttgctggtcttaccatggcccagactctgccttggccctgccctgacctgtcctggaccccggctgtgcca

SEQ ID NO: 236785 - DNA, 2181 bp, Homo sapiens
  misc_feature (1908)..(1908): n is a, c, g, or t
taaaattatgaaactcatagaagaaaacagggacaaatcttcatgacaaatatgtacaaatgaccaataagcacatgaagagtctcagcatccttagtcattgggaaaatgcaaatcaaaaacacagtgagctgtgacttcatgcttactacgatggctgtaattaaaaaacaggaaagggccgggcgcggtggcttaagcctgtaatcccagcactctgggaggccgaggcgggcggatcacgaggtcaggagatggagaccctcctggctaacacggtgaaaccccgtctctactaaaaatacaagaaaaattggctgggcgttgtggcgggtgcctgtggtcccagctacttgggaggctcaggcaggagaatggcgtgaacccgggaggtggagcttgcagtgagctgagattgtgccactgcactccagcctgggtgacagagtgagactccatctcaaaaaaaaaaacaaacaggaaaggtgactggtgctggcaaggatgtgcagaaattggagccctgcattgctggtgggaatgcaaaatgatgcagcttctgtgaaaaatactttggtgcttcttccaaaaaatttaaatagaattaccatatgacccagcactcctaggtatttcccgaaagattgaaaactgggggccgggcgcggtggctcatgcctgttatcccagcactttgggagaccgaggtgggcagatcacttgaggtcaggagttcgagaccagcctggccaacatggtgaaaccctgtctctactaaaaatacgaaaattagctggatgtggtggcaggtgcctgtaatcccagctactcaggaggctgaggcaggataatcgcttgaacctgggaggcggaggttgcagtgagccaagatcacaccactgcactccagcctgggtgacagaggaagactctctcaaaaaaaaaaaaaaaacaaaactgggactcagatatttgtatgtcaacatttattgcagtattattcatagtagccaaaaggtggaaacaacttgggtccatcagcaaatgaatggagaaactaaatgtggtatatccataccagggaatactaatgagccattaaaaagaaatgaagggaagttacagtgagctgtgatcataccattacactacagtctgggcaacagagaaagaccctgtctcttttaatcccactacttgggaggctgaggcaagataatcgcttgaacctgggaggaggaggttgcagtgagccaagatcgcaccactgtactccagcctgggtgacagagcaagactccatttaaaaagaaagaaagtccgggcgcagtggctcacgcttgtaatcccagcactttgggaggctgaagtgagtgaatcacctgaggtcaggagttccagaccagcctgggcaatgtggtgaaacctcatttctactaaaaatagaaaaattagccgagcatggtggctcacacctgtaatcccagctactctggaggctgaggcaggagaatcactggaacctgggagacagaggttgcagtaagcagagattgccccactgcactccagcctaggtgacagagcgagactccatctccaaaaaaaaaggagtgaagttccaatgtagtttaccttgaaagcattatgctaagttaaacaagccagacataaaaggacaaatactgtgattccatttacacgaaatatctagcataggccagttcatggaaccagaaagaagaggttagcaagggctggggagatgggcagttaatttcttaataggaacagagtttctatttggatgatgaaaaagtttggaaatagatggtagtgttggttgtacagcattatgaatgtaactgataccactggattgtacacttaaaaatggttaaaatgggncgggcgcagtacgcctgtaatcccagcactttgggaggccgaggtggacggatcacaaggtcaggagattgagaccatcctggctaatgtggtgaaaacccatctctactaaaaatacaaaaaattggccgggtgaggtggcaggcgcctgtagtcccagctgctcgggaggctgaggcaggagaatgatgtgaacctgggaggcagagcttgcagtgagccgagattgcgccactgcactccagcctgagcgacagagcgagactccatctc

SEQ ID NO: 236786 - DNA, 311 bp, Homo sapiens
gctatagagttgtttgagctccttatatattctggttattaatcccttgtcagctagatagcttgcaaatattttctcccattctgtgggcagagcttgtactcttaaccacatattatttcaagtgtagtccatagacaagctgccagtgaacagcctaattgtcactggtccatgacagacaagaaatgtgcaaccagtcactaaacaaaccgcttgattcagccaagtttttcttaatatcaagactctcctaatgaaggaaaccaagtattaatgtacattttggcataagttcctgacatcttctc

SEQ ID NO: 236787 - DNA, 423 bp, Homo sapiens
accttgagctaatagagcttttaccactaaaagagcattattctcatgtcataatgagaataatcatttacatacttggcataataaatgcctaaaagacattttattttctgaatctatcgttttcttgctataatggggatattgtaaattatgcatttgtattaatggtatttcttaaagcaatctatgtaactgtaaactaaaccaatctacaaactattgtaggcatctgtaaattctgtcgtaggtattataaaccttgttgaagtcttaatcagcagattatgttgtgaatgtatttgtacattgttaaaatagtttttaagattatttgtttaattgaataagtgtcttattagagtgatagctttgaaggtgcaaaactttatatttgtataaaattctactgtttacaaggca

SEQ ID NO: 236788 - DNA, 675 bp, Homo sapiens
gctacatgatcatctatattcataaaagataatagtctgtagtgttttggggatatatttgtctggtttgggtatcaggttaattaatactggcctcatacagttgtcatttttcttccttttctggtttcttggaagagtttgtgaagaactagtatatactagtattaattcttcaagtgcttcttagaatttgcttatgaagccatctaggcctggcttttgttaactagatttttttttttttttttttgagacagggtctcactctgtcgcctaggctggagtgcaacggtgtgatctcggctcactgcaacctccacctctcaggctcaggcgatcctcacacctcagcctcccaaatagcagggactaaaggcatgtgtgacatcatgcccggctagttttggtagttttttgtagagacggggttttgtcatgttacccaggctggtatcaaatttctggactcaagcgatctgcctgccttggccctcccaaagtgctgggattataggcatgagccactgtgcccagcctgttaactagtttttttttattattattaataattcagtctccacttgttatagggtatattcagatagtctggggtttttttttaagtcatttttagtaatttgtgtctgtctacagagttcccttttttgatta

SEQ ID NO: 236789 - DNA, 410 bp, Homo sapiens
ctgtaatcccagctactcaggaggctgaggcaggagaattgcttgaacctgggaggcagaggttgcagtgagccaagatcgccccactgcactccagcctgggcaacagggcaagactcctcaaaaaaaaaaaaaaaaagatatggctagaggggtgaagaaaaataccaaggcagaggcctagtccaaagtaaaatgtttaagggatcttaacaatattgtaatgatcagttgcttaactgtgtgacagaaatactaatagtaatttgagtaacatgacaaaacatacaacgcatttacctaaatacagctctcaatctttataacttgtgacatgtataaggcagatattttgccttgttttactgatgaaagaaagagaataaacatgtcattcttatttcactgaa

SEQ ID NO: 236790 - DNA, 579 bp, Homo sapiens
ggcgttaagctctctcactctatccctttttaaagacaagaaaaaaactttcgttggcgaaggtggtacttttttcttttggaatgtctgagctcagagcttcccataagaggtattgcgattcaatactgtacagtcaaggtgaagttccactaagattatgggaccgtggcatattctacggaagataccagggttccttggcgctctgttcattgccagggtggtctgctgaaagccggcagtttcccaccctcagactccttggagctctttaaatgacggtctgcctggtgtttctcagcggtacacctgtgagtgctctgttatcatggaaatggtaacccatgcaggtagggctcatgccaaccagactgtggtggggtgtgtgtgtgtttgtgtgtgtttatacatgcgcgtgcgtgtgaacgtgtgtgtttggagtttccttttgacaggtaatctttggatgtcaaagggatacagttatttgtctggcagtgtcagggcaatctgagtttctcgagtaactaggaggaggtaatctccagggaagcctttttgtgctcttgactgtct

SEQ ID NO: 236791 - DNA, 1683 bp, Homo sapiens
gacttccgctgctggcctggggcttcccagccgtcttggcgttgtcctctccaacccccgccgctccgcgtagaacgccgctctcaggctgccgtcaagctcccgcggcactctcctaggtggcccgacgagacccagagtgacccgcgggacgcctgtatcgaccgcgtcctcttcccaccagcgtgggattcggttgaacgtggagtccccagcaatcttcagtctctcaccagggccagggactcgtctggggcgcgggggaaagaagcgtggcggggctgtagatgccgcgtgagtaggatgcagattgcaccgctggagcgcttgacaaccaaccgagcgttggcttagttttgttttcccgcacagcaagctctctgtctttcagaggaaggtaaaggtggtgaaagctctaaactaaaattgtatcgaaatggctgcagaaatcgactttctgagagagcaaaatcgaagactaaatgaagattttaggcggtatcaaatggaaagtttttccaaatattcatctgtacagaaagctgtctgccaaggagaaggagacgacacatttgaaaacctagtatttgaccaaagctttttagctcctcttgttactgagtatgataaacacctaggagaactaaatgggcagctgaaatattaccaggcataacgaggaccttggaaaagttcacctttcaaaccaaatttatagttagaatttgctattctgatctcctagaccaagcttccttgatcttctcggttgaaagagagagaaaaaggctggcagaactgcctgttccacctggcccttgcgaaagtgtactccaggataagcttctctcctttagcctaggaagcacaatcaagactaatacacaatcatgaattagttaccgttttaagtgagattttgcatgcttttacatgtaaattcagggttttgtgtgtgtgtgtgtgtgtgtgtgtgtgcgcgcgcgcacactctccatttgctcattcacacttactgagagttgactacttattttttgctattttgcttttactcatattttcgccaactttaaatgctttcttttcttttgaaatcctaacatctttttactccttcagagaacgttaatcagaccttcatttaattccctttctggtgtgcattttattctgccttgtattttagttaggattttttttaaccatctttcctactatttttcaatgagcatgtctgtttaccttagcgccttgtatggtacggagagtttagatagttaatgaaggtggtgaatcagaaactgaatgaatgactgctaaaaaagacctccattttcttctttactgttagcattttaccttttgaaatactagaaaaatatacatacttatatgggcttcacctaaactgaggtgaattaactaagatatacattcaagatacaggaaccatctggtatttgttatagtgacatactccagaatatctttcatctgtttttcacaactacaagtcataggaattacatttataaacatttctcaccatgttacataaaatatttctattttatttatattctacttaaaatgaatgttttattgtgttctgtttattagtaaattatccatattaattatccctttgttataaataaagaataagtctttcttatctgt

SEQ ID NO: 236792 - DNA, 896 bp, Homo sapiens
gacttccgctgctggcctggggcttcccagccgtcttggcgttgtcctctccaacccccgccgctccgcgtagaacgccgctctcaggctgccgtcaagctcccgcggcactctcctaggtggcccgacgagacccagagtgacccgcgggacgcctgtatcgaccgcgtcctcttcccaccagcgtgggattcggttgaacgtggagtccccagcaatcttcagtctctcaccagggccagggactcgtctggggcgcgggggaaagaagcgtggcggggctgtagatgccgcgtgagtaggatgcagattgcaccgctggagcgcttgacaaccaaccgagcgttggcttagttttgttttcccgcacagcaagctctctgtctttcagaggaaggtaaaggtggtgaaagctctaaactaaaattgtatcgaaatggctgcagaaatcgactttctgagagagcaaaatcgaagactaaatgaagattttaggcggtatcaaatggaaagtttttccaaatattcatctgtacagaaagctgtctgccaaggagaaggagacgacacatttgaaaacctagtatttgaccaaagctttttagctcctcttgttactgagtatgataaacacctaggagaactaaatgggcagctgaaatattaccagaaacaggtgggtgagatgaaattacaacttgaaaatgtcatcaaggaaaatgaaagagtcttgctctgtctcccaggctggagtgcagtggtgcgatctcggctcactgcaagctccgcctcccggattcgtgccattctcctgcctcagcctccccagtagctgggactacaggtgcccgtcaccacgcccatctaattttttttgtattttcagtagagacggg

SEQ ID NO: 236793 - DNA, 1610 bp, Homo sapiens
gacttccgctgctggcctggggcttcccagccgtcttggcgttgtcctctccaacccccgccgctccgcgtagaacgccgctctcaggctgccgtcaagctcccgcggcactctcctaggtggcccgacgagacccagagtgacccgcgggacgcctgtatcgaccgcgtcctcttcccaccagcgtgggattcggttgaacgtggagtccccagcaatcttcagtctctcaccagggccagggactcgtctggggcgcgggggaaagaagcgtggcggggctgtagatgccgcgtgagtaggatgcagattgcaccgctggagcgcttgacaaccaaccgagcgttggcttagttttgttttcccgcacagcaagctctctgtctttcagaggaagatcgaagactaaatgaagattttaggcggtatcaaatggaaagtttttccaaatattcatctgtacagaaagctgtctgccaaggagaaggagacgacacatttgaaaacctagtatttgaccaaagctttttagctcctcttgttactgagtatgataaacacctaggagaactaaatgggcagctgaaatattaccaggcataacgaggaccttggaaaagttcacctttcaaaccaaatttatagttagaatttgctattctgatctcctagaccaagcttccttgatcttctcggttgaaagagagagaaaaaggctggcagaactgcctgttccacctggcccttgcgaaagtgtactccaggataagcttctctcctttagcctaggaagcacaatcaagactaatacacaatcatgaattagttaccgttttaagtgagattttgcatgcttttacatgtaaattcagggttttgtgtgtgtgtgtgtgtgtgtgtgtgtgcgcgcgcgcacactctccatttgctcattcacacttactgagagttgactacttattttttgctattttgcttttactcatattttcgccaactttaaatgctttcttttcttttgaaatcctaacatctttttactccttcagagaacgttaatcagaccttcatttaattccctttctggtgtgcattttattctgccttgtattttagttaggattttttttaaccatctttcctactatttttcaatgagcatgtctgtttaccttagcgccttgtatggtacggagagtttagatagttaatgaaggtggtgaatcagaaactgaatgaatgactgctaaaaaagacctccattttcttctttactgttagcattttaccttttgaaatactagaaaaatatacatacttatatgggcttcacctaaactgaggtgaattaactaagatatacattcaagatacaggaaccatctggtatttgttatagtgacatactccagaatatctttcatctgtttttcacaactacaagtcataggaattacatttataaacatttctcaccatgttacataaaatatttctattttatttatattctacttaaaatgaatgttttattgtgttctgtttattagtaaattatccatattaattatccctttgttataaataaagaataagtctttcttatctgt

SEQ ID NO: 236794 - DNA, 646 bp, Homo sapiens
ttgagacaaagtctctctctgtcccccaggctggagtgcagtggcactatctcggctcactgcaagctctgcctcctgggttcatgccattctcctgcctcagcctcctgatcacttttatatatactaggaaaccaaaaagttcatgtgactcactttattgtggtggtctggaactgaacccatggtatctctgaggtatggtaggctcccggaaccctgctgaagtacaggactgttcttcctcccatctctgctcctatatccacagctggactcctaactaatcagaagcttctctgttcctgagatgggcaccatttaccaacactgaattccttaggggtgggagaaaagaaaacctttaaatctatgtgagtcctttaaaataacgtgggaaaacgtccttcctggagaagcaaatatttatgcacataattaactaaggaggtagagtgttctttccaaatcttaagcaaaacttggtggaaaaaaaacagacctgcttatgaaatggcctctcacagacactggaaggggccacacgtctgaatcagctcatgaatcctctccctattaaaaatataccactcatctgggctaacccaagacttttctggtacctcactccctactcctcatttac

SEQ ID NO: 236795 - DNA, 448 bp, Homo sapiens
ggtctgatgagcttagcatagtgcctggcacaagtaggtgctcaatattttatactcatttttcttggccctataatattccagtatacgagactttgcagttagttcatcccatcccatatcattcattcgttcttgatactcccagtggttctagggggtctaaagatgcagcaatggtaagagtctccccgtcaactctccctgctaatccaagcagcccaaatgaggttaattttctctgttgggggttgagaatgcagactcctgtgtcagaacaggctcaggttcaaatcccgtggccttaggcaaaatgactttcccacattgagcctccttttcctcttctgtgaaatgggagcattcaagccagcctggaagggagatggaaaagctgcgtgcgcagcgccaggcccctggcaggctctcagcaggtgtttcccctggc

SEQ ID NO: 236796 - DNA, 597 bp, Homo sapiens
aagtatcaatggctctccctcactttaacaaataatttggccaaatttctctcactaatcttaaattcttccaggtctcattttaacaagcaccagttgaaataatgggtattatgaatatatttaataataaaaaatctgtcaaaataattctgaaaagttttcacattctttagagtcgattactatacataatacaagtacctgcccaaaagtatgtttgttctcctaaaccaggttattttcctcaatttattaaactggattcttatagaaagattacaagggtttgaataggcaagaactgcaaagttgtgcatacttacagaaatttagggaaacacacaaagaatgaatgaatgcaaagacacacaaaaccaggtactttactgcaggtcttggtgtttttttcagttaaacaaatcttaaatccccaaagccaggtgaaccattaaacctcaataatgtaacacattatctaaatactagaattcctaaagggaacagtaggtctgaatttgtagtcttagatcagaaagtaaagcgaaggaagacaaactggagcatggtatatacttgcgtgatttccactatggg

SEQ ID NO: 236797 - DNA, 901 bp, Homo sapiens
ggcaatccggccctccagagaccgttcagctatcttgagccgctagagctaggagaaaaatgcagacgcgaggagacgtgggggattgctcttccttgtttgatgtgggagaaaaagcgactggggcttgctggacccgctcccctgtgcggtgacatggcacctcccttccgaccgttggccgggatagctttcccggaggtcgcgtcccccagcggaggcggcgggaatcgcggaggttttgtgctgcggctggggtctttctggccgtcccgcctctagatgccgggtggcagggagccggtggcggtcggccatgtgaaggtggccatcttggccggccagcgagggctcctcacggccttccttcggcgtccctgcccggctcgttgccggccccgggatatctgaggggcgcaggcccaccttctagtcgtttcctggtgaatggctctgctgaagatggccggaaagcagattaatgaaggtgctgccatcgatttaaacaatcgccctcctgcccgctcccctgcgctaaagtttctgagggatcctcacccttcgtggttcgtggacttaaaagtggaggcagcgctccagcctttccctccagagagaaaggaggccgctcccaagtccgtccttgccccgtggccttcctgttcctttgaagggggggggaatcgatgtttcaatcctctgttcaggagaatatggaacgaacatttcttttttggtgggtgggggctattcgttcccttgaatgtgcttaagcagatctcttgacggcgtggaatgggctgtttcatgaagctttcactttaaaatgtccacctgcgtttgtcccagttttgcccaataaaggaattacagggaaaaagagcgaacaaaacttgagcca

SEQ ID NO: 236798 - DNA, 391 bp, Homo sapiens
agttgctattgtataaccgtcccaatctgttttgaataaagagaagaaagtgtgttatggggcaggagcagtcatggaaaccaaaaagggcgacatcaggctgtgcgcgatggctcacgcctataatcccagcactttgggaggctgacgtgggcggatcacctgaggtcaggagtttgagaccagcctggccaacatggtgaaacctcgtttctactaaaaatacaaaaatcagctgggcctggtgacacatgcctataatcccagctactcgaaaggccgaggcaggagaatcacttgaacccggaagacagaggttgaagtgaggcagtgagcagagattgtgccaccgcactccagcctgggcaacagagcaagactccctctcaaa

SEQ ID NO: 236799 - DNA, 459 bp, Homo sapiens
gtgacaattgttaaaaagaattggtcttctacagatttccaagcctttaattttcattttccataaaggattttaaaacttcacagtcttagctgctgttggctaactcatctgcagtgaagtctatttaaaagtactaacaactcaaagctatgtttcatcccaaagcacgttatgaaaacaggaattgcaacagaaatgtaattcaaagacttttattgacttttcatgtttaatggttattattctggtttgtttcgagtaattttaataaccacagtttaattacaaaattcagactaattcttttgttcccatgccaacaaaatacatttgttcccagacagctggtatgatgcatcattctaagacttgttatgagagatagaaccacatgtaattttggccacatgttattctccgtgacagtttgaacacttgcctctgttttctgaaaaa

SEQ ID NO: 236800 - DNA, 292 bp, Homo sapiens
gcgatctcggctcactgcaaccaccgcctcctgggttcaggtgattctcctgcctcagcctcctgagtagttgggattacaggcgcgtgccaccacacccggctaatatttatatttttagtagagatggggtttggccacgttggccatgttgtgcccagccaatgtcatctgtttctttttactttttaaaatatgtgggtcttgaacatttacacacgtgttggtcaacatccaggtgagaaaagacggaacacacaagctgtcagggaaatgcaaatcaaaaccatcg

SEQ ID NO: 236801 - DNA, 446 bp, Homo sapiens
ggggagctgtctgatctgaattccgcagggcagtcttgcccatcatagagggccagatcaacctgagcaccctttggtctgctggcctctcctggggccccagcctggccatgcctgcttgcagggcagtctcaggtgccctgggggcctgcatcataacttctgcactggcagacttgcctgaccagtggagagctccagcatggcggagcctagaggagggtccccatagggaccttctccccatactgcggcttcccctaggcccatggcaacttctcacatctccttgctgacacatgtctttgtgggcaggttttgccatccttgccccgccagcacacaggagtgcagtctgccctcccagcttcatcatctgccattgcagatgaagctttggtgggcagaaagccagccagccccaccatcaccttacccttgtgcta

SEQ ID NO: 236802 - DNA, 478 bp, Homo sapiens
cagatacgtagagatatggagataaactaaacagccactctggctgggtttgttttaccaaacaaacatagcaagtccgcaaacatttgctggtgtgtggtatatgccaggcactatgttagagtcccaagatccaaagatatatgagctcacttccagatgagctcacttccagatgaaaaggctttcactgtttagtagtaaaatgcacatacatccacatacacacacatctgatatgctcttgccatgtctctgacaaggtctgtgtcagcatctgaggtttctcattagagaatatcagggtgagatgggccatgacacagcctgtaactgcttattccttagtgcactggctgcaaaaccttgggctcaaggttgctggggtcacttggcaaagtaggcaaggcccaaggagcattctctcttcttgctttggttattttattttattttttcaatgctttaggggagaccg

SEQ ID NO: 236803 - DNA, 377 bp, Homo sapiens
gccccaagtgacttggtcggtgctcccttccctgcagcctgtgtaactgcttcagtctccggtggcctccccgcgacccaccacgaccccgatcacggatgccctcctactggccccggacgacccccttccccttaggaaccccacgttcctccaaccagaaaaacaattccacagaaatgcatcgagagcctactaagcgcaagctcccactgtgagcggcgtggtctgcacggggctcgcggcccgggctagcagtccttttcccggccagcccatcccagccagaggccggcgctgcctccgccgcggtgcgggggcgacagccgggggcggaatgcgccgggcgcgggcactggggcaccgagaggcggccg

SEQ ID NO: 236804 - DNA, 454 bp, Homo sapiens
ccaattattttgtctaattatttactaagagagacatgttctatttgctactatggtggtagattttccattttccctttagttctgtcaattgtaggtgactaaaagttgtaattattgacccctggacatttatgcggactctctttctttctttgggcctagaaatggtttttaagtttatttgttgtaatttgcccaacagtcagtgattctgtagagagagtacttttcataaagtatactactcattattgttttttagccactatgcatctgagggtttgagttaatttttaaaatatgtaaatttaattactatggatactaatatcgaacatcctaggtttacgtgcttggtaaatgcttactgaataaaatcctgaacatttgtcttaggaaaataaaaatattttttgagctgttcttaaaaataagaattgcgacaatttat

SEQ ID NO: 236805 - DNA, 175 bp, Homo sapiens
ttatgcattcattcattccacaaagatttattgaatgcctgctatgtgttaggcactgtgctacagatggacacagatgaaaaataactcctatacccaaggaatatacgatatatttggggggaaagggaggaatctgtatgtgaataagagcaataaaaggctgcatctgttg

SEQ ID NO: 236806 - DNA, 370 bp, Homo sapiens
gacgtcatggcgggcacctgtggtcccagctacttgggaggctgaggcaccagaatcacttgaacctgggaagcagaggttgcagtgagctgagatcacaccactgcactccagcctgggtgacagagcgagatcccccatctcaaaaagaaataataaattattgttttctaaaccactaaattttagggttggtttgtgatacagcaacagatagccaaaatactagcagaaaagactctttggcttttgtcttatttctgcctggaatatgaacacaattcttgggatgcagccaccatcctgcctccacgaagaagaaaaccgcccataatttctacagcagcctgaatagctgacccctggactt

SEQ ID NO: 236807 - DNA, 364 bp, Homo sapiens
gttttaagaaaaatacattattttaggatgtaaacacaggtaatctttctttgaaagcagcttataaaataaatctgaggctgggcatggtggctcatgcctgtattcccagcacttgggatgccaaggcgggtgggtcacaaggtcaggagttcaagaccagcctggccaatatggtgtgaaaccctgtctccgctaaaaatacaaaaattagccgggtgtgttgatgggtgcctgtaatcccagctacctgagaggctgaggcaggagaattgcttgaacccgggagatggatgttgcagtgagtcgagatcccgccactgctgtccagcctgggttacagagctagattccgtctcgaaag

SEQ ID NO: 236808 - DNA, 577 bp, Homo sapiens
ccactcggcaggctgaggcaggagaatcacttgaacccggaaggaggagattgcatgagccaagattgcaccactgcactacagcctgggtgacagagagagactctgactcaaaaaaaaaaaaaaaaaaaaaagaaaagaaaaaagaaacgtaacatggtactactcatgttacgattggcttcagtcatctacttcagtggattcaactctctgcttgtagataaattacttccatttcctgagaacataatctgcctattttttaggccagtggtctccaaattattttgattacacattcctggccaggcgtggtggctcacacttgtaatcccagcactttgggaggccaaggcaggtggataccttgaaccctggagtttgaggctagcctgggcagcatagcaaaatcctgtctctacagaaaaatacaaaaattagcctataatcccagctactcggaaggctgaggtgggaggatcgcttgagcccaggatgtggaggttgcagtgagccaagattgtgccactgcactccagcctgagcaacagaatgagaccctgtctcaaaaaaa

SEQ ID NO: 236809 - DNA, 159 bp, Homo sapiens
agttgagaatttgctaattcagtcatcatggtgactttacagaatctaactaccaagaattacaaaaattgactgtatttagcttttccagtctcctttatacaggtagacaggagaggtgttagggaatgagtgcttcgttagtcaacctacaagtgt

SEQ ID NO: 236810 - DNA, 453 bp, Homo sapiens
catgagtagacccatggtcattaccaaatctggtcatttgggtactattgtaggtttaaccctagggcaatattctcgaagtttagttcagggatccatggggttccccaagactttctggagcacacagcttcttcaaatctactttcataatgatgctaagttatttgttttttcagtctcattgtctcattagtatatagtggcactgtccagatgctctatgctgtattgtgtcataaaagatgaatatagaaaaagaaaaaagaatctagctgtattctattaagctagacattaaacagatttacaaaatgtaaaataatgtcattcttctaatttttttttgctttgggaaatacagttatttttcattaaaaacatatttatgttatcacaaagtgaatatgttattttttatgaatgaaaaataaatatttaaaaaatatttta

SEQ ID NO: 236811 - DNA, 448 bp, Homo sapiens
gagccagccaacctatgtttgcatcttcaaagtcatcctccgaactgtccatctcactctcccaggtctcatcatggtcgctcttgctgtttgtttttaatttgttcattcactcaaccaatatttagtgaaggctccctcagcataatcacacactgttctgggaactaaggattcagcagtgatccagccagacccaaacccaccagagaaacagagatggggaagagaggagggaggcatgggccagattgtaggtgatcccagaaaaatgaagcaggaaagggaatagtgagggctgagccagaggtcagggagagaccaggagacagactagagggctgcaaaggaacaggccctgtgatatcaagtggagagagtgttcctgacagaaggaacagccagtgcaggggccctgtcaagaaggcttgtgaaagacttcgaaatg

SEQ ID NO: 236812 - DNA, 544 bp, Homo sapiens
  misc_feature (375)..(375): n is a, c, g, or t
  misc_feature (378)..(378): n is a, c, g, or t
  misc_feature (380)..(380): n is a, c, g, or t
  misc_feature (384)..(384): n is a, c, g, or t
  misc_feature (386)..(386): n is a, c, g, or t
  misc_feature (393)..(393): n is a, c, g, or t
  misc_feature (516)..(516): n is a, c, g, or t
agctcactccatacaaaagaaggattagaagtaggatatacagttagcaatcagcacccacgggctctgcatccatgggttcaaccacgtgcagattgaaaaggcagttaggcctatgatcattgcatctctactgaaaaatgtacagacttgatgttattccccaaacgatacagtaaaacaactgtttccatagcatttacatcacgttaggtattataggcagtctagagatggtttaagtacacggagtatgtgtgtcagtgacatgcaaacaagacaccgttttgtataagggacttgagcatctgtggattttggtaaaaaaattcatggggttcctggaagcaatccctagcagataccaagggatgnctnantttnanataagancaatatctaagaactctccagctcagtttgataaaatattacttaagcctactatgtaccaagcactttaaagtgctgagtgttaaaggcttgcttaagagtaatgtgtatagtaaaatcccnttaaatcaaagccaaacatcaaagaaaa

SEQ ID NO: 236813 - DNA, 113 bp, Homo sapiens
tgaaggcctgggtcaggaccctgctctcccagcgcagttcccagctgtctccctgctcctctactggtgatgggctaataaagctgactttctggttgatgcaaaaaaaaaaa

SEQ ID NO: 236814 - DNA, 764 bp, Homo sapiens
cagggtctcactctcgcccaggttggagtgcagtggtatgatctcagctcacttcagcctcgatctcctgggctcaagtaatcctcccacctcagcctcccaagtagttgggtctacagtggtatgagcacaaaaggaggagatcactggagatatattaaagtatggagaccaccatctgtgtgaagacagaaggacaaaccatatggcatatggaggtaaagactaccgatggcttatggattatgcaagtgattgatatttgaaataaaaatctacattgagttatcaaagataatagtcacttccattgaagaataagcaaaacttccaaagacttcattaatatccacatcagtgatatttcaagagagactaactcagcagtgtcagctaatgaaagtgaatgaagaatgtgaagattaaaagatcgtatgaatcaagaattaatttgtgaatttcatgagtcataagtgcccctagtgttttcccaggcctcaccaaggctgtaggtacaaatggtagagttgccatcatgttccagccactcttggtccccatctgcatgtgccgggtgtctcctcaaattctctttcaagttgagtcctagcaggtatactttaccagttcaacaggcccactcaagaagattcaatcctaataacagatacagcttaagctaaagcttggacacctcaactcttgtataagacctcagtctttgtacctgttttgtactattaattaaacagtaaagtttcttt

SEQ ID NO: 236815 - DNA, 357 bp, Homo sapiens
cttccgtaaacgtatgttgaattagagaattttgtgaaccaggctgtcaagttgaaaatccacccaggccaggtaagtagaaatagaagccagttttaaccagagtagaggctgtaaagtttggatttggttttgtggaaatctctggttattgctcttcagagcactgtacccagggaataatatatttctaccctgttgagcagagtagatttccctgtaaagaaagattaaagaggctgggcgcggtggctcatgtctatagtcccagcactttgggaggccaaggcagaaggattgctagagcccaggagtttgagaccagcctggacaacatctcaagactctgtctctacc

SEQ ID NO: 236816 - DNA, 458 bp, Homo sapiens
gggtttatggtgaatgactgactttatatgcctgaggccctgagccatgctgtatttatttgaaccatgtggtatcaatttaaccagatacgtttattctaagatatgatttatgctgaatgcctggttttgttctagagggatcatggaaaggaagctgaatttgccaagttttgccacttgggcattgcatgcctatgtgattaaccaccaataaaaacctgggacatcaaagaataaataagctgctctaattgccaagaattcacatgtggttgtatgcagctttactgggagactgaagtgtatctgcatgtgattctgctgtgatggacacttgtaagtttgtgcctggagtctcctggactttgccctgagaatctttttcctttgttgatacgactctgcatccttttgttttaataaactgtaaacatgagtataattgcttctctgag

SEQ ID NO: 236817 - DNA, 306 bp, Homo sapiens
tgtctcttcttgggtctgtcatactttctttgttcttctttcctttcctgggatttctttcctgctttcaagcaactccaaactaagacattggagaaaggagacaactcactgttaggatcatcctgttagggatcttttcagggaagtccctgaagttttccggatgttggcttccttacccatgaaagagaaaggatatagcctgtgccagctgggcatggtggcttgagcctgtaatcccagcatttttgggcccaggggttcgagaccagcctgggcaacatggtgaaaccctgtctccac

SEQ ID NO: 236818 - DNA, 454 bp, Homo sapiens
ttctgcagacatcagccgagcatactgagatgagaaacgggttctgccttgcagatacccagcctgccaggagattcctacccagtggtggggtgggtcccataacccgagaccactcagagcccagggaccccagaagtggcaccagcctggcctagaggaggtaacaccaagccagggaggaaggtgaagggctcagtaccccctctggaggaaaattttgaggaaccttgtttgaggcggtcatttcctaagctagccttcagtctgagccccagccccagcttctggacttggacagtccctcctgtcatcagccatgggtggccagggcagcctcaagatggctgagggtttggggatgaccccaactccctctcccacagcagggtcaggaggctcactgggaggagtgaggtgggataaaacccagctccagacacaaaaaaaaaaa

SEQ ID NO: 236819 - DNA, 95 bp, Homo sapiens
gtatcaggaatctcttttagccagagtcactattaggaaaaagaaatacttgcaactgggaacttcactttcaggcttaaagctcctgcagagga

SEQ ID NO: 236820 - DNA, 2000 bp, Homo sapiens
  misc_feature (1587)..(1587): n is a, c, g, or t
  misc_feature (1604)..(1604): n is a, c, g, or t
  misc_feature (1611)..(1611): n is a, c, g, or t
  misc_feature (1614)..(1614): n is a, c, g, or t
  misc_feature (1622)..(1622): n is a, c, g, or t
  misc_feature (1626)..(1626): n is a, c, g, or t
  misc_feature (1633)..(1633): n is a, c, g, or t
  misc_feature (1645)..(1645): n is a, c, g, or t
  misc_feature (1653)..(1653): n is a, c, g, or t
  misc_feature (1663)..(1663): n is a, c, g, or t
  misc_feature (1667)..(1667): n is a, c, g, or t
  misc_feature (1683)..(1683): n is a, c, g, or t
  misc_feature (1689)..(1689): n is a, c, g, or t
  misc_feature (1691)..(1691): n is a, c, g, or t
  misc_feature (1708)..(1708): n is a, c, g, or t
  misc_feature (1713)..(1713): n is a, c, g, or t
  misc_feature (1718)..(1719): n is a, c, g, or t
  misc_feature (1721)..(1722): n is a, c, g, or t
gaagaatgtgataaaggacatgatgattagagaaaaatgttgtttcaatgttaaatgtgctgaagctgataatactgtggttttataagagaataaccatattcttaggaaataatctaagaagtgtttaagaataaaggaccatgattctactgtgtattggttcaaaaaaagattgtgtgtgtgtgtgtgtgtgtgtgtgtagaaagaggtaataaaagcaaacagtaaaatggtatcagtaggtgaataggtaaatctgggtaaaagtatatggtgtattctttgtactattcttgtgactgttgtgtaaggtttaaattatttccaaataaaaattttaaacaatttttaaagtttaaaaagttaaaatatagcacatctcaagaattttcttagtcaaccaattataacagaccatactctaggatcatcagttttggattatttcctttgatttgttgatgaagcactaaactgaaagcaataggaaattttctttatagctgtagtttctacctattgaaggccattagcttctattaggagattgtattgaattggatacatttatttttcacaaacaaaacaaagtctctaattttcacttgtacttctagctagatgaaagagagaaagtggccatgtgcggtggctcacacctgtaatcccagcactttgggaggccaaggtgggtggatcacctgaggtccggagttccatgccagcctggctaccaaggtgaaaccccatctctactaaaaatacaaaaattagccgggcatggtggcgcatgcctgtaatcccagctacttgggaggctgaggcagaagaatcacttgaacccaggaagcagagattgcagtgagccgagattgcaccactgccctctagcctgggcaacagagactccgtctcaaaaagaaaaagaaagagagaaagtgaatttgttcatacatatcctcaaagatctttacagctgccttacatttcagattgttacctaggtcttagtttagtttactataaccttttgacccaaaagtaggaatattgccagctaggaatcagtaatgctattgcaataaaaagggaaagtgttttaagtaaagcgctctaatttggaagcattaactcaatttatatattttgttcttgagacaaaaaaattgagtgaagttaaagttggcaaacaagatcagttttggcttttgcactaacctcaagaaaaataactactgtaatatcaaatgtcagacatttagtctgcaattgctaggtgtttaaccaaaataaaaataattttatttgttgaagtttaaagaaagaaaatataaaaatcagaaacagaacttttgctcatggccatataacaataaatagaaagtttggtgatggtgagttttttctcctttaaaatttttcattatggcagggcacagtggctcatgcctgtaatcccagcactttgggatcgcttgatcccaggagtttgagaccagtctgggcaacatggagaaaccccatctgtaccaaaaatacaaaaattagctgggcatagtggcgcacacctgtgatccctgctantcgggaggctgaggcangagaatngcntgaacccnggangcggagnttgcagtgagcngagattgngccattgcantccngcctgggcgacagagngagacncngtctcaaaaaaaaaaanaaaanaaaannanntaaggaaagagcctgtaatcccagcactttggcaggccaaggcaagaggactgcttgatcccagaatttcacaaccagcctgggcaacatagaccttatctcaaaaaaaaattaaaaagtagccaggtgtggcacacgcctgtagtcccagctacttgagaggctgaggtgggaggatcacttgaacttgggaagtcaaggctgcattgagctgtgatcaggcccctgtactccagcctgggtgacagtgagaccctgtctcaaaaacaaaacaaagc

SEQ ID NO: 236821 - DNA, 409 bp, Homo sapiens
tttgtttaaatgtgtgttttaagttttgcttaatctgaattattttattaggtttttggttctcatgccagagtaaaagaaatgataaattcttttttcctcatttaacacatgtatataaaatactttgagtaacttcacatataaaaatatttagaagagtttaagctgggttttttgttttgtttggctttaaaaacaaaaaaagttacaggtgccagggataatatcttggctgcgtaacttgtatcttaccaataaaacttagtgcgttctgttttcctagaatttaagagttacaaatattgatgcttttagtgtggaatttatatttacaaaagtaattacttccagaaagttttctggctaagtcacctcttaaggagatccctgtaaaattcacccttta

SEQ ID NO: 236822 - DNA, 776 bp, Homo sapiens
atcatccatatcttggccagaaagaaaaagagcaaaatatggaaataatgtatataagactatattgtataaccttggcccactattcattagcaagggaaataaaataaggctcttctaaccaaaaagaagaaaggttttctcctgaggaaggtggaatatatatataatggataagggaaagccaatacctgccacaggatgccagtagaaaactcccagtaccaaactgtcatttttcaatggcccagaactattaaaacattttattaactgacttaaggaattttatttaaaaattttattaactgacttaaggaaaaaacactaccaattatacttctgcactatttcttaaagagtatttacagaataatctcacctcaatgttcatttatgaaaataagtaggaacccagagtgcagagatccactttaagaatgtggcactaagccaggcaacgcagcacacatctgtagtcccagctgctcaggaagctgaggtgggaggatctcatgagcctagaagtccgcggccagcctgggcaacatggcaagacccatctcaaaaaaaaaaataaaacaaaaaaactggcccagtgtggtggctcatacctataatcccagcactttgctgggctgaggtgggaggattacttgaggtcaggggagttggcgaccagcctgggcaagataatgttgcctgtctctacaaatatatacgtatatatatacatatataaaaatattttaaaataaaaatatattaaaaactag

SEQ ID NO: 236823 - DNA, 747 bp, Homo sapiens
tgcctttgtgtgctttctctctctcctgcttccaagtcaagatgtgctggcttctcctttgcccttctgtcattattgtaagtttcatgaggcctcggagccacgcttcctgtatagcctgcagaactgtgatcattccactcttctgctaatgtcatgttctggttcagggagtcctccagggatggccatacctttctctccaagagctttggcgaactctactccaatctgaacagacagaatgcaaacaaaaatctaaccaggttttgaagaagagttaaccacgttggagacataaggttactcaatgtgaagatgacaacaagggtgaagactttaatgatgatccacttccacttaaaaaataataaatatattttctcctccttatgatttttaacattttattttctctaatttgctgtaagaatatagtgtataatacatataacatgaaaaaatatgttaatcaactgtttatgttatcagtaaggttggcagtacactactagaagttaggattttggggagtcaaaatttacatgtgaatttttgactgcctgggggggtcagaccctataatccccaagttcaagaatcaactgtgtacctccttttctccatccattcatcatctgatggacatgtagaagttttgcttttttatcttaccttttattatatatttatatttaccatctctctaaaattgacttatgtgtgcttatgaatttaagattcatt

SEQ ID NO: 236824 - DNA, 573 bp, Homo sapiens
tgcctttgtgtgctttctctctctcctgcttccaagtcaagatgtgctggcttctcctttgcccttctgtcattattgtaagtttcatgaggcctcggagccacgcttcctgtatagcctgcagaactgttactcaatgtgaagatgacaacaagggtgaagactttaatgatgatccacttccacttaaaaaataataaatatattttctcctccttatgatttttaacattttattttctctaatttgctgtaagaatatagtgtataatacatataacatgaaaaaatatgttaatcaactgtttatgttatcagtaaggttggcagtacactactagaagttaggattttggggagtcaaaatttacatgtgaatttttgactgcctgggggggtcagaccctataatccccaagttcaagaatcaactgtgtacctccttttctccatccattcatcatctgatggacatgtagaagttttgcttttttatcttaccttttattatatatttatatttaccatctctctaaaattgacttatgtgtgcttatgaatttaagattcatt

SEQ ID NO: 236825 - DNA, 312 bp, Homo sapiens
ctccacacactccacccccgcctccaccttctgcggcaatgaagccacgccaccctagggggctcgggggccggatgctggcggggcgcgcactagagacacgccgcactggaagcagccctcggagtcccgtgagccagggagactggggtgcaccgcgccacgctgagtctcggtgtaaaagccgagagcgtgagcacctcctggccgaaagcacgcgaggcgctccttgcccaggaccccgcgcgccccctcagttcccgggcagctgtcggcgcgcactggctgacgcgagctctgctcccgcggccg

SEQ ID NO: 236826 - DNA, 511 bp, Homo sapiens
gagaagcttcttccttctttctgcttgaactgtcattgcttcttctccctctgtggggctatatctgaagaataggtgatattttatatacagaacagcatgagatttctccagaagcagaagaatagcaatgtccttagtgtggagtgaactagcacctgagtgatattcattacagaaatgcgtttccagaagggaccagaaatgtccccttaatggaaagaaattgctgctacgttaggatcaaagatgaaaggggaaggtaatgcgtgcttagaaggagagctttccatctcacacactgttcgtgttggctgcagaactggagggtgtcacaggcgtctaatggatatatgctccctgggcaccacacactgggcccttgaccactgctagagcatggaggaaggggtttggggggcatgatgaagaaaacctgacttgttgtattcattagtgcttccataagtcaactttcggtaaaaggctgcataataaatatgttaaatgg

SEQ ID NO: 236827 - DNA, 406 bp, Homo sapiens
aaaagctaaaaattgtaactgttaagttttgtagggagatacatcacaagggaggggaggttgcagaagggaccctatttccctctggagaagaggcagctgagctccagcagccagcctgccccctctagccctaggtaccctcggcatccacggccactcagccccagtagcctgcttggacagagcaagaaattccaggaaagagtaattctaggaagcaaattaagcaagttaagacactttgcagggggaaaaggaatctttcatcttcttctcaggttttcatgtttgaaacagaatgggagagataggagggtgtgtgttaaattaccctgttgcagctattttcaagttgtaagaaatgaacttgcaacacatagggctatttagacagtttatcaga

SEQ ID NO: 236828 - DNA, 418 bp, Homo sapiens
cagtatcattgcagggaagggaaaactgtcactaatacagatcttaggtttctttcttagatgcagtgacagttattggggtttgaaatacatcttctacacccttgccactcaaagtgaggtctgaggaaggccagcatccaaatccgtggggttctcttttgaagtgcagaatttcagctccatcttaagctcagtgatccaaaatctgcattgtaacaatgtctccaggtgattcctatgcacaatgaaatttgagaagtgttctactctagataagtagcttttaaacagtttggatcacttgctcccacctttaaaaaaagattttgagtatatagcctaatatgtgtacttatgaattgtgtagttgcttttctattaatattgcatatcattaaagcttcttgtagacaat

SEQ ID NO: 236829 - DNA, 501 bp, Homo sapiens
ccctttattttaagacttaaaactttattttaacttgtaaattcaaataaacggcaaacatttatcaaataccttaaggctgtgtcagagcatatatgtatcagattaccatttttaatcatagatttttcttttaactgtggataaacttaaaaagttattggtaacagtatatgcttatggaagaaaatatagaaaaacatgggctgggtgcagtggctcatgcctgcagtcccagcactttgggaggccaagttgggtggatcacttgaggtcaagagtttgagaccagcctgaccagtgtggtgaaaccccgtctctactgaaaatacaaaaaaaaaaattagctgggcacagtggctggtgcctgtcatcttaactacttgggaggctgagacacgagaatcgcttgaacctgggaggcagaggttccagtgagctgagattgaatcattgtactccagcatgggcgacagagtgagactccatctcaaaaaaaaa

SEQ ID NO: 236830 - DNA, 327 bp, Homo sapiens
atttggagagggcccagccatagatttacctggtgagtcacagagtagaacttgatatgagaaagcaggaccctatatctatcagcctaatggttctcagaataccaggtcatatccatcatttcttttcccaaatagctgtaacaggcatacctcgttttactgggcttcactttcttgtgttttggagatggtatgtctttacaaactgaaagtttgtagaaacctgcattgagtaagtctaccagtgccattttttcaacaacatgtgctcacttcgtgtctctgtcacattttagtaattcttgcaatctttcaaaagtattt

SEQ ID NO: 236831 - DNA, 407 bp, Homo sapiens
taatttccaggatgtgacaggccttttgtaatctgtaatcactttgagatggaccctgttgaagccacttttaaactgtagttgagaatcacataaaatagctgtgttaaaaacatatttttaggggaaagatggtcaaatcagacattctttcaagcagtgtactcttccacccagcacatttttttatgaaagtccttttcagatattttataccaaccaagagctttttgttgaactctgacagactctgtggtctgtgggtctggcatgtattcaaaaatgatgcttagcacacagtgatgcaacggaaatgcccttatcctaagctgtgcacgctctaatcctagcaaggaggaaacaatagacaaggggtatatggttttctttataatgtaactaaccta

SEQ ID NO: 236832 - DNA, 620 bp, Homo sapiens
agaataaaataccagtcttttatcttacagtaaattcttcaaaaaccatatactctaacaattaattatttctctggagaaagggacaggcctttcccctcgaagacagcttggtagtctccgagtcttaattatgacagataaaacataatttatagtagtccagggcttacagaaaaatgacatcatagtcgaggttctttgattcttgaagtgacctgtcagtagtcagggctctgggaggagtgccccagacaatcaccaccaggcccaaaagagtcaggacagtccctcttcctgcggagacatgccccatgcacagagctactataatacaaacggcaaaatatgtatgtatacagctgatgctcggacaggactcccccaaaacttaactgctaataccctactgttgaatggaagtcttaatgataacataaacattcaactaacacatattgtgtatgttacccatattatacactgtattcttacagtaaaataaactagaaaaagttattaagacaatcctaaggacgtgaaaatctatttactattcattaagtggaaatggatcatcatgaaggtcttcatcatctccatggtgagtaggctgggga

SEQ ID NO: 236833 - DNA, 1647 bp, Homo sapiens
ttctttaaaaataaaaacaaaacttgccaaaaactcatcataaggaacaaaagcaacagattctccagctgtggccctttaccaaaagctctggcccaagcttctacacagcaaagctgctacactccgtggactcctctctccatcagactgccactgattttgttttagaagcatacgtaggaagagccttggctttgagggacctgctgcctcccctgtgactctgtattggtaagcacagaagatcctcagatcctccgagaagttctcagcagacatcctcagctccaggcctcccttcttctccaccctgctcagcatgaacctagagctggaggcagctagccatgtctggctgcctccctgggtcctcatatgatactgagccaggtctccagggaacactgttcacatggacagagtctgaactcagtagtgatgctcctgagtgggttccacaggaaacacaccggctattccaaaggcctgctggccacaaagccttctaacaataataagtactagcagtatcactgctgtttattgcttcctgtcaggtgggaactaagtccattagcccaagttcagtagccctgttttacaaatgcagaaacaggcttagaacaattaagaaacttgatcaagaccacacaattattaagggatagagtcaagaatttcactcaggtctccctgactccaaagcctgtgctcttaaccactatagatgtctctaatgcttcggaggggaggccaccatgacccccacttacagtcaccagctgggccccggccgcccagagatcatgcagagtgaacagaactgatttccagcactgctgttccatggctgtgtgactttcgaccgtctcatttcccctctgtttctcagttccctcttatgaaagatggaggacactatacctgccatgcctcagtgggacaagatcatctataatgttctgcatggaagcaccatgaaaggcattaccagcttgaagaaaaccagtgtctggaatgaggcgacaccagtatgtagggagagcaatcgggaagcgataagaaggagattcactaggggtctgctgggccgcctgctgcagagaacgcctctagaatcctgcactcccgtcttccttcctgcagctcaaagctggcccaccctggagatggtaccagctggggctctccttccgggcctcagtgagggaggggaaggagccaagaatgggtcagtaaccacaggattctttgagttcacagagagtctgcctgctgtgggcctccaaagagttctgccagttcttcccaagtcagcttgggcttaaagtccttcctgcaccaactgggaaggagctggagaagctccacctgggatgggaagctcgacctgggatgggaagctcgacccgggatgggaagctcgacccaggatgggaagcctactttgtgttgaacttcctattttgtcactctctgcaggcccaatgaccagagaattttctctgccctttctggcaagattagtggcttcccctcacccactctacccccacctcctcattacagaacaaaggaacctggcttcttcccgccagtccagagagggttcctaattggctttccattaaagagaaaatagac

SEQ ID NO: 236834 - DNA, 409 bp, Homo sapiens
gagacggggtttcaccgtgttagccaggatggtctcgatctcctgacctcgtgatccaccagtctcggcctcccaaagtgctgggattacaggcatgagccaccgtgcctggccagcttctacttatgtgtgcttaatgtaggtcccttccaccataagtttgcgcctggtgaaaaaaaagaaaaacaatatatgcacatgtgcaagtctattcatgacacttctgagctcaaaatctctacagtgactttctcttgcttttaaagaaaaaaattgaactcacagccgagcatgctagctcatgcctataatccaaacactttgggaggctgaggcaggaggattgcttgagcccagaagtctgagaccagcctgagcaacatggtaagaccctgtttctacaaaaaat

SEQ ID NO: 236835 - DNA, 402 bp, Homo sapiens
tgctcttaggtttttagaccatatcaaaattctctctctacacacatgatttataagggaaagaaaagtttgcagtatgcctaaaatgttcctcaggttaattatatcttgttttgcatagttgaatgtttatggaagtcttagatagtgagtcactctgaaaccacagactcttttttaatagtaataatatggtgagttctataattcctagcatctagcacacaggtatgataaatgttttaattaagtgaataatcagcttcctgaatttttctactttgtaaatatgctctttgtgtgttgaatctatttacatatatatccaagcatttggcacaaggtaaaccaatgtggctcagattttaatgttattgtgaatcacttggggatcttgtttaa

SEQ ID NO: 236836 - DNA, 93 bp, Homo sapiens
gctctcttcctgcataacagtaacccgtgcttgctaagccagaatttgaatgcattcttttgcttatcagttgaaaatttcagttggtgtcac

SEQ ID NO: 236837 - DNA, 1320 bp, Homo sapiens
ttaatagattgaagatattattaaatacattctgcattaatattatatgtcctctttgaatccaagtggcaatacaatagaatttcattttataaataacacctttcaagcgaacaccacagggcacagtacataagaatcaaaatagaacacaaatgctgtaatcaaatgcagaccccaggaaggctgattaaaaaggcatgttgctactaagaacagccgacaggttaagtatagtgggtcatagcagaaaagccagcagaacagaagggcaaactaaaataaaatggacttgcctgcctgaatcacacggacttatgacattcctttgtcttcatctctttttgaactcaggaattgcaggggagaggggggtgtgcatgtgtgttggaggagagaactaaacatagggtcattaaatttatcctcagtactcacgcatagcacaaacaaaaggaaatcataaggataaccacctgcagctggcagagatgcctacagtgtgattgtgagacaacccaacatggcttgctttgctggataccactggctttaagaaaacacaactgtgaggtaacaagtagaccccttccataatagtgagaacagatagtgctgatggccagacataggtaaaaacggatgaatggtgagaaagatgttctgtggtcctgacctcagtatagtctactctctacaggactctcctcacccaattagcttttctgctctcagcctctcacaaccacgctccttgctaatgtcaggtgtttgtggttttaaactctacctgtaattatacagcaaaagcacctgttcccttcttaagggaattaggcaaaagtaggggaggtattttggaatatactctctccccatatgtaaaactagttctaacaatgatcacagtatcatagtttaccaaattggtcatttattgatgcttctctatttaatattaagagtagaacaatataggaccagaatcataagaaaaaatttctaaatatgtatttttctgaaaaacagtaacctatattttgctgggcacgtggctcatgcctgtaatcccagcactttgggaggccgaggcaggcggatcacgaggtcaggagttcaagaccagcctgaccaatatggtgaaaccctgtctctactaaaaatacaaaaattagctgggtgtggtggcacatgtctgtaatcccagctactcaagaggctgaggcaggagaattgcttgaacccggaaggcagaggttgcagtgagccaagattgcaccactgcactccagcctgggcaacagagcaagacgccatctc

SEQ ID NO: 236838 - DNA, 695 bp, Homo sapiens
ccaccctgggccctacctacaaacttacctgattctgagcctgtttttaccttccattcaaaggaggagatacagctcttcctgttgcagcacacaccccatcactgcccatcttttcatacactcactccattgagtagccctttctgcattcggtttgaagtttcttctggagaacagtgaacatatgtcagtctttcctgtctaaaaatatatgtgtagtgagtgtgtgtaggtgggagtgtatctcttcatggactttgcatcctcagttttctccttctgtttacaaatagatgtcttggaaagatagctatgtgcggtccctgttccctcacttttcagtcactcctcacgtcactgctattcatttctagccctaacacatcgcttctctcacttccatgggatctcccttttctagagtttctacttccatgtttactcctctgctcctctgccagcttcttccctttcttaaatgcttttgttaccttgaatcccttgtcactgagtacattcttcctgggtggttgaataagcccattcactatgacagtttcagccacctttaccccccagccccagactaactaccacgcaaactccagatcatggtctgcagcttccttttgaacattttcatttgagtatccccagacttagcaaggctcacactcaacatattttaaacc

SEQ ID NO: 236839 - DNA, 471 bp, Homo sapiens
agactcaggtgaagtaatagtaatggagaaggaagtagatactaagaggctatctgtccaagaaatcagcctaaattttggaaaaacctttgatgagccaaactgtaatgcttcccatctttcttctggccaggatatccattaccaaaacttgacatgaacttctcattggagaatagagaagagccatgggtgaaggaattacaggattctaaagaaatgaaacaattacttgattccaagataggtaagtaattgttctttgatatactagtgggaaaaaaaaagaaaaatttaacctaaataaagagtttggaattctatttaggaatttctatgttcctgccactggtttaacataactcttcattttccttcactttcttttctccatggaacacaatatcatctgcagtttctatttcttctctcaggttttgagatcgggatagaaaatgaagaagatacttc

SEQ ID NO: 236840 - DNA, 482 bp, Homo sapiens
ggcaggccggcggggagtcccccggggcgcacggagcccgcgcgccctccgggaccctcccccgtccctgggccggacctgtgggcgccgggagtccgggcagcgttcggcgcgccgggccggggtggcgggcggccccgggaccccggcagctggagaaggagccggagcccggccgggatgagaaggtgacgccgccgggggcgccactcgctttgtgggggaagatgctcgcctactgcgtgcaggatgccaccgtggtggacgtggagaagcggaggaacccctccaagcactacgtatacataatcaatgtgacctggtctgactccacctcccagactatctaccggaggtacagcaagttctttgacctgcagatgcagcttttggataagtttcccattgaaggtggccagaaggaccccaagcaaaggatcatccccttcctcccaggcaagatcctcttccgaagaagccaa

SEQ ID NO: 236841 - DNA, 899 bp, Homo sapiens
tctgcctccctccacttttccccacctatgttttgaaaagtttctgtcaccatataatatttaagccataatttactaatttgctttttaaaaaactttgatggcaaattaaaaaaaaatcatttttatgtttctgatactaggtattaccacatgctaagtggatctaattccagtcaaaagcaaagaaaaagggccctttagttagctgttcagccttgtcttgggcaatgtatgactttcattagtttttgttgaaacagtgaagagtgggcagttccttcctcactgagcttcagtcaggaacccctgcctggacccagctaggccagggccagggagggatgtggcaggaggagcctccaaaaagctccagttgacctctctgtggggcatggtggcctggctacaggatggagttcaaactccttcctttctggctacctcaaatcctgtttgaagcaaggaaaaaataaacaaatgaaaaaacacttaaaaaaaaaaaaaagaaaaaaaacactttagttttgtatttaactctcaccatggtctagcctaacctactttctttgtgcccctgatgagtctgctgtctcagcttttaaaataggaaactgagaaaatatatacacacacatacgtgcctatacacacctatctataaatacatatacatgtaaatatacatatatacatatatatgtacacatgcacaaatgctcatatacatacatagatggaaacagtgcagaagagattactcaaagcaagtgtgcaaaggaaataaaagaattgccaaatctctgggctgcaggtacaagataaggaaccatctcaaaagcattctgcaattaatttgttccgcactttactcccactcttcctcctgtttaggctga

SEQ ID NO: 236842 - DNA, 516 bp, Homo sapiens
catgagctgccctgagctttggtcgttggggaggtggctcaaatggagccagcggctgtggttgacctgccttggggagcagggctgaggggcgaagaggacatgtggatatccagccagaatgccctctctccagaggacacacagctctggatttctacccccttgctatcctctctggccattttgaacctgtaccacctaatgtagaaaaggcccgcctccagtgcccttctttccaaaacagctacacaaatgcttctgaatgccctggatacgcagaccgagtggcagtctggctaaaggcccatccagcactattgtgcccaagagccttaccgggcattccctgaagccccctcataggcagtgatcctagaccaaactcttaaatagaatcacttttgtttcctagaagagatcaaagagtggttgcttcttactttgaagatgaaattataccaagttaggttttttgctatctattgatccaaaaaatatattcgtgcaattaaa

SEQ ID NO: 236843 - DNA, 714 bp, Homo sapiens
cagtgaagtattgaagtcccccactattattgtgttgccacctatctcatttattagatccagtaataattgttttataaatttggaacccctagtgttaggtgcatatatattaaggattgtgatactttcctgttagactaatccttttgtcattatatagtgttcctctttgtctttttttttttaaactgttgttgctttaaaggctgttttgtctgatataacaatagctactcctgctcacttttggcttccatttgcatgaaatatttccacccctttaccttcagtttatgtgagtccttatgtgttaggcattctcttgaagacagcagatactcgattggtggatttttacccattctgccaatctgtatcttttaagtggagcatttagattattgacattcaacattagcattgagatgtgaggtactattttattcatcatgcaggttgttgccttaataccttgttttttccatttcatagtgttgttgaagagtgatggctaaatgtatccagcataactcacctacacttagttttctagataattgagttgggtggccccattttaataatgacaaacatgaaattctaaatgcaatatcatcttggagagattatttgattttttcctataggaattgtctccaaactgctttctagacagcctcacaaagcatctagaatgtataaatttgactt

SEQ ID NO: 236844 - DNA, 2620 bp, Homo sapiens
acacacccgggagacaccgcgaaggcagagcagcgttctcagcacagaccttgtgggcactgcctcgctttgggactactcggagccgcatcaatggtgaataaaatccttcctgtttgcagcccttaataatcagggtcagagaccagttagaagtgttcagtgtggaaaacgggaaaccaaaagcccctctgaatcctacccaccgaggttctccccagccaaggcgaggcggccgcagtgcgagatccacaccgcagcctcggaagacaagcgggcagaaatcccatgaggggcagttgaggtttgaggaaggcgaggtgaggcacctgtggcagaaaaaaaaaaaaaccgcaccacggagaagcagagcctgggtccccaacggacaaaagtgtcttcccatcagcccttgcgctgggcccaggtgaccctggcattcctggttcgagaccagggtgcgcttcaggccgctaggggtgcccaaaagcgggcagaaggcccatgaggggaaggtgatgcacctggggcagagaaaaaaaaaaaaaaaaaaaaccgcgccgcctataagcggggcctggctcccccacagaagaaactgtcctcacatcagcgcttgcgctgcgccccagggaccctggtatccctggctcgagcccagcgtgcgcctcggcctgctaggggtaccccaaggcagacagaaggcccatgagggaaaggtgagacacctggggcagagaaaaaaataaaaaaactgcgccgcccagaagtggggcctgggtcccccacagacgaacgtccctacccatcagccctgaactgggccccggagaccctagcgtccctggctcgaaaccagggtgcgcttcaggcccgctagtggtacctcaaggtgggcagaaagcccatgaggggaaggtgaggcacctggggaaaagcgaaaaaaacaaaaacaaaaacgtcgcagagaagcagagcctgggtccccgaggaagaaagtgtcttcgcatcagcccttgcgctgggccccggggaccctggtgtcccagtttcgaacccagggtgtgcgtctggccactaggggtaccccaagtcggacagaaggcccatgaggggaaggtgaggtttgagggaggagacgtgaggcaactgtggcaggaaaaaaaaaaaaaaaaaaaaacacgccgcggagaagcggggcctgggtccccaacggacgaaagtgccttcccatcagcccctgcgctgggccccatggacactggcgaccctggttagagcccagggtgcgcctcgtgcccaataagggtatcccaaagcgggcagaatgctcattaggggaaggtgagacacctggggcagagaaaaaaaaaaccgcgccgcaaagaagcgggacctgggtcccccacggatgaaagtgtcttcccatcagcccctgccctgggccccatggaccctggcaaccctggttcgagccccaggtgcgcttcgcgcccgctagggttacccagaagccggcagaaggcccatgagaggaaggtaagacacctggggcaaaggaaaaaaaaaaccgcgcttgcagaaaagcggggcctggctcctccacggacgaaggtgccttcccatcagcccctgcgctgggccctggggaacctggtgtccctggctggaaaccagggtacaccttggacccgctaggggtaccccaaggagagcagaaagcccatgaggggaaggtgaggcatctgcggcagagaaagaagaaaaaccgcgcagcggagaagcggggcctgggtcccccactgacgaaagtgtctttccgtcagcccttgagctgggtcccgaggacgctgacatccctggttcgagcccacgctgcgcctcaggctgctacgagtaccccaaggaggaaagaaggcccaaaagtttcagctgaggtttgaggcaggagagatgaggcacctgtggcagaaaaaaaaacaaacaaacaaaaaaaaaaaaacgcgcagcggagaattggtgcctgggtctcccagggacgaaagtgccttcccatcagccactgcgcttggccccatggaacctggcctccatggttcgagcccagggtgcgcctcgggccgctaggggtaccccaaagtgtgcagaaggcctatgaggggaaggtgaggcacctggggcagagaaaaaaaaaaaacacctcgccgcggagaagcggggactgggtccccccacggacgaaagtgtcttcccatcagcccttgcgctgggccacagggaccctggcttccctggttcgagcccacagtgcacctcgggccgctaggtgtaccccaaggcagacagaaggcccatgaggggaaggtgaggtttgagggaggagcggtgaggcacctgtggcagaaaaaaaaaacgcgccacggagaagcagggcatgggtcccccacggacgaaggtgccttcccatcaggccctgcgctgagccccgtggaccctggcgaccttgactcaaacccacggtgcgcctcgggccgttaggggtaccccgaggcaggcagaaagcccatgaggggaagttgaggtttgagggaggagaggtgaggcacctgtggcagacaaa

SEQ ID NO: 236845 - DNA, 498 bp, Homo sapiens
tgtttttttaggtcaggttaagagtaagatggtgattaaaattttaattataacatgattacttattaaatgaagttgaaacgatgcacatcaaatcccaaaataggctcttatgtgaaagttctaactcgtagcttctcaaggtgctcttatataccactatattcagtggtttcagattctgtttcaagatcttgttgcagagaattgactttacatctctttagctgaactcattaactgagaggcgtaaatgctttaaagtatcattaagttagaagagttgggagtgttgggggactttgagaagacttgtggtttggggacaacaggaaaggtttttccatttgatgcatagacatcaacgaaagtttacacaaaacacagtgttactctgttattcgtgcacagttattggtatgtgaaagtattctttgctaaatgcaatacattgtaattaaataaaatcacttcatttaaaaccgcacttgaaaaatc

SEQ ID NO: 236846 - DNA, 2944 bp, Homo sapiens
  misc_feature (1512)..(1512): n is a, c, g, or t
  misc_feature (1530)..(1530): n is a, c, g, or t
  misc_feature (1856)..(1856): n is a, c, g, or t
  misc_feature (1866)..(1866): n is a, c, g, or t
  misc_feature (2437)..(2437): n is a, c, g, or t
acagtatcaccatgcctctcatagcgccacgacactagaagaaacctcactgattgctgtccctgtctacagtccaagaggatttcaaatgggcccacacggtatagctgagaacccgaatcccttgctgatgccagctcattttctttggtctcatcctcatcactcctccaagaaaactacccagtccagagggacttgcttttgctataagtgggttagatcttgagataaggaaatagcaaaatgttggtgtaacattgagtgtggaaatgtggcctgagggaagtgagtgctggcaggagctgaggaccctgttgggagggggccgtgaaaccttggcatagacctcgccagcacagctgtttggaatggaggcaggaagggcaggggaaagccatgagagagggaattttcaagatggtcagtgttctcaatccacagccatcacagaagaaactaatgaaatatgggtacaatctggagatttttaagtctctaagaagtggaatttgtgagacgaaaggcttccagaaagctccctttctgacctggcctctacccctagagggccttagccttgctgtggggaatgaaactcttcccggttgtagggttttggtgctgtccacccccagcccagccagaaatgtggcttctgtacttctgctgcagttcaagccacttttccaggtatgtcccatctgagtggagatggggctgacggcaggccacagggccaagctcgggcacggggccggtagctgggactgaggctgcactgctgattaatgggcagggaggcactttgtgaaacgtgcaataccctttgacggccttttccgggggactcgcagctttcctcgtgtcttttcagcaatatcacatttgattttacctttaaaatgtattgatgaagctgcatgattggaaaaggtgctgggggagatgaatctctcctactttccgttctgtttccattacttcaggggtgtgtacgcatgagtatacacgtgtgcgggcgtgctgtattagagagcccaatttcctttatatacgtgaactcctccccctagtagccaccattaaacatccaacggctttaaaatggttagtgagaagtacacaacataatgtcagatgtggccctgagagaggcgtactgctcactgccctgctttaacccgttggctgtttaatggtggttactaggggcaggagttcacgtatataacagtcatttttccaaagtttccagcaccaagggtcctcctgctccttaccacactgcggagccttctacatctcttcatactgcttttcttccttgattattttttgtttcaagtatttcttcctccccctttctcctggtgtctcagagttagcaggaagctggtaattaaaagaagacatgggttttgaaatgctgctgtggtagctcttccccccccttatccattttacaacagaaacaaaaagactcactccttttcttttgctcctccctcnagcagagtaatgaaagcngaatgttgtttgcttgtttttgtttttgagtccactaaatcattattgttacactgactagctgggtgaacttgggcaagttagttcaaatttctgggcctccttttcctcatctgtaaattagaaaaagtaatgcctagttcatagagttgtgagaaagtgcacaaggtaagtctaagtgccttccccatcgtaggtatgaaatgcgtgtttccttccacctctcattttacttgggtctgtagacctaataagtgttccttttcattggatttcagtttaatttaatatgttttaagcacctagtatgtgccaggtcttgagcnccagggtctncacaaataccagataggttttctctcttcaagagcagcctggtgctgaaaccaggaatgtgataaacggtcgcacaacagtgtgaaaggtgtcatgggcactgagggaatctggaagaggagcacctaggattccttggggacagggtgggagggtagaagaatgtgtccctaaggagatgacaactggtcaagagcgttaaagggtgttggcgatgggagaagggtgttctgggaagagaggagcatgtgtatggaaatcgttgtgtgttccatgggagagaaggagcgtcggccaccgatgggggatgaggttgagtgcctgagaagagtctagatcaggaacagcatcgtatgttacagtggagacttggtttgaaaactactgaaagccattaatggagtttaggagcatcatgagatgataaagattttacctgcagcacatcaagccagctctaagaaatcctgtgtacacaaattgcctctttcgaatcaatgtgaagtcagagagcccacaggccagcagtccagttctgccactaattagttttgccgcattagggaagtcncttactttccgatggtctgagttgccacatctccgaaattaaagtgttggagtaggtgacacccatgtttcctcccagctataacagcagcctatgactctgtgatgatgtcactgctttttggcgcttgtttcataattcctagagttaacttattaaaattgctgtgcaagcatgatgactgtcccctagtaaacatcaagtgttcttcttcatatgttccatatgaaaattagcttcttgggccaggcgcagtggctcatgcctataatcccagcaatttgggaggccaaggcaggcggatcacgaggtcaggagatcgagaccatcctggctaactactaaaaatacaaaaaattagccgggcgtggtggcgggcatctgtagtcccagctactcaggaggctgaggctggagaatggcgtgaccccaggaggtggagcttgcagtgagccgagatcgcgccactgcgctccagcctgggggaacaaagcgagactccatctc

SEQ ID NO: 236847 - DNA, 575 bp, Homo sapiens
attgtaaaacaacacatttgtatagtcagagtatcttcccacaagacatttattgattacaaaggggaaagcagtaaatttgtaataaagaaccctagcagacatgacttatccaaatgatcaaggtcaatatagctagtaattaaacatatagaaatcatatgcctgctgacatgttgcatggagaagagcaaaatatcacttctgtggtattcttcttaaatgtgtaacaccaatgtaatcacaagaaaagaggccgggcgcggtggctcacgcctgtaatcccagcactttgggaggccgaggtgggcggatcacaaggtcgggagatcgagaccatcccggctaacacgatgaaaccccgtctctatgaaaaatacaaaaaattagccaggcgtggtggcaggtgcctgtagtcccagctacttgggaggctgaggcaggagaatggcgtgaacccaggaggcggagcttgcagtgagccgagatggtgccattgcactccagcctgggcgacagagcgagactccgtctaaaaaaaaaaaaaaaagaaaagaccagacaaatccaaattg

SEQ ID NO: 236848 - DNA, 354 bp, Homo sapiens
ttgttttgcccagctttatgtttcattttagttgtaaagagagaatttcactgatgactgggtgtgtaaaattggcctttgttaattaaaaatagaattttgagcttcctcaccagaggctattgctgctagaaaggatctcacttactatttcatgttatcattttaccatctcagctgtagtcaagaagtcaggcttgcaactttttggttgccgtacatgttgtctcctaagcttctgaataaccattagattagtgcaaacttcttaaaaggaaaaaggacttttttcagggtagtgaactgcaatcgaggaagataagtagtgagcttcagccagatttagggaaaggg

SEQ ID NO: 236849 - DNA, 695 bp, Homo sapiens
  misc_feature (676)..(676): n is a, c, g, or t
agatacctgctttcatcttttgcaatgaatagaatactctcctacttagaaacaggctttttctccttgccactttattttttccttacctatgaattgcatgtgcctttgatgaaaacaatgaactggacatgtacaacggtacatgtaatagactgaatgcaacttagaagtggccactcttccagtgtacataggcttggaaatgaactaatccaaacctgagtaatttgtttatagtacctcctttcacttttgtttattggtatctacagtctctcattctttttctttaataatatctctttatatagaattttatattcagccatgactctattatttcaatagtcacattaccacttcgaggattgataccatgaaaaaaggttatctagtagttttgagtgaagatacgaggcacaccttcaataccaataagaaggtatactacaaaggtctaatgaagaaaaatacctcattttgaaggtagcacatagctttcaactgactgggcctgttatggtctttgctgtgtttgttatcacagtatctaatagtgaagtggtaattactttctttagtagaaattccaagatctaaattggtacacatataaatatttgacaacaaatgttatttaagctaaatctcatatgtcaagttctgaatcagntgcctaacaccagttcata

SEQ ID NO: 236850 - DNA, 166 bp, Homo sapiens
gttacagctgctaatgttaccttaactaacatgaggttgtaaatcagtgtgtggtgagatcaatttagtgggttaggaccagcatttttagatagaataaaataggaaacctggtttgtgtctgaccacttcatgcagacctggggctccatccagtaaattaaac

SEQ ID NO: 236851 - DNA, 712 bp, Homo sapiens
  misc_feature (600)..(600): n is a, c, g, or t
  misc_feature (609)..(609): n is a, c, g, or t
  misc_feature (633)..(633): n is a, c, g, or t
  misc_feature (658)..(658): n is a, c, g, or t
  misc_feature (664)..(664): n is a, c, g, or t
  misc_feature (676)..(676): n is a, c, g, or t
  misc_feature (690)..(690): n is a, c, g, or t
agatgatgtgactctcttggatgggccttccccggaatgggtattgtgacatattgctgagcccattatataggtgatgtgactctcttgcatgggccctccacataaggggtagtgtgacatattgctgagcccagtaggtgatgtgactcttctctatggtttgggctttgcccaagcagggattgtgatgtgttgctggactcaccacctatgtgttgtgactctcctcttctgcctaagccctgcatgcattgtgtgttgtgacatgcctggattcaacacctaggtgatacaactttatggcaggggaaccacccacagaagtattgtatcatctttccatcacttaggtgatgtgattcttttatttttcctgtttctggcatattttgggtatagtgacataccattgagttcaacacccatgaaatcggaggcttacgcctgtaatcctagcacttgggaaggctgacgtgggtggatcatgaggtcaggagtttaagaccagcctgaccaacatagtgaaaccctgtctctactaaaaatacaaaaattagcttggtgtggtggcacgcacctataatcccaactactcangagactgangcaggagaatcgcttgaacttggnaggcgagtttacagtgagccaagantgcgcnactgcactctancctgggcgacagancaagactgtctcaaaaaaaaaa

SEQ ID NO: 236852 - DNA, 658 bp, Homo sapiens
  misc_feature (555)..(555): n is a, c, g, or t
  misc_feature (579)..(579): n is a, c, g, or t
  misc_feature (604)..(604): n is a, c, g, or t
  misc_feature (610)..(610): n is a, c, g, or t
  misc_feature (622)..(622): n is a, c, g, or t
  misc_feature (636)..(636): n is a, c, g, or t
agatgatgtgactctcttggatgggccttccccggaatgggtattgtgacatattgctgagcccattatataggtgatgtgactctcttgcatgggccctccacataaggggtagtgtgacatattgctgagcccagtaggtgatgtgactcttctctatggtttgggctttgcccaagcagggattgtgatgtgttgctggactcaccacctatgtgttgtgactctcctcttctgcctaagccctgcatgcattgtgtgttgtgacatgcctggattcaacacctaggtgatacaactttatggcaggggaaccacccacagaagtattgtatcatctttccatcacttaggtgatgtgattcttttatttttcctgtttctggcatattttgggtatagtgacataccattgagttcaacacccatgaaatcggaggcttacgcctgtaatcctagcacttgggaaggctgacgtgggtggatcatgaggtcaggagtttaagaccagcctgaccaacatagtgaaaccctgtctctactaaaaatacagangcaggagaatcgcttgaacttggnaggcgagtttacagtgagccaagantgcgcnactgcactctancctgggcgacagancaagactgtctcaaaaaaaaaa

SEQ ID NO: 236853 - DNA, 241 bp, Homo sapiens
tcctccgcgccgtccccatgctcgccctccgcgtcgctctcgtccgagttgtcctcctccaagtagcggtaaccgcgcaccttgtgctggggccgcgggatgcagggctggcgcggggccacgccccgccgcagcttctgctgcatccgcaggtaggagaccgcggcggccaccagcgtcacaagcagcaccgccagcttagcctgggtgtacggagagggatgccagggacccgcggccg

SEQ ID NO: 236854 - DNA, 280 bp, Homo sapiens
aacattttcatgaacatgatctcatttaaccatcaacaaagttcttaggaggcagcacagacagtattaatcttatttcccaatgctggtaaaggacttaaacatataatggaagatgggcatgctaaatacgcaaattaaaagtctgactacactaatggtctaaaaattatctttgaagaaaccttggccttgagtgtgacccctctccagtgaccaccactccattgagacccaaacttccccttccctgctgtatctcccctccgtgtaaaggaaa

SEQ ID NO: 236855 - DNA, 729 bp, Homo sapiens
  misc_feature (579)..(579): n is a, c, g, or t
  misc_feature (697)..(697): n is a, c, g, or t
  misc_feature (710)..(710): n is a, c, g, or t
  misc_feature (729)..(729): n is a, c, g, or t
caaatgacttattatcatcaagccattgtgtttgcttatgtccatgaagtgagtgtgtcattggtgtttgttttaatgtatatacaataccatagaaatgcatgaaagacattcaaagctcgtgccatgctgatcttgggcatttttatcttaggcatcttcaggtgccagtctgggcctcgaacatccacatctggggcattaatatccactttggggcctttaatatccaagtcaggaacttgcatgtcaccttccacttttggcagagacacatccatatcacccttcactttgggtcctttcaggttaagatcaatgtcaggcatggagatcttgggggctttgatgttcatctcaggcatcttgaatttgggacctttcaactttccctctgggccttcaatattcacatctggaacatcaatgtccaccttgggtcctgagacatcaaggtcagccttgggcaagttcacatccacatctgggccctctactttgaagccaggcatgctgaacttgggcattttcaccttgggcatcttcaggtgccagtctgggccttgaacatcaacatcntgagcattaatgtccactttggggccctagatgtcaacttcatgactcttgaggtcaccctactgccgaatttcgcacgaggtataaaccactctacaggtgggaggaaagccaaccnttccaatacctantgatttaaggatgacagan

SEQ ID NO: 236856 - DNA, 178 bp, Homo sapiens
ggagcctggcacagtggcctcatttattatgctgctctgctgctcacaggggaagcccgtcccccaaagtcctcttcctcgtcctcgtgagtatcttgtccctggattgcttgtcagccttgtctgcccggagcactcagtagccggcaggctccccacctttcctggagtctgaggc

SEQ ID NO: 236857 - DNA, 282 bp, Homo sapiens
gttgcggtttctgccgctgttgactctcacgtggagataatggaacatcatttcagagtttcggaaatgggagagaaatctcccagcagcccagcagttgaagaggagctgcctcaaataccagcccaacgggaggcctgtctctggcttttatgttcaagctgggactcttggcctcagaagcctgcttctggtcttgaaagttggtcccttcccagcattatagcattaaaaaaattttttttttgccaccaataaaaccatgttcggggctaatactca

SEQ ID NO: 236858 - DNA, 87 bp, Homo sapiens
ccaaaaaaacactgtgttatttcaaaaatatcagaatgagattcttcagatcccttatttattttcccccacccccgccacacttag

SEQ ID NO: 236859 - DNA, 353 bp, Homo sapiens
agatggagttgctctgttgcccaggctggagtgcagtggcatgatctcggcccactgcaacccctgcctcctgggttcaagggattctcctgtctcagcctcccaagtagctggaactacaggtgtgtgccaccacgcccagctaatcttttttgtatttttgacagagacagggtttcactgtgttagccaggatggtcttgatctcctgacctcgtgatccacccgcctcgacctcccaaagtgctgggattacaggcgtgagccaccacacctggcctgctctttccttttgtccagtctctcagagaggctgcctggatcacagtgctaccaccccaatctgggtctct

SEQ ID NO: 236860 - DNA, 473 bp, Homo sapiens
ccagagattgtatttgtatcctttttctccactcggaaatgctttttatactgccttgaatagtaccatgtatttatgtattttaaaggtgttttaagacatgcttggtaaagatgttattaattgcttatgcatatttcactgattgacatatacaataaaatagtaaattattaaactttttaaacacccagccacaaatattgtttccttgatattgcatgacaactttgcatagtgctctattaagtatttaatataaacaagatatctctctctccacccacttttcctctccgtcttctctccattgcaacttttctggaaacttcttcctagtccagtagtagctggaagagaattcctcttattccaaaaaagtaatctccctatttcaaagtacaaataaatcaatatgtttgcagatcccagcttcatattgtatggcggtctttaaaaaaaaaatgtggtta

SEQ ID NO: 236861 - DNA, 470 bp, Homo sapiens
agatggggcctccaaggaagtaattaaaattaagtgaggtcataaggatggagtcctgaaccaataggattagtgtccttataggagacaccagagagcttgcccactctcatgggcacaagaagaggtcatggagcagtgagcacacagggagatagtaaccacctacaagccaagagaggaagcctcaaggctgggcacggtggctcacgcctgtaatcccaacactttgggaggccgaggtgggtggatcacttgaggtcaggagtttgagaccagcctgaccaacatggtgaaaacctgtctctactaaaaatataaaaattagccgggtatggtggcgcacctgtaatcccagctactcaggaagctgaggcacaagaatcacttcaacccaggaggcagatgttgcagtgagccgagatcacaccacggcactccagcctgggcgacggagtgaaactgtgtct

SEQ ID NO: 236862 - DNA, 364 bp, Homo sapiens
gcccaggccgctcctgtactctgggatgccttctcctgtctgcctgcccaaatcctcgctgaccttcaagttccagcgtcgggaagtgcctggccgcatttcttaaaggttttacaaggatagacatcatttcctccaaaagaacacagagggaatgttgagcgctccctttccctacttctccttctcatgattaagcaggcattgtggctgttgagattaaagccccatgcggagatgcagggcaccaggctagatggagcccaggtccccaggcagcggtgtggagaagactcatcatgttcacctggcccacctatccatttggacttttcaataagaaataaatcagttttgagaatgt

SEQ ID NO: 236863 - DNA, 433 bp, Homo sapiens
cagaatgactattattaaaaagaccaaaaaaaaaaaaaaaggatgttggcagggctatagagaaaatggaagtcttatacacagttgatggaaatgtaaattagttcagcccctgtggagatttctcaaagaacttagaacagaactaccatttgatccagcagttcctgtactgattatatacccaaagaaaaataagagccacagtagtaataagatgccctaggcagagggacataggtgttttcattggaatgtttgggcaaattgtaagggctgcagatacagtttgattcaggactcaaatagtataacaaggatcagtttttctgtttttgtttctttgcttcgtcatccccattctcaggccccatgtagatacaagatggctagttaccaatagctcaaagttctggattagagtctctttagt

SEQ ID NO: 236864 - DNA, 425 bp, Homo sapiens
ccgggctgtacgaaaaagacttattgatggaaatgtaaattagttcagcccctgtggagatttctcaaagaacttagaacagaactaccatttgatccagcagttcctgtactgattatatacccaaagaaaaataagagccacagtagtaataagatgccctaggcagagggacataggtgaaaattaggtggaagtttagaaataacacatcaatactttctgtattataaagttttcattggaatgtttgggcaaattgtaagggctgcagatacagtttgattcaggactcaaatagtataacaaggatcagtttttctgtttttgtttctttgcttcgtcatccccattctcaggccccatgtagatacaagatggctagttaccaatagctcaaagttctggattagagtctctttagt

SEQ ID NO: 236865 - DNA, 2336 bp, Homo sapiens
  misc_feature (1549)..(1549): n is a, c, g, or t
  misc_feature (1973)..(1973): n is a, c, g, or t
gttggcctactggtgaaggaaaatctcaagggaaaccttaaggaatggctacctacagtccaccttttaactgagacccacacggttgcatgaccttcatgagttggccatggctcttttccacgttcctttcatcccaggactccggctgaaggacctgccattctctgggagactgctatccttgtagcagaaggaaagggcgatggtggaatccataatggcttctaaagctgctgttttgaagtgcatgtttcacttcctgctcgcgtttcattagtgaaaataagtcacatggccaagcctgatagcagcggagtgggggtgattaattctctcacagggaggggtagaaatcagttaggtgcaagcaacaccctctaactgcgagccattggaggcttttgagtgggtaatgacataatctagtttgcatttgcggaagatcccatgcagaaacaaatgtcacactgcagctgcaaggacagtgaggagggagatggccatggtgccttggtccccagagtgacggcatgcggaggcgtcaatgcatctacctccagcacaccaggcatgatgtcaggtgcagcaggaggtacctggccctttgctacacagaccacatggtcttgctggggacaagacctagggaacagctcattttggtacagtgtggttggttcctggagagggagagggaatagcccacgggctaagcagcccactgcaggtacctaatgcaaccaggaaggtcagggaaggagatggccagccacgcggtggagtttgaacattatgtagcagttagccaggtgaagaggagatgctggggagacagggagaggccactcctggctgagggacctgtacctgcaaagactctcaggggaggaggacggctttctgtcactgtttctgtgtgtgagggaaatcagagggtaggcccggctgtcccctgcctttcctgtggggcctgactgcacgtaccccctctccccaaaccctccaggagttctgagtctctacctggatcttgattccactggcatgaaatctgtgaatctcacctcgagaatcctccctctgctgcagcaggatgggaccaacagttccctgcagtggcaagggagctgttcacacactgagcgagcagtcacagctgccctgagctccacattctcctcctcgggggactcccctggaattacctttgtcattttactttctcaacccctgtgtttcctctgatatcttacttatctctggtctttttgtccagacagctcttaagccttgggaggaaccttttcctctgatccctttttaggccattatcaagttcagggtgggagggtagagtcactgtctttccaggccttgctgcatcccttagagaccttcggagggggcactttgtgaccagtggggatgggggaaggatggcttggtgtgtctgtcctcacccactaccctctgcccacttctgcctgcccttcctctgtgtggcatatacagtactgcacccctgagcaggacattccccagtganagccccaggcccgacacttccaggctgtgtggccttgatcaagttagtttccctttcgtgattcagattcctctcaggctgcttgtgcaaactcaacataagaaagtctgcgaagctcttaacccagggcctgggccatgctagggggatcagtaagcagtttctgccacctctgttactgccgctttcacctttccttgtggaaaagagaagcagccagaaaagctgggttttagccccagctctgcctcttaactagctaagtaaatgtgggcagaatgcttgacttctctgaatctcattttttttttttttttttttgtcaaacaagatgaatgaacaagatcggtcttttttgatggggacttgaatggtgtgtggggggacagttctttgtgtgggacggtccacactaaatgccagntatccccacccattgttacaacccaaatgtcaccccccaccaagtatttctccatgtccctatgggttggtggtggaactgtccctgactgaggaccactgaactagcttaccctaaacttcactcctgctctggtgtcctgtgtgggtggaaaagtgaggacccagtggagcaggtagacaaagatcagttcaacagggccctctgctcctttgatattgggacagcttcacttcctctgaattagaagcttcttgacctccatatattgaggaaggaaggggtttctaacaaatgaagaaacaggctgggcacagtggctcatgcctgtaattcccctttgggaagcccagttccatctct

SEQ ID NO: 236866 - DNA, 799 bp, Homo sapiens
ctgctgtgtcccaccccggatccacccccggagctccatccctggctacagccgttccctcaccactggacagctcagcgatgagttgaaccagcagctggaggccgtgtgcgggtcggtgtttggggagctggagtcccaggccgtggacgccctggacctgcccggctgtttccgcatgcggagccacagctacctccgggccatccaggccggctgctctcaagacgacgactgcctgcccctcctcgctacccctgccgctgtctcagggaggcccggctcctccttcaacgttcagaaaggccccggcaccctcaatcccagccggggacagccttgggccccagccccgcattctccactcgagcctgccagagccaggcacccgacctccggagcacggagaggctttcacaggctgcgcccgaaggtagcccccccagtacccgggcagcctaggcaaagagatcccgaccccgaacagacagcttgtgtaccgagacatctcacacaaatggggattgccggcccaacaacgtgaaagatcagggccgcacagggtgcacgagcccaccggagaacaagtcaccaaagaaccacagcacacagaaatcaacaccacttcacaagaaaaccaagtccccccacgaaaaccgggaagagacccccccgggcagaagcccactgggccgaccggccccgactgggcaagcttggtcaggagcggtcccccacatcgacgcggtgccaaagtcgagcaccacccaacctgccagaagtccagcgacccaccggc

SEQ ID NO: 236867 - DNA, 2321 bp, Homo sapiens
  misc_feature (1640)..(1640): n is a, c, g, or t
aagtggagccctctggcagaggcagtgaagcagctgatttttcacaggcggcaccacgtttgttgaagtattgcaactgatagcattgggagcctggtgaacgagagcagcctcagctcagcgatgagttgaaccagcagctggaggccgtgtgcgggtcggtgtttggggagctggagtcccaggccgtggacgccctggacctgcccggctgtttccgcatgcggagccacagctacctccgggccatccaggccggctgctctcaagacgacgactgcctgcccctcctcgctacccctgccgctgtctcagggaggcccggctcctccttcaacttcagaaaggccccgccccccatcccgccgggaagccaggccccgccccgcatctccatcaccgcccagagcagcaccgactccgcgcacgagagcttcacggcggccgagggccccgcccggcgctgcagctccgccgacgggctggacggccccgccatgggtgcgcgcacactggagttggcgccggtgccgccccgggccagccccaagccccccacactcatcatcaagaccatccctggcagggaggagctgcggagcctggcgcggcagcggaagtggcggccgtccattggggtgcaggtggagacgatctcagattcggacaccgagaacaggagccggagggagttccactctattggcgtgcaggtggaagaggacaagaggcgagcaaggttcaagcgctccaatagtgtgacggctggcgtgcaggcagacctggagctggagggcctggcaggcctggccacggtggccacagaagacaaggccctgcagtttggacgctccttccagaggcacgcctctgagccccagcctgggccccgggcccccacctactcagtcttccgcacggtccacacgcagggccagtgggcctaccgcgagggctacccactgccgtacgagccgccggccaccgatgggtcgcccggccctgcccccgcccccacccccggccctggggccggccgccgtgactcctggatagagcgcggttcacgtagcctccccgactcaggccgcgcatccccctgcccacgcgacggcgagtggttcatcaagatgctgcgggcagaggtggagaagctggagcactggtgccagcagatggagcgtgaggcggaggactatgagctacccgaggagatcctggagaagatccgcagtgctgtgggcagcacacaacttctcctgtcccagaaggttcagcagttcttccggctgtgtcagcaaagcatggatcccactgcgttccctgtgcccaccttccaggacctggcgggtttctgggacctcctacagctctccatcgaggatgtgaccctcaagttcctggagctacagcaactcaaggccaacagctggaaactcctggagcctaaggaggagaagaaggtccctccgccgataccaaagaagcccctgcggggccggggcgtgccggtgaaggagcgctccctggactccgtggaccggcagcggcaggaagcgcgcaagcggctcctggcggccaagcgcgccgcttccttccgccacagctcggccaccgagagcgccgacagcatcgagatntacatccccgaggcccagaccaggctgtgaccggtccggcccgcccagcccggcccgggcccgcggttctccacccgtactgtacacccagcgtcgaggtcactgtgaacgcgggccgccccgtgcgcccgccccaccggcaccggacgccccggcccccgggcccgtcacactctcgtgggttttttaccttcctgatcccacgcgaaggcgcccgggctgggcagggggccgtgcctctccgccctgcgcccctcacctggatcccctgcccacctggtccgacgctttgtccccacctcctccccatgggcaccatctctgccattctttcccccacgggccaggccgggccgggtccctcatctgggctctgcgtccccccctcccccaccccgcggggctgggcttcgtggggatcaagcttcgtggctttttatgaagaatcccgaaccctgcctaggagcccgccccaccctcccaggggctccatcctcagccctctgcccactgggcccagggaccacagtggctggaccaacccaggaccagggcgcctgggcctctcccctttcccagcggctggggaggggagatgggggcttcccctcaccacacctgtggctgttcccacatccccttgaatatcccaggaaaaataaaacggcagaactgcaaaaa

SEQ ID NO: 236868 - DNA, 632 bp, Homo sapiens
gagaatcacaaagctatgttcttgagcaagaggggatggatttatttagcaagcggagggattggccttacgagtatggacagttcgcccaaaacagcaggtgggaaggcattatatctgggcgcatttgctgagagatgggtaaatgtggtgatggaagtctatcaaaatttgcctctgactgtttcagtttttccattgtagtaggaagcaaggtcattcttcagctgtgagtgaagatgagtggggacatatagggagtttgaagaaaaagggaaacagaatggcatatgggaaagagaaaaagtgaatggactggggaaatacagagattgctgaggagtatgaattgaaagttagatcaggtagcattgtggagtgtttttctctggccatgttcagtggcatgggcagtgctgactaggtggagaattagacttaactagggttgtaatcttgccaagtgagtacgaacaattgatgagggcagaggaagttggggtaaaaggaaaggagtgattgtaataactgattatagaatttacattgggcaaggaaggcagacagacatcatggggatgaaggacagaggggtgtagtgtagtataagagatcttgagtgagctggaaag

SEQ ID NO: 236869 - DNA, 127 bp, Homo sapiens
atgatgacattgtcaaatgacacatttttcagaatgtatccccatcattaagcaatgcacgactgtacttgaaaattttaatctattttcaaattttgcagtgatttcataccaacggtttagctca

SEQ ID NO: 236870 - DNA, 1414 bp, Homo sapiens
  misc_feature (3)..(3): n is a, c, g, or t
  misc_feature (6)..(7): n is a, c, g, or t
  misc_feature (127)..(127): n is a, c, g, or t
  misc_feature (297)..(297): n is a, c, g, or t
gcntannggtcttgctgtgttgcccaggctggtctcaaactcctaacctcaagcagtcttcctccctccgcctctgaaaatgttgagattacaggtgtgagccactcccccagccttaaaaaataanaataaaaaattacaaggtattatgtggcccattgaaagatgttggaaaacagttgtgcatgtgacccagctgtaaccagttataaaagtgtcaggatcattaagaaatgtactgtgtctggctttcccaagtttgggttcctgctgaaggaatgagatggaccttttctncctcccctcctcacctccctgcaagaaccaggattgtgcattttgacgggcaggctcttacctctgacaggccacagggggcatgcagagcctttctgcatgtgctttttgggcactcggataaagaccccctgtccaggcctttgtttaggatatttggcccatggagaaatgaggctggaatcacctgggagggatagaggcttcaactggaaggaggagtgacctgaactccaggttgtgggcctacgctttgttcccatgcagcacctcgttagtggtgactgaggcctggaagtcaggggccttggtgaccaagtgttgagtggacaggaggagctaagggaggtgaggggcatctctccagtactgacccctccccatgcccaaatcaatgccctctatcagctcagacacagccccacccagcagcagtgcgggtcaggaagggcaaatgcagtcggcacggatctgctccatagtctccacctcacttcgtctcgggttgaggggagtgagtccccacagcactgatatgatatcctgtcagctgagaacatccagcttgatttagacagataaggtgggacatctctagggcatggtgtgtggagcagtgccatccctctgtggcagcgagccaagcaataaaccagaatgtgcaaaacctgcgtcccagaatcaccattcctggaggaaaagcctatattgtcaagatgcccacaactaaattaacccaaacattccacccagcctcgaaaaaccagtagaactttgacattaatacactaaccctcagttctatacggaaatgtgtaagaatagccaaataatgtaacgtgcggtcattgagagagagaagcccgtcagaacaaatggaaccaagtccagaaacatgtttgtctaggcgcaagatgccagcatgtgtgtcagccagggaagcagaccaggaggagatattaagatttaaaacccagctctgtagctcaggcctataatttgagcgctttgggaggctgaggtgggagaatcacttgagcccaggagtttgaggcagcagtaagctatgatcgtgccactgcattccagcctggatgacagagcaagaccccatctc

SEQ ID NO: 236871 - DNA, 447 bp, Homo sapiens
gagaggttgagagacttgcccagagtaaagtggctgagcccagattcaaacccaagactatcagactccaaaccccacctcttctgcacacggcctgggaacatgtaactgcattcccctttcactaccggttttacccatcgtcccgtcacatgatttggtggttttgggtattgaggaggcagagaggataaggctgcagggggctggcaggatgaatcaagggcaggggaacaggtcttttcccacatgggaagatgatctggctacctcactgtctcctcaaccatattcttggctaataaaagcaggaacgttgctgcctcctttctgtgataccttataatgcctagaaagtaactgtaagataatttattacaaactggcaactttatcataaaaggccttggagcaataattgctttcattaaataaaacctataaaat

SEQ ID NO: 236872 - DNA, 2533 bp, Homo sapiens
  misc_feature (65)..(66): n is a, c, g, or t
  misc_feature (84)..(84): n is a, c, g, or t
  misc_feature (91)..(91): n is a, c, g, or t
  misc_feature (93)..(93): n is a, c, g, or t
  misc_feature (125)..(125): n is a, c, g, or t
  misc_feature (145)..(145): n is a, c, g, or t
  misc_feature (288)..(288): n is a, c, g, or t
  misc_feature (330)..(330): n is a, c, g, or t
  misc_feature (352)..(352): n is a, c, g, or t
  misc_feature (396)..(396): n is a, c, g, or t
  misc_feature (421)..(421): n is a, c, g, or t
  misc_feature (446)..(447): n is a, c, g, or t
  misc_feature (498)..(498): n is a, c, g, or t
  misc_feature (543)..(543): n is a, c, g, or t
  misc_feature (550)..(550): n is a, c, g, or t
  misc_feature (557)..(557): n is a, c, g, or t
  misc_feature (566)..(566): n is a, c, g, or t
  misc_feature (611)..(612): n is a, c, g, or t
  misc_feature (646)..(646): n is a, c, g, or t
  misc_feature (724)..(724): n is a, c, g, or t
  misc_feature (751)..(751): n is a, c, g, or t
  misc_feature (782)..(782): n is a, c, g, or t
  misc_feature (856)..(856): n is a, c, g, or t
  misc_feature (913)..(913): n is a, c, g, or t
  misc_feature (935)..(935): n is a, c, g, or t
  misc_feature (944)..(944): n is a, c, g, or t
  misc_feature (980)..(980): n is a, c, g, or t
  misc_feature (991)..(991): n is a, c, g, or t
  misc_feature (1010)..(1010): n is a, c, g, or t
  misc_feature (1146)..(1146): n is a, c, g, or t
  misc_feature (1207)..(1207): n is a, c, g, or t
  misc_feature (1232)..(1232): n is a, c, g, or t
  misc_feature (1272)..(1272): n is a, c, g, or t
  misc_feature (1306)..(1306): n is a, c, g, or t
  misc_feature (1315)..(1315): n is a, c, g, or t
  misc_feature (1327)..(1327): n is a, c, g, or t
  misc_feature (1346)..(1346): n is a, c, g, or t
  misc_feature (1355)..(1355): n is a, c, g, or t
  misc_feature (1378)..(1379): n is a, c, g, or t
  misc_feature (1446)..(1447): n is a, c, g, or t
  misc_feature (1451)..(1451): n is a, c, g, or t
  misc_feature (1455)..(1455): n is a, c, g, or t
  misc_feature (1459)..(1459): n is a, c, g, or t
  misc_feature (1498)..(1498): n is a, c, g, or t
  misc_feature (1528)..(1528): n is a, c, g, or t
  misc_feature (1553)..(1553): n is a, c, g, or t
  misc_feature (1560)..(1560): n is a, c, g, or t
  misc_feature (1571)..(1571): n is a, c, g, or t
  misc_feature (1620)..(1621): n is a, c, g, or t
  misc_feature (1632)..(1632): n is a, c, g, or t
  misc_feature (1661)..(1661): n is a, c, g, or t
  misc_feature (1684)..(1684): n is a, c, g, or t
  misc_feature (1692)..(1692): n is a, c, g, or t
  misc_feature (1694)..(1694): n is a, c, g, or t
  misc_feature (1701)..(1701): n is a, c, g, or t
  misc_feature (1714)..(1714): n is a, c, g, or t
  misc_feature (1728)..(1728): n is a, c, g, or t
  misc_feature (1750)..(1751): n is a, c, g, or t
  misc_feature (1759)..(1759): n is a, c, g, or t
  misc_feature (1768)..(1768): n is a, c, g, or t
  misc_feature (1790)..(1790): n is a, c, g, or t
  misc_feature (1807)..(1807): n is a, c, g, or t
  misc_feature (1810)..(1810): n is a, c, g, or t
  misc_feature (1834)..(1834): n is a, c, g, or t
  misc_feature (1852)..(1852): n is a, c, g, or t
  misc_feature (1885)..(1885): n is a, c, g, or t
  misc_feature (1934)..(1934): n is a, c, g, or t
  misc_feature (1943)..(1943): n is a, c, g, or t
  misc_feature (1966)..(1966): n is a, c, g, or t
  misc_feature (1970)..(1970): n is a, c, g, or t
  misc_feature (1981)..(1981): n is a, c, g, or t
  misc_feature (1996)..(1996): n is a, c, g, or t
  misc_feature (2004)..(2004): n is a, c, g, or t
  misc_feature (2040)..(2040): n is a, c, g, or t
  misc_feature (2066)..(2066): n is a, c, g, or t
  misc_feature (2080)..(2080): n is a, c, g, or t
  misc_feature (2083)..(2083): n is a, c, g, or t
  misc_feature (2124)..(2124): n is a, c, g, or t
  misc_feature (2130)..(2130): n is a, c, g, or t
  misc_feature (2144)..(2144): n is a, c, g, or t
  misc_feature (2157)..(2157): n is a, c, g, or t
  misc_feature (2162)..(2162): n is a, c, g, or t
  misc_feature (2185)..(2185): n is a, c, g, or t
  misc_feature (2230)..(2230): n is a, c, g, or t
  misc_feature (2242)..(2242): n is a, c, g, or t
  misc_feature (2267)..(2267): n is a, c, g, or t
  misc_feature (2286)..(2286): n is a, c, g, or t
  misc_feature (2335)..(2335): n is a, c, g, or t
  misc_feature (2343)..(2343): n is a, c, g, or t
  misc_feature (2363)..(2363): n is a, c, g, or t
  misc_feature (2377)..(2377): n is a, c, g, or t
  misc_feature (2385)..(2385): n is a, c, g, or t
  misc_feature (2397)..(2397): n is a, c, g, or t
  misc_feature (2415)..(2415): n is a, c, g, or t
  misc_feature (2426)..(2426): n is a, c, g, or t
  misc_feature (2436)..(2436): n is a, c, g, or t
  misc_feature (2444)..(2444): n is a, c, g, or t
  misc_feature (2450)..(2450): n is a, c, g, or t
  misc_feature (2468)..(2468): n is a, c, g, or t
  misc_feature (2470)..(2471): n is a, c, g, or t
  misc_feature (2495)..(2496): n is a, c, g, or t
  misc_feature (2528)..(2529): n is a, c, g, or t
  misc_feature (2532)..(2532): n is a, c, g, or t
tggacagaaagagcaggcctgcaaaaacttaagacagtcaagttaccaaagacagtacaaagtgnnttttatacttaaagaaanaaaggantngaaataacttgagcatgaaaataaccaaatanattggggaaagtaccaagtngaaacgaaatgaaaagtatcataattgaaatggaaagttcaatggattggtttaactaacggtcatcaaaaagagaataatagatgaagaaataaagaagttttcagactcgaaaaagctgaatgactttactacctgcaganctgcactataagaaaagttaagggatgtccttcaggcataangaaaacgatactaatggcagcngtgtgccatctggagcagccactgttatcacgccagctgcagtntggaggcacaagtggtggtggcagnagtggctgtgggagcagcagtggtnntggtgggtcccctgtgccctacatccctgaggcagctgactgcacaccccnacccttgcacaactgggcaggacccactgcaggcccggaacctcngccgtgncttcaanctcgctgtntgctgcgtctcaggagtctgtgagctgatagtgcagccaggactnntggggtggccccaggagcattgggtttgtttgcncggggttggctgaggccaccagccacccgcaccttgcctgctgccactaaggggaaaatgcagaccagtggtatggcnagggctgcatgctttatggagccaganagttggtagagtgggagcttcccaggtgcanctgcagccacccaagctgtggctgctaccagggcactcctgtgctcttgggagccaagagtaggcaggagcccngccctcccaagtgcagctgcagccacccaagctgcagctgtggacccaggaatctcngtactcttgggggcccaggaangcacccctntccctgcaggctaggaagtgcctgctcccactgtcngtgttctcctnactgttagcatctgctccngtcacagttcacaacctggggcactgtctctctctcagcactttcgcatcccagctgcatgtgtgcatgcttggagtagtgctgacatgccagccccttggccccctttggactgtggaggctgacaagcatgggnaggaggctgaagtggggctgaggacagcttggcactggcctgcaggtactccttggcatgnataacgtgggtgccatgaacaatgncaggaggcaaacaggctcttgggtggaagggagcaggttnccaatgaagccccacctgcaagctggggtggggntgaagcctngggggtgggccnccagtcttcagggaggagntaccctctntgctgagagctgaagagacaacnngatgacctgcctgcagagaggagctgccctctctgctgagagctcagtactcaacaggacaccctgnnttgnagangagntacccactgcgggtctcctctgagctgtcttatctctcngtaaagctcctcttcatcttgttcaccttncacttgtctgcatatatcattcttnctggtcncaggacaaganctggagacctgctgaatggcggagctaaaatagctataacacaaacagnnctgaaacatgncccttgtttgtcacattgcaagcaatganaagagagaagagaagagctgtgnctcttcangnagcccanacctaggaactcngagccagggctgtnacaccctctttagggctctgtnngttcctgncatctccanggttctgggcaccaccacattncctggtgtcagccgtgnaanctgcttatggtatgcctggtctanctgcagccttgcatgganctggcacccgtgccagtgcctgaagctgcctgnccatcgcctatcccccctcagccggcatgcctggctgtgtgcagtggcnggaccccangcttgctcacacaccccttgctnctcngtgcctggctnacccttggcagacangcgatccnggctcatagtgggaactgagcacagcctgccaggcngagtgggtggaacaagaccagagatncagagcaaaactcnggnaaaggcgccactggccatagaggcttttggctgatgaagtnataccncaaggatcccgtancaataccagatgnaaatntggatccacacaaagaaatggtntacaccagaaatagtaacatcgtgtatctataccagaaatagtancaacatggatanatactttatattatttaaacttctntaaaagataattgtttagnaaataaagtaatatgcagtttataatatatgtaaaagtaaaatggatgncaataagngcttaaagactaaaaggggngaagtttactattntcagattnttaaactgtacntgatgtgatctactgtcncctgaaggtcngccgtgatcngttaaagntgtacnctgtaaaccctggagccncnnctaagataacaaaccaaaagattnnagctattaaactaacaaaggagatcaaatggnntcnt

SEQ ID NO: 236873 - DNA, 2367 bp, Homo sapiens
  misc_feature (271)..(271): n is a, c, g, or t
  misc_feature (277)..(277): n is a, c, g, or t
  misc_feature (465)..(465): n is a, c, g, or t
  misc_feature (1482)..(1482): n is a, c, g, or t
  misc_feature (2243)..(2243): n is a, c, g, or t
tgagatggagtctctgtcactcaggctggagtgcaatggcgcgatctcagctcaccacaatctccgcctcctgggttcaagcaattctccggcctcagcctcccgagtagctgggattacaggcgcatgccaccacacccagctaatttttgtttttcgagtagagatggggtttcaccatgttggccaggctggtcttgaactcctgatgtaatccacccacctcggcctcccaaagtgcagggattataggcgtgagccactgcgtccngctcangtgaatgttcttaatgggatcatgggatctagaatggtgaatccttttcagaaggtggactttgcccagatccatcaaaggaatcactatttatggcagtgttgccttatgaaatgtgtttcttaggtaataacacttgaaagtctgaattactcctggatacatggactgcagaatggatgttgtgntagcaggcatgaaaacaacattaatcttgtacatctccatcagagcttttggatgactaggtgccttgtcaatgagcagtaatattttgagaagaatctttttttgcaagcagtaggtctcaatggtgggcttaaaaatattcagtaaactatgctgtaaacagatgtgctgtcatccaagctttgttccatttatagagcacaggtagaatacagttagcatgattcctaaggcctgtaggattttcagaatagtaaataagcattggcttcaatttaaaaagttactagctgcatttgtctctaacaagggtcagcctgtcctgtggagctttgaagccagccattgacttctctctagctatagaagtcctagatggcatctttttccaacataaggctgttttgtctatagtagccaccttcatcaaggtgggctaggtcttctagatgacttgctgcagcttctccgtcagcacttgctgcttgcttcatcttgcacatttatgttatggaggtggctactttccttaaaccttgttaaccagtctctgccagcttctaacttttctctgtagcttcctcgcctctctcagccctgttgaattgaagagagttagggtcttgctctggattaggttttggtttaagggaatattgtggctggtttgatcttctgtctagaccactcaaacttctttctttccctttttttttttttgagacaaggtttcgctctgtcacccagcatggaatgcagtggcatgattatggcttactgtagcctcagcctcccaacctcaagcagtccccccacctcaacccccccaggttgctgggattgcaggcatatgccaccatccctggctaatttttattttattttttgtagagacaggatcagcgtatgttgaccatgctggtctcgaattcctggcctcaagcagttgtcccgccttggcctcccaaagcactaggtttacaggcatgagccactacaccctgccaaaactttcnctatatcagcaataggctgtttcactttattttatttatttatttttacattttactttaagttctgggatacatgtgcagaacgtgcagatttgttatataggtatacatgtgccattgatggtttgctgcacctatcgacctgtcatctaggttttaagccccacatgcattaggtatttgtcctaatgctctccctttccttgctccccacctcctgacaggcccctttgtgtgatgttcccctccctgtgtccatatgttctcattgttcaactcccacttttgagtgagaacatgcagtgtttggttttctgttcctgtgttagtttgctgagaatgatggcttccagcttcatccatgtccctgcaaaggacatgaactcactcttttttatggctgcaggctgtttcactttatcactcgtgttcactggagtagcacttttaatttctttcaagaacttttccttcgctttaacaatgtggctgtttggcacaagaggcccagctttcagcccctcttggcttttgacatgctttcttcactaggcttaatcatttttagcttttgattgaaagcgagggacatgtgactcctcctttcacttgagcacttagaggccattgtgggattattaattggcctaatttcttttttttttgaaacagagtctcgctctgttgcccaggttggagtgtagtggcacgatctcggctcactgcaacctccgcctccgaggttcaagcgatcctcctgncttaatcccagctactcaggaggctgaggcaggagaatcgcttgatgaaaccaagaggcggatgttgcagtgagctgagatcacgccattgcgctccagcctgggtagcgagtaaaactgtctc

SEQ ID NO: 236874 - DNA, 419 bp, Homo sapiens
agctggcaaggacttgagaaaatgggacagtagcgtcgttttgcagataggaaggctgaggctcagaggttgcaggtcctggaacatagagctgcattcgggcttccctccctccagcaggggtgcctggggctgacggtgacctgcaggtggaaagtggcttccgcagcaacctaggggacacgtctgcagattcaggaggccctgggaccacctcgcaggttctaggtggagataaaggggatgtggggtgatgggcccacatgaggccttggggagggcctcattacagcagggaagggggctatagtgtctctggcggtgagaagtgggcagtggcggagcctggctgcagagaagttaaccaggaagggaaaaagagtaagagggagggaaaaaatcctaacaaagaagtatag

SEQ ID NO: 236875 - DNA, 429 bp, Homo sapiens
cgggcatagcccggggaagctgcagcctcttcctgattgagagatttttagttcctaatccccagctcactaattatgattattttcattattgtacatttattgagcacctctctattgacaagtttcagtctgattttattagcccatcagtggggaaagggattgaggccagggtggtgggcagagtcccaggctgggaggcagggatagataccttggctccattcctagacccctcactgtgcctccgccctgttgtgcagagtagacctcaggccagagtctgtgctggggtcaggacagcttccagatttaaaaacaagtaggtgatacatatgttaaataacttaatttagctattccacaatgtatatgtgtatcaaaacatcatgttatataccacaaatatatgcagtttcacttgtc

SEQ ID NO: 236876 - DNA, 1928 bp, Homo sapiens
  misc_feature (674)..(674): n is a, c, g, or t
  misc_feature (722)..(722): n is a, c, g, or t
  misc_feature (1162)..(1162): n is a, c, g, or t
aatactatgtaagtgatgatgtactcttctcagtgtattggcttggagatacaggatgtcagtttgtcatgttattttattagaaatgataattctaatgccttagttgtgatggtgtcctttgggtttctgcactgcaaagttgctattttttcctttgtatttaataagtaatttgtggaaaggctaaatatcctgttcctcttcaaactttttagggattttagtgccagtgataattttttctttagtcagttattactgtaatggctgcaaaatagtgattatgtaactcttatttctcttaacatttattagttggcattctactttaaaaatgagctttcccactccgccacttatcacttagactcataaattcttattttatgtgtgagaaagtgtgtatgtgtgacttacaaatgtagcttatttgtatacatggtgtttaaaccgtatgtatgatttatatatactgtaattcattttgatgtgaacatcagattgttcctcttcaaacttgctctgtgacctttgatatgtctccatcatgtttttttttttagggtgtttttatagtttggcattaccaggatgttccaggcttatcttgtagtttccctgtttcttccttagaagcagccattttcaaaggcactctgattccttttagnggggaatggtaattaaaaaacaagatcagggtgctagctgtgctcctnatactagggcatccttatttccaggccttttcagcactcagagctaggaaagaattagcattttcaagatgaaatttccatgtgtgttttttaaaatacattttagtcatgaaatcatcatgtttcttttacttccatttgaacatcacaggattcttattcctatttctctttccctattccatattgcatctccttttttttccacaatgagaacgtggctcccagaatcttgaaatacacatataacagattcagaacttttactgttataagaaaacctattcagtagtttaggatttgtttacagttttttctttgtctctttttaggctaagggtatataattcagatattgggttcagaagtttcctacagagttgttatattaagaatttaaaatatataatttggtttattgtgtctgtttgtatgcagtnttagcatttatttttccttccatgttcactgatttattttttgcatatgtaaaacatctaacagttcgaaaggcaagagtatccaaaggtatatagaaacttgtcacatctttctctgtttctttcattcctgtcagaacagatttcatttcgtttctggtttgtttttcctgtgtttctttttacataaacaagcagatgcataaacatgtatatatatcctgttgctttgaaagagcatcttattagttctgtaaagtattggcaatattgcaaatatctgaactttttatgaagtatgtcaacagggataaaattaacttttttgggaactttactttgaaagagttattttgaaagggattttttataaaatagtataggtttttatgaaacacgtcagagtgttgctgttaactggttgcactaacaatacttatatccattgttgaagaatatagggaaagaaataccaaaatttttagtaagattttgtaaaattgcaaaaattaatattaagaattcatagaggcacagaaatgtattttttgattaatgtattgtaacctgatgtaaatccttagttcttttctcatttctgcattgacatcatactatgttgaagaatatttctaaaaatattctagagttaagaaagtgttgatagcacatctatatttaaatacttagtaccacagcaagtagtttatatgacttgagaatgatactgtaggaacatactaaaagactttagaaaaagcatgtc

SEQ ID NO: 236877 - DNA, 292 bp, Homo sapiens
caaaaaggtatttccatcctccaaggacctgtctagacatgaaggctgactgtgagaggagagatttagaggagatgggtcaccatgggggtcagacccacagatggggatggggaagaagaggtgataatccttagcaacctacgtacaaccacagaagctggtgctggctaagtcaggcagaaaagaaacttagtgagaggatcgctgagtccaggaggtcaagccatgttcatgccactgcactccaacctgggtgacagagaaagaccttgtctcaaaaaaataaata

SEQ ID NO: 236878 - DNA, 899 bp, Homo sapiens
cggggtgcacgtgcaacggagacaccgcccctaaacctggggccctgaggctaacagctaacagtggccctgccgttacggccagtgtcaggtgccagctgggctggaccaggaattcccagaaacctggcaaggcatgatttggggtgggtcgtgctgagggccacaccatccgcttccccgcttctgaggccttccgacctgggctgagcccggctacccgagtcccggggtctccggctcacagacttctcggcctccgtaattgcaaacgccagctcccccagtccatctcctgtcctggatctacgtctatatcctactggatccgtctctctggagaaccctaatacagctgtcaacacaaggatgaactaactacaagaaggcctgaataggaactctcccaggggacgaagaggtttcagccttcagcaaaggatggttcatagaaaccgttcgcatagtcggccctccacggactgcaaccctagttaatattacctacagtaaacaaaaaattcaagtatagattttagtctaaagcaaataggaaatgtcgcttccctggacgttgggagaagcaaacacgaatcctctcctgaggccggaagcggtggctcacgcctgtaatcccagcactttgggaggctgaggcgggcggatcattttataactatctattaaatgtttaagttttcagtccatttttcctgtctacatggaattgccgactgcacaaagaacacatgagggctctctcaaggccatcatttccgcggagtcccatttcctgactcaaatgacaagctctcaactttctactcaagatcattgaaacatctgtgttgattatttgtaaccgggatatgctttatttattagataagagactaacc

SEQ ID NO: 236879 - DNA, 430 bp, Homo sapiens
caaagcaaaggggtgatactcttcctaccctccctcctggcatactctccactcttcttccataacatcttctatgggtttttaccttcctttttagactattagctcctagaagcataaatgatgtcttaatcattttaaatatttctttgcccaacttacattaaaaatacttggtacattaatgtgtttagtaaatgctggatgaattaataatagacaccccttaccactatacgaatggccttaatgttctttaaccttgttaaacttgtaaggaaatgctgattggtgtttgtagaaccataaaggcgtggcatagaatgggtcatctgcaagtctcagccaaatgattgtttcagtgctttgttggtggacaccgttattctttgtgtatggctggtcatactcaaaaggttaaaagtcttca

SEQ ID NO: 236880 - DNA, 688 bp, Homo sapiens
tggagtttcgctcttgttgcccaggctggagtgcaatggcgcggtctcggctcactgcaacctctgccttctgggttcaagcgattctcctgcctcagccacccaagtagctgggattacaggcgcctgccaccacgcctgggtaatttttgcatttttagaaacagggtttcaccatgtcacccaggctggtttcaaactcctgacctcaggtgatccgtcccgccttggcctgcccatgtgctgggattacaggcataagctactgacccagcccaaccctactctcatctcaggattcaatggacaaaactgcttcctagttcaaaaagaaaaagtatgtcatcaggaacaaagcccatcaacttcacaaccatgcagcacaaatctatttgtgcctgcgcccgaagaagcacctcccctcctgtgcaagggcatgtgcactcacctgggccctggatcccactgttcctcttcatctaggacaggagctctccagcttgagtgtgcgtgagaatcacccagaaggctcattgaaacacaggctgctgagctccaaacccagagtttctaattgagtaatctgaagtaaggactggtaaatttccctgtggcgaattccttgcagccccgggaatacactatgtctagaagcgggcggcaaccgcggggagctcccagacttttt

SEQ ID NO: 236881 - DNA, 203 bp, Homo sapiens
gtaactggatcagtcgtatccgaaacttcagcatcacacagtatacccatgtaagaagtctgcacatgtatcccctgaatctaaaatagaggttgaaattatttaaaaaaaataaaaataagcaaattacttatatatgcatcaacatagatgaatgcagaaactttatactaagtaaaataagacatgtacaaaacagataa

SEQ ID NO: 236882 - DNA, 349 bp, Homo sapiens
tcttttcccagagttatgaggaaataaaggggtgtagagctaccccacccaattaacaagcagtgggtctgcaaagataagcccataacaataagtccaccccctgtacatatttgtaagcatatgactggagatgtgcttacatgtgtacctgctatatttatactcacttatcaatctatgatcaacatatccagacttacctaccttccattctttcttccttttcttttttaactttttattatagaaaatttaaaacacagatgtagagagaatcatgtaaatgaactctcatgtccacatgaccagctttgtttaacagctgtgaacacatagccaatcttgc

SEQ ID NO: 236883 - DNA, 423 bp, Homo sapiens
acactagcacattttcccatgtttgtgcatacatgtgtgtttaaactacattctggatttaaaagcctgggctaactcaatcacaggtgcagccttgtttctatgaaaggagataaattcctatagagagtgagaaagggatgcggaagccatagcaaagagaagcctccctcccttccagtccctcctgttgttttcaaacattttttgttagcagttagcggaatcctaatacccacaactgataatatgctatcttaatactattactctagtttataagcttacttacaacctttgctcattatgaagagaacaatgaagcttatttttatgaatacaacatttaaaaattaggggccaaggatgatggctgcagtcctatatcagtcccaacagccaaagttatgtgtttggttgagt

SEQ ID NO: 236884 - DNA, 447 bp, Homo sapiens
aagtgctgggattacaggtgtgagccactgtgcccggccagaaagcatgatttttaatcaaacataggtttgcatactgatctttgagctataatcttttaagtgtagatatttcttactgttaacacatatcattgctaacaaaatggtaaccttctgtagaaatctccaaattttcatatcagtcagtagttaataaacattgtcaggtgctgtgctgagtatcagggcacaaatgaataagacccaacttatcatgatacaggaaaggaaccactgccataattactattacagtatgctaattacagtacctgtttttgctgttggaaatacttttggatttttttcaaggctgataaatatccctagggtgttctagctactcatcctctttttgttaattgtgtactataggccagtgatgaactggactctggagattaa

SEQ ID NO: 236885 - DNA, 356 bp, Homo sapiens
cgccagctaggcctgttttgtgccctctctgcttaagtgacagtcttgagatttcaaggtgagcagcggataaacggttaccattagcaactccttatcaatgtgacttttctctataccgtgtaacaaagcaaaatagagaaatcagttggatctgggtctgatgtcattggagccgccatctgtaacccccagtttaaaatgtttaccttcccaaagcagccattttgttctcattagcaacctttagagtaagaaaatattatggagtcaggtgttttattccttttctaggtttcacgcgttggggtttccacgttggatattttttaagggggaatttcactgatagtctt

SEQ ID NO: 236886 - DNA, 351 bp, Homo sapiens
aagaaagaggccagatttctttctttctctgtgtaaacttctgattttcaactttgctttctgcaagaggctctggtttatgaattactttctatttggaaaaaagtatttaaagatattagtatacaattgaaaatgcaggatatgcatcataattttacggtacaacttttattcattaaagctttattaataaaaatgactgtaaaacatttaaagttataatgtgtatagaaatgttaaatgatgtaattaattttaacaactgtatatatattgaaatattgaatgctcagagatttttaaggcaattttggcatggctttcagattgattaaaccattgaaatgc

SEQ ID NO: 236887 - DNA, 408 bp, Homo sapiens
tggggggtgatatggagagagaatgggcgatgtttctcagggctgcttcgagcgggattaggggcggcgtgggaacctagagtgggagagattaaaattttagtttcctgacttgggacatgttgaataaagctaatttgccagtcctgggtgggggcaaatcctcgagcttgatgtgtaaggaagggagggggcctgaataatccctgaggaatagtagaacagcagatggaacactgagaaattatttccttgaggatagatttccacgatggaaaggaaatgagaggttctgagaggcaggctagtggcttgtactatagcatagcctgcctttgctggtgtgtggcgattaggcctggtggaaccgccatcaataaatcaagcgtgatcggggtgaggaacagg

SEQ ID NO: 236888 - DNA, 466 bp, Homo sapiens
gctttgtatttccaaagcttacaacttgaggactttcctctttcttcttctccattttattttttaaccaggaagtcctgaagcaatcaaaatcattggttacttcctaccgtaaacaaccctttcatgaagtcatagcaggaaaagaaaaaaagccagcactcagttactcggagtttgtcctcccctgtttatcctgggctaggtaaacagaacattccagaagttcagatattggtagattaattcctatagtggtaactgaactgagttcccaatatcgagggtaatttctttcatcttaaggatagaaaagtgggaatttatgggtttttttggagacagcaggaattcccttttttgtcatgttctatgtaagggagggatggaccaaattcagcctgctacctgtttctgtatgacccaggtgttaagaataatgtttatatttttagatggtgagaaa

SEQ ID NO: 236889 - DNA, 1910 bp, Homo sapiens
aatgtatagtaaatttggtattaaaattgtctcaattatttgaaatttccatttctattgtttttactctgtcatcaatttctgtctggatatgcagttacctgtagctcagaatctgactaggttatcgttaaattcaaaacccacaagaggacattatgttaacaaacctggaaaatataaatggagttttaaaagaaatatataaactaccaaaatagacttgaggaattagaaaacctgaacaaagcaataaccaaggaaagcattgaacaatattattaaacaattcgctttatgaaaggttcctgtccctgataaatattgtattaggaatgtttgcttccaaggaatgactaaagggaaaagggatttataggaaacatagagggtaatctcatagaaaacctttgcagtaagtaaggctggacttcatgtaaactgtgaagtcattaaaaagcaaatcttgttcactgtatcttttaaggtttctatggctcttgttctctgcttttctccaaatacacgttttcttagcctgtatatagttgaataatagcgacccacccgaatttacccagcatttagctccagcacttactgacatcgaattatccacagctaaatgtctcttagttcaaacgcgcaaaacacattctcattggtcaccaaatgaccagtgtgtttcctctcctcaagtgcagtgtctgcttttggtctgatgagctgtgggtggataatcagggtatgtgattgattcatagtctgtgcagaggaggttgaacctgagtgtagtttgcactggtgaatttattgacatgtctgctatagctctattgatgagtctatcctgttttcaagaatgaccgtttccaaaatatgtatattggtattgagcacaaaaaaggctaacagcctgaaaaagaaaactccagtttttgaacataaatggctccagtacatgagcataaatattcattgtctcatatatatgattgtataaacaaatactataagatcatattcattcaacaacctaccacaggcaaatagtatttaacccaagaatgcagggtgattcaatactgggaaatctattaatataataaaattaatatgctattgatattgatcaaaaagtcaaatataccatctgatgctggaaaagcagctgataaaatttaacaattcctgatacgatatttcgtacacttggtttttgtacttttttgctatttccagtaaactgaacattttttcatttttataaccagacaatatatcaaagatgtttaaaacctcttaatgcagataataaatatttttatattccaagttcctaattcacgtaacgatctcttaataagtacttttaatgaagcattccattaaagtggtctggtttttgagaattattaagaaacagaatagagtttttctttgtcccacaggagaccttgtttcaggagtgtaccttttctgatgttcaatgtgaaggatcggcagtgccttttaggaatgaataattgcttttcttcagcaggtgcctttcaaaattgttctcttcacttactctaggaattgcctgtggctgtctgaactctgactcccttctctaagctgagtcaatgctctaatcatgacctttgtgcagctctcactgatggctgatcctccacctggatgttctatttcagactcagtatgttcctccctaagcctatttcaccctctgttcaaaacaatttacagcagggcatggtggctcatgcctgtaatatgagtactttgggaggctgagacaggaggatcatttgaggccaggagcttgaaaccagactgggcaacatagtgagaccctgtgtctaccaaaaaccttaaagcctgggtaacagagagagactctgtct

SEQ ID NO: 236890 - DNA, 1835 bp, Homo sapiens
tcatgaactgctgacctcaaatgatctgcccgccttggcctcccaaagtgctgggattacaggcatgagtcactgcacctggcctggagcttggattctaactcctgtgtgttttctccaaaaactgtatttcagccactattttcattgtgtcatgcatatatcattttggatcctgttattttattagtattttaccagaaatgttcatcctcattttctcaatgatcatattaaattttatttataatatcatccagtatacagtccctttcactaaataatagtctgagttcattccctaggatattttatatttactataaattatatgcacatgctttgtaaagttttcttttttgaatgttggaactaaaaaaagtcaataaatattctaaaaagtctaacttttttccccatgtcaatacactgcaggacttgtatattctttttcaaatattcataatgtgtcactctagtggtaaagtataaaatagcctattgccttgaggaacttcagatgggcacgcattttatacctaagccaggttagaagcttttaatcaagagaatatttgaaagttaaatcaagccaggcgtggtggctcacacttgtaatcccagcattttgagaggctgaggtgggtggatcatttgaggtcagcagttcatgaccagcctggccaacatggtgaaaccttgtcgctactaaaattacaaaaaaattagccaagtggtagtggtgcatgcctgtaatcccagctacttgggaggctgaggtaggagagtctcttgagcctgggaggtgaaggttgtggtgagccaagatcgtgccactgcacctgcactccagtctgggcaacagagtgagaccctttcccaagaaacaaaagaaaacaaaaaattaagtctttttcttcttcttcagagctatctaagaaatatttcgtaatagaactctagctgtttttatatttttaattatttaatttttaagcgatagtttgcttctgtttccctccttccccactttgcagtttctcaggtatagttgtttttcagagttgtataggttaaggtgttgggaactccataacccatggttcttgcctgtagttctaaaattctcacatttagcagtctgcactcatcaaacatctagttgaactagatgactgattaatcacctcgtgattcattgtgttttacttctcatctagtaaactcttaatgcagataataaatatttttatattccaagttcctaattcacgtaacgatctcttaataagtacttttaatgaagcattccattaaagtggtctggtttttgagaattattaagaaacagaatagagtttttctttgtcccacaggagaccttgtttcaggagtgtaccttttctgatgttcaatgtgaaggatcggcagtgccttttaggaatgaataattgcttttcttcagcaggtgcctttcaaaattgttctcttcacttactctaggaattgcctgtggctgtctgaactctgactcccttctctaagctgagtcaatgctctaatcatgacctttgtgcagctctcactgatggctgatcctccacctggatgttctatttcagactcagtatgttcctccctaagcctatttcaccctctgttcaaaacaatttacagcagggcatggtggctcatgcctgtaatatgagtactttgggaggctgagacaggaggatcatttgaggccaggagcttgaaaccagactgggcaacatagtgagaccctgtgtctaccaaaaaccttaaagcctgggtaacagagagagactctgtct

SEQ ID NO: 236891 - DNA, 2280 bp, Homo sapiens
aacacacattaattttatagacatggttgctgctaagtgttttacatgatgtttagagagcattcactttcctgttttaattgaacttggaagttttgtttatgtcaaaatttgcataagtttcttaatttttcctagcccttctaagatccacattgtctcaaaatccaagttaaaaatgaggtacgtgatgcatagtaatgtgtggccagcatgtgaatagttcggactttttgcatacattgagaaataaatagacatcccctgaacagtctcaactttcagcctaattcagcaatgctccttctaccctttgcttctgttgtgacgccaatgggtatatcagtgaaaaagatgaaaaattctttgccattatgggtttgtgcccctcgagaaatagttcagaggacccttgaagaaagaaatgaatggaatgtatcaggctaatgtgaaaatacaatattagtgattgttagaggacagtgttttgcctgtaacattttaagtgtaattttgtgtttgtgtgtatgctgggagaggacaaaatggtagactttggacttacaagctgattttcaacttcataaaaagttaatgttcttaccagctttgtgctaggcacacatggataagtaggctaaaccaggtctagttcccataatcaggagggttataatttaatgcacagaatgtatttttttccagtatacagtccctttcactaaataatagtctgagttcattccctaggatattttatatttactataaattatatgcacatgctttgtaaagttttcttttttgaatgttggaactaaaaaaagtcaataaatattctaaaaagtctaacttttttccccatgtcaatacactgcaggacttgtatattctttttcaaatattcataatgtgtcactctagtggtaaagtataaaatagcctattgccttgaggaacttcagatgggcacgcattttatacctaagccaggttagaagcttttaatcaagagaatatttgaaagttaaatcaagccaggcgtggtggctcacacttgtaatcccagcattttgagaggctgaggtgggtggatcatttgaggtcagcagttcatgaccagcctggccaacatggtgaaaccttgtcgctactaaaattacaaaaaaattagccaagtggtagtggtgcatgcctgtaatcccagctacttgggaggctgaggtaggagagtctcttgagcctgggaggtgaaggttgtggtgagccaagatcgtgccactgcacctgcactccagtctgggcaacagagtgagaccctttcccaagaaacaaaagaaaacaaaaaattaagtctttttcttcttcttcagagctatctaagaaatatttcgtaatagaactctagctgtttttatatttttaattatttaatttttaagcgatagtttgcttctgtttccctccttccccactttgcagtttctcaggtatagttgtttttcagagttgtataggttaaggtgttgggaactccataacccatggttcttgcctgtagttctaaaattctcacatttagcagtctgcactcatcaaacatctagttgaactagatgactgattaatcacctcgtgattcattgtgttttacttctcatctagtaaactcttaatgcagataataaatatttttatattccaagttcctaattcacgtaacgatctcttaataagtacttttaatgaagcattccattaaagtggtctggtttttgagaattattaagaaacagaatagagtttttctttgtcccacaggagaccttgtttcaggagtgtaccttttctgatgttcaatgtgaaggatcggcagtgccttttaggaatgaataattgcttttcttcagcaggtgcctttcaaaattgttctcttcacttactctaggaattgcctgtggctgtctgaactctgactcccttctctaagctgagtcaatgctctaatcatgacctttgtgcagctctcactgatggctgatcctccacctggatgttctatttcagactcagtatgttcctccctaagcctatttcaccctctgttcaaaacaatttacagcagggcatggtggctcatgcctgtaatatgagtactttgggaggctgagacaggaggatcatttgaggccaggagcttgaaaccagactgggcaacatagtgagaccctgtgtctaccaaaaaccttaaagcctgggtaacagagagagactctgtct

SEQ ID NO: 236892 - DNA, 626 bp, Homo sapiens
gataatggatatgttaattaccttgatttgatttctgtacattatatgtatcagaacattatctaccccatgaatatgtatgattattatttgttaattaaaaaaataaaattaaaaaaatcatacatgggccaggcatggtggctcatgtttgtaatccgcccacctcggcctcccaaagtgctggtattacaggcgtgagccaccatgcctggccattagtaaggtgttaaaaaataggttctctttgtaaaaattagttttgaactttatttttactttttttctttgcattctcacccagtctatttttggtcttattttgaagtttcgcacaccagtcaagatgtatatatatgtgggccatgggatatactttctgactttgttattctgtcatgttgacactctctcagtgggaatctgcattagtctgttttcacactgctgataaagacatacccgagactagaaagaaaaaaaggtttaattggacttacagttccacatggctagggaggcctcagaatcatggcaggaggcaaaaggcacttcttacatggcagcagcaagagaaaatgaggaagaagcaaaagcagaaacccctgataaacccatcagatctc

SEQ ID NO: 236893 - DNA, 552 bp, Homo sapiens
ctttgtattcacttggctgtttggcacagaaggcccagctttcagcctgtcgtaactgtcaacatgctttcctcactaagcttaatcatttttcttgctttcgacttaaaacaaaagatgtgtaacccttcctttcacttgaacacttagaggccattacaaggttattaagtggcctgtttcaatattgtttcttagagaataggaaggccagaggaaagggaaagagatagggaatggcaggtcaatgaagcagtcggaacacacacaacctttatagattgtttgccacgtgggcatggtttgtggtgccgaattacaaaagtgatatcagagatcactgatcacagatcaccataatagataatatcataatgaaaaagtttgaaataaatattgcaagaattaccaaaatgtgacagagatacaaagtgagcacactgttggaaacatgccagtagacttgcttgacccaaggttgtcacaaatgtgcgatttgtaaaaaacgagtatcttcaagtgcaataaaacaaagttcagtaaacagggtat

SEQ ID NO: 236894 - DNA, 945 bp, Homo sapiens
aatctattttaactttgatattgtgaatatcctcaagaatccccttaagtaggtcataaaaaggctcccaaatatagagaaacagcttagaaactgcttccatattcagattgttatacaaaaagcatgagcattatgggaagcactaacatttccctggctctcgatgtgattcagagaggaagtccctggcacttggtgatgctcagtacacaatgattcttctctttctccctggagctgttctttaacagaatggttcaacaagatagaatcctagaaggaaataccactggtttactgcatgagtaaaattaggaggcaattttaaaacatgacatatgcgaaaccaattaaagttaatatctgaagctgggctcatgcctgtaatcccaacactttgggaggccgaggtgggcagatcacctgaggtcgggagttcaagaccagcctggccaacatgctgaaacccatctctactaaaaatacaaaaaaaattagccagacgtggtagtgggcgcctgtaatcccagctatttgggaggctgagacaggagaatcccttgaatccaggaggtagaggttgcagtgagtcaagatcatgccattacactgcagcctgggtaacaagagggagactttgtctcaaaagaaaaaaaaagttaatatttggactcctggatatatggtcatacctggtttccacatcagactctaaaattcaacaaaacttaatacctgctgtaatactgaatgttgatgatgaaggctttatcccacataggcataaaaggccattgattacagccattatgaaacaataacatctgagtgtgaatacaacagagagcattgaaggagatcagttgatatagtgtatacaggaacttgttttctaaattaaaagataaggccaggcacagtggctcacgcctgtaatcccag

SEQ ID NO: 236895 - DNA, 616 bp, Homo sapiens
cggcacgaggcgtgcgccgcctttgcagtaaataagatgaggaaagcgaggcaccgcggggccaggtcacttgctcaggggcacgcagcaggggttctgcctgagaagccgtaagctcacgtccctaaagctccgcagcaggggctttggatccttgtgaatttcagctcctccaaggcttgaggaaagaattcaagaaaggtccagtggagcctcgtggaagcgcagagcagtgctccagcaggaggaccctcagagccctcggcaacaaggatgagactggaacaatagagacaggagggagttctaggggccgatttaagtcaactggaagctggatgttggtgggcgttttcgctttttttttttttaatgctagagcacagtggctaaaaaaggtgggctctggggccagcctgcctgggttccaatgcacttgctggctgtgtgcccttgtgcaagttacttaacctctctgtgtttcagcttccataactataagaaaaggaatattagcacgttttcccaacagagcccatggggggttcaatgagatatggaagcacccccacactgtcaggcacaggcaaatgctcaataaatgttcattattagt

SEQ ID NO: 236896 - DNA, 229 bp, Homo sapiens
gccacctgaagctctacaaggttccaaaggtgaatattaaggaaaatccctcatgctctggcagccagaggggaaaaggaacaattttgaaatatgccagaatatcgttcttaacaatgtctgccctcaggagaagatgtttaaccagagcctaatcttctggggttttctgagagcctcattgatctgggggaagggaaataccaactccagccccttctagccttcc

SEQ ID NO: 236897 - DNA, 392 bp, Homo sapiens
aaatgagttcattgtttttgacgtcctcgtcgattttttccccctcaaagagtagataattagaactttgatgaagaaaaggtcctatgttctgttttatacataatcattttctgaaccatcaagtgtaattcagcttcaatcttcagggcgaatgaagattacttaggatgtattaaactgtgtgaatttaatgttcatgacaagtgtttcataaaggaagatgctggctattatctctcctcagaaggaaattgttgataagaaaccattctgagaagtaagatttatggcaacatcagaggctagagaagctggggcagctgagcacccaggacgatcaggacaactaggacaattcagtttttcttgtgctgtcttttgtgttacaa

SEQ ID NO: 236898 - DNA, 613 bp, Homo sapiens
ggggctgtcgtggggtttaagcaagctcaggccatggagtccagtggagtcagttcgtgttcctgttgtgccacttctttctcaccctgccttcccgaacctcagtttacccatttgtcaggtggtttagcagatgcttcttcctttcaacattgtgattggggtaggggagatgaacactggtgggagcttgtcactctcgtcctttcatcctgctttgtacactctgagaaaggcttattgggcagaggctgcccttctgaggtgtggatggaactgttggtgacattatttttattaatttatttttagagacagggtctcggctgggtgtggtggctcatgcctgtaatcctagcagtttgggaggccgaggtgggtggatcacgaggtcaggagatcgagaccatcctggctaacatggtgaaattccatctttactaaaaatacaaaaaaaaaaaaattagccgggcatggtggggggcacctatagtcccagctacacgggaggctgaggcaggagaatggtgtgaacccgggaagcggagcttgcagtgagccgagattacaccactgcattccagcctgggagacacagcgagactccatctca

SEQ ID NO: 236899 - DNA, 141 bp, Homo sapiens
cacttagagcattttatttaacagaccacatctgtgcccttaatgaatagtaattaaaactcacagcagcattcccattcggtgatgaagagttattatacacactctctaaaacaggtaggctttagaccatgtagtctg

SEQ ID NO: 236900 - DNA, 355 bp, Homo sapiens
agcctaagaaaatctgtcgctttctagccaaaggacaaggagagaaggagctttgttagaaaacttttaggagccgggcgcggtggctcacgcctgtaatctcagcactttgggaggccgaggcaggcggatcacgaggtcaggagatggagaccatcctggctaacatggtgaaaaccccatctctactaaaaatacaaaaaattagccaggtgtggtggtgcacacctgcagtcccagttactcaggaggctgaggcagaggaatcgcttgaacccgggaggcagaggttgcagtgagccaagatcacgccattgcactccagcctgggtgacagagagagactgtgtctaca

SEQ ID NO: 236901 - DNA, 487 bp, Homo sapiens
ctgacctctctttggtgccctggacagcttgggggtgacaggatgaagagagcaggcaacctgagtcagccctttcattgttctgggttttgagtattctgtgtgaagcagagagcaacctagagctgtgtgggattttatgccttttctccatgcctcacctgccatattgatctgactggcaaaacgaatcgggtaaggcttctttgagctaggctcaggcatcagctgcacataatggatattacctcaaggtatttttggtataaatagtgccatgtttagaggatgcattgaccttcaagggtattggtcagaactgagattaagctcaaagttagcttcagacaagataatgagaagcgttttcctggaatattttacaatgtgctctgggcctgctgtttattcagctttatcctggtttttctaccactatccattaagaaaaccatgctgtaataaatatcttgttcacaaatgaaaa

SEQ ID NO: 236902 - DNA, 344 bp, Homo sapiens
ccaggcctaaggactactatagaaaacaaatggttgggaaaggcagtgaaaagctgttaaatgtggctaaaggaacttaaggacaggcctggtggctcacgcctgtaatcccaacagtttgggaggccgaggtgggtggatcacctgaggtcaggagtttaagaccagcctgggcaacatggtgaaaccccatctctaccaaaaatacaaaaatcagctaggcgtggcagcacatgcctgtaatcccagctattcgggtgactgaggcaggagaatcgcttgaaccagggaggcagatcacagcactgcactccaactgggcaacagagtgagactccgtctca

SEQ ID NO: 236903 - DNA, 1343 bp, Homo sapiens
gagagagtgtctatatatgtcaaccagactggagtgtagtggcatgatcacagctcactacagccttgagcttctgagcccaagagatcctctgccttagcccctagagtagctaggaccacaggtacatgccaccacacccagctaattttaaatttttttatagagacagatctcactttgttgcccagactggtcctgaactcctggcctcaaggggtcctcctgcctcggcctcccagagtgctgggattacaggtatgaggcactgtgcccagctggctctttaatctttactattagactgattttcatatgacacagtaggcatagggctcttttagttactagtgattccaaaagtgactttaatcccattactcaggatctctatggtactgtcaattagatcttcctcatttttgcaacatgtttacgtagcattaatgatattattgtttcataagtgagaaaatgaagacacagaaggataaaatagtttgttgcatcagcttgcgggcataataagcaacctttcttctctctgttaattctgttttgtaggccagtataatggctttagtgtcactgttgttaaggagtttttgatgggttgtttctattttctttttgagatgtgaactgtccagattaattctaatctataacttttgggaaaagtatattgatatacatgttagaatgtgtgtgtgtatgtgtgtgtgttgtgtgtatgtagtagatgataacctttagctttggttttcaataagaattttaaaatttattacaattagaaaatttttcctccagtttttattcagttgtcctttttccctttggaaatagtggacctgacccaattcttttttgagaattcatttcatagagcagcgtgttagaatatttttgttcttctaatcaagtgcagtgtaagaactgtagacatccataatttcttttctatcccttggttaagatattagctttattactatatttactggtcctggaatagcaaggcataatctgaggagcatagctacttcatctgtgtaataaattgctctttcactacaaacattttaatactgattttgttggtcatttaactttctaatagtggtccttaaattatgctctaaaagaagaataccatatatattggaaattaaatttgttgttgaataaaattagaattattataaaattcaacacgaccttattgctacctcaggataatttcttggcaaaaagttgatccaaactgggtgtggtggctcatgcatgtcatcccagcaccttgggaggctgagacagaaggattgcttcagcccaggagt

SEQ ID NO: 236904 - DNA, 1290 bp, Homo sapiens
gagagagtgtctatatatgtcaaccagactggagtgtagtggcatgatcacagctcactacagccttgagcttctgagcccaagagatcctctgccttagcccctagagtagctaggaccacaggtacatgccaccacacccagctaattttaaatttttttatagagacagatctcactttgttgcccagactggtcctgaactcctggcctcaaggggtcctcctgcctcggcctcccagagtgctgggattacaggtatgaggcactgtgcccagctggctctttaatctttactattagactgattttcatatgacacagtaggcatagggctcttttagttactagtgattccaaaagtgactttaatcccattactcaggatctctatggtactgtcaattagatcttcctcatttttgcaacatgtttacgtagcattaatgatattattgtttcataagtgagaaaatgaagacacagaaggataaaatagtttgttgcatcagcttgcgggcataataagcaacctttcttctctctgttaattctgttttgtaggccagtataatggctttagtgtcactgttgttaaggagtttttgatgggttgtttctattttctttttgagatgtgaactgtccagattaattctaatctataacttttgggaaaagtatattgatatacatgttagaatgtgtgtgtgtatgtgtgtgtgttgtgtgtatgtagtagatgataacctttagctttggttttcaataagaattttaaaatttattacaattatggacctgacccaattcttttttgagaattcatttcatagagcagcgtgttagaatatttttgttcttctaatcaagtgcagtgtaagaactgtagacatccataatttcttttctatcccttggttaagatattagctttattactatatttactggtcctggaatagcaaggcataatctgaggagcatagctacttcatctgtgtaataaattgctctttcactacaaacattttaatactgattttgttggtcatttaactttctaatagtggtccttaaattatgctctaaaagaagaataccatatatattggaaattaaatttgttgttgaataaaattagaattattataaaattcaacacgaccttattgctacctcaggataatttcttggcaaaaagttgatccaaactgggtgtggtggctcatgcatgtcatcccagcaccttgggaggctgagacagaaggattgcttcagcccaggagt

SEQ ID NO: 236905 - DNA, 1289 bp, Homo sapiens
gagagagtgtctatatatgtcaaccagactggagtgtagtggcatgatcacagctcactacagccttgagcttctgagcccaagagatcctctgccttagcccctagagtagctaggaccacaggtacatgccaccacacccagctaattttaaatttttttatagagacagatctcactttgttgcccagactggtcctgaactcctggcctcaaggggtcctcctgcctcggcctcccagagtgctgggattacaggtatgaggcactgtgcccagctggctctttaatctttactattagactgattttcatatgacacagtaggcatagggctcttttagttactagtgattccaaaagtgactttaatcccattactcaggatctctatggtactgtcaattagatcttcctcatttttgcaacatgtttacgtagcattaatgatattattgtttcataagtgagaaaatgaagacacagaaggataaaatagtttgttgcatcagcttgcgggcataataagcaacctttcttctctctgttaattctgttttgtaggccagtataatggctttagtgtcactgttgttaaggagtttttgatgggttgtttctattttctttttgagatgtgaactgtccagattaattctaatctataacttttgggtgtatgtagtagatgataacctttagctttggttttcaataagaattttaaaatttattacaattagaaaatttttcctccagtttttattcagttgtcctttttccctttggaaatagtggacctgacccaattcttttttgagaattcatttcatagagcagcgtgttagaatatttttgttcttctaatcaagtgcagtgtaagaactgtagacatccataatttcttttctatcccttggttaagatattagctttattactatatttactggtcctggaatagcaaggcataatctgaggagcatagctacttcatctgtgtaataaattgctctttcactacaaacattttaatactgattttgttggtcatttaactttctaatagtggtccttaaattatgctctaaaagaagaataccatatatattggaaattaaatttgttgttgaataaaattagaattattataaaattcaacacgaccttattgctacctcaggataatttcttggcaaaaagttgatccaaactgggtgtggtggctcatgcatgtcatcccagcaccttgggaggctgagacagaaggattgcttcagcccaggagt

SEQ ID NO: 236906 - DNA, 1289 bp, Homo sapiens
gagagagtgtctatatatgtcaaccagactggagtgtagtggcatgatcacagctcactacagccttgagcttctgagcccaagagatcctctgccttagcccctagagtagctaggaccacaggtacatgccaccacacccagctaattttaaatttttttatagagacagatctcactttgttgcccagactggtcctgaactcctggcctcaaggggtcctcctgcctcggcctcccagagtgctgggattacaggtatgaggcactgtgcccagctggctctttaatctttactattagactgattttcatatgacacagtaggcatagggctcttttagttactagtgattccaaaagtgactttaatcccattactcaggatctctatggtactgtcaattagatcttcctcatttttgcaacatgtttacgtagcattaatgatattattgtttcataagtgagaaaatgaagacacagaaggatgttaattctgttttgtaggccagtataatggctttagtgtcactgttgttaaggagtttttgatgggttgtttctattttctttttgagatgtgaactgtccagattaattctaatctataacttttgggaaaagtatattgatatacatgttagaatgtgtgtgtgtatgtgtgtgtgttgtgtgtatgtagtagatgataacctttagctttggttttcaataagaattttaaaatttattacaattagaaaatttttcctccagtttttattcagttgtcctttttccctttggaaatagtggacctgacccaattcttttttgagaattcatttcatagagcagcgtgttagaatatttttgttcttctaatcaagtgcagtgtaagaactgtagacatccataatttcttttctatcccttggttaagatattagctttattactatatttactggtcctggaatagcaaggcataatctgaggagcatagctacttcatctgtgtaataaattgctctttcactacaaacattttaatactgattttgttggtcatttaactttctaatagtggtccttaaattatgctctaaaagaagaataccatatatattggaaattaaatttgttgttgaataaaattagaattattataaaattcaacacgaccttattgctacctcaggataatttcttggcaaaaagttgatccaaactgggtgtggtggctcatgcatgtcatcccagcaccttgggaggctgagacagaaggattgcttcagcccaggagt

SEQ ID NO: 236907 - DNA, 704 bp, Homo sapiens
ggtttctccatgtaggtcaggctggtcttgaactcccgaccttaggtgatccatctgccgcggcctcccaaagtgctgggattacaggcttgagccaccacgtccggccagtgcagatatctaaaaagataaggactttaaaaacaacaatcttactaccattattacacctgaaataatagcagtaatccttttatatcatcaaatattcagtcactgttaaaatgtcagactgttggccgggcaccttaggaggctgaggcaggtggatcccttgaaggcaggagtttgagaccagcctggccaacatggtgataccctatctctgctataaaaattaaaaaaattagccggctgtggtggtgtgtgcctgtagtcccagctactcgggaggctgaggcaagaaaatcactggaatccgggaggcggaggctgcagtgagctgagattgtgccattgcactccaacctgggtgacagagcaagactctatctcaaaaaaagaaaaaaaaaaaggactgtcaaaattaatagctcaagactgttcagttttcaaattaggatccaaataaagctcatacattgcaattggttaattttcttgtccttttcatctgtagttctgctgttacttttattcacttgcaatttactgttaatccatggactttgtagaattttttacattctggatatatatatata

SEQ ID NO: 236908 - DNA, 226 bp, Homo sapiens
gtaggctcagggacctgtttgtggaccttctaaagtatttctccaaatgaaacaatgaaaaagttatcatctattttattcatttatgtgttgccttaattctaggtaatacctatttgccagtggaaagaatattggtgctacagaaatcttaattgtttggaaagtagaattttaaaagacatttctgccttttttcttcaaatattaaaagacttatgggata

SEQ ID NO: 236909 - DNA, 834 bp, Homo sapiens
  misc_feature (73)..(73): n is a, c, g, or t
  misc_feature (100)..(100): n is a, c, g, or t
  misc_feature (137)..(137): n is a, c, g, or t
  misc_feature (311)..(311): n is a, c, g, or t
  misc_feature (401)..(401): n is a, c, g, or t
  misc_feature (412)..(412): n is a, c, g, or t
  misc_feature (449)..(449): n is a, c, g, or t
  misc_feature (456)..(456): n is a, c, g, or t
  misc_feature (459)..(459): n is a, c, g, or t
  misc_feature (503)..(503): n is a, c, g, or t
  misc_feature (515)..(515): n is a, c, g, or t
  misc_feature (532)..(532): n is a, c, g, or t
  misc_feature (558)..(558): n is a, c, g, or t
ctgctggggagataagtacatacctagggtttccaaaagtgctacaagagtccaaaagctataaggaaaagcnaagccagcttagcaaactgcccgatgnaagcaccttgctaggcagatggcattattggaagganctaactgtggggactaaactgaaagcttggacgtttgatatggagtcttctactgagaactgtgttgcatttcttgctttgtatattcctctttgtgctgagctgtattctttgtcttctttgctgttatctttatataaatcacagtcacacttggtacaccatgtacatttntgactaaagtagaatcagtgcaatcttctcaggacctaagaatcatggtgagtggccataaatgttagaaatggaagatttctggaatgncagacatatcncacttgttccagaatgtaagctgtcttattctgctcnggctacnatnagaaactccacagaatatgtgccattcacaatagaaattttttnctacagttctgnagactggaaagtccaanatccaggtgccagccagtttagttcntagtgagcagctctcttcctggcttgtagacggttgctttctcctgtatcctcatgtggcctttccttcctgtgtgcgcgcagagagggatctccctctctatttcgtcttatttggcctctcaatttattacattagaacgtctacctttatgagctcatttaactttacctcttaaaagctctatctctaaatatagtcacatcagaaattaaactttcatcataataattttgggtgacacaatagcccatggcacaaacctctgagtttggt

SEQ ID NO: 236910 - DNA, 518 bp, Homo sapiens
  misc_feature (31)..(31): n is a, c, g, or t
acgatcttggctcactgcaacctccgcctcncaggttcaaatgattctcctgcctcagcctcccatgtagctggaattacaagtgtgcaccggaatacaaaattatatacatatttgtttaaaattactgaaacatattcatgagacaaagctaaaaagagacgtgtagaaaaatcaaacattttagctgatagtggtttctttttaaaatttgcctttatatttctataaagctaattgcagccaatcatagctaaccgaagactcaaactcctgagctcaagcttttgtaccatattgtacttaccatattgtaagtaatgcaatactggtaccatcatctcttcacttggcttccaggataccacactcactgacttgcctcctaattcactggcattcctccagggactcctgtgccagctgctcctacctccctgatccctaacatttgaatgtcccaggcctcagtccttgtctctctcccactcccttggggattttatccagccacgact

SEQ ID NO: 236911 - DNA, 497 bp, Homo sapiens
ttgagacagagtctcgctttgtttccaggctggagtgcagaggtgtgatctcagcttactgcaagctccacctcccgggttcaagtgattcttgtgtctcagcctcccgagtagttgggaccacaggtgtgtaccaccatgcctggctaatttttgtatttttagtagagacgtggtttctttttaaaatttgcctttatatttctataaagctaattgcagccaatcatagctaaccgaagactcaaactcctgagctcaagcttttgtaccatattgtacttaccatattgtaagtaatgcaatactggtaccatcatctcttcacttggcttccaggataccacactcactgacttgcctcctaattcactggcattcctccagggactcctgtgccagctgctcctacctccctgatccctaacatttgaatgtcccaggcctcagtccttgtctctctcccactcccttggggattttatccagccacgact

SEQ ID NO: 236912 - DNA, 503 bp, Homo sapiens
agagaaatttgggtgcagagacagagataagaccatgtaaagacacagaacgccatttacaagccaagctcctagaagctgggagagaggcttggaacagatgtgcctcacagcctcaggaaccaatcctgccagcaccttgatcttggacttctcgcctccagacctgtgagacaatatattgctgttgtctaagcctcccagtttgtggtgctttgttttggaggccctggcacactaatacagtatccactggactctcagtaactaaagggacgaaagtgtcctccttctccctgcatccccttattgccaaatgcatcttgggaaggctattacgagccttagaaggatgaggagtgacctaaatggtaagtttaagtaacatccagaatttgtatgtagaaaaattcagatcataaggatttatacctcagtatgctattgttcaggtgccatctttttgtaataagtcgtagaaccaataaatttgaaagaattaa

SEQ ID NO: 236913 - DNA, 558 bp, Homo sapiens
gctccctctgtttctcctatctttagttcattctcagggttattcattgtctgttctttctgggtaggtgctccctggagctctggccttagtcatcttctccattctttcctcagagttcctgcaagctattttcctcacccatggcttggttgccacctaaatttatgttttttatattcagctaatttttccatcctctagactcatatggcaaactgcccaccagacatcttcttctctgtggtccacaggaccttcccactgtcctcaacaatgcttcctggtgggtttctggggctccccctaaaaaggccccttcccacttgggagatggggaatctgaggctaagaggtggctgtgaaccccagtccagggcagggctgggccatctgtctgtgctcactgtgtcagtggccctttaggatatgcagtctaaatgtccgatggagttctgcttggtgatgccccctatccagtggctcaggctttccttgaagtgggaatctctttccctaatccagaggctctttggagcctgacaatttacttcccct

SEQ ID NO: 236914 - DNA, 407 bp, Homo sapiens
ggagatcttattaaaaatgatactgactgctctttgaatgctgccaaaaattgctccatatttcgtgttctaccccaagctgccacaagagggcattcttcccccaaaatatatgcaagtaggtagtaccattgagttctacaaatagagaaaataatatttgtaagatatttcatgagtttctttggcctggctaggaaatatttacattaatgtctgattataagatgatactttattttctcactgtgttttcttctccgattttgaattttatagggtgttaaccaatggattagatgacaaccaaaaactgtatatgttttttaagtaaatggctttttgttttgcttttgatttatgattagcattgtctaataaaattggtggttcattatgttccatag

SEQ ID NO: 236915 - DNA, 300 bp, Homo sapiens
atagaaacatatttcatatgtatctgtaaaagagatttgcatcaaaggggagcaagggaattgtgtaatggcaggtgggaaagtggagccaagagaatataaatataaatatatatatatacaatgataaatatttgagtgtgatatataataaagatgagaaataacagtataaatgaatcctgattgactgatcaaaatgacccaatagacagcacaacattgataatgctggagataagggagagaaagaaggtaaagaaggtagtgatatcatttagttgatgtgagaagaagata

SEQ ID NO: 236916 - DNA, 703 bp, Homo sapiens
  misc_feature (51)..(51): n is a, c, g, or t
gtgaaacctattatagagtcatcattttaatgcagaaacaaaaatcactancaattcggaaaggatatttgtttattgaacacctaattcatacgggaactgtgctaagtagttggcgtatatcttcacatttaactctcacaaaaatttaatgaggaataagttcagtagctttccaaggagaatgaggctttccttatacctcaatttaacaatttaaaaaaattgagtgttcaggaaagagacagctcctgccttttccacacctcgctttagctcattggtcatcaattccaagactctctcctcctggattctgggctaggtagctctgttccctggcttcagccattagatgcatggagacctaggtaatttgtgcattcacaaatgaaagtgttctaggaatactgtggaaagaaacaaaagtactgtagtctaataaggccacagatatcccttctgtatgtctagccctctaaaagacgttctccccaagaagcaaacaagggaccccattagtggagagctttcatctggccacatcacatcagagccagatgcaccatgtatgcaaacttttttagatcttttctgtctaagagagaattttcctatgtaaacagactgttttgcttgtctattgatgtgaacaaattacctctaggcttagtagttgaaaataaaatcaccaccaacacca

SEQ ID NO: 236917 - DNA, 155 bp, Homo sapiens
ttagggagaacaacatttgtagttgccatatttactgctttgtcatggatttctttccaattaagactaagtaagagagcaaagtcccatgaagatgggacaaggaaagggataaggatgagagtagaggaatggagagagggcaggaaaaagag

SEQ ID NO: 236918 - DNA, 399 bp, Homo sapiens
gttccacggagcgtcactccctctgtgacttctgggtcagccgatggggatggacagagtctggcagtgggtacaggaaccctcgccacagtgggtggccttgaactcctgaactcaaatgatccacctgctcatgcctgtaatcccagaatttttggaggccgaggcaggtgaatcgctagaggtcaggagtttgagagaccagcctgggcaacatagcaaaaccctgtctctattaaaaatatacaaattagatgggcgtggtgacgtgcatctatagcctcaactactcagaggctgaggtgggagaatcacttgaccccgggaggttgagggtgccatagagccatgattaggccactgcactccggactgtgtgacggagcaaggccctgtctc

SEQ ID NO: 236919 - DNA, 598 bp, Homo sapiens
agagtttctccatgttggtcaggctggtcttggcctcccgacctcaggtgatcagccagcctcggcctcccaaagtgttgggattacaggcgtgagccactgcacctggccctgaatcttttattatttgacttagttttataattgagtctctggacttttcttgatatactgttatagctccatatagaaatttttcagtcttatgcctctaattgatttcacttgtctaattatgttggctaatcccccacgccccacctcaatttattgttaaacaatagtagagatggtaggcatttttttccttattctttatcgtattggaagtacttctgtttttatactactggaaatacttctattttatactgtacttctgtttttataccagtttctggttttatacttagtttatttaatcaactaacaaagtatgaaagattagtgtaagtaattatatgtcaataaacctaatgattaaaaagaatctatctgtgctacttctgggtttggaggaggatggtggctacctgatcttgaatctccccactgtccctcccctctgttccaaacaataaaaaaggggagaacaagt

SEQ ID NO: 236920 - DNA, 422 bp, Homo sapiens
cagtatggttctattcttgaaaaggtttccagcgtccttttccaaaactatagagttgtgctgctcctgtctagaaagcagctcagtgaacttgaccttgacccttctgctgtatgaacttctcagaagattgcagatacttttattcaataagtctattccccctttttttgtttagtcaagtaggtaactattttgtgggtatattttctaaggtcaaattcctaatgataatagacaacctgaagttgatagtggccaactccgtgacattgctacttgataaatataccaatcttaggatctcttcttttttttgagtacacaaaaatcattttgaaatgcctgacttgctagttttttgatgccttacatatggaatatgcttaataaattacatttgttatttactatatgtgact

SEQ ID NO: 236921 - DNA, 519 bp, Homo sapiens
tacaaagtaatctgtgaggtaggtaataaggcagatagattaataccccaggattacaaaggatatagctaagaatgttagataaggagacaggtgtgtaattaaatagcaggtttatcatatgcttattcagccatccattaattggatgtttattgaatgtctgtattagacgttgggcttataaaagaacttcagagaaacttgtgtatttgaaaatatgagaaggaaaataatttgtagccacacctagtctattcacctgctctttgcttgcagtactcctcatataataagtacttaatgtatgtgatcttatatttgatcattacaacattcccttaaaatcactattcttaccattttacagataaagaaacaggattaaagagattttttttccacgataaaataatcaatgatatcaaaattcagtcttcaaatctcatgttcttattccactatgtgtttcttagcaattcagagaggcactttgtttcttcctttaaaaaaaaaaaa

SEQ ID NO: 236922 - DNA, 531 bp, Homo sapiens
ctatgttggtgaaagaccttgaaataggctatataatcatctttccacattaatatgattttacatttattttcaatattgctttacattaatactaaatgtaatttttttcaacttaaggaaagaaaatgtttatggtaaatcatatgtatatttaggaatgttcatcacatgttttcaattacattgtttcatgaaataacttaatggtttttaagaaaagaaaagctacagataatcatggtatctatagcttttaaaaagctgactttaaagtcaatcacttttcaatatttatccaaaaatttctgtgtttgcagagcacaatcaatactataatgcctttaaaacacatgcatcactcattttttttcaaacgtcagcaaatgaatataagtattggtgacaagctacataaaaacagcttgagcataacgtgggaaaaaagactcaagatggtttgtaagtacaggacttatgtcacaaaattgaaggatgaggataggtgaagggagtcctgatgcaatacta

SEQ ID NO: 236923 - DNA, 355 bp, Homo sapiens
ttgcatggcatgtggatggcctcctatttttaaggttcccccttccatcacagtcatttctctgaaactttctcattgccgacaatccctgttgtccttaatcactatgccagagacggtacctccacaatgcaccacagcacacagaaaaaaaataacaggcagaatcaggtttctatcttgtccataggctatggaatgtttgctgtaagatgtcacaccaagaatgacttggtaaaggcctaattcagtctgagtagagggttggatgcctagttacggaagcaaaagttattctggacaaaattaggttgcagatacaaatttgagatagatgttatccaacatttccaaa

SEQ ID NO: 236924 - DNA, 347 bp, Homo sapiens
caagtttgatcctcttaaaataacaagcagtttgtgtggaatattgaagtatattttatcatcagcgaagttaataactctgcttagtttgatattttctgtgtatatatacatttttatagctttaccaaaacagagcttacactagaccgtggtttctttttcctccttccaattactatgtgttcttaaatgtgacaaaaatacctttgctttttgagttcagtaattaagaggtttaactacttcaagctgacctccctgcaacgagtgcaaattagtgagattaaaatgagattgcttctctgtgttctctcggtttacatgcaagttttccctccccccca

SEQ ID NO: 236925 - DNA, 343 bp, Homo sapiens
ttttctttaagtatttgcccttttcttttagtttctcaagattcccaatctttttatttattattattattttttgagacggagcttcactcttattgcccaggcttgagtgcagtggcacaatctcggctcactgcagcctctgcctcccaggctgtgtccccttgccaaaaacctctttccttttctggacttcagtttttagtcagtgaaattaagcttttacacttgagatcttagaattctctcccaactcagatgttctccagtttcacctgatcactgtatagcacttgaaagggaggatagtgctaatagcctggctcttaggagacttctttga

SEQ ID NO: 236926 - DNA, 608 bp, Homo sapiens
acatttgcaaaggctttacagtttacaaaataatatcactgaatccttacaatcaccacatgaggtgatgcggtgttattcctgtcagtcccacgtacaagctgaagctcgctaacatttagtaatgtgcttgaggtcacagaggaacaaactgatagacaaagggctaaaataataacagttcccattatttcttgtttcctatacttctctcagggataagtactactgtcttgactgttttatctttaaggaatctgaaacttaggataaacaacttgcctaatttcttatgatggagatgtaatagtggttggaatttggacctattccttctgattctggagctcaccagttaaccactctgctaaactgcctccccaagaggtaaaaaatatctagtgctttcaagtccaaatcactttccaatagcaatagttgataatatcatgagctgcccatgcttccagatgggggtagatgctagtttggagggaaaggctgtgccatgggacagaagactcaatgaggagggtgagtattaccacaagctgggacccatttgtaatggtatttatagaagtctaggagcacagtattcaattagc

SEQ ID NO: 236927 - DNA, 468 bp, Homo sapiens
gatggggagaatgactgttgaacaggtctcagttttcttttggggtgataacagtgtttcagagctgtagagagggggtaattgcacagctttgtgaatgtactagatgcctgaattgttcacttgaaagtggttaatttatgttatgtgaatttcaactaaattggacaaaaagcacccctgacaacaaattggtaccttgtgctcttttatgtgcttatccaagattcctttactattaggtggaagtagtaagcatggcttccatgaacagttgtataggttgttcacagcacaaggctaaccagatgagaagctaccatcacctggtgcttttttcactcagcgtgggacaagcatctgcccagaggaaaaggcatctttttctaactcatgcaaaggtgctctgtgggcttctcggccttgataagaagagccatcaggcttacttctccgcagcctttatga

SEQ ID NO: 236928 - DNA, 260 bp, Homo sapiens
cttcctcaggtaaacaaaagttgaaggagtttatcagcaactactcttgccttacaagatatgccagagggagttattcaggcttaaatggaaggatgataattagtaacatgaaaacatatgaaagtacaaaattcactgataaataaatatacgggcaacttaagaatactctaatagtgtaatggtagtatataaatcacataactctagtataaaggttaaaagaaaaataattaaaaattactattgttttcata

SEQ ID NO: 236929 - DNA, 455 bp, Homo sapiens
agagtgggtccctggttaggggtccaccccttggcctgtgccctcggacctaggtgaggacgggcatttctgttctcgtgcccaaatcttccattttccaagacgactctggccctccacgcccccatcctgtgcctataaatccccggtgccctagtgggtagaaacacgagtgggtggacattgagtgaaacacaccagaggaacacacaagcggctggacgtcgagaggaacataccggtggaagggcacaccgaccggcaccggcagacgccagcaggccatccaccagctgaatgatgcggagtttagctggggccggtcggacggaggagaacctagccgcggggcagcccactccaagggaaaactaccttcccactccatccctcttcttgcctccccgtccacctcactgagagctaccaacactcaataaaataccttgcacaca

SEQ ID NO: 236930 - DNA, 884 bp, Homo sapiens
ttagcatctcctgtgagacaggcactccttgcaggctcacatccaatcctcatgacacccctctaaagtgggtattgttagcacattttatatggacacagacagcctgggttcaaatcctcactctactatataccagctgtgcaacttcagaaaagagacttaacctctctgagtctcagtgccctcatttataaaatggaaataaaattagaacctgccccagttcctcaaaaaattaaacatagaattaccatatgatccagcaattctgcttctgagtagatacctgaagaattacaagcagctctcaaagagatatttgtacactcctgttcacagcagcactattcatagtaggcaaaaggtggaagcaagccaagcgttcactgataaatgaattggtaagcaaaatgtggtctatacatacaatggaatgtaattcagccttaaaaggaaggaaattctgacgcatgcatcaacatggatggaccttgaggatattatgtcaagtgaaataagccggtcacaaaaatacaaatagtgtttgatcttgcttatatgagttccctagagtaatcaaatttatagagacagaaagtagaatgatggttgccaggggttgtgggtagggggatgaggagttgttgtttagtgggtggagttgcagttttgcaaaatgaaaaaagttctggagctggatactgacaatgttaggcaatacatttctcacaatgtactcccattgttaagtgacacatgactgtatttgcagaggtgtggcagggttcagggagctacattatgggtatacttaatgcttctaaattgtacaggcaccaatagttaagatggtaaatgttgtgtgtattttatcaaaatta

SEQ ID NO: 236931 - DNA, 229 bp, Homo sapiens
gcagatatgcagcctttatatacatttagaaactgtatggctctattttcatcatatacacatacatacacatgcataggataatgattaagcatggaaatgtcagcagtcttagcacctgcatagaaaagtgactttgatgacagaccttggagaaagtctctcggctcaataacatctctgaataaagtccaatctttatttcaataaacttctcattttattttga

SEQ ID NO: 236932 - DNA, 392 bp, Homo sapiens
gctttttaagagacagggtcttgctctgtcacccaggctagtggcctgatcttggctcactgcaacctccacctcctacattcaagtgattctcctgcctcagcctcccaagtagctgggattacaggcacctgccaccacgctcagctaatttttgtatttttaatagagatggggtttcaccatgttggctaggctggtctcgaactcctgacctcaggtgacctgcctgcctcagcctcccaaagtgctgggattacaggcatgagccaccccacctggcccagccccttgttttttaaggatagttttgatgggcataatatttttggttggcagttttcttccttgagtactttgaatgtactgttccactcccttctgtcctgcaa

SEQ ID NO: 236933 - DNA, 1941 bp, Homo sapiens
ttggtgatgtgcacgtttctgaatttcaagattttttttctgtgtccttcagggagaataaatttctatatagtgtcaagatgctacataatgggataaagaattatagttaagtgggtgaatctcattgtgctttttgtactgtgtagcataataccaaattcctctattcactaaataaacattgtgtgaatactgtcctaaaacagcctgttgaaggatacaaaaggatatctagaaaaagcagttgaggattggtttggattgtttcaagtgataccaaaatatttattttgaggtaaatagccacagtagtatagagccaagaggtaagcacagatcaaacatatttaagggctatctaaaaataataaggaatttggacatttttctgtaggcaacagagcaggcttttcacttaggatgctgtcattgaagaatttggccatgatcaaagtagccctttatgtagttaaatgggggtctctttaggcttcatagattttgcatgtttgggtttctatttagtttgttttctctgatggacaaaggcaggggaccagattctgtattatcctggaaggactgtgggaatgtgtcaaaggagaaccgaatttgaacactgaccttgtcattaactagctgcatggcttgagccatatcacctgtcaggatttcagcttccctatttgcaaaatgggaggtagaaggctgttggaataggtaatgttaaagcttcttagaatggtcaccttttatgatttttgtgacaatcatggacaactctcgccttttgtcttttagaagataatccagactgatattcatcccaggaaatttaaaacccaaaatatagttaaacaggactctgaaatacattttcacttaaaaacaaagcaccaggaaaaaatgagctgctactacaagttaagtgactttggaatttggacaacattgagggttactgccctaatttttaaagttttttaatgctatttaaaattaaacaaatcaatgcctgtttaacatttctaatagttcttcatacgtactaagagcccaatttaattatattcccaatagagttgttaaattatgaataagcacaatttagtttgtaaactacataacgcagtgcttgggaacatactgtatcctcgaaactgctagtttcaattcacttataggcccttctaagttgagagtatcagtgctactcggctatgcttttggatgccttcctgtaggaactgaaccttttgtgcaccacaagtggctgggcctcagttatgggcagatgagtgagtctgaaggttgcaggttatgttaagcatagtggggggcagggttagagggttgtgaggggaagagctctatagaggaagacagaaatggcaaaatgtacttgatagcctcaatttgttcttacacaatctctctggttcataaatgaggacagagacattaatcttaaagtatacacgtggaagtgcttcttttaatgattttccagttagtgtgcaatgttctcatctggtgcataagtagattttattgcaaaggccagagcccctgctggacatggatgaaacctcaacatacacaaggaaagatggaaactctcttggtggagaaaaacaaaaaaaaatactttaagaataggaaaaataggccaggcgcagtggctcacgcctataatcccagcactttgggaggtggaagcttgagcccaggagttagagaccagctcggacaacgtggcaaaactctgtctctacaaaaaaatacaaaaattggctgggtgtggtggcatgcgcctgtagtcccagctacttgagaagctgaggtgggaggatcacttgagccccaggggtggaggctgcaatgaactgtgattgcgccacagcattccagcctgggcgatggagtgagacctcacgt

SEQ ID NO: 236934 - DNA, 421 bp, Homo sapiens
cctggggaatccctactgctcgcccacgctggtgcgcaagaaggccattcgcagcaaggtgatccgctcgggggcctaccgcggctgcacctatgagacccagctgcagctgtcggctcgggaggcctgtgagttgtgggaacatgcctgccctgtgtgtacctgggacacgtgcccgtgcgctcctggaccagccagaggtgggcgtgagtgcccgttcctgcaaggctgtggccgcacctccaagtgatgcctgtgcactgtgtgtgtttgcctgcatccgtgtctgtgcaaaggggactgtgtacagccgtgtatggaccagaactgtcgggcggaaggcccgtgtgcagatatgtctgctgagcagggtagagaggcttggggaggacaccaccctgggtgatgaggcctgcggccg

SEQ ID NO: 236935 - DNA, 247 bp, Homo sapiens
catttaatggtccaatttgctgactaggtttagtccaacttaggcctttaggatttctgagactagggctattcatgcttcccctagctgatgttccatttcattcattaaatgaaaatttttgtttcccaccgtgtgccaggcacagacacttgcgggtacaacatggaatagaactgtcccaaaagaggttatattctagtgggggaaggacagataataagcaactaataaaatattacaacaa

SEQ ID NO: 236936 - DNA, 387 bp, Homo sapiens
gtttcctaccatctacagagtgaagataagacttgtcacatgaggctcctgcctgtctttgtagctcttaaatttggagtataggcaaagtgaaacccaaaagtagagccaagtgtttgctatcgctacaagagcacagattcttgccctcaggcacctcaaatcctatgtgagaataaccacagtatgaagtataaatagtaaatccttgactacttagctcacacttgaccctggagagtttggtactcacagagaaatgtaggctgctgagagtaaagtgttcagagttcatttctttctctataacctatctcttctggaaaaagagcctggaaagctttggaaaaaaagttggttaactgggaatagaaaagtaggaccaaa

SEQ ID NO: 236937 - DNA, 423 bp, Homo sapiens
aaggagaggaagaaaagcagggaacaaccagttggtggaacaatcagaatacacacaacatttgtcagttaagtttaccatcttatatgggcatggtttgtggtgacccaaaataattacagtaaaaacatcaaagaacagtgatcacaggtcaccataataaatattataataatgaaaagtttaaaatgttgcaaaattaccaaaatgtgacacaaagacaagaagtgagcacatgctgttggaaaaatggctgcagtagacttgctcaatgcagggttgccacaatttacaatataatacattgtattataaaaaatacaatatctgcagagcccagtaaagcatagtgcaataaaatgaggtgtgcttgtatttatagatgatatctaaagtcaaagaatgggtggaacagtgaagacg

SEQ ID NO: 236938 - DNA, 348 bp, Homo sapiens
cagggctggcggacacagcaatgaccaagacagagatccctgacctcaggccctgggatgttcccggcatgtagtggatgccaaagttgaacaaatatgtgctatagaaaaggcttcgacacattcattaattcttccaacaaatatccattgaggtttgccgtgagctgggctctggggagatagcagggaacataatttgaacgtggggcagtgagttgacatccttgcattgaatgacttgtgttcctccagagctgacctggccccccgacagccactacgagctgtgtggcttctcctgtcccagctcctgcaccgagcctgccctgcccgacagctgtctga

SEQ ID NO: 236939 - DNA, 350 bp, Homo sapiens
tgagaccaagcagggctgtcaccaaagtcaggagtgcccaggcctccctgaaagcaaacatcccagggaaactgagaccagcttaaaaaaatcttaattggtgaccaagttttaaaaatcagtaaatctcaccaataaaccaaataactcaacgttaaaatggacagaagcctgggaagaagcagcaaatgcagagcagggaacaagatctaataaaacttcagtcacagggaaatctcaccagctcagctgagagctgtgccctttcctcaaagcagcactcctcagcctcacttacagcccaattactcttgtgttacacacagtccttagagaggtggtgatgtgtc

SEQ ID NO: 236940 - DNA, 309 bp, Homo sapiens
tcaaggctggtcgaatggagaaactccaagaaagtggtgcactgagatccctgagaattatcagtctaagcaggtgatgtgtcaacaaagatcttttaaaagtgtatgttatcatggcaaattttgaacatgcacaaaaatagaatagtgtaatgaacctccatattcttatctcccagccctcacaatccttggctatggtcaaatgtgccctaccctcatccctattcactttcctttctcctggtttaaatcatttcatgttattttaaatgacttagtaaaattttaattatgtatctctaacat

SEQ ID NO: 236941 - DNA, 490 bp, Homo sapiens
tgacttcattgttcagcccgggttgaaggccactgctctccatctcctgaatgagaaggtctagaagtgagacctggagtctgttgtttgcatctttgtttctttcctttttcaatcaaggtcaccagatgattctcttgcacactgaagtttgaagaccaccactagaaacaactttttcatctaaagcctttacagagtacagtttgctgaatttatgagcattaagaacaccccctctatttccatcttgaggctagaatttgccctggggcagttactgtggctacctcagccaccctcacccccagcctcctagacctagagtaccattgagctcctcacatcaggagctcgtagcatgcctgggccatggagaagctccatcctgtattatttcaaagtacctcctagtatcttccccatcattagactggacatcgggattgctactttataaataaagtcgtgttctgtgcagtacctctaa

SEQ ID NO: 236942 - DNA, 388 bp, Homo sapiens
tggttttttgtaaagacagggtcccactatgttgcccaggctggttcttgaactcctgggctcaagcggtccttccacctcagcctcccaaagtgctgggattataggcatgaaccatcacacccaacccttaaatttgttaagtttattaattatcttgctgtcccacaaaagttctctgtgttcctacttcatcgaccctgtgaaaagcagccctgtgcttcatactctagatggcatctctcagcctctgccccatacatcttttacttggctatcatgtggatataaattaaatcctgtgaatacgtaacatctcataggatgtagaatgcagaaatgcagtaaagaccatacttctgtgcctcttggctattgttgctgtcaa

SEQ ID NO: 236943 - DNA, 524 bp, Homo sapiens
cagatcagaactcagctgctgtatgccatctggggttatcttctcacttgcacgctcatgaccagtgtaggctgcatcttataagtaatctggctcacagttagctagacatatattagtctgatggaacaaaatccgattgtagctttgaccactatgaggaccactgtcatataaggtcttagataccaacttgagtaaattgcttaaggactgggaatagatccagattcctccaggtttagcttcaagttgtgatcagttttcgtgggatgcaaggagagcagcgtcttaagaattctaagctttcatttatcaatcctgaggtagttaacattactatttccagtaatgttcactgggccagtttacttttgaagaaattgaatctcacggtttaagtaaagtaactagctcaaggctatatagttataactaagccacagagcagggaggctaatctaggcctacctcatgccacagcctgagttcttagttgtgatacaaaacaaggtaaaggggga

SEQ ID NO: 236944 - DNA, 578 bp, Homo sapiens
cagatcagaactcagctgctgtatgccatctggggttatcttctcacttgcacgctcatgaccagtgtaggctgcatcttataagtaatctggctcacagttagctagacatatattagtctgatggaacaaaatccgattgtagctttgaccactatgaggaccactgtcatataaggtcttagataccaacttgagtaaattgcttaaggactgggaatagatccagattcctccaggtttagcttcaagttgtgatcagttttcgtgggatgcaaggagaaaatgaataggaatgaaataaatagctgatatttgaacatttttaatgccctaggcagcgtcttaagaattctaagctttcatttatcaatcctgaggtagttaacattactatttccagtaatgttcactgggccagtttacttttgaagaaattgaatctcacggtttaagtaaagtaactagctcaaggctatatagttataactaagccacagagcagggaggctaatctaggcctacctcatgccacagcctgagttcttagttgtgatacaaaacaaggtaaaggggga

SEQ ID NO: 236945 - DNA, 1003 bp, Homo sapiens
atgtgtgtgtatatacacgtgtgtttatacacgtgtgtgtacatatacacgcgtgtgtatatatacacacgtgtgtgtgtgtatatatatatactaatcagaattctcttgatatcactatgtattcatagttttctgttcaactaattataatctgtcattttaccaaatctcaaattatcccaaatttggtcagaagtagcctcttcaggttgtctcctgtgtcgttttggcatgttcccatcatttttacagcaatttattctgggcacaacaggattttccaaggtcatcttgtacttgccttgccccagctctggaatcagccattcctccaccttttagtgaaattggcagttagaaatcaagatttgtgcatgagatgtgcttattattattgagatgtctcaccctactctttctcaatagataatgctagggggctttatgtgtgcatacacacacacacactcacgcatattttaaatatacacccacacccatgcgcccctctgcaacatcttcctcacctcacttgagcttccatactccatacgtgggcttcccctctctctggaggagaccatcctcatctcacatagctcttgaagttttggctttaggaccaaattgagggaataagaatggtcattgcagaaatcctgtaaaaattttaaaatattaaatttaaaaattacaattttatcacgcagaaacaactatatttttggtggaagtttttttttttttttaatgtagtgagcaaattagtaaagctgaattgaggagggggtaaagtgttatgcccaagacacagaacttacattttgaaagaattaaatttgaaatgcataccgtatgtttttctattatacaatctccttgctactgtaattgctatttaataagagtgcatcagagaaactgtatgaatggaaacctgaccattaagcactgaataccaataggatatttttactaataaagttcaaaggaaaaatga

SEQ ID NO: 236946 - DNA, 731 bp, Homo sapiens
tgaaatcggggaattctggttaatcttgtctctcgttcatattcccacgtcttcaaaagtgccaggaccggtcccacctccaggggtgtcagtgcatttaagagaatggcaagaaggcatagggcgatccaggcctcgctccggggcccggggttgggatcccgcttcacgcgcccccactggagaccgcaagcctgtttttaaacaggtggagagcagcgtgagcccagagctaaaggaacgtgtaaacccaagccgcctcgattccgagttttgcgtcctgccgctcacctccccaccctctgcgtttggggttccgttcttggccttgcagaccctgcgggcctgctcccgagaggatgagactgggggaagcagggccgcggggcgggtgaggtatgagctgcgagaggtgtgggccgcggggcaggcgagggacgagtgagccgtggaccctggatgggcgagccaggagcgcggggcgcgccccgtcaggccgtgcaggcgagcaggtgctggaacaaaggctgcggggccgccaggctaccgcggcctttgatgggcaaggacgtctcctcctggggctcctcattcgcatgcaaatccagcgctggtccccttttctttgtaggcaaacagaaggatgtttgtgtgtttgtaggaacgaagcctgcttgaacaagccttcctcaataggctgggtctcgaaaaataaaccagttgaacaaaca

SEQ ID NO: 236947 - DNA, 456 bp, Homo sapiens
tcctaacaattaatggtgattccacatatgtatttccttctattctttcttattaaggctcagctcttccagaagttttcagaagccccagggttagctaagcccctcctctttgctccattagctaccctgctgccagccccctacttactcacacacccttattaaatcaagtttacctttttatgtacctgttgccatagctgtaaagccaataatataataattaacatttactaaacatgtatcatgtactgacctctgtattgaatgatttccaatctgtgtctcaaggaattctcagctatcctaagtagatactattactgtcactgttgtacagttgcagaaaccaaagcttaagaggtgaaataaccaggcgtggtggctcatgcctataatctcagcacttcgggaggccaagacaggaggattgcttgaggccaggagttcaag

SEQ ID NO: 236948 - DNA, 425 bp, Homo sapiens
ttttctccctgttgcttgacataatttctcagaggcccaaaactaaactctcctaattctctcaaaaaaattttttgagacagtcttgctctgttgccctagctggtgtgcactggtgcaatctcacctcactgcaaccccagcctcccacgtagctgggattacaggtgagaaccaccatgcccggctaatttttgtatttttagtagagatggggtttcgtcacattggccaggctgatcttgaactcctgacctcaggtgatccacctgcctcggcctcttaagagtgctgggattacaggtgtgagccactgcacccagcctacttctttttcattaggagagactgatttctctctctagccgccagctccatgggcaccgatgtgaatgcacctggtggggtgcggtgttgggtgttat

SEQ ID NO: 236949 - DNA, 674 bp, Homo sapiens
gggaaacgggaggtgatagaagaggcgagatttggggtggaggtgcagaccgtgggaagcctggcgggccatggtgaaccttgagtcttattccaagtggaagagagaggcctggagggtcctgggcaggtggtgctgtgatctgacggggccttcacaggaccttgctggcaactggatggaggacagacccacagccacaggggcagggagcccagcgtggaagcggtgggggtggagggacacggttggcttctgggtgtgttttgaaggtagaacctgtaagacttcctgcagaattgtatatgggaatgagagaagaatcaaggacctggcttgagcgatgggaagggtggcactgccattgaagggaagggacagcaggaaggacgggcgagctcagtgggcaatggcatcagggcatcagagcagagccacgaagctccagggaggccatcaggccaggagggcaaacttgggagtcctcaggagatgactgtgaagtctcagggctgcctgaggtcacctgttctgccgtcactcctgggtctgcgtggctgggtccttgttgctcgggctctgccctgaggtcctgcccagcctgctccacctcccgctctccatgtccgttctgctgtgtggcattcgccactccaagcaccatctgagattgt

SEQ ID NO: 236950 - DNA, 136 bp, Homo sapiens
aagaaattgatagaaggtaataaaactaattgttctcaaatgtttaggtcccgttccaccctggtgagataaaagacatcagcagccacaatcttcactggttacctctgatgaattaataaactacatgtttaaa

SEQ ID NO: 236951 - DNA, 485 bp, Homo sapiens
catttgcccttgagtgctcagcgaatgttagtattccttctgccatcggcctgtcacttccgtttttctctttggctctacagggaatacttgcatacaaaaagagctgaagtaagagtcacctacatcttaggaaaaaagggctgctttaggtttatcctcaagtagttttgtccaggattctgaggagaataaaagctgggtcagatccagtgtgttgaaaagaaagctgaggtgagaagtgagagaaacagagaggcagagaaagggggaatgagccctgtctgctatgaagtaggaggcaatccaaaagacaaggaatccgtggtcattgccactgagaggagaaagaaggcaaactcactcctgtgacttcagggccatccatgaggtgggcagaggaactcagagtctgcccgattcttgaaaagactcttctttatcacctcaaaactatgctgcatttggtgatgttggagcggccg

SEQ ID NO: 236952 - DNA, 403 bp, Homo sapiens
atttttttttaattaaacaatgttggtgaaatatatttaaacgtaaatcacaaattcgaagtcttccaaatatttatttactaatgtggaagacatggaaactacagtaatctcatttaaaggaagttactttgatgtgcatttgcttttggcggggtatgattgctgacctgcctttgagggcaacttcctttggctcaggtaagcaggcaaacccgtttctccaaggcgattccaaccccacgcccctcaaaaccttaaatcttaaattgagttattgggtgcaggtcctttctcccacagaacctcccagcttccggaatagaggagcggggcagaaatatcctgctttttatttcagagctgacgtttgcaatcctagtgcactagcggaaaaaaaaaa

SEQ ID NO: 236953 - DNA, 469 bp, Homo sapiens
gcacttaactgtgcgtttcccaaatatgcagttttgctacaattttagagtctgctggctgcccacaccatgcttaaatttgaggggcccttccaaacagcaactctgatttctttgaaaataaatgtatctttacagttaacaaagagcaaggggggcattttctgggttctagttttatggggcccagaatttaatggttcattaacaatttaatagatatcttcttcactcatttcatatacagccacattcctttagtcaatttttgtgttgttctcatccatttaaaaacaccccaaagtctcattagaagtttcatgtcatcatctaattcatgtgaaatatagcccatggtgtcttcaggagggtccagttaaaataatttacatcagcactgggttgtatagtctgtctgataaacttacttgaaattaatcaaataaagttatcttgaaaccctaacaca

SEQ ID NO: 236954 - DNA, 432 bp, Homo sapiens
ggtcaggagattgagaccttcctggctaacatggtgaaaccctgtctgtactaaaaatacaaaaacttatccaggtgtggtggcgtgcacctgtagtcccagctactcgggagactaaggtgggagaatcgtttgaacccaggaggcgaagattgtagtaagctgagattgctccagtgcactccagcctgggtgacagagtgagactccatctcaaaaaaaaaataataataataatgtatctctcttcctatattaagataccttaggtagctagctctacttatttcaaaataaaattcatgaccaggcatggtggctcacacctgtaatcctaacactttgggaggccgagatgggaggaccacttgagctcaggagttcaagaccagcctgggcaacatggacgctatctctcaaaaactcaaaaaa

SEQ ID NO: 236955 - DNA, 430 bp, Homo sapiens
  misc_feature (132)..(132): n is a, c, g, or t
tcagttctcagttcctgcagacaattctccattccagccacaagtgaaatgatcctgccctcagcccaacttcgaggtgcatcttaccccttctcaaaaccagctcccagggaaaaaaaaaaaaaaaaaaanaattgtcgcgcggccgctccaacatcagaatggtaacaccagagagctaggacctgtcacctgggcctccccgggagagctgacaccgcggcctctgaccccacctcccgggaagttcagctgctcagaaccacaaagcaaaacaaaggggcgcggagaggaagaagccgcagtgcctcccaatcaccgccggcgcccgagcccgagcctagctctcccgcggctccttgcccggtcctcccggctggccgcgcaccaaggcccaagcagcccctggtccctcgtctccccgcggccg

SEQ ID NO: 236956 - DNA, 641 bp, Homo sapiens
tggtggtggtggtaactgtttttataaattaactattttccagacattgtgagaggcatttaacaaacattatctcatgtactcctgacaacctgaggaagtagttactgtaatcatccccattttacatctgagaaaattccttaaggaagttgcccaaggttatagggcaagtaaaagacagagctgagattcgaacccagagagtctgactcaagaacctgcaatctaaaacaactatttgcagccttctcaattacaccatgaattcttcgtaattttttttttttttagacagaggtttactctgttgcccaggcttgggtgcaatgtagtcctcatagctcactgccgccttaagccttgacttcctaggctaaggccatcctcccatctcagcttcccaagtagctgggactataggcgcataccaccatacctggttaatttttagtagtagtattattatttgtagagatggggtcgtgctatgttgatggtgctgatcttaaactcctggtcttaaatgatcctcccactttggcctcccaaaatgctgggattacaggcatgagccaccatgcctggccaattgttagtaattctgattgactacacttagtgtattcagagagagacat

SEQ ID NO: 236957 - DNA, 381 bp, Homo sapiens
ttttagtagagacagggtttctccatgttggtcaggctggtctcgaactccagaccttaggttatctgcccacctcggccttccaaagtgctgggattacaggcgtgagccactgtgcctggccctaaaccatttttatgatggctgattttaaatccttgtcagaaaattctgatatctgtgtcttggtgttagtgtctcttgactgtcttttcttttttttgagacggagtttcactctgtcacccaggctggagtgcaatggtgctatctcggctcactgcaacctctgcctcctggattcaagcgattctcctgcctcagcctcttgagtagctgggactacaggtgccagccaccacagccagctaattttttttt

SEQ ID NO: 236958 - DNA, 396 bp, Homo sapiens
tggtggtggtggtaactgtttttataaattaactattttccagacattgtgagaggcatttaacaaacattatctcatgtactcctgacaacctgaggaagtagttactgtaatcatccccattttacatctgagaaaattccttaaggaagttgcccaaggttatagggcaagtaaaagacagagctgagattcgaacccagagagtctgactcaagaacctgcaatctttttttttgagacggagtttcactctgtcacccaggctggagtgcaatggtgctatctcggctcactgcaacctctgcctcctggattcaagcgattctcctgcctcagcctcttgagtagctgggactacaggtgccagccaccacagccagctaattttttttt

SEQ ID NO: 236959 - DNA, 1753 bp, Homo sapiens
  misc_feature (262)..(262): n is a, c, g, or t
  misc_feature (266)..(266): n is a, c, g, or t
  misc_feature (268)..(268): n is a, c, g, or t
  misc_feature (273)..(273): n is a, c, g, or t
  misc_feature (275)..(275): n is a, c, g, or t
  misc_feature (1125)..(1125): n is a, c, g, or t
aaatgccaacaaagcatatgccaacgaagcccctgcttctgccttcaaatgagagtacctagaggaattgtttcaaatggcaggttatctccaaccttttctcctctcttcagttttctagatactgtgcacatccactctagagttccttttttcctccctcctccactactgattctgctcagaagaatcttcatcagtaatgcccaatgcctgggcttttctttggggtcctttagcccagacctgagaaggttcttgnatangnagttntngatctggcacctttgttactatcatagttataactatttatacgtttctattcttcaacaattactgttttaacttttgctaaataagttactgtttacttataaatttaaaatgtactttttgtgaatagttctcacaggggaaaatagttcaataaaatgcagtttttttcattgagcagatcagctgggttcatgagttttggaattggcagatgcacgggaacttgatcttgttcctattttaaaactttgtttactggcaggtatttgactgttaaaaaatccattggtgagtttaatgatctgtttaaatgtgtgcagtattgctaggtagcctttgtacattaaaaacagataacctgatagtagttgacttttctaatagtttacttaccatatcactttcaatttatgaataatttctaaagttaccctgttccatggccacagctcatgccactaaagccaatcagctgtcttgaagatgtgccatttgtcgtgaggggaccaagaaatagggtgaagagatcagcccaaatccatcactagccactggaaaaaatgattcaaaatgcattctccactgagtctgaattacattatttttagccaaaggtctttgcaacatttaaagaaataggggtaggtatatcatcatgtttaaaatgaattgtaaatatcaaaattatacagagagtgagattttaaatgaaatactatatagcatcatataattttcaaagaggaatcatcaaaccaaatacactgtagccctaagatttgaagtgaccaagacaaatcaagaagctctaatgcttctgttacatgtgtctatgtggacagtaanccacttacttgggggatccttttttggagtaaatatagttagatttgtagcctatttttagatatctgagcctgaatagaaagtaatgagatgagatctgtatgttaagtatttcacagaaagattccctgggctaggagtcaagtgttttctttttttaatggaaggaggcatatttgaaggtaaactactgtaaggctgattggagtcttggcaaggttagattgatcatcttagaaaacctgtgtgcagaatggttaggcaatcaaggatatggtatattttgtggacaaccaacctaacatattagcaccagtttggggaatgacttaagagttcactgggctgggtgtggtggctcatgcctgtaatcctagcaccacaggaggaggccgatgtgggcggatcacttgaggtcaggggttcaagaccagcctggccaacgtggcgaaatcctgtcgctactaaaaatacaaaaattatctgggcatggtggcgcacatctgtaatcccagctactcaggaggctgaggcaggagaatcactcaaacccaggaggcagaggttacggtgagctgaggtggtaccactgcactccagcctgagcgacagagtgacactctgtctc

SEQ ID NO: 236960 - DNA, 456 bp, Homo sapiens
tcaaaagtgtttttccatgtttcagagacagaaaaggggagaaaaagaagaagaaaagggagaggaaaaggtaaaagaaaagaagagaatgaattgcagctgaggaagtggaagagcgagaagcgcttccagataccagacttaacaggtggatttttgggtttgctgaagaagaaaaagaaggagaaggagaaggagaagaagaagagaagtgtgattaacaagaaaaaaacttatttgggggctatgaacaccttgaatatttaacagaatatcagctactcatctgtaaccattcactacatagctaaacttttagtaataatgtaggtattctctggccaagagaaagataggatgtgtgtgtgtgtgtgtgtgtgtgtgtgtgtgtgtgtgtgtgtgtgtgtttaacagaagaaaatggaaagaaaataaaataaaggatattttggagtc

SEQ ID NO: 236961 - DNA, 230 bp, Homo sapiens
aaaaaaagataaaaagaaaaagaagtacatgcagacactttggaaagaaagaagtaaacctgtcttcatttgcagacaacatgagtatctctatggaaattactatggaatcttttaaagctaatagaaataaaagtgagctttacaggctctcagaatagtaggccagtatacataaattaatcgtgtgctggacaaaatgaaactatggtgcaaaagcactattttta

SEQ ID NO: 236962 - DNA, 384 bp, Homo sapiens
tggagccaaggctgtctttccagtaggaacgggtgggtggagcagagtgaggtggaacagggattttgtctcatgcgtagacaaaggtggcctcgtacacctccccaggccaggattttgggcggttccttctagtgcctactgttcttaggcacacagggccctgccaatgaccgggggcgccaggggctacaggactgtgcctcaaatgcactgcagcagagactggctgaaaggagactgagaacatgttcaaaaagagagggttaaacccagagtgaattcgattaaatacgccccttcagcacacccacaccatcattagtaaaacctcttctagaatatttgacaatattaaaagccttgaaatttgtaaactcttta

SEQ ID NO: 236963 - DNA, 398 bp, Homo sapiens
cgaggtcagaagatcgagaccatcctggctaacacggtgaaaccccgtctctactaaaaatacaaaaaattagctgggcgtggtggtgggcacctgcagtcccagctactccggaggctgaggcaggagaatggcgtgaacccaggaggtaggcttgcagtgagccgagaccttgccagtgccctccagactgggcaacagagcaagactccgtctcaaaaaaaaaaaaaagtgttatttcaatgtttgatattttaattagtttaatggtcttcccaactcctattctgagacatcagtaattattatccatgagtcccagtcacatgccatcaggaaaaaaggtgtggataggagacaaggtttctggacataacattgatgtaccacttccctga

SEQ ID NO: 236964 - DNA, 497 bp, Homo sapiens
tcaggtgtgtgtgagtgtgtgtgtgtgtgtcacagagagagagacagagagagagagagagagacagagagagcacaataggtaactggagtcctcctatatgcattaaataaactgagttaatagttgtaaagcttgcaacaaagaaaactccagatgcttccctggggagtctgacccgccatttaaggaaaatataatagcagcagttctatcacaaaacctgccagaaagaaagaataacgaaaatcattcccaacccattttatgaagccagcattccctgatgccaaaagcagacaaaaataaaataacactctagactaatatatctcaggagcatagatgcaaacttcctcaaggaaattttaagcaaattgaaaccaatatgcaacatgtataggccaagtgggctttattctaagaaagcaaggaaatggtttcaaatggtttaacatttgaaatttaattagtgtaattcaccataagaacagatt

SEQ ID NO: 236965 - DNA, 373 bp, Homo sapiens
gttattagttcctagggaaactattgggctgctgagagattagtttgaaaggaaagcagaaggcagatgtggctttgtgtgccgtgtcagggatttataccttgacctctgtgctatggagtgatgtcatttctagaaaagtttcaagttacatggttttaaggaaatagtatcatttttaaccagatgctcagtccatcttgaggacgtcatcagaataagtcatatagaggtatttaagatactaggatatatgtctagtgtaatatgcatacttgtaaataacacacacacacacacacacacacacacacacctgcttcatttttgttcccaattacgactagaaagctaattaggaaataaaaacttt

SEQ ID NO: 236966 - DNA, 1235 bp, Homo sapiens
  misc_feature (1235)..(1235): n is a, c, g, or t
agtcattggtcagtattgggtatcatcatgttcttaccatcttttttctggagttttaatagttgttttttaaaaaaatctctgttttaataagccattttgatgtttgaaactaccttggataagcatatcaagacccttcagagattctaaaacatgttcagcactttctggtacaatattctcaaagaaccaggatacatcttatttctcaaaatgaaacaaaaatgtattagacattacccctgtgatttcaagcccacagtctgtcactttgaagtatttgtatccttttacaaaagaaaagccaaatgaagatctccctgaaaaaatattttaatagaatatgtctttatttcagtatcttaaatagtgaagatggagaaatagtcaataatgaagagcatgaatatgcatccaaaaaaaggaaaaaggaccattttagaaatgacacaaatactcaaagtttttatcatgaaaaatggatctatgtccataaagaaagcacaaaagaaaggcatggctattgcaccttgggagaagcctttaatcggttagacttctcaagtgcaattcaagatatccgaaggttcaattatgtggtcaaagaggatttaggcagagggatgacagctgcatggagatccatttatgacccaagaggtaaagacaagaaaatggggcccagagagatgggctgaaggtcacaatggaatcaaggacagagaccaaaaacgtagctgtcctgacagccgtgaagagcttcttcattacgactttatttcctaagtctataaactttgattttcctctgatgtaaattaagtgactttcttaaatgcatcatatgactttttaaaaaattttttaaattatacttttaagttctggtaaaaaacaacaaaaacaaaaaaaaaaacaaaaaacaaaaaacaaacacacgcagaaaggacagccaaagcagacaaacaaggaatcgaggcggcgcgctcaaaaaaatcgacgcggagcaaaacagacacgcaccaccaattgcagaagtgacgggacacatagaaggagctaataaaaagaaggcacggggtgacacaacagccccggagaaacaagccatcgccgacaggagaagacccacacgtccgggcgatagccgacaaccaccagcaatgacgcgggaaaacaaaccggccggaccacgcaccagggagaatgcggagacaaaataggcggcaatn

SEQ ID NO: 236967 - DNA, 378 bp, Homo sapiens
ggatctttggcggttcaatatgaattagtttacgttttaaatatctgtttttccattatgggtttaaaaattttctgtttttcctatttgttaattatttaattagttatattaacaaagcaatatgtgtctgttgtcaaaatcaaacactgtattaaagtatagaaagagtgaagttcctttttcattttctacctactcctatctcaccccctttctcaaggcaaacactgtttctgtacttacaaagatatggaagatggaattattttctacattgataagttcatactacaaatattaagtaagttacttatcccatttagtagtatttcaagacttttccctgcattcgtttctatagatctaagaagttat

SEQ ID NO: 236968 - DNA, 2419 bp, Homo sapiens
tgagatggagtttcactcttgttgcccaggctggagtgcaatggcacaatctcggctcaccacaacctccgcctcccaggttcaagcgattctcctgcctcagcctcccgagtagctgggattacaggcaggcgccactacgcccggctcattttgtatttttagtagagacggggtttctccatgttggtcagggtggtctcgaactcccgacctcaggtgatccggccacctcgatctcccaaagtgttgggattataggcgtaagccaccgcacccggtccaagaaccagtgttaataaacgtacagtagaagtggggtgggggcagggggaagctactgatcacaaacgagaaactaccacacacaaattaattttacagctttgatttagtctctcgggaccccacatctgaagaggggttaggcagcgaagtgtttcggtatggggcttgaggatagtgattttgggattctgagctactgagctcctctgagactctggggcactgctcacttgtaagcacaagggggctttgcttgacggtaatttaggtcaagcttccttgaatttcgatgaggcagctggagtttcttgaaaatattctcagctagattcagaataattctttctcctcttcgcttttgtggggactttatctcaagtgtctgtttctgtctcactggaagacttaatttaggggtccttcagacccctaaattcagttgaggaaatgacttctgctgcaaatagagacctctgctttatttgtcatggagaacaaggaactcaaatgagagatccaaggcatccttgttttcatgcaaatggttctatcagctcaacagaaggaaatgaaaaaaaacataggggccaaaaaaacagagaagaattatctctgcacacagagtatcagctgatctttaacaatgtcttctaagagctccattctaaacattatcagttttccaaatgtaagcgcatgtgagctgagctagctatgggatatcgcacacttcaaatcccttataaaagtcatgagaaggctgtactccctatgtctcaccagcagacaggccaaatctctgaatttgatgtcctgctgtgaacagccatgaagaacactcttggtttttgtagggaggatttctattttcaattatgggctttttttgggggaagtggggaaagtactgtatccttagatgaccacggttgctgtggccaagtctcaaacacttgtttcagcagctggaacactaaataaatttagtctttgtcttctgggtctttggtaaagagctagttagaatttattcaagacatgagagatatgcctggcacaaagtcagacagtatatattatgggtttctgttgtcccccttgagataaaattacagaagggggtggagggaaatgagggggtctcttggcccccaggactctggtgtcattttctcctataaaccattttcaggactctcaatgacctagaggctctctgaacaggcataggctgtgcctgtctagataggtccccactgctatgttggtaaccacactcaggagatgtgaaatctttcagtcactttttccattattgtattcagtctggaggcttctcacagtcctctgtagggtgcagaaagagaatctctgctctctgtcagactgctaccctgatggggaatgccattacccacagggaagcagcaacacagcattcttacactacagacctgcagcttgatatgtgagtgatttaaaaacatacattttagtacaatgtatggaatggtaagaaaacactggtgggttagacctttggcttacatgcactattactgtgtggccactggttatctttgaggatagctgttcatgccaaagcgttattttaacttttctctattactttatgatctatgaggccatttggggtctctctaagaacacagctcccatttataacactatttcaatagagaataagctctgaaaaaacactgttttgaataaagctcacatttcccagaaaatagccctagtgtgattcaaataggcatggcattgtgtagcgagaagccatgaaacctgtgggagcacgagctgagcacacagggagaaccctgcatttggattcactggcaaagaccaaacttgaagctatagctctgggtacctctcaattatccctactggctgaggcaacactttaatggtagcctgaggcgccagccctgtgagacatttgacaactcacagcacaacaaccctcctatgagcgggattcctcgtctgggcgcagtggctcaagcctgtagtcccagcaccttgaggggtcaaggtgggaggatcagttgagtacaggaattcaagaccagcctgggcaacatagcaagacctcatctctacc

SEQ ID NO: 236969 - DNA, 1306 bp, Homo sapiens
cagtgacggaaatgtgaaagagcttttgtgtgtctcacatggtcattgctcaataaatggcagctactgtttttactcgtaaggtgatgatttggatgcacagaacatagattcccctgatgtctggctaacttatacaccttacattcacacctgccttctgaggtagctgctgttactataccctttccataggcgaggatggcaggcatcagaaaaggccaaccactcttccatagttgcacagagactaaacatgggagcctggacttgaacccaaggctcactgtgagtttggggccatgcatccttgccccttgtctttgggagacctccacgtaaaggctggcaaggcagatgtgtggaaatttggaagttggtggctgcgtgctggtgcagtgcctttggaggtatttcacaaaccattagcagtgtcagtccttgggctgggggtggcattttgtaccggattcagtctctgcacgataaaccatattgccctgttgcctgccatcagggaaaaggaggttgaaagccatgggaatgaggattcttaatagttataggctgcttgcctctgtctgccgtttagtctaatctcaggttcagttgatactattgattagtctcttttcaaaaccttgtgaggcctatggggcttctctgtgtggggtaaaatggtattcttctcatatgtgaattgagaagaaaaggtgaaagtatacaattaatttgcctgcactttcttgtaaattgtatgctggatttctgtgaaatgctgtatggaacaatattccaagcaaattattgttatttactgtgacttttgcctgcatatttaaagtcaacaattatgggtttttttttttcttcttaatggcctttgtacaacatttttagaaacttggtcaggtgtcactaagaaaacttgtgctttggctctgggatttttgggaaacaaattaacaatatcaaaagtaacaataaagtcttgtttccaaaagaaataacccaatacaggccggcctggtggctcatgcctgtaatcccagcactttgggagactgaggtgggcggatcaactgaggtggggagttcgagaccagcctggccaacatggagaaaccctgtctctactaaaaatacaaaattagccaggcatggtggtgcatgtctataatcccagctactcgggaggctgaggcaggagaatcacttgaacctgggaggcggaggttgcggtgagccaagatcacgccactggactccagcctgggcaacaagagcgaaactccatctcaaaaaa

SEQ ID NO: 236970 - DNA, 411 bp, Homo sapiens
cacctagtcctctgaaatttctaaataagccagtgctgaaggatctagcccaacttctaccaaactttgttaccttttccccttcagtggtaggaatagacatgatttatttagcaagggtgagtgcttttgttgaattttagtttggggtttattattacacaaactaaagacagcggggcaatttggaaagataactaggcagctgcatgacttcaggcaggtgtcctaacactgtactcttaaagtgaggggagtgaactggaagatatcctgtgtcctcatagtttgaacattctgtggttcgctcatcaatatgactacactgtatagtcatagcacacatttgaggtcttgaagaagagagatgaggcttgttctaaaaagcatccagagtaggtcttgaaaaag

SEQ ID NO: 236971 - DNA, 473 bp, Homo sapiens
agggaccaaaaggagaaatattttggatttaaaaattaacaagactgtccaacaaatagaagatacagagacaaatgattcaataaggcaagggtcaaaagacttgaacaggcacttcacaaaagaagataatgcccaactaagcacatgaaagagtgttcaacattaaatatcagggaaatgcgagttaaaactacaataagacagcagttcataccccttagaatggctaaaatcaaaacaaatgatcataccaagtgctggtgggaatgtgaggaacctggaactctcatgcactgctggtgggagaggccaatggcagaaactctttgaaggactctgagagtgtcttataagtgtacatctaccctataagcaagcaattccactgctaggtatttgcccaagaaaactatgtttatacagacttgtataagaaaaatatgttcccaataaaattgtaaagaatgaaa

SEQ ID NO: 236972 - DNA, 215 bp, Homo sapiens
ctgcttttaagttaccccggcgggaactgatataagcagattgaggtataaattttaatttttttgtttatcttactgctgatatgtttcctaggaaagggtgaattgttttcatttaacagtaaaaccatcattgtactatgaaatctaatgaagccttgtttatcttgtttttaaatatttttcatgtaatttttggtactattttgaaatca

SEQ ID NO: 236973 - DNA, 218 bp, Homo sapiens
ctcctctctactcccctgcaaaacttgcctttcccttaactattcctacgctattgggctgagctaacttttgaagacatttttggctacagtcagggatttccaatcttctggcttccctgggtcactttggaagaagaattatcttgggccacacataaaatactctaacactaatgatagctcaggagcaaaaaacaaaaacaaaaaaaaaaaca

SEQ ID NO: 236974 - DNA, 242 bp, Homo sapiens
ttaggggaaaggggctgggaagaatggttgcaatattccatacttatcatggaaaacatattttcactaagacggaaatctttgaagcttctttgttctgttttgctagtcatacctccatgtattcattattcctatctcaaaccactttaattcttggcccagaaactacttttaatttaatagacatggcaagtggcctgaaaaataaaagtaattctttttttccataccatatttta

SEQ ID NO: 236975 - DNA, 337 bp, Homo sapiens
cacactgtcttaattactgcagctacatccttaccctttaagttgagttatgtgggctgggcgtcgtggcacatgcctgtaattccaacaggccgaggcgggtggatcacctgaggtcaggagttcacaaccagtctgaataacatggtgaagctctgtctctactaaatactaaaaaattagccaggtgtggtggcgcattcctgtaatccgagctacttgggaggctgagacaggagaattgcttctacctgggaggcagaggttgcagtaagctgagattgtgccattgcactctagcctgggcaaaaagagtgaaactccatctcatcaaaaa

SEQ ID NO: 236976 - DNA, 1796 bp, Homo sapiens
  misc_feature (1203)..(1203): n is a, c, g, or t
aatcaaacatagacaaatgggattacattgagctaaaaagcttttgcacagcaaagaaaacaatcagcagagtgaagagacaacctacagaattggggagggggaggaatatgcaaactatccatttcataagggattaataaccagattacataaagacatctaacaactcaatagcaaaaagccacaaataatttgatttaaaacagggaaaatgatctgaatagacatttcacaagagaagacatacaaatggccaacaagtgtaggaaaaaatgttcaacatcattaatcgtcagggaaacgaaaaccaaaacctcaatgagatattatctcacctgttaaatggctactttcaaaaacacaaaaagtaataaatgttggcaaggatgtggagaaaggggaccactcatacaccgttgctgggaatataaattagtatagccactatggaaaatagtatggaggtttcccaaaaatctgaaaacacgcctaccatatgatccagcaattccactgctgggtatatacccataagaaaataagtcagtacatcaaagagatttgcattctcatgtttataacagcagtattcacaatggtcaagatatggagtcaatctaaatatttgtcaatggatgactgttaaagaaaatgtgatatgtatacacagtggaatatcattcctccacaaaaaaggaataaaatctgtaatttgcagcaacatgaatggaaatagagtcattatgttaagtgaaataattcaggcacagaaagacaagtatcacacgttctcacccaaataggggagctaagttgatctcaaggaggtagagagtagaatgatgtttactagaggctgagaagggtagggagaagggagggatgaatagaggttggttaatggaaacaaaaatatagtcacacagaagaaataaattctaccatttgatagcacagtagggtaactatagtcaacaataatttatttgtatatttcaaaatagctagaataaatgatttagaatgtttccaacacaaagaaatgataaatgtttgagatgatgatatcctaattaccctgatttcatcattacacattgtatgaaaatgtgtcaaaatatcacatatatccctaaatagatacaatgattatgtatcaataaaaattaaaattagaaaaaagcagaagaggaaggcagnagagcccttcagaagtatgtggaggagaaggtgaagcaggagagataaggtagaaaaggagagcagagcagagagaagtgttagaagaactctacctaccatttctatgcaggcagactctagtagctgggaatgacccccaggcaatagccagcaaggaaacagggacttccgtccttccattgcatacagctgaattctgccaatatctttttcttttctttttttctttttttgagacggagtctcgctctgttgcccaggctggagtgcagtggcgcaatctcagctcactgcaagctctgcctcccaggttcatgccattctcctgcctcagcctcccaagtagctgggactacaggcgcccgccaccacgcctggctaatttttttgtatttttagtagagatggggtttcactgtgttagccaggatggtctccatctcctgacctcatgatccgctaacctcggcctcccaaagtgctgggattacaggcgtgagccactgcgcccggcctgatccatgaaaattgagagagaataaatgggtgttttaaacaaaagaaaataaaaattctttatataaaaagcc

SEQ ID NO: 236977 - DNA, 460 bp, Homo sapiens
caacctcaggtcccctggaggagtgttaggtgccgtcgtggtggactgggctgggcaattccctggtctccaggctgtgtgctctggcatggtcaggggaagggcaaaaccatgctgggtgggcttatcctcatgctccctgatcctctctgctctcttttctcagcaattcttcactatcttcttaccacttcaatgtttataaacagactttaaaactcttttgcccagcctttctagttgtccttagtagaagattggttcaaatgcattcattaaccattactggaagtttgaagacatctaccttttacaaccaacatattccttaagctgccgtgtcttttggcattttcagcatgactatatgtttttgtaatgtattatttctaatttgtcaagaatttagacaaatcagagtgatttgtcatactgagccctattaatatttcacaagtca

SEQ ID NO: 236978 - DNA, 479 bp, Homo sapiens
ccgtctccattaagtactaatgatgctttctcgcacatggccgaattttgggagctttgggaaagtgaacttgcttattctacgagagggaaatgaaaaactgcctggttgagaggggatggggtggagagagaagggttcatgatgggagtctcatgtccattgagggatgggtgcagagaaaagttctgggctctgcctcattatttcagagatgaaaccagagactggtgcaagcttgcccagcaagttggtggctcaggcaacttgaaagttggtggctcaggcaacttgaaaactgagttttcatgtcccttgagatctagcagtagctttcctctttattgttactattgactatgcctttctagcaggggatgtggtaagaggagagcctcaagtttgcttcacctggtgcccaggcatgggtggtggttgatagaccaattccaaaaatgaataaactgataactgggaat

SEQ ID NO: 236979 - DNA, 443 bp, Homo sapiens
cctcactcaaatacaaatagacagctgaggaatcatattcaattaagaaagcttccaaaatgaaaacaactgaaatacgtagactataagctagtaaacaatattgtttaaaacctgcagaagaacgagagactgaggagcagaagaaaacttaaaaacgaggctgggcgtggtggctcacgcctgtactcccagcactttgggaggccaaggtgggtggaacacgaggtcaggagatagagaccagcctggctaacatggtgaaaacctgtctctactaaaaatacaaaaaaatagctgggcatggcagggtgcacctgtaatcccagctactcaggaggctgaggtgggagaattacttgaacccgggaggcggaggttgcagtgagccgagattgcaccactgcactccagcctgggagacagagcaagactgtctcagg

SEQ ID NO: 236980 - DNA, 328 bp, Homo sapiens
  misc_feature (26)..(26): n is a, c, g, or t
  misc_feature (31)..(31): n is a, c, g, or t
tttcgaatttggggttggggcccccnccaantgggaaaagagtgagaccctgtttcaaaaaaaaaaaaaaaaaaagtgtccctttgctttactcctgctctccagtgattctacagcatggaataggccactgacttactcacatgtatagttctcatctgtccattttaataattgcaactagagctctttttgaactttctctcttgttcttcaagcatacatcaaacctgagtttagagggtatttgcgtcctagtttcatgagattggcaagtagtttttagagagtatgtttgtgccattcttttctttttccagctgacgga

SEQ ID NO: 236981 - DNA, 693 bp, Homo sapiens
caggtgcccaccaccatgccaggctaatttttgtatttttagtagagatagagtttcaccatgttggccaggctggtcttgaactcctgacctcatgatctgcctgcctcagcctcccaaagtgctgggattacaggggtgaaccactgtgcctggtccctttcacattttttgtagtgcagttatgctggcaactgactttatttggcatttgtttgtatgaataagtttatattttaccttccttcatagttcttttccttgatgggcctattaaaatttttttttcttttgtaagccacttcaccccttccctatgggtttgtttttatttacctctacatggctgactttggacagaaacgttaaaagttctacttgttgttttcctgaagctatgcttctatttctggactcatcgccaagtcacctgaaggcaatacaaatgaagtatctgggccacatgcagtggctcacgcctgtaatcccagcactttgggaaactgaggtgggaggataccttgagcccagaaaaaaaaaaaattagcctggcatggtggcacgtgcctgtagtcccagttacttgggaggctgaggtgggaggatcacttgagcctgggagttggaggctacattgatccttggtcgtgtcactaccctcaagcctggacaaaagagtgagaccctgtttca

SEQ ID NO: 236982 - DNA, 488 bp, Homo sapiens
gcaagctgagcaaatccctgagaacaaaagggggagaagacctgacaagggaggggaaggagtgagtctattccttccttgcacagcaactttaaccccttccatgcctccccagcagcaggagggcaggcagggtttccagacagggggtaatgaatgcatctcaggcatgcacgggcttccaggaactgctgtgccaccaaagccaactttccataggggagccctccctgggagcagccacagctggagatgccatttgtccttcatagacccagactcatggcatcaaagccccccaccgctccacccccaacaaaagccagaagggagctgcattccatccttctgccagtcaggaagctgaagcctagaaatggggaggaacttgcccaaggtaacatagctttcgactcacaggaaggggcctcgactaggacagtgccagacacagaaatgaataaagtgtgttcaatgaccggaatcaa

SEQ ID NO: 236983 - DNA, 709 bp, Homo sapiens
aaacccactgcaggttcaggcgcgcgtggccagcgcattcctagtccgccacactgctacccagacagaacatccactgcttccacattctccccaggctgcaaagagttcccaggagactttcttttcccccctcaaagctgtgcacttgggcctggtttcacctgcagagaagtgggtaatggctgatagaggaagaagcgggtccctaagacagtcgcctctgctccacagtgccatctagaggaaagacaggacatacgctctgagaagcgcaaggctggggtgttaataagcaggcccttgggaaatctggagtgccctgttcccctcattatgatcccgatcccaggcagaaatgcctgtgggctatcactacaaaaggaaaacaaccaaaaatgcatccaggattaaaaccaccgttcaaaagcacatcattaaagcaagctgtgacccagatgtttgttttggtgtgcttaagagtttttcaagcaattgaaaagagtggaaaaagtgaaacaccaagaaaaaagaaaaagaaaaaaaaaagcagagcaaggaatgttgtgggatgattctctgtgagccaaggaggacctttttatttaaaaatctgtaagcttgggtgttgagggagaactactacaaaactagacttgaattatcattggagcaggattttgaaccgcggtgcgcgtggggatcctct

SEQ ID NO: 236984 - DNA, 315 bp, Homo sapiens
  misc_feature (22)..(22): n is a, c, g, or t
gttagaggatccccacgcgcancgcgcgttcaaaagcacatcattaaagcaagctgtgacccagatgtttgttttggtgtgcttaagagtttttcaagcaattgaaaagagtggaaaaagtgaaacaccaagaaaaaagaaaaagaaaaaaaaaagcagagcaaggaatgttgtgggatgattctctgtgagccaaggaggacctttttatttaaaaatctgtaagcttgggtgttgagggagaactactacaaaactagacttgaattatcattggagcaggattttgaaccgcggtgcgcgtggggatcctct

SEQ ID NO: 236985 - DNA, 481 bp, Homo sapiens
gactcggctgatcaaatgcttacttcttatccatctgagcgcaaaagacacaaggtttggtataagaaattctttcaccatcttctacacattacagtgctgaactcctacatcctgttcaagaaggataatcctgagcacacgatgagccatataaacttcagactggcattgattgaaagaatgctggaaaagcatcacaagccagggcagcaacatcttcgaggtcgtccttgctccgatgatgtcacacctcttcgtctgtctggaagacatttccccaagagcataccagcaacgtccgggaaacagaatccaactggtcgctgcaaaatttgctgctcccaatacgacaaggatggcaagaagatccggaaagaaacgcgctatttttgtgccgaatgtgatgttccgctttgtgttgttccgtgctttgaaatttaccacacgaaaaaaaattattaaataccgatcatcatac

SEQ ID NO: 236986 - DNA, 486 bp, Homo sapiens
gaattatgggctaatgttgttaatggactaatgtaaaaatatattgataataaaattttctgttaatttggttttttaaaactttattctgtctcctaagagaactattttgagatttacatatagaaaaactatttcctgcctctccctgatgtaacagaattgaaatactttaaatatgagtttcttaatattatagttaatatttatgaaagaatatttaattaacatacagtatggctttgtttttgtttttaattttttgggtacctttgtcccctgactccactagatattttctttaatgcacagagaaagagccaagtttttccttcctgggtctgtgctgtagaatacaacaggaatgggccaggtgtggtggctcacgcctgtaatcccaacactttgggaggctgagacaggaggatcagttgagcccaggagttcaagaccaacctgggcaacataatgagatctcatctctac

SEQ ID NO: 236987 - DNA, 500 bp, Homo sapiens
cattatccaagtgacacaggaagttgaaccagtaagcaggagtcatcataatatgaaaacgttccctgataaacagacgaataacattaggtttcacttaagcaccctctccacctaacacagacgggtcagggtctttgctggtgacttctcactgcctcttgaggctcatgaacactacacaatgcaggagaagcacaacagaagctaacagaaaagtgtaagtacaaatcctgtcaaaaaacatgatttcataaggtctgtgaaagtgatgttgaaagacctcacaagtcacgtggaaaaccactgacaaatcgggaaccaaaagagattgtccagtgaacaatggaagaggagaaaataaaaataaagaataaattgtcacatctaaagagaattactcgaaaaatcaactgacgaagacctaaaatatgcttttaaaaatgacctagtcaattagtgttgttactaaaataatacttagatgagggagcactttg

SEQ ID NO: 236988 - DNA, 644 bp, Homo sapiens
cggcgcccaggagtcaggctctacccaggtgctgctggcctgcacagctccacagggctgagaagccacagctgggaccccgaggtgcaaccggccccctctggcaagcaccctctgagcctcaggtgattcctgcaggcatccacaagcttcaccgactgagtagctagtgtctgcggagactgccagcctcagccctaggcaaaagcgtgtttccctcgagtgggcactccgcaccgggcttccctccaaggccaaggcagtgcgtgtgggtggcagcagctccacaggctccagacaactcgtaatgaatgatcataggctcttcatgttatcaaataccttagagataaggaagtgaggtccccaaacaaataagccatgcatccagagctggagttttttcaaggctctggggacactgtcatgcagggtgggtatatccctaagttcctggggtgcctacactggggcaggagcagacacatgtataaataaagaaccaaggtagttaaaagttatgacagatgaaggaaatatcataaaacagagagatgtgacaaagagtaactgggagctgaggtgaggggcatattttagctggggcagtcagggaggtcctctctgaggaggtgacatttgag

SEQ ID NO: 236989 - DNA, 469 bp, Homo sapiens
gcgttttcactatagctgtagaagattctctgtgggactgatgccccctgccagactctccatttatctgcttctgatctggattcagtggggacatttctctggccagagggtgggagctctgaagggcccctggggagccctaaaggagcagcacggggggttgtcgggggaaccagagtcagtcccctcttctaagccctgggttggccctcctcactgccacaggatctgtaacacctgctgccatgataaagaagaaaagaacagcactcagaggacagaatacaaggcagatctggaaggcaaagaactttgaacagatctctatctagtatttattaatgcattacaaatttgaaaagcccgtgagatccctgaagggagagaccttattttcctgtgtcctagagcttggcacagtcagtgccaagtgagtgttgaataaatgaaggaatgaataaacaaa

SEQ ID NO: 236990 - DNA, 310 bp, Homo sapiens
agtcacggtggcagcattgagagttggacacccgggtccttgaagtgatctctaggccccagcccaaatccgccaccattccgtgctgcggggacaccatggctccagaagaggacgctggaggggaggccttagggggcagtttctgggaggctggcaactacaggcgcacggtacagcgggtggaggacgggcaccggctgtgcggggacctggtcagctgcttccaggagcgcgcccgcatcgagaaggcttatgcccagcagttggctgactgggcccgaaagtggagggggaccgtggagaaggg

SEQ ID NO: 236991 - DNA, 561 bp, Homo sapiens
ttataaacaacagaaatttattctttcacagttctggaggtgaggaatctgaaatcagggtgtgggcagggccacactttctctaaaggctctaaggaagaatccctgctgcctctgcctagcttctggtggaccccagcgattcttggtggtccttggcttatagatgccatcactcccgtctttgcctccatctgcacatcagcttcttcacagcttcacgttcttctctatgtgtctgcatccaaatctcgctttcctttctcttacaaagacaccaagtcagtggatttagggctcaccctaatccaagatgatctcatctcaacttgattacatctgccaagatcctatttccaaagaagatcacattcataggtaccagggtaataattcttccagtttggcccagggaagccaaaatattggatacccctggtatatagctttcaatgttagattatctgctgctttaaagactaaacttgataatgtttaatggtaacattttatttgtctcccagaattctgccatgtgagaggcaaatagtttcaaatgat

SEQ ID NO: 236992 - DNA, 2096 bp, Homo sapiens
tagataggggatagacaaatctcccatgcagaataattccaaacaatttatgtagatatcccactcttaaggaggtatagtataactctctagtccttatgtgtgggttttgtatagtgacatccttccaaagagtacagtatagaaagggggaaaaagaggaactttacagtggaaaaacttgacaaacactactttagctaggtcaaggttaatatcaacagtgataaatcatgttgatagtatgtacccttgatatgatgttatgagaatggtacctttacctttgtggtcttcctcccaacaactcataaaccccgtctaatcatgagaagttagacaaatcccagttgaggagcattccacaaaataccttaccaatattttcctcaaaaccatcaaggccataaataacaagtctgagaaacaataggaaagccagagaaactattacagccacaaggagcattaggagacatgactaaatgtattacggtgttctacagtatgtaaaaagtaaggaaatctgaataaaacaccaattttaattaatgtataatattaatgaaccaatattggtacacttttattaactaaaatccatatttattccgattagtttttacctaatgctgctcattgttttttaatccctattagatggggagcacccacagggcagggattgtgtgtgtgtttcatttacctaatgtgatgccaaacagtaacgggtacttgggaagtatttcttgagtgactactggaaagaagtcttagagtttatagtctgacttaaacttccccattttaggtgagaaaattgcttagggaggcatatgtgtcttctccaagtcccatgggtaattcatggtatagctggtattagacaccacatcttatgatatccagttgctattatctctttgaaactaatgaaccttaattttcttttttttttgagtcagagtctcgctctgtcgcccagactggagtgcagtggtgcgatctcaatttactgcaacctccgcctcccgggttcaagtgattctcctgcctcagcctcccaagtagctgggattacagatgtgcaccaccaggcttggctaatttttgtatttttagtagagacagggttttcccatgttggtcaggccggtctggaactcctgacctcaagtgatccactcacctcagcactttgggaggccagcgcaggtgggtggcttgaactcaggagttcgagaccagcctggacaacatggcaaaactccgactctaccaaaaaaacaaaaattagctgggtatggtgacgtgcctgtgatcccagctacttgggaagctgagatgggagggtcactggagcccaggaagttgaggctgcagtgaaccgtgatggcgccactgtactccagcccaggtgatagagcgagaacctatctcaaagtaaaaaataaagggtaaaattcaacttaagcctggataacagggtgaaactccgtctctacaaaacatacaaaaaaattagccaggcgtggtggtgcatgcctgtagtctcagcctcctgagtatctgggactacaggtgcctgccaccacgcctggctaatttttgtatttttagtagagatgggattttgccatgttggccaggctggtcttgaactcctgacctcaaatgatccgcctgcctcagcctcctgagtagctgggactacaggcacacgccacgacgcctggctaatttttgtatttttagtttgagaccagcctgcccaacatgacgaaacactgtctctaataaaaatacaaaaattggtcaggcgcagtggctcatgcctgtaatcccagcactttgagaaactgaggtgagtggatcacttgaggtcaggagttcaagaccagcctggccaccatggtgaaaccccatctctattagaaatacaaaaattagtcgggcttggtggcacatgcctgtaatcctagctacttgggaggctgaggtaggagaatcacttgaacccaggaggtggaggttgcagtgagccgccaagatcgtgccactgcactccagcctgggcaacagagtgagactctgtc

SEQ ID NO: 236993 - DNA, 390 bp, Homo sapiens
acgaacaacagaaaaaaacctccctttcatagcatagaattgggcagggttggaataaacactaacatgcactactaggagttgattataggtctctgagagccaggagactgaatctgcctagttcaatgtagtgcagaggagtgtttcaggttttgtggatcaggccgtcactattgcaactactcagctctgctgttgtaacgctcaagcagccatagacaatatacaaacaaataggtgtggctgtattccaacaaaacttgatttatacaaccaagggtggctggcttacaggccgtagtttgcccatcttccccctcttccctcccccgccattgtactaccagccaagcacatagtgagggctcaataaagattggtggattg

SEQ ID NO: 236994 - DNA, 431 bp, Homo sapiens
cagtgggtgcaggagaccctgtatggaagcactgatgagttagctcctctgtgcaactaagcacccaccttagataaatcacataaatcacctgttcccactgctccagtactaagcatgagcagtcagggaaagaagactatgaggtcaactatggtttaaaagcacccatgatgcttcctgggaaatgcaaagcttgagctgggccagagtgaatggccaagggcccgagttttctcagcaacaactgctaggccattttatgtgccacggaggttgtgagatgcagcagaaccaaagaggaaggcatttccctgacctaacagcctaatacagctcccacctgcaaagccaaggtgagtcaaaacactgctcttcagaaagcaattatttgaaaagtcagtaaatgatctgtcttgatctgcctttca

SEQ ID NO: 236995 - DNA, 1046 bp, Homo sapiens
tgacgattcaacaagtgaagcaccacaagaaacaccagcaaaagaagaagcagagaggcgggaaataatcttcataacaatagtcacttatagaagacctatcagcaaatggactgtactgttcacatacagatgctcatggtaggatgtgtctaagattccaatggagtgaaattttcctgtggcaggccagatggaactaacctagaagaactcaggtggtggcaggttcaggaggcttaggactcaactcttacttaaactttgattagctatggtgggatggatttgagcagaacaagatgggattgcagatgtgctttaggaggacttgcctagcagatgtagcaaagtctgaaaggaagaatctgggagtccggagtcttaagcctggaaaaccagaggaatcgggcatcattgacagaagtaggaaagtcaagagcaggcttggatgatgcagagcttagttttctgtgtgtttggaatcatcaggcagagaggtctagcagatagctagagatgtgggttagcagagtgttgagggctggagaggaatgtgtgtagagagattaactggagcccagcaagaagtgaaaacatggagggaagagttcagaaccaaggacagagccctcggggcacctgcatttaaagacaaagggtaggaggaagacattgatcaaggtgctggagcagaatcaaacaggtggaagatgagaagtcaagagccatgaatgtttcaaggaggagagcagagctagagaggtggaggaggaccgggattgagaggaggctattgaacttatcattcacaaggtcactaatgaagttcagaagagcagatcaacagagcaatgacagcagaagccagaagagaagagttaagaaagagtagacagatggcagacagcaggtgcaggagaaacaaacagtggcttctccatgctttgaattttcccttctcccttactccctttttttcccctattcttcctttcttttttccctttatttactcattcattcaataaacttttattgtgtgt

SEQ ID NO: 236996 - DNA, 487 bp, Homo sapiens
gccactctggtcctctttctaatactttaaatgatatcatgctccctgctgccaaggaacccatatttcctttcattttgggcacttatctcagtttatatttgtatgttattggtgtgattatttgatttatgtctgccttcactccctaaactgtaaattccactagagctaggactatgtttggtttatcagcacctaatagaatatgtacttgataaatatccactgaatgactcactggataaataaatgaatgcaaaactgcaatctcacattacatccactaaagcaaagtgcagatgaaattctaaattttaaatgtaaatcaaaattaatccatcattaaaaattataggttattcaggtaagttaatagaactcaggatgtgaacagacttttaaaatattttagagtgactcatagaaaaatgatgtactacttataattgcaaagaaataaaaacttaaatgtctaccaattgaa

SEQ ID NO: 236997 - DNA, 375 bp, Homo sapiens
ttggaaagctatccaagctcggcgctatctttaaaaggaatgagttgtggctcctaactagcttgccgaggagagcgtagagtgacacgggacgggggcccagggcactgaggccaagagttcccgagtcacgccagtgctcgcccctttggcctttgcctaaaatcctgcgatgcctcgctgacaaagcacccagtgccagagcctgcggcccagcgaagctgctccctggaaacacacacacacacacacacacacacacacacacacaaaagggggtggggagagggaaaggtttaggtttaggagaggaagccagccagccagccctgcagatgcaaccgttgcaatttgggtctcttctgtcgtcttctc

SEQ ID NO: 236998 - DNA, 634 bp, Homo sapiens
aatttggatcccatataaaaatatgtcccagctactgctcactctgtttttcactttgggtttacctctctagacttaagggtgttgtacagagaatagaaagagagaggggccatttaaacaacacccttaagtatagagaggtacccaaattttgctagctaagactagaaaattcacttcatctcctgtggctagtggggcctccacatacaaggctcccagagaagtcagctgaatgttggcttggagcccaatagaatcacttagctttggtggcacttatttagggtggagggtggggcatagtagatgcaattgaaagcctgagaataatggcataaataagcccatgaaaagatgttcatcattagtcacttggaaaatgcaaatcaaaagcacagtgaggtacttcttttcacccattagaataatcaaaagagacagtactaagtgatgacaaggatgtagagaaattggaactagtgggtgggaatataaaatggtgtagccactttggaaagtagctttagcagtttttcaaaatgttaaacaaaattgtcatatgacccagtaattcccctgctagacttccattcaagaaaaaaaatgaaaacatatgtccacataaaaa

SEQ ID NO: 236999 - DNA, 801 bp, Homo sapiens
ataccaacatttctgctgcactgttttgtcacgcagcctaaccctagtatagtgtggaaaggcactgtataagggtgtgaatacccggaggtggggctctttgaggcctcttgaaggctggctaccccttggtcacacctctgcagtgccaatcagtttgctttctgtaatttgtcccatgaagttagagttctagaccagacttctcagagttgttacttttctttttctaaactgaaactcagttttcactattacctctttataaaaaatatggtctgtttagaaatctgagaaaaatatttcattataaaatattcataaaatttttgttttttgtgaaagttatcatgaccatttgcagtaagaagacctggttgtgctctaaagctgaaatgtcatttaatttcaggtacattcaagtaaactttgcagaaagaaaatgggtttcatttagctgctcattagggggagaaaagtctgtgataggcttttaataatactgaagtttaaaatggacctggaagactacacttctgtttcacaattcttgctgttctcctcagctctttttgatagaagcaaaatcagctttctaagatagtgttgtatgttttttactgagcaatattctgactcggtgtcctctagctcactaggttcttcctgtagtaaagagttataaaagtgaggctggacgcggtggctcatgcctgtaatcccagcactttgggaggccgaggtgggcagatcacgaggtcaggagttcgagaccagtctcatcaacatggtgaaatccca

SEQ ID NO: 237000 - DNA, 683 bp, Homo sapiens
gctgaacatagacccttatcagtagttctgcttttgccctttgccttgtcatctttgttggacccttatcagtagttctgcttttgccctttgtcctgttccctcagaagcatgtgatctttgttctgctttttgccctttgaagcatgtgatctttgtccctactctctgttcttacaccccctccccttttgaaacccttaattaaaaaacttgctggtttgaggctcaggtgggcatcatggtcccaccaatatgtgatgccacccccggtggcccagctgtaaaattcctctctttgtactttctctttatttctcagccagctgacacttatggaaaatagaaagaacctatgttgaaatattgggggcgggttcctccaataagtcccatgagccacttttcaaatgctcaatatctatatgtggctggtgacaactctagttctatcagttttcaggaaatacaggggctaaaaaagcacattaataccaccaaaagaaagcaatcaacaatatccacaatgtggaaaactacagggaaagctacaaagtttcttcaacaaattgcaagaaaaaagatgtggccaagaaccccttgacactcattgaggggttattcctgcagagtcagggggctgccaccaagatgtgaggagagaaaaaagggaggtacaggcc

SEQ ID NO: 237001 - DNA, 737 bp, Homo sapiens
gctgaacatagacccttatcagtagttctgcttttgccctttgccttgtcatctttgttggacccttatcagtagttctgcttttgccctttgtcctgttccctcagaagcatgtgatctttgttctgctttttgccctttgaagcatgtgatctttgtccctactctctgttcttacaccccctccccttttgaaacccttaattaaaaaacttgctggtttgaggctcaggtgggcatcatggtcccaccaatatgtgatgccacccccggtggcccagctgtaaaattcctctctttgtactttctctttatttctcagccagctgacacttatggaaaatagaaagaacctatgttgaaatattgggggcgggttcctccaataagtcccatgagccacttttcaaatgctcaatatctatatgtggctggtgacaactctagttctatcagttttcaggaaatacaggggctaaaaaagcacattaataccaccaaaagaaagcaatcaacaatatccacaatgtggaaaactacagggaaagctacaaagtttcttcaacaaattgcaagaaaaaagaaaaaggagagaagctggtgtaggcaaagctagagggtgtggtggcctctcattctgtggccaagaaccccttgacactcattgaggggttattcctgcagagtcagggggctgccaccaagatgtgaggagagaaaaaagggaggtacaggcc

SEQ ID NO: 237002 - DNA, 722 bp, Homo sapiens
ctttttcttctttagtttttaccaagttgcactgaaaatagctcagtgactaattgcacttctaagagtgaggaccctagttaaaattaactctaaaaatactgaatttttaacctaaaccttttatttctaatcaacagtattatttatgagtaggttatagattactttgaaacggaatgtgtctcagaactttgctatcgatatttttaaggtctggtagggaaaagataataggaatgagatttatcagtgaataggggactgctttcccagtttctcggtcgcactggtgtattcaccatggaagcatcttatgaaatatgtacataaactactaatatcccacattacaggttgactattctttatctgaaatgcttaggacctagaagtatttttggattttggtttttcagagtagggatactcagcctacattggtaagtaaagaatgtgaggtgacaggctgggcgcgatggttgacgcctgtaatcccagcactttgggaggccgaggcggatcacctgaggtcaggagttgaagaccagcctggccaatctgtactaaaaatacaaaaattagctggacacagtggcacgtgccagtagtcccagctactcaggaggctgaggtaggagaatcgcttgaacctgggaggcggaggttgcagtgactcgagatcgtgtcactgccctccagcctaggcaacagagcaagac

SEQ ID NO: 237003 - DNA, 604 bp, Homo sapiens
attgtcacctttgagttgccaagaattttaacaggcacttagagaaattcctttcacatacccgttttagcacggccagttgactccaacccacatggatggtagcaggaggctcaggtgattgcagtgtgattttaattcatttacttgatcattcattcatccatccctccctttactaacttatttgctgctttcttgaattcctttattatcttctcatttatgtattcatttgttaattctctcatttatttacttcctcatttattttttcaggtttttaattacttacacattattcattaattcagtcactctgtcaattattcagttggtaattcagaaattaagtaattcaaataaacttttgaatattgactgaacttgacatcaagtttacaaaataaataaatctgttcttgtcctcaaggaattcacagtttggagaagatggacattgtaaatggatattttgcacagtgggttgaaagtacacaaggaggctgggggtggtgggcagagaagatgcccttgaagagctgccctctgagctgaattttgtagtagaagcagctaacatttatccagcagctgctggtat

SEQ ID NO: 237004 - DNA, 453 bp, Homo sapiens
tatatacacacatatatatacacacacatatatatgtatacatatatatatatatatgcatgcagaggtagaaaaagacttgtctatcccaaataatttagaattctgtagggtaaataaaaaataataaaaactataacacgagaaaatctatatgtataacacaactatttctaaattttaggaagttatcaataatactagtgctctgatgaccaaattataacaaatactttagaataagtgttagtcaagattataattctataaggctagcgcggcttacatgatgtattagaagcttagaagagagaagtgggttctagttgaactcttcacaattgggggttaggtttttttagagggttttgttttttttgtttttttaaacatctgctcatcttaactcataaagagaacaaaggagtcctggaatcttccaattcttaaaaa

SEQ ID NO: 237005 - DNA, 1689 bp, Homo sapiens
  misc_feature (833)..(833): n is a, c, g, or t
  misc_feature (920)..(920): n is a, c, g, or t
atacgactatgactatttctgcagtaattattattgagacttactataataatgataaggctgtatataaattataccttactaaaaatttaaaatctaggaatttactgagagagcataaagtatggttgtaatagagaaaacaaatgattgaaatggcttaaatgcaagcctttaatattaattttgagtattttaacgcaaataaaaccaattatgacagtgtgctcaaattggtaaacaaccaatctgtgactttatgaaaatatatttatgacagtcatacttgccttactcttaagtgtagtatttgtccttaagttgggagcaccataaattaattttaaagcaaaacatatgaccctcatccaatgttttaaatgaattgcttcctactaggaaaacaaaacatctcaggacatcaaatacttctagtaatcaagatgttttgtttaaatttgctaatgtaagcttcaactctatttggttgcactttaaaaaagcatactagaaaatggggaatatttgaaacatgcatttttaaaagctaggtgttatcttactcagaagatgttaaaagcttctttatacattttatttgaaagtaatttccaaaaaagggatgcttggtgggtatatgaaaaggtgttcagtatcactaatcatcagggaaatacatatcaaaaccataatggaatattacctcacagctgttaggatggcttttatcaaaaagacaaaaaataacaagtattagtgagactgtggaagagaaggaaccctcacacaccactgataggaatgtatatcagtataggcattattaaaaacantatggagattcttcaaaaatgtaaaactaagaatactatataatcaaacaatcccacttctgggtatatatccaaaggaaatgaganccatgtataaaagagatatgtactctcccatatccattgcagatttactcacaacagtgaagatactgaaacaatataaatgttcattgatggaaaagaatacagctggaggcatcatgctacctgacttcaaactacactacaaggctacagtaaccaaaacagcatggtactggtaccaaaacagacatatcgaccaatggagcagaacagagacctcagaaataaaacaacatgtctacaaccatttgatctttgacaaacctgacaaaaacaagaaatggggaaaggatctcctattcagtaaatggtgctgggaaaactggctagccatatgcagaaaactgaaactggaccccttccttacaccttatatgaaaattaactcaagatggattaaagacttaaatgtaaaactgaaaaccataaaaatcctggaagaaaacctaggcaataccattcaggacatagggatgggcaaagacttcatgatgaaaacaccaaaagcaattgcaacaaaagccaaaattgacaagtgggatttaattaaattaaagagcttcttcacagcaaaagaaataatcatcagagtgaacaggcaacctacagagtggaagaaaatttttgcaatctacccatctgacaaaggtctaatatccagaatttaaaaggaacttaaacatatttacaagaaaaaaaaaacaaccttatcaaaacataggcaaaggatatgaatggacacttctctaaagaagacatttacatggcc

SEQ ID NO: 237006 - DNA, 4077 bp, Homo sapiens
  misc_feature (1363)..(1363): n is a, c, g, or t
  misc_feature (1622)..(1622): n is a, c, g, or t
  misc_feature (2617)..(2617): n is a, c, g, or t
  misc_feature (3454)..(3454): n is a, c, g, or t
  misc_feature (3745)..(3745): n is a, c, g, or t
atgatgttttgtgtgtgttttaattctcatctatgacattggaataatgacaggacctacctcatagaattgtgaagattaaatgagatattataggtaaactaattagaacaatgtctgacacataataagtgcccttaagtgttaaatgagaatgatgttattgttttgtgttacagaattagtgtatctgtggaaaattggccaaaacaaattctgatggatcttctttattgctgtttaaatatttcagacaaaatgaaatataacctagaatatgaacagtgctagatatgcatacttgaaacaaaaatcatcatggtcatttatatatttctattttactaagatttttttctcttataaaaataaattataccttctaatagtaaggaaattgcctctgccagtttttgttgtttaatttgttttaatttcaaacattaaaatagcacattaattgatcaaggaatctcaattactttcaaatgctgcaaatatactaatatttattcatggcagtcacagcaggggtagagggacaggagacaaccatcttctagaggaagaacttttaaaacaattatattaattccatttataggaaaaagaataattcatagaaaaattaatgttgcagttcctaaaagcatgttccagttactattcccaaaacaatgtgtcagattctattgtattcattggctattagtcattttggcagcttgggctatgctgccactaacagtttcatgagactagcatactatcttctagtttacacaaaattgtgtagataccttgtctctctatcagactgttgctccttgaaggaaagcgttaaccaagcctgttctgtattccccatatccagtatggtactttgtccatagaaagcactcagtagattccaaagggatcatacaattttagagccacaggagaaaggccttcattagatatgggtaaattcattgtgtaatgtatgaaaaaaatatatactaactctacagtaaaggaatgaaaaaagtctggaaagatgcttttccccatgaagcctgctttccctttgctcctttgcagtttcccaatcttgttcctcttcctgtcactcatggtgctaacacagatgcctcaggacaccgcttggctgggtgcatctacaggtgttccctgcgtatccgaaatggccttattcagcagattctcttgcttgtgtacgtccctgtctctccctctaaaccggagccctgtgaaggcagaaatcattcttgtcttgtgttgcattatttttgtctagtgtgtagtggtccggtgtatatctaaaaaaaaaacactcatatatagtaatgattgaagtaantgtctagctctgctgtgggctagctgtgtgatttgggggaagtccgttagcctctctgggcctctgtccatctctctataaagagatgaggctggacctgatcagtgtttgaaatgaggtgatccatttgctgattctgatccagaacggtgtttttatttttattttttcttgtttgtttttacagagaagcgtgtactcccattttgctgcaagaccccctttcaactttcacctttgtgttcagtgttatcctccnagctcctgaaggcactctggcataggctgaagctttgtgttacctttctgttctaaaatttggagtctgtggttttaagacatgcatgatttcgtgcttcacctccatttacttacaagcaggagctttcatttacattgtcttgtcgtcttgagtatcatttgttttgactctttctacctggcaaagcttttggatttcaaagctcacaaattcctgctgttggctgtgccctttactttaacaggggtgattatatcttctctctagatatttttattagcatcctacagggtgtgaatttttagcattatgttgaagataaaatgaatagtgggaaaacaacatctttcggaatatatatccacacatgaattttagaaatcctattactaatttgaaattatttattttcctttctatggattatacttatgagtctatgttggttatggagatggatgaatacattttgattctgaacttaccagcaaaattcataagtaagtatacatatgtactatagacatgttaataactttatttaattagttataccccaggatttttttttccagggcaaaaccaatataaaaatgggtataatcctcagtgaatctgttgtgtgaggtctgattacttctatgacgtggcattctataaatattgctgcttattagattgaagtatagttgacatggacccatatttagagtgggccataacatgcctttgttgagtaaaaatgttaatatagctagtagttatgaacagtgagatgaacttctgctatttttgcactcaaaaaaagtaagaaatgtaaattttgtgagtgtgttttctgtgctgagtagaatagcagccattacattgagagataggtgaccgtttggctgattattgctgcctattttagaacattctgtatggttagctacttgaagcatagattcacaataggagcaactttcaaatctagtagaaacccgtggganatacacatgggcctgttcaaataattgaactcccttccacttatgactatcttatttgccacttggtgcagccctgaagattgtacaagctgtgaagaagccacttggatatggtctggcagtctcaaagcaatcatttcagcttccgtcacagtagacctactttatggagcaccaaggggcactgtcattaagaatactaaggaagtaattgcttgtacatggccctgagtagttccttcccttctatatagtttgcatgcttttacacagttattctccacgttgttatttcagatattaggagatttgtggtcacaggctaaagatgaccttattatacaacaatctgacgtttgaagcagcagtatctagatatgtcagtttcttatatatagctttgaataagtgtttctgctttggaagaagctctacctatctgatacatctgtaaatgtggcaagttaaagattaccatggtcaatacagtctttctccatctttggtcttattaccctcaccctatgtcaagtgctttatctcttttggagaagggagcctgagtttactgaggactcaatgtgcttgctatcaatgcctactcacttaaaagacatttattattacttcatagacaaaatttattgattaataaaatatctgaaatgaataaggggcattagagaagacagttctgattcaaatttatttttccccttattttctgtaaatatattttaccttattaaatgtgtgtgagtacataacaatgagaaagagaatgaatgagaaaatgtaggcacacactctctcagaataaaatcttgctcttgtgtntgattttgttctgatgccagctatctgggtttgaaaaaaaagtttttagtgccttgttaattatgtgttcaccattattacataagtaattaccttatgtaataatattaatgatattaagctccattcaataagagaactgtaatcctcaattgcacagacatcctcgcctttagatatttattcaaaatttagagaaaaagaaagatacatagaagaattagatatttgatctttgtaaggatttccaaaaaactttttgaccaatttcagccaacattagtgaaacanaatcagtgatataacattgcatggtattaacattgtttcaggatcatgagaaagctctttctgtatcagaaatgcatacctttaaatggaatcccagcactttgggaggccgaggtgggcagatcacgaggtcaggagatggagaccacggtgaaaccccgtctctactaaaaatacagaaaattagctgggcgcagtggcgggcgcctgtagtcccagctactcgggaggctgaggcaggagaatggcctgaacccgggaggcggagcttgcagtgagcggagatcacgccacagcactccagcctgggcgacagagtgagactccgtctc

SEQ ID NO: 237007 - DNA, 595 bp, Homo sapiens
gagatggaatcttgctctgttgtctaggctggagtgcagtgatgtaatctcggctcactgcaacctctgcctcccaggttctagtgattctcctgcctcagcctcccaaatagctggggctacaggtgcccaccatcatgcccagctaatttttatatttttagtagagacgggtttcaccatttggtcaggccagtctcgaactcctgacctcaagtgatgtgcccgcctcagcctcctaaagtgctgagattacaggtgtgagccaccacacccagcctcatttggagttctgagctaaggaatctgggagtggccaacccagaaattcatttcttatttatgaagaacatctgaacctctggctcatcccatgaaacacaggctgtatgaaggatcaaggccctttgttttgggttaagtgaaggttgccaggtggagggtgccatataatttgcatggtttttacaaatggtagtgattctctgtccagcccaccaccactggaccaccctgtatgtaagttccctcaataaaccctatgtcttgtttgctcactccgggtcttttcttcagcccctcgagcatggtgcca

SEQ ID NO: 237008 - DNA, 1793 bp, Homo sapiens
  misc_feature (634)..(634): n is a, c, g, or t
  misc_feature (1342)..(1342): n is a, c, g, or t
  misc_feature (1353)..(1353): n is a, c, g, or t
  misc_feature (1788)..(1788): n is a, c, g, or t
ttttatttctagtttacaataaaagcatgtataatttagtataaaattgtaaatgcttcataggtaaaattttaagtgtaatattaggatagggcagcatctgagcaagaataataaaacttggtattacaaagctgggcgtctggacatgtcctgatgagctcatcatgtgccatctgcttcaataattctggccaccagcaaacatattttgccagtgagtactgtacaatcctacctatagttggttgactccttttttatgaatatttctacctggctatggacaacactatgacatgaaacatactagcaaactacaagttgtatattttaatagcacattttaaaactgaaggacaattaggagtcaattaagtctgcattgcctagattgtttccttcttcattcttttcaccttttgtagtaagaactgagaaaagtaaaccaagctattcccagtagctttccttaaatgtggtgacccatctgttgccatatgctaggcatctgcttttatcaccctcatttgtggtccttcaaagctagaagtgatgaattaacatcaaatttatgctaatctgtggtaggagagaacagctatttgcaaactatttaatctggccatagtcnttatcagatataaggaatacaggacaataggaatagaaatcagaaatatttttttgaattagtgcatgacttttaggtaactgtagcacctctatggttgtatttctgtatcagcaaaatgtgcgagtgacccttgcttgcaaatatttgttgattttacacccaagtgactacaatatccaatataatagggtagaatcattcatgaatgctcatgcaggtcagtctctgtttaacttcagttgtagaattgcttctttcttgaaagattattctttttttaatccagtcctaaactgtcatcagaaaatgttcatagaatatgaaaggccaattctacactgaccagaccataataaaaatattttcctattatttagtattgcggaaaaaagggaattagaatcagaacatcaagatatttgtcccatttctagcactaagtggtgatacaattttggccaagtcatcaagcttgtgtccacatatgtatcatagaacgcagtactctgactccaaaattaactatggtttcttttagcactagaaatctctgattcctctgtctgtctttagggtatattttcactgtggcttggaaatcataacttatgcatttatcgacacagttttcaatgcacatatgtaatttttcagagtaatacatataatatcagtgatatttacattgaaataacttttttaaantaaaaattagntaatgtgtattgggcaggttttgtatgctaaaaccatatataaataatcattttgaacaagagaacaaccagatcattactgaaaacaaattgtcagtttaattaacctacttaattacattatatttcaacatccttgaatgtggaagacattttaaaaaattaggccgggtgtggtggctcacgcctgtaatcccagcactttgggaggccgaggtggatggatcacgaggtcaggagatcgagaccactgtggctaacatggtgaaacctcatctctactaaaaatacaaaaattagccaggtggcaggcgtctgtagccccagctacttgggaggctgaggcaggagaatggcgtgaacctgggaggcggagcttgcagtgagctgagatcgtgccactgcactccagcctgggcgacagagcgagactcngtctc

SEQ ID NO: 237009 - DNA, 410 bp, Homo sapiens
atttctttcctcaccctcccctcccggtgttagctgttagaggtctaagatatgtgcttcttggagatattcctaatttagtttggatttctaaaatgtcccacccagccgggcgctgtggctcatgcctgtaatcccagccttttgggatactgagatgggggaatcacctgaggtcaggagttcaggaccagcctgaccaacatagtgaaaccccatctctattaaaaatacaaaaaaaattagccagtcatggttgggggggaggggggcgccataattccagccacttgggaggccgaggcaggagaattgctggaacccaggaggcagaggttgcagtgacccgagatcgcaccactgcactccagcctgggcgacagagcaaaactctgtctcaaaaaaaaaga

SEQ ID NO: 237010 - DNA, 1828 bp, Homo sapiens
  misc_feature (164)..(164): n is a, c, g, or t
  misc_feature (329)..(329): n is a, c, g, or t
  misc_feature (615)..(615): n is a, c, g, or t
  misc_feature (627)..(627): n is a, c, g, or t
  misc_feature (1758)..(1758): n is a, c, g, or t
aaaatttaaaaaaaatgctagagttagaaaatcatttttgtggcccggcacggtggctcacgcctgtaatcccagcactttgggaggctgaggcaggcaaattcacaaggtcaggagctcgagaccatcctggctagcacggtgaaactctgtctctactaaanatatcgtactatgtctcacattgcttacttcatacatttaagaagctgtataaatatttttaaaatagtgacatgcaatgatacattataaacataacatgttgactaaattattatttacctagagcagttgcctcattctacacagtgctttttaatgccaanaaatgtattaataaaatattaaagtccaaataatttaagcatagagtaaatcatataatccacttttatgtcaattattatagtaccattatagtggtgagacggctacatctatttacagatatcaaactagctgattatgctttgatgagctttattttcaattttatactttattaacttaactgcattcactcgggcctgctaatctagcaaactgataagaaaggtgtgtttaaaaaaacacttttccatttctcaatcttgtggcaaaaaaataaaaaanaaaaaaaaaaanaaaacaccttttagcatactcctattttacctaagaaggcttcaaaccatcttaatatttataatagttccactgtattacataaatagcagttatccaaagaattttatccttaactttatagaaggctatattcttgacagagatgcctaaaacaaaagtgacttactcttaaaaagaatgttatgatgaaagccatgtttttaagcaagggcctgatgcctaattttatgtagaaataatataaatgccattttaaacaacagttacataaaaatctttccaaaagaactaatagggtcgagcacagtggctcatgcctgtaatcctgatacttttgggagaacaaggcaggcgatcgcttggagaccagaaattcgagactagcctggtcaacatagtgaaataccatttcccgtaaaattttacttaatttagcagataaaattccaaagaaaatgtaggaagatcctatctttctccttcataattcaagttcatattacattgaaacagattagaaggtgatattcatcaggtcatggatgagtgtgatgttgatcctaggaaaaaagttacaacttacttatctaaatgggcagtatggcatgggtacttagaaggaagtggtaacttttaggagaaaatatgaattcaccaaaaaactatgtcagactaaggtcattcttttctttgaaagggaccacgaaatttttgtaaattttgttcactatgctacaaagcatttgatgataaacaaaatcagggtttctgccctttccatgtaagagaccaaggctaatacagtctagggtctaccttcacacctctgtgacaggaaagaaagacccttccccacaccagctccagcagaaacatcccaaaagaggactctggcccagtatgcatcaggttatggatactgtcagaatgccaggtctactaccagaaggaaatgtgtgaaaagatgctggtaagttaaaaatgagagccaatacaataaccaaagggtgtcaattaatagaaagattatagtggtgtaaacatactgttctatactcagtcctgtccaatcagttttttaagtttgttaggaaaacatacagaaggaatagtaattaattgtgcagntcaaaaagtttcagagggaagaagtaatgtgcccaaccaaaaataagtataaagacctgcacccaggttt

SEQ ID NO: 237011 - DNA, 269 bp, Homo sapiens
gctgtggagaaataggcattcgtatacatttctggtaggagtgcaattttgtgaaactcctaaagggggaaattgggcaacatcaacaaaactaaatatgagtatgacttaaccattccaataggaatctgcacaaagacacaattccaacatacaagacaacatatgtataaggttattgtgaaattattgataacagcgaagtacttgggaaaaggcacatatacattaatataggacagattgaatagattataatgcatccacac

SEQ ID NO: 237012 - DNA, 173 bp, Homo sapiens
acattgcctttacaattcacttacagtctgtgaggccaactttgttgtcaggccagattataatcaagctattctttgttgaaccaatatgccctctcagggaatgatcgtaatcaatcaatggttttaccatttaaaaattccctatcagggagtttgaattatttttcttc

SEQ ID NO: 237013 - DNA, 482 bp, Homo sapiens
gccagacataagttctgtgctctaccaggttgaagagtgcctcctccccaaagattcccgtccagtcagaaccttagaatgtgactttactgagaaatagtctttacagatctaggtagttgaggtgaggacatattggataatggtgggccctaaatccaatgactagtgtccttataagagggagatacagacacacagagggaaaaagtccacgtgatgacaaaggctgagattgcagtgacagagtgataaaccaaggactgtcggcaaccaccagaagatgagagggaggcacgagacagattctccaatacagcctccaatgaaaaccaatcctaacaccctcttcaattcagacttctagcctccagaactgtgagagcatacatttctgttgttttaagccaccaattttgtggaatttattatggcagcccaaggaaacgaatacaagggctaactttaaaaactggatcttc

SEQ ID NO: 237014 - DNA, 482 bp, Homo sapiens
cagcctcacaacctgcatcatgcaaagccaggcctctttgcttagtttttctttagtataacctgtgtcactttgcactaccaaagttatactggccattctctgagttctggctgatgccttgctagttacactgagagtggtgaggtcattgtgggaagcttgctttcacattgcatagacaatgttaacctggtgcagtcgtcacgcctgttatcccagcactttggaaggctgaggcgggcggatcatgaggtcaggagtttgagactagcctggccaacatggtgaaaccccatccctactaaaaataacaaaaaaaaattagccagcatggtggtgtgcacctataatcccagctactcaggatgctgaggcgggatagttgcttgaacctgggaggtggaggttgcagtcagccgagatcgcgccgttccagtccagcctgggcgacagagtgagactccatctcaaaaaaaaaa

SEQ ID NO: 237015 - DNA, 575 bp, Homo sapiens
cgagtgaacctgcctaagaatgaaatcttacagggaaacagaggcagtctcaatgatactgcagaaggggaagatatcccatgaattgagaaatatttcctgggtttctactcgattgaaattccaagaggtaagggatagatactgccaggaagacttgggaattcaaaagaggagctctctgagactagagtcacatcctgacacggctcttctccaatgtgctggagtcctcagcatctgctggtcttgattcactgatgggggcaaccagtgtccccttaagtgtccgggcagaaacatactgtaccttggttttagaaagtaggttggcaggcatctttcctcattcccatcaaggagttggtaccttccacagtgtaagttattttctctgttctagagctactacaaagtgctagggaaggaaaatctcctaaagcagtctgtcatcatgaaggccaaattatgtagcagaagagcttggaaaaagattaagacggtggtggggaggacctttgtcctggtggcttgaagccatagggaaagaggttcactaaatgccaacaaatgct

SEQ ID NO: 237016 - DNA, 457 bp, Homo sapiens
cagtccttaaaaatgagaggaacattttcttgcattccttccttcgggaattgtattcaaaatgtaatggaaagtaattgttgacctcctgctttgggtgaaggagactgtaagctggtacttgagaacgaatttgccagcatgtgctgttgttgactgtgtgaatgatggtgccagggaatccgtggcttggtacacactgtttcatccagtggccacgtggaagctttgtagcattgagcagatagtaaaatatcttagaattaatgatctctttggaagagagcccagatttgtatgaaaacttgtttttcctctcaattgttttgtccactgttttcttcattttccttttctctgcataccccccgccccccaacgtgtagctctccatctaagttttggataaactgaagtggcactgtgactttaaaaataaaaaagaaatctacttgga

SEQ ID NO: 237017 - DNA, 2260 bp, Homo sapiens
  misc_feature (1095)..(1095): n is a, c, g, or t
  misc_feature (1156)..(1156): n is a, c, g, or t
  misc_feature (1398)..(1398): n is a, c, g, or t
  misc_feature (1462)..(1462): n is a, c, g, or t
  misc_feature (1496)..(1496): n is a, c, g, or t
  misc_feature (1551)..(1551): n is a, c, g, or t
tccaatattgactgggatgattgttgcacatatctgaatgtatcaaaaatgattagcttcaactaaatgggttaattatatactatgtaaattatatataaataaatttgtataaaaatataaatgaaactattgcctgcaagtagttccagaaagaagttgacacatttcaagaataacaaatgttattaaacatgtgaaattgatgaatgagaaaatatactatttccatactcttccttaaagatgtatcagtccctaatgtatattcctattatggtgatattatttatgctcagtcaatcattaacatatgcttatgaaaatcttattttacttaaagaggaatactttaaataaattttattcaattgccttagaatttaggcctactcctagacaggaagaaagatttccaagaattcacaatcttctaaaaccattacctatatttattatttatgctcttacataaccctcagtagcacattatttttcttgtacaattgatcagatattatttgaaattaaagtgtctgtccctttcagtcagcgtgtttctaaaatatgacaactaatgaaatcgcatagtaaatgctacaaactaaaggctataataagttgtaacactttttcagaatcacaataaaatttttctggatatgctgttgtgtaaggaattcctcagtgatatgtgcatttgaacttcagctaatatttctattctctctgagtttgggaagttatttgaattcccctactcctaggttttttatttatacacttaatattcattgtttttgcccttcctatgttatattttaacgatttattcactcattgttgtgtttctattccaaacgtttcctaggttggtgaaagagttgataactgtcaaaaaaataagcctgcaattggaatatggaaagagcaacggtcaagtaagacaacattttggcaagtgcacatagaactaatgagtaactgttcctggggctctaggactattagcgcagattctagactgagatgggatctgtgtgaagagttaacatttctagtaggcaatgaatcccagcaaggtcattaaaggancttgtctgtttctttgtttttatttaataaaaatgttcttctttggatacttcctgcccantaatgaagcaataaggtgggcttgtgaacatatgtgtcttgtatgcacgctcagcaatgtgccttcattatctaaaaaggaccaaaatctattaacttatactattattcagcatatggttttataagagacaggagagactaccatcagcatttccctgtttgaacataaaatattaattcagttttctttacagaaaatttaagagtcagtttcaaacataaatttattgaaagggttantcttctttgtgaaatataatctgtgttgccaaaaggaaaattcagacattacatccaaaatgtntagttctcagttctggctgtctctaatatatatncatttatcaaaatcagtgataatcagtctgctttaaagggtattttttgaaattnctgatatatcatgaagacaaatatgatggttatcacaacttaaaactaaaacctgtctatctcaggagaagataaaaaatgtatgcaaaatgtaaaaagactggcactcctggatgaattatattattgtaccttagagaaattgtgatactgatgtggttatgcatttcagtaagagaaaatggcaaattgaaattaccaaatattcaagacagttctcggaaatctaaattatattatagaatattaatgtcacacagagcactatttctagaattagtctgtgaaaatgtcttcatttaaattcttaaagccagatataaatatttcaaagtaaggttaaaattcagttgaagagtactagtacgatcccaaaataaaaaacggtaaactgaccagatctaatttagaaggaggcagagctagctgggcatggtggctcacgcctgtaatcccagcactttgggaggccaaggcaggtggatcacctgaggtcaggagttcgagaccagcctggccaacatagtgaaaccccatctctactaaaaataaaaaaacttagccaggcatggtggtgcatgcctgtagtcccagctattcaggaggctgaggcaggagaatcgctggaacctgggaggtggaaggttgcagttagccgagattgtgccactgcactccagcctgggtgacagagtaagactctgtctca

SEQ ID NO: 237018 - DNA, 1727 bp, Homo sapiens
  misc_feature (1027)..(1027): n is a, c, g, or t
tagtagagatggggtttcaccatgttggacaggctggtctccagctcttgacctcgtgatccgcctgtctcggcctcccaaagagttgggattacaggcatgagacatcacgcccagactctttttttttcttaagacataatctcactctgtcgcccaggctggagtgcagtggtgtgatctcacctcaccgcagcctccgcctccctggttccagctattctcgtgcctcagccttgccagtggctgggtctacagcgggggtgccaccacgcctgtttaatttttgtatttttagtggagacggggattcaccatgttggccaggctggtctcgaactcctgctcctgacctcaaacagtcctcacgccttggccttccaaagtgctgagagccaggcgcctggctctatgtctttttttggggggtatggagtcttgttctgttgcctaggctggagtgcagcggtgtgatctgggcttactgaagcatccacctcctggtttcaagcagttctcctgcctcagcctctcaagtagctgggactacaggcatgccccaccacgcccacctaattttgtgtgtttatttttagaagagaaggtttcactgtgttggccaggctgatctccaactcctgatctcaagtgatccgcctgccttggcctcccaaagtgctgggattacaggcataagccactgcgcctgactcctatgtcttttatttctaggtgtgtcccgtatcagtagaacctgactttgacaataacttggaatttgaagaggaggagaattatgtgaagtgaggctgttgtctgactgaaattcctaattgtagggatggtttcatttaagtaattttggagccttacaccaagctccatgctgagggcaggacccctagatgaaccaaatgttgtttcacttactttgttttcatggtttgtttgctttcagtttctatagctttcggtccagcctttttcagatattgaaatgattttcgttttggagaaagaaaggcanggtctctcttttcttgatcctttttctaatctgctgattttactattttgggaataatctcttttgtccttctgtcctctcttaagtctcttaagatgtgaaggtttagccacccatcccatccaaacaagattgggcacagcagcctaaagagatgtgtcatgagaggttttccttttctccacatatatgttagtgaatgactttgtgctcctgtatgttaattgggtcttgtcatgttagcatttagaagttcagacccttcagggattcctaaaccttgggaaaaaataacttgatcatttacattttcgtgaagcagtcttgctctatcattcatactgtgtctccacaagacatttccgtcccttttcataattttagtcaaagccacctagtaacctttaattatataggagagcttgattaagcagtgggtcagatgctctgaaccaccttgattcttagaaggtcatgaaaaaatgttgcctatagttaataattttcttaaaactttattaactatgtaattattttatgagcctctgatgttttagtacgacattccaccagtggaaacatgctcccctttattatgtggcaagaatgataattcgggccaggtgttgtggcatgtgcctgtacttgggaggctggaggatcacttgagcccaggaatttgaggccagcttgggcaatg

SEQ ID NO: 237019 - DNA, 346 bp, Homo sapiens
tcagaaaaaagctagcctccttttcttagcaaaacacattcccagcgtcccactccgttgcctcgataaaatgcagagcctggcccagatttattaactccacagacttttatcgagtggctactatatgccaggtgcacagtactaggagctggggaataggttagagcaaagtagacctggcccgtgatattaaaatgtaatctcgagattacaaaatgtaaaacatatgacctccacccattaaactgtctttgcctaagacaaataattcccaggatcacaatctttatgggaaaatatgtcaagtacttgcaatgtcagacaaatatcttccaattctcaa

SEQ ID NO: 237020 - DNA, 662 bp, Homo sapiens
aaacttacccactcctgtgatagtgacattaatcattcatgagggcaaagccctcatgacctaatcacctctttcaacattgtcacattcaggattaagtttccaacacatgaactttggaggccacatttaaaccatagcaacctcataatatattttaaagcttccatagaatatacttcccaaagaatgaagtcatactgatttgaggcctgaacaaggtcattaggagcaacaaaatgtaagataaaaggtatttcccttgtgcctggcactctccatctcctgttgttttcatgttcccgttgtcttgagcccaaagatgtagcggttctgctttctgtttttggtgtggtgcccatcatacctgtggtgttctctgaacaaaggcctgttcctgctgggcacaaaaattgggctgggcttggggctatagatttcttttggagataaataagcagggtatcttgcatccccttccatttcgcctgtctcaaggaagaggccaagggtcccctctttttgcaagtaaaacagaatgtactttcttaaaacgatttaaatatcacagttgggttcaatttatctacagaaatagacttattaaaaggaaaacttacaaaggagaaatttctaccaaataatgggctccctttttgtta

SEQ ID NO: 237021 - DNA, 495 bp, Homo sapiens
aagtcatcactactagactagttttaaaagaaatgctcaagtgagtcttacatctggaaactataaaactcactggtagagctgaacacaaaggataaaggaaaaggaatcaaaccttatcactacagaaagaaacccaacttcaaaaataaataataggagagtgagtaaagagcaaaaggtgagaccacaatcaataaaatgacaagcacaagtcctcatctatcaataataaccttgaatgtacatttctcattgaaaagatatacattggctgaatggatgaaaaaacaagacccaactatattctgacaagaaactcacctcatctgtaaagacacacgtagactgaaagggaagaaatggaaaaaggtactacatgcaaacagaaacaaaaagcgagcagagtagctataattatatcagacaaaatttatgtcaagaagatttaaaaagagacaaaaaatgagttatataataataaagagatcgatt

SEQ ID NO: 237022 - DNA, 595 bp, Homo sapiens
gaaactctatcttaaaaaataaaaataaaataaaataaatttttttaaaggccggagggactaagatgggagtgggaaggagggaggttccagctcaatcctcaccagcagatattcctgcatcctccatacctgagccttcagaccaatgctccccaggcccaaaggggacctccctttcaagtataaggctcccctaattcctcaccttaggatctttaaggcagatgactgccttaaagaacatatattccttgcagcaagaaaacccaactcccaacaccccacagagtgtggtctggcctggacaagtctgccctaagaaaaaagcgacaaagacccttagtaattgaaacagactttaagtaccataaagatgagctttcaatcattaaaaaaaaaaacgtttactgagccaggcaccaggcctaggaacagagaggtgcatccaggctgccatgttaggtgggcctgggccccactgctggggtcagaaggtattagaaagggtctggtctgctgggcgcggtggctctcacctgtaatcccagcacttagggaggccgaggcaggcagatcacctgaggtctgcagc

SEQ ID NO: 237023 - DNA, 447 bp, Homo sapiens
cccacaactctccattagaaaagaaggtagcttaagatagagaaagaggaacagttgaagatggaagttcggctgtaatttattatactctgtttgtttttgcacaagtatttatcttcttgtttggacttacaaagtcataaaatgccaacgccacatctgtaaatggaattctttagctttgtagtttgatttacacctttctccattatctggtggtggtgttgattcttcttgaatccatatttctgcattgtagaataccatggtcccctttgtggaaagtttcctttgggaaaagattgattttgtgcctcttactgtttttttcaataggtactgaaataaacttactttattattttatttttttgagacaggatcttgcgctgcctgtgatcacaccactgcgttccagcctgtgtgacagggcaagacctcatgcct

SEQ ID NO: 237024 - DNA, 1260 bp, Homo sapiens
cccacaactctccattagaaaagaaggtagcttaagatagagaaagaggaacagttgaagatggaagttcggctgtaatttattatactctgtttgtttttgcacaagtatttatcttcttgtttggacttacaaagtcataaaatgccaacgccacatctgtaaatggaattctttagctttgtagtttgatttacacctttctccattatctggtggtggtgttgattcttcttgaatccatatttctgcattgtagaataccatggtcccctttgtggaaagtttcctttgggaaaagattgattttgtgcctcttactgtttttttcaataggtactgaaataaacttactttattattttatttttttgagacaggatcttgcgctgcctgggctagagtggagtggtgtgatcacagctcattgtagcctcaacctcctgggctcaagtgatcctcccacctcagccttccgagtagctgggaatataggaacgtgccaccacacccagctaactttttggtatagtttgtagagatggggtttcaccttgttgcccaggctggtcttaaagtcctgggctcaagtgatcgtcccgccttggcctcccgaagtgctgggattacaggtgtgagccactgggtccagcctgaagtagacttactttaaatgaggacagagatgactggtgtgtgcagtgacaggcaggagaatgtaacttcccatgctggggtgctggcagcaaactcacacgataacactaacttcctatttggatttggaaactggttcctgtttctgaatccattacagtcctcagaggtttttgtccatggttttgcaaaatgaagtcagaaaatggagctggatgtagagagaacaggaaaacccatgtggctgggtgaaataactgagagtgggttatttagggagtgacgtggacatgccaaagaaaaacagcagagaactgagtctatccacgggagaagagcaaatcctgcacgattcgggggagtgaacattgatctaggcggatatgaagaaaccagggagtgggtgggtgagaatgggaactccttgtcaggaaaaaaatcattggcaatgaagtagaatattctggtcctaaagtaaatcggcaagcccttagaaatatctttttttataatgagttggggggaaaatcttaaatatgtttggcatgcttaaagatatggtccgagagtgtggacacttctctatgtgacaggctcctacac

SEQ ID NO: 237025 - DNA, 364 bp, Homo sapiens
gaggtggcagtgagccgagatcacaccactgtactccagcctgggcgacagagcgagactgtctcaaaaacaaaaacaaaagttaaaaaaaagatttctgtatgggaatattctttccgtgcgtttgtatgcccttgctaaaatgcaggttgcataacagccttaataagaaaattcctaagcctatggaaacttgtgggaggggtgtagtcatgcataatctcacatcgaaatctgccaaggcagtgaatactatagaatccacaacttcagttttcattctgccccacagctcagagctggaaacatatgtgcttatgaatctttgtcaagttaatcactttttccttttgcaccaaaaatt

SEQ ID NO: 237026 - DNA, 506 bp, Homo sapiens
tcttcactattaagctaaaaaggtaatttttctcttgaatgatgtgaagaattgaatttctttcaactgttccaaaaatctattcctgcctgccaccctgtggggcaggcaagatgatattatacatctcttataaaacaaagatacagactcagaatggctaataggatattgctgaggcctgccaggtatcttttggtgaatagatactctttatcttaaggtatcttttggtgaatagatactctttatcttaagatttgttgtggttattcttggtctgctgcccatctataaaaaatttagaatccatcggtaaagttgcacaacaaattctgttaggattttgttggaattacactgaacctacagatcggtttgggaataactgacatctttacaatactgagtcttcccatccaaggaaacagtatattatattccatctaattatgtcatttggaattgtcttccaataaatttttatggcttttctgcaaaaagat

SEQ ID NO: 237027 - DNA, 671 bp, Homo sapiens
atggttagcactttttgttccttatgtaagagatgtttccctaccttgagataatgaagatattctcctacattttatttctatttctaaaggtttcaaattttttactttcacatttaagtttaaactcatccatctagaaacgattttactagatggtgtgaggtaggaatccaatttcaactttttccatgtgctaattgctttagcacaattaactgaacagaccttcctttccctagagatcatcaatggcatttctgttacttttaaagtcattttatatgcatgtttctattttagagctctacagtctattctaatggtttctttgtttataccaataccacactgttttaattactacaaggtaaaattaaatcttgatattgtataacaaatcctttccaccttgttcttcagatttgttgtggttattcttggtctgctgcccatctataaaaaatttagaatccatcggtaaagttgcacaacaaattctgttaggattttgttggaattacactgaacctacagatcggtttgggaataactgacatctttacaatactgagtcttcccatccaaggaaacagtatattatattccatctaattatgtcatttggaattgtcttccaataaatttttatggcttttctgcaaaaagat

SEQ ID NO: 237028 - DNA, 1099 bp, Homo sapiens
catagcacatcagtgaagacaaaaagagttgttactcagttctttaccctagaataaatcaaatcaacaaatatttattgaatgtctactatgtgcaaatagccctggactgttcagcttttaaaagccatccaacttttcacattaacaaatcaaagcattattatttcaagcattgcagaagctgcttccatgtccttaaggtgacaaagcatatgaggactttgcaagtacttggagtaaaggaagagaagagaattcacagagtgaaaagaggagaaagagtgctctaaaatatcaccaatggactgcaacatgtattgaagttagagacaaggtcatcagccaagactggggagaaagggagatgaaaaagcctggagaaagtttaactcatctaagaggctgttaagtgaatcaacaaaagatgccattttctattaagtcatctattttattaaagagttaaatgcaactgttgctgtatatcatgaatttatgaaagatttaggagtgggagttctttttttctccaaaaaaaatgagacaggttaccatctttttatataggagtggtacaaacctcttatttgaaatacccatcctagggtaaatattcattgatacaaataattggtaacctttgttttggcttttggactgtgtctctcaaaggaaaaaaaaaatcttgctgttttcaaaagttaaatagaacatcaaccagggaccatggccatccagaagactgagttccataaaaatggactccccactcccactggaatcctctgtttttgtgtatctaaataaatagacgccttgctcattcctggtattaggtgtgattgagagataactcacttagcggcagcagcagcagcagtttctgtgcatgctatagcccatgctcttgtgagcatcaaaaggagatgaagcctgattaaccattttgaaatctatcggatgagaagtccttacaaaacaacttttatacgctttaattaaaaacgtgttccggcagctcagagctgaatgggcttcagggggagcagggctgagcccgttgctatgacgacaccaaatcttttcacgcctggcc

SEQ ID NO: 237029 - DNA, 635 bp, Homo sapiens
cttgttttcatctgtgcttagacaaaattacaaagtgttcttggttttgtctcacttcactctggttacagagtggccttgtctgatgttggtgttcaataaaatcgtttggtgggtatgtttgcttcagagagcaggcaggactccttctcatccacgaccttatggaggatacactggtataggagtagaaatgttcagttgggataagggtagatgaagaaatagatgacaggtaaaatcatctctctctctctttttcttttctttttttttctttttcagtgaagttagagacaaggtcatcagccaagactggggagaaagggagatgaaaaagcctggagaaagtttaactcatctaagaggctgttaagtgaatcaacaaaagatgccattttctattaagtcatctattttattaaagagttaaatgcaactgttgctgtatatcatgaatttatgaaagatttaggagtgggagttctttttttctccaaaaaaaatgagacaggttaccatctttttatataggagtggtacaaacctcttatttgaaatacccatcctagggtaaatattcattgatacaaataattggtaacctttgttttggcttttggactgtgtctctc

SEQ ID NO: 237030 - DNA, 348 bp, Homo sapiens
tcatatgtgcctttccacatctttttccatgttcatgccaaaatggaaacacattcacacacatgtggggctggtgtttgtttctaccgaaataactaccctattttaaaagtcctaggtggaggggaacaacgcacacgggggcctatcagacagtggagggtgtgaggagggagaggatcaggaaacataactcataggtaccaggcttaatacctgggtgattaaataatctgtgcaacaaaccccatgccacaagtttacctgtgtaacaaacctgcacatgtacccctgaacttagaagttaaaaaataaaaataaaacatccaagtcctatatgtcaaaaaa

SEQ ID NO: 237031 - DNA, 437 bp, Homo sapiens
cttctgcaagaagggagtttcagtgtggcagtgtgagtggcttgtgagggaaggctggagtgctgcacagttacgccctgtgctctgcagtagtgctcttgaatttctgtatggctgatgtaggtcagaccttcagagagtgttatgcctactaatcttaattagtatatcctaatactgattgttagaaggcattttagaatttctagtgcatcacatgtttatgtctaaaaaattaaatctcttttctactggtgttgtccataactaatgcataattaagccatagcagcgagaagttgagcagaaatgaaagcaccatacctgagccaacagactcttccaatgtgagacccagtttacctctggtcacttgatatggttaaaatgtgagcactagaagcctttacggagcatctagtctggtcactttaaag

SEQ ID NO: 237032 - DNA, 1056 bp, Homo sapiens
gtccactagtgcctcatttctttctaaacctcattccacatggcaggggaaggtcttaggaattgtggagctgtggcgttctaagggttctcactgcctacctatcaccagcaagggagtccttgttgccatccatccctagggggtaattttgttccctgaggctgctttctagggacttctggtcgcttgttttatcctggaccagacctgaaagcagagcctgaaataaggccttctatgcacatcatttatgtaggaggtggccctaggaagcaggcccaatgcgccatgggaaaaaccagtaccagggtgttttgctgagttgagcactgtggtgggcagctggacatgagcccactggaatcttctgaagagcccaagagcctcttctcagtattgtccacttgaggattgatagtgagaggcatttatccactggtgtccaacgctcactggttgaggatcaccccagaaagcgacacctcccccacttctagactagcatgtgggtattccaagcaggcttacctcagtgtctcaccccaggcactgcaaacaccccaggacagaaagtgaacatgtgtattgtgcaattgaagcaagacactatcagtgcaaagtgagtagaccctcagatgctgctgggtcagagggaaggcccagggatatgacacaggacacagaggtggcagatacaccacctcccaacatttcctctatcacagcaactagaacaatggcaacaataggggtgggtgtggtggctcacgcctataatcccaataccctgggaggccaaggcagaaggattgcttgagcccaggagttcaagactagcctgggcaacttggcgaaaccctgtctctacaaacatatttgtatgtgattgaacaagtagaacaatggaacggaaagtccagatgtagttctaaatatgtacaggaacttagtataggataaatatggcatcttaaatcaatggggaaaagatggattattcaacatattgtaaaaacttgagaatcacattaaaaaagttggactcctacctca

SEQ ID NO: 237033 - DNA, 473 bp, Homo sapiens
taacaaataattgtacagtgtcacagagactcccagtggtccagggtcaaagggtggagtgagagagagatggagaaggcagcatggtctgcagaaggggcagggacacactaggactctgccatgtacagctctcacgtgtctgtgggttaagtctcttcactttctttagcttcctcatctggaaaatgtggatgctatcactgccttcagaggcattattaggattaaacaaaacaacacataacgaagtgtacctggtccatagcgggtgctgcacagttatcacatccctttgcctaattagtaacaaatctgccagtgggctacagccaagaagcacaccatgaattaagcctagagagctcggaattttacttaagcatgactctgtgcagcccctgggttaaaccaggctgttatgtgctaataggaagtggcatcagaaagtaaacaatcagcccaagggccag

SEQ ID NO: 237034 - DNA, 466 bp, Homo sapiens
gtggaagtgggtaaataaaatctgcgtatgagatttttccatcttatgaaaaatatgcttaaagtaaaaccattccttgtaagtaaccatggcctaccaatgtgtcaactaagtttattacggggaacatttgtagatttattccatgctgaatcttctaactttttattcttatgtgactatatactgaagaaatcctaaagataagcagttttgcacacctttgttactcttattattgtatgtataaaaatattccattttcacgtatttaattctatagttattgattcagaaaaaggataatatgtaacattgtgggctcactgtttttcatgaacttaatgtgctcatgaatcattgaatgtcttctcactgactgcttcttgtgtccaagttattgtgtattattgatccacaatgactttgtaataaaatcagtttttttctattctttatattaatg

SEQ ID NO: 237035 - DNA, 394 bp, Homo sapiens
taactttcttaaaggtaagaacaagcctttagtcttattatttaaaccattattgttattctttactagctgtcttttggaaaagttagtttagattttggaccagattagggtaatttggcttagaagatctcaactgtttggcattatgaatctgtacatgggtagttacattttaaaatagactaggatcttaagtttcgtgcctacagggtagacagttgtctcttattaattagaaactaattagaaattagaattaattagaaattaattaggctagagactgaattggtattaaatgtcactaatcaaacagctcagtgctatgccatggtgatgcctggagttgaacagagtgtgatttccttagtatagcaaccttgtcatcctc

SEQ ID NO: 237036 - DNA, 412 bp, Homo sapiens
cctcatggcaaaggatatcagagaggtaaaagataattgttttgacatatttattatcacaactagcgactctttctgcattcacattggctggtatgcagaaaagggtgctttacaggattcttggaaatgtgtagtggatgctggctctaggggaggcagaatagagtgtgggttctgccatgggtcacatccgggttttaattctgcctctgccacatgaccttgagcacactggaaaaccctattagatgtgcaagaaggcttccccatctgtaaaggtgggtgacttagcaactttagcaatgcttaagtcacccggttgttgtgagtaatacataagttaatgtatgctaactttctagaaagtttcctggcacaaagttgtatttaataaatgatttttaaaaca

SEQ ID NO: 237037 - DNA, 347 bp, Homo sapiens
ctctcgctctgtcacccaggctggaatgcaatggcgtgatctcagctcactgcaacctctgcctcccaggttgaagtaattctagtgcgtcagcctcccaagtagctgggattacaggtgcccaccaccatacctagctaagttttgtatttttagtagagacacttttcgccctgttggccaggttggtctcgaactccggacctcaggtgatctgcctgcctcggcctcccagagttctaggattacaggtgtgagccaccatgcccattcagaaactgctctggcagggaggcccccagcctctgtgagatactctcctggagggcgcatttcagcctaagggc

SEQ ID NO: 237038 - DNA, 482 bp, Homo sapiens
agactaagacaggaacacccgccgtgggcaggccaggctggaaggatagaggactgtggtcgaaccaagaggaggttcaactgtgacttatgccagtgtggtcacgaaggcagatgggttgaactgaaaagggggcaccggttcctggcatggaggcacccaaggtcttaggaggtggatggactgtcacatgggcaaagaaatgtcccagggcaggactgcaaaggccacagaagaataatttgggagagagacaacccatgagaagtcactcagaccagggtcagaaacagaacaggaacaacaatggaaagaggatgacaccattgatgggcacctaggtcaattcaatgtctttgctatagtgaatagtgctgcaatgaacatgcaactccatgtgcctttctttctctgcagccttgcaagtatctgttgttttttgactttataataataagcattctggcttgtgtgagatggta

SEQ ID NO: 237039 - DNA, 336 bp, Homo sapiens
agtgaatacgcattagtcaggagctgggattgcggtgggcatggatggggagaggatagcagggaggcaacggactgaagatcctggcaagagaatggctgacatgagggaactgggctgagctggccagggaaaatgtgaagccaggagggagacaacaaaggaactacaagtcttaaaagaaaaagtggtgctgtaagaataagggacagaaaagtctggaaagacagtggacaaaatcagatggtgagattaaagtttaccattgcagaggaggttcaactgtgacttatgccagtgtggtcacgaaggcagatgggttgaactgaaaagggg

SEQ ID NO: 237040 - DNA, 506 bp, Homo sapiens
tgtttatgactagaattaataagcacttctgccattaaaaggtctatagatcttccaccaaattgtggattcctttccagcaagaggtgagtatttcatgtcttgtgtaatcttcagagtgcctggcaaactgtaaccaagcaatatgataactgttgggtggctgcatgggtattgtttttggtcctagagttctccctgaaacataatacatgtttggtaggatggaaacaaaatttctaatcaatgttagatttgtttctttttttccaagaagaatggagaagtaaatcatattttaaaatgggattgattacttggactctcagtgcagaaaacactgttttatatctattcatctcagaggaataaagggtgtgatacttcttaaggtacttcttaagatactttaaaggaaagtttacatatatatacacatatacatatacatatacccaaacttaaactcttgaaataaaagcacatgtcggagattaaaaactgta

SEQ ID NO: 237041 - DNA, 2181 bp, Homo sapiens
  misc_feature (2114)..(2114): n is a, c, g, or t
attgcagggacagtgtttgagggcagttacagaggatcagaagaaaccgggcaggagcttgactctgacatccaaaagtaacccccgcttgtaacgatggactatggcattggggataattagccatcttcttagaccggcttgtgtctaagcagctgcttgtagtggggcagcgtaggcaggtttttagccaagcgcttcagtagattctcccagtctggataggggagcttgaggggcctctaagcagaagtctggagaccatctcccagcttaggacgtcaagatcaaagcccaaatgcagcgttgccactgctcttcctccacggtttgcccagagctggtgcttccacaagcccaggttgggaccagctttctcctctgagtgagactctgtggcagtccaaggaaaacctgtccatctggaggctgattatagaagcttggccagaattctcctcccctccctttcacttcccaaagacacaggcagcaagtgcggctgcttcccaaggagcaatgaggaggcagtcccaaaggggtgaaggcccaaacctcatctgcccagggggctgcattcacgaggcctttcttacccagctcggagcaggcctcagactgtaacatgatgtttcaggtttacggtgtgagactttgtcagtgtgaaccttgagcagtttggactcaaattgtagcctcatccactgaggcatgtttgtaattagggtctggcttactcagggctttctctggaagttaacaagaactacagagtcagaaaattctgccaggagaaaagtgatgtttaaaaaatcatctaggatggccgggtgtggtggctcatgcttgtaatcccagcactttgggaggctgaggtgggaggatcacattagcccaagagtttgaggctgcagtgagccatgatcacaccactgcactccagcttgggtgacagagtgagaccctgtctcttaaataattaaaatttaaaaattaaaaaaaaaattccctatgagagaaagtacatggactttggggaaggatctgaagtttagccaggttgggacaatttggaccgaatcatttaacttaaccctgctattttcctcaactgtgcttagaaaaggggtacaggacctgatttctgtccttaagaggtttatagtccagctacaccttagcctgggggcagagtttctcaaccttagcactattgacaacttaggcaggataattcttacagtggggggtgtcctgtgtgttgtagcattggcagcaccgttggtctctacccagtagatgccagttgcccctccccagttttaacaggcaaaactgtttccagacacttgccaactctgtgcaggcaggaggggcaagttttcccctgatggaaaaccactgccccagggtttctgcggcccagaactcattgttttcactgatgtcataggagtctggagttttatatcacatgccctggtcttcattgttttatggcatgaacatttcagtgtgatgatggttatccctgaaacagtaaggctgaagttactgaggcagaacaaaccaacccaagagagaccttgttccccatcttcctttagaattcaagtatagattcttttttatatgattgggtaagaccaagagacgtagcgtgagagagaactgtgcacccttaggagtgtacaaatcctttatcaggggtgcagatgcctctgaagtagcaacttcttcaggatcccccctttattctttttctctctcccttttgtatgagtttttctctcttgtatgttatgtttcttgttgcctttagttaaaacgtccactctttatggaaaagtgaaagtcatgtcaggcacttttttccattcttaaaaagtgcctcttccattggctgggtgtggctcatgcctgtaatcccagcattttgggaggccaaggcaggtggatcacctgaggttgggagttcgagaccagcctggccaacatggtgaaaccccctctctacttaaaaaaaaaaaaatcagccaggcatggtggtgcatgccagtagtcccatctactgtggaggctgaggcaggagaatcacttgaacccagaaggcngaggttgcagtgagccaagattgcaccagtgcactccagcctgggcgacagagtgatactccatctg

SEQ ID NO: 237042 - DNA, 452 bp, Homo sapiens
gctgctctgtgtccttagtcgtggatgtcatcctgctggtgggatatctccagcatttttttcctataaaggtagcttgtactgtgatggacagccatataccagagaatattcttaccctctcttcctctgaaaaatcttgaagtgggccaggtgcggtggtgcacacctgtaatcccagcaccttgggaagctgaggcgggcagatcacctgaggccagaaattcaagaccagcctggccaacagggagaaaccccatctctactaaaaatacaaaaaaaaaaaaattagccgggcatggtggcagatgcctgtaatcccagctactcggaaggctaaggcaggaaaattgcttgaacctgggaggcagaggctgcagtgagccgagatcgcgccactgcactccagcctgagcaacaaggaagaaactccgtctcaaaaacaaacaaac

SEQ ID NO: 237043 - DNA, 408 bp, Homo sapiens
aagggagattccatctcaaaaaagaaaaaaaaaagttacctatcaccccactaccaagggggataagccctgttgacaatattaatgcatgtccttccattcttctttcccttaatataagcttctaggccgggcgcagtggctcaagcctataatcccagcactttgggaggctgaggcgggcagatcacgagatcaggagatcgagaccatcctggctaacacggtgaaaccccgtgtctactaaaaatacaaaaaattagccaggtgtggtggcgggcacctgtagtcccagctgctcaggagtctgaggcaggagaatggcgtgaaccccggaggcagagcttgcggtgggccgagattgcgccactgcactccagcctgggcgacagagggagactccgtctc

SEQ ID NO: 237044 - DNA, 375 bp, Homo sapiens
gagatggagtcttggtctgttgcccagaccggagtgcagtggtgttagctcactgcaagctccacctcccgggttcaagcgattctcctgcctcagcctcccaagtagctgggactacaggcacatgccaccacacccagctaacttttgtatttttagtagagatggggtttcaccatgttggccaggctgatctcaaacccctgaccttgggatccgccctcctcggcctcccaaagtgctgggattacaggtgggagccaccatgcccagcctcactgacatccttcttatgcttgcgcttgaactcagcaataagatggttgactatttggttgtcaaagtcttctccacccaagtgagttctctgggtgt

SEQ ID NO: 237045 - DNA, 4396 bp, Homo sapiens
  misc_feature (69)..(69): n is a, c, g, or t
  misc_feature (1323)..(1323): n is a, c, g, or t
  misc_feature (1617)..(1617): n is a, c, g, or t
  misc_feature (3396)..(3396): n is a, c, g, or t
gctccctgcatagtatttcctttcttcaagtttttatttattgtttattttggcttatgctttcttaanattagacacctcccttaaaattctagtaagccttagccaatggttcttttttttttttttttttttttttgagactgagtctcactctgtcgcccaggctggagtgcaatggcgtaatctcggctcactgtaacctccacctcccagtttcaagccattctcctgcctcagcctccggaatatctgggactacaggcacgtgccaccatgcctggctaatttttatatttttagtggagacggggtttcactatattggccaggctgttctcaaactcctgacctcaagtgatttgcccaccttggcctcccaaagtgttgggattacaggcatgagccaccgtgcccagccaatggttcgtatttacagccgattggaaagggcagggcttaactgagaggaagggggtctcccaaatatcatcacttgtccaactaccagtatttttagacccagctggaagaaatgaccaaaaggcttccccatttggcttggaaactttgagcaaatgctcacttttccaacatactgcctcatctctactcatacttgtacccatatccccaagtcagcactttttgggttcagtctctttggagagcaaagttttcttcaggatgctctagggtaaagcagggacagacatggggtgacatggggtgaggaagggatctgaggtatcactctcctgtttctggccctactccataccctgtcttcagatgccaaccatttctcagcctctctgtggttttatagcaggaatctgcccatttctcattgactcccctctttgggagcctctgggtttttctttctctatcaagccaagtcagttaccttctcaagttccaaaattgtactgacatttcttattcgctttcatctcctcccctgcccttgtgggcctgcatcttttttactcctttacttctagtgtggtttggggaggcagcacaaagcaccagagatgttagtccatcatgtttaaacagaagtccctccttgctactgtcattcaaaagtggcagtcgctggtattctccgtttatcataaggtggcttctgccattatgaccaacctcagtctgacatgaaatagtatgtaatgctgacttgccagtgctgtgagaccagcaggggaacctcctggcaagctgagagttgggtgactttgccctcaatagccatcctcattacatttctcagtcatactttactgcattttatgggggaaattatgtggtagtctntaatccacggattcatgaagggctatgatgtatcccttgagaatgtcaagggcctactgtacctctgtcactatggaaactagttccctggtagcaattaggcttagcaacatccacaatggtgcaatgcacatggattctggctctggtaatggacagggagcagtccctggagacagggccacacttaccctaatgacagtctccggggtcttcatccagcctgagcaccctgcatggagcccggcctgaagtgctccagctcagaggaggaggagggagagggtaagcctntttggcccactgaaatctggaattattcaagtgctcctggaatggctttccaaacccagcctcccaggacatctgtcttacggccacctaagagaatgaggtttaaggtggtcaacagttcataatctaccttcaggtgtgtgtgtgtgtgtttaaaacagcctggctcatggtaagtgccttataagtgtttgctattattattactaaaactgtatttagcttggatccatatgaaaacaaatttgcattcctggactctttgaaactcactaaactcaacaaaaaatagtagataagacagagacccagggactaagaactcctggctcattgacccctctttacataatagagaataagccatcatccagatattttgtttattggtttgccccattcactggattggtgaactccctgccaggcccactccttgacactttaccaagaaccaatgagttgatgcctgtaaaggcatctgtgagctgtctctttccagaggaccctcaaggctgcttcttcctggtccagggggtgacagcaggccaagctccatacccttggcttgttcacaggactcctgctcctctccaggtctcccgtccaccctcgtttctccttccagctccaccctcgtttctccttccagctgtccttcctcctgtttatagatgtgtctccatctccccttgccttttctgttgtcatccccatcatctcactttctttcttttcctcctctggactgggagttccttaagggcaggtcttgtttatcttgtcagtctgaacacctagaatggggcctagtaaatagcagatgtccaaaatatttttttcctttttggactgataaatcctctttctttattgccttgcttctgaggtatctgccttgtgtcctctactttctcccttctccccgccttacacagacacacacacacacacacacacacacactctctctctctctctctctctcacttcgtcttagagcctcttgggctgctcttctgcctggctgtgcgtgtgaaggaggtggtgtttcccatccttgggaaagcccttctgacctcagtggtggcagggagaggcctaaataagttgcacaactcagaatgtcaggattgatacctcctgatgagaagcaggcttgttctgtgcaatttccatctcatttgtcttttcatttgtagcttaaattggccaatttcatctggaatgtgcctggactctctggcaagccatatactacaaatgagtgtcccagtagctgtctacagagggactggcaggggagtgggcccaggtcctccacagcagcattggtgacggctcctgggcctctggaagcactaatgcttggaggattggggccgaatgtgatctccccaaggcctgaggaggggaggatggaggaaactgcaatgagagggagttagggctaggtcctgaaaaatctggttgattgattgattgattaatttttttctctctctctatcagaagagggtaaggtacatgggatggaagaggagttgtttgtacttttaagagtgggcagaagtgatacaatgtggagcaaaagaatacaaatactccattcacatgaaattcaaaaacaggctaaactaggtctacgctgctagaatgctgagtgtaagagagccttttagggggctagaaatgtcctacatgttgttttatatcttgatttgggagtggtaatatggggatgttgtataccccatattcaaactcaagttgcccacntgatttgtttgcttcactatatgagttctacctcaataaaaatggggggaaaagtcacaccaatggttttcgaactttcctgtacataagaatcctgtgggagcttatctacaatgcagatttctggccagcctggaatctagttgatctgaagtgctgtcgggaatctgcatctgagtgccccacacccccaagggtgatcttgagacaggtgttccacagaccagaaaagaccacacaggggcttgaacatctgcccagttagatggcctaagcgccatcctgctgggagccatgaggggcagctgggtggctgagggctcccggatgcccttggcagggagggttagaggttgactatgctgcagcatagagaaagtacggtgaggacagcaaaagcggtagcaggaaacgaggggctgctctctgggctaagaaggaccaggacagagagtggatcttctcctcagggatgagaatctctctgagcaaagaatgctttgctgcacccctgcacccctgcacccctgcaccctgggcaccctgccccaggatggctgggcaaacctcatggagtggctttggcacaggaagggtagccactgcagaaagctggaccccagcagatgtggagtttcatggaatagcctgatccctctgcagggtctggagactgacgtgatcagttctgtatctgtatcttcagcaggcaccttctgtccaacaggaagaaggaacccaagactgaagacccacagctaaaggtgaaaccttggggagggtgtagacaacgtggcacttccatagacaaatgccaggatagtctgagcatttgaaaatgtgggcaaatgatgacttgagctgtccttgacttgagggcctgggagagctaggatatagtgagggggagctacatacagggagtgggaaaaggggcaggggcatctaccatatgccagaccctttacaaacaccatcccatttaatcctccagtaattc

SEQ ID NO: 237046 - DNA, 2553 bp, Homo sapiens
  misc_feature (25)..(25): n is a, c, g, or t
  misc_feature (80)..(80): n is a, c, g, or t
  misc_feature (127)..(127): n is a, c, g, or t
  misc_feature (140)..(140): n is a, c, g, or t
  misc_feature (178)..(178): n is a, c, g, or t
  misc_feature (209)..(209): n is a, c, g, or t
  misc_feature (211)..(211): n is a, c, g, or t
  misc_feature (217)..(217): n is a, c, g, or t
  misc_feature (248)..(248): n is a, c, g, or t
  misc_feature (278)..(278): n is a, c, g, or t
  misc_feature (438)..(438): n is a, c, g, or t
  misc_feature (481)..(481): n is a, c, g, or t
  misc_feature (612)..(612): n is a, c, g, or t
  misc_feature (797)..(797): n is a, c, g, or t
  misc_feature (844)..(844): n is a, c, g, or t
  misc_feature (861)..(861): n is a, c, g, or t
  misc_feature (882)..(882): n is a, c, g, or t
  misc_feature (926)..(926): n is a, c, g, or t
  misc_feature (938)..(938): n is a, c, g, or t
  misc_feature (980)..(980): n is a, c, g, or t
  misc_feature (982)..(982): n is a, c, g, or t
  misc_feature (1004)..(1004): n is a, c, g, or t
  misc_feature (1026)..(1026): n is a, c, g, or t
  misc_feature (1099)..(1100): n is a, c, g, or t
  misc_feature (1103)..(1103): n is a, c, g, or t
  misc_feature (1153)..(1153): n is a, c, g, or t
  misc_feature (1182)..(1182): n is a, c, g, or t
  misc_feature (1243)..(1243): n is a, c, g, or t
  misc_feature (1284)..(1284): n is a, c, g, or t
  misc_feature (1286)..(1286): n is a, c, g, or t
  misc_feature (1365)..(1365): n is a, c, g, or t
  misc_feature (1377)..(1377): n is a, c, g, or t
  misc_feature (1395)..(1395): n is a, c, g, or t
  misc_feature (1426)..(1426): n is a, c, g, or t
  misc_feature (1595)..(1595): n is a, c, g, or t
  misc_feature (1640)..(1640): n is a, c, g, or t
  misc_feature (1847)..(1847): n is a, c, g, or t
  misc_feature (1928)..(1928): n is a, c, g, or t
  misc_feature (1987)..(1987): n is a, c, g, or t
  misc_feature (1998)..(1998): n is a, c, g, or t
  misc_feature (2014)..(2014): n is a, c, g, or t
  misc_feature (2076)..(2076): n is a, c, g, or t
  misc_feature (2109)..(2109): n is a, c, g, or t
  misc_feature (2142)..(2142): n is a, c, g, or t
  misc_feature (2150)..(2150): n is a, c, g, or t
  misc_feature (2174)..(2174): n is a, c, g, or t
  misc_feature (2205)..(2205): n is a, c, g, or t
  misc_feature (2211)..(2211): n is a, c, g, or t
  misc_feature (2277)..(2277): n is a, c, g, or t
  misc_feature (2287)..(2287): n is a, c, g, or t
  misc_feature (2320)..(2320): n is a, c, g, or t
  misc_feature (2324)..(2324): n is a, c, g, or t
  misc_feature (2412)..(2412): n is a, c, g, or t
  misc_feature (2429)..(2429): n is a, c, g, or t
  misc_feature (2514)..(2514): n is a, c, g, or t
  misc_feature (2530)..(2530): n is a, c, g, or t
  misc_feature (2547)..(2547): n is a, c, g, or t
accatttaaaatgtacaactcagtntctattagtatgttcacagcattttcatcaccctgaaaagtgaccccacatctcntaggcatgactgcagccttcctccatgtccctccacctacccctgtngtaggcaaccacngtctacttttgtctccatatgtttgcctgttctgcatntttcatatacatagagttatacaatatgtantnctttgngactggctttttcacttagcataatgttttnagaattcatgcatgttttagcacacattcntagtttatttcttcttatagttaaatgatattctattccatggctatactggttttccattcattcatcagttgatggacctttaggttagtttccactttttagctattatgaaaaatgctgctgtgaacattcacttacaggttattatgtggacacnggtttttatttccctgccattggactttatcctcagagttaantgggcagatttcagcacttgtcttgctcatgctatcctttctgccttctcagtttctgttcatctagcctcattcattcagacctggcagacaatttttttgttttcatgaagctttctctgactgttctntcattgaccttatgtgttagcaatcgttgtctagtctgtgctgaaaaacttagtccttaattttacatggcttttttttttatggaagataattttctctcattataaatttgcttaatgggggaataatatataatatgtatgccacctatccttgcatacattgaaaatattttagcttagangtttgtagcatacaattcaatcctttataccataccaattatttctnctttgagaccttgacanagtaaggttatattctaaatntatttttagcaattaaatatcaaatctaacccaattagtctaanacaggagatgcnttcaatcacgtgtttatgtttttctctctatgaaaaagaatntnaattggccttttttcactatgnagccattactgtgtttctggantgctcccagtctgtcagctgaacagttctgggtgcagcttgtctgatgaaggatagcacagcccctcaatctnngtnctcagcagagtgcttgtgaaggcagcaccacagcaacagttgctcagagngaacggattcaggagccttgacttagcantagagtccagggttttcagctcagtgtctttagcctgtctctgctggtcatgtcagttacntactattccatccaggaggtgctatttacattgtagtacananatagtcattgcctaatgagtcatacagagagaaaagtaagttataaattatgtcccccatttgctgcaactctcagtgntaagaatgattnagtgcagctataggagantacttccattggcatgccacctgcgtaaaanacacaattttgttaagatatacaataaaattattatgctaatagcaaatattttatgtagctcactatgttccatgtagtcttctaagtgcttcatgttagtccccagttaaacacctggttttggaaggctgaggcaggaggattgcttgagcccaggagtttgagancagccagagcaatatagtgagaccctgtctctaaaaaaaaaaaanaaatttttttaaacacttagctgaggcatggtggtgcatgcctgtagtcccagctacattgggaggctgtggtaggagggtcgtttgagcttggaatattgaggctgcagtgagcagtgatcaagccactgcactccagcctaggtagcagagggagactctgtctcataaataaaacatgttgtatagattcccatagaagtgagntagatatcagacatagaattattagccactttgatgtctaccttgggagtaaaacatataataaggggcagctttaaaccntctcaatcaatgcctctaacttctcgagaaggttcttatttcatgaatttctaagcaanggactacctgnattaagacatttggtngacaccattttgagatgaagaatcttgaatgggaagaagggagatctctacttactgaagcntcccaatgacatagttaagtgtcccccaaaagnaactttagaacaagatgttcatcatgccatatntctatggnaaaggaaattctttaaaagaaaanaaaggcaaacaattgataatctgattctcangggaangttttcattatcaaagaaaaagagggctgggttccatggctcacatctgtaatcccaacactttgngaggctgagnggggtggattacctgaggtcaggagttcaaaancagnctggccaacatggtgaaaccctgtctctactgaaaatacaaaaattagccaggcgtggtggtgtgcacctgtagtcccagctacttgngaggcagaggcaggagnatcacttgaacccaggaggtagaagttgcagtaagctgagatggcaccactgcactccagcctggatgacacagtgtgactccanctcaaaaaaagaaaanaaagggacaaagtatantggtcc

SEQ ID NO: 237047 - DNA, 313 bp, Homo sapiens
caagggagggcactcatctaagcctgccctccagattccttgtcctgggttgttggacctagagcaaaatgatacaaagtagatggcactagtccattcctgagggttcacttgttcctgatctggttttcatcctgtctcaaaatctggttgtccagccttccaattaattaatcctgtgagttccttaataccttttgaataagtacattaagtaaaccagatgtatttctactgtgcatgaccagaaacactgcctgatacagtaagcagaggtagctgtctctaatagcaacaaataacttcagccaca

SEQ ID NO: 237048 - DNA, 459 bp, Homo sapiens
accccacagtacccttctgaggttaatccgcgttgatagaagcaggtgtggttcatctggaatctgttggtgtgaactgcgcggcggcgtcccccaccaggcaccacagcgggcgcctcttggtagcagccaccggcctcttctgggactcgccggagggtttccacgtcgcccgctccgacggggctgttcatctccccttgatctgtgggactccccgtccgtctcaggtatgacccctttgttggtgatctgggttgcagatatcccctctgtgtctgtggcttgtctcgctgcgttgtttatggtgcgcttttgtcatgcagacgtttctaattttgctctgtctggacttggcaatctttctgttcgtgatttgtgcttttggtgtttatgtacaaactctttcccggtccagaaagcataaaaaagtttgctttgtgcgctgaggtctctaat

SEQ ID NO: 237049 - DNA, 600 bp, Homo sapiens
aaatgccaatcaaagcagtgggatttttttttttaatactactctttactatccaatttagacaatgttagaattaaggttaggcttaggtaaaaaattaagaatgatagaagcaagcagggtagagttcgggtctttgtatactgtcagagtgagacacgtcacaggtattttgtcatctgttaaaattgtacatattctttgacccagaaattgtacttctagaattgtgttctaaagaagtacttgcatctgaacacatattcactccagaagtgtttgaaatggggacaaatgaaaactaaacatttatcaaaagaatgaataaaatatgtaagtccacattacagaatactatgtggcaatttcaaagaaggaagtgcatttttttatatggatgtagtgatctctaaaacatctctccctaatcagccacaaatgtaaaaaaagaaaaataataaaacatatcactaaggaaagagaaacatagtatagcataagtacactatgtagccattaagtcaagtgatgattttttttctatacgaatatagcattagataaatgctgtgtccagaaggttgacatgaaaaccagaaa

SEQ ID NO: 237050 - DNA, 172 bp, Homo sapiens
ttcacctcttctctttcctccttcccactgcctgcaagatgcacatgtgctgctgagccagtttttttgttttagcggttaatgacaggacaagaaacagaagcagctccggtccctagggcaaagtagtctacccaccccaatctacctgcctacctctgaattatttcaa

SEQ ID NO: 237051 - DNA, 542 bp, Homo sapiens
caaactcttcttccattcatctgcagactttcctatctctccctgcagaaacaagcaattcaggatcttatgtgtgatgcctaattaattttaacacagcgaatttaatgaaatcgttgaagagcagggcataacactaggaaggctttaaaatttcataatgtttccctctcatatttgcatctgattactgccaccatgcattctgtgtgtactttatcatctagtcgttattgatgcactttttggaatgtgttctcggttgttctattagcataggttcctctgccttgtcacctaacgtacagttttcttggaagccaagaccatgcatgccttttcttcctcagtgatcctttcgctgcagtaactgctattaaagaacttttaactgcttttcgttaatgaatgcataaaaaaatctctggaatcctacaagacgatggttcttttgttacatgaagaaaagaaaaaacagtagcatttgcaagggccagcaagttaaaatatatgtcattaaaatatgtttctatttcccatca

SEQ ID NO: 237052 - DNA, 454 bp, Homo sapiens
gggattacagcacctggcatatatatttttttttaggttttagttagacttagaacactgtgtcatttcttaccaaagaaattactgtcttgatttcctctcaggatttgagaagcccaaaataataatggtcttactaggccttggtttaaaaaatctaagccagcagactcaaaaaaaaaaaaaaaggcatagaaacttcacaaaacatcttgcatttgtttaacactctgcttcttcagatggcagaatatgtgtcttccattttgttcttgcagtaaactgacaaggcacagaatttaggtatcattacaattgtacccgtgaagaaacagaaactccaaggaactaagtgttagcagttagcagtagaaccaggcctagaatccagccatcttgcttctctggcccccaaaaagaagaggaagcaaatggatggaaaaacaacaacagc

SEQ ID NO: 237053 - DNA, 405 bp, Homo sapiens
tctgaagagtaatttagctgtcacaaatcttatgccatttactgtgtagtgaaagctttcagccctgcctgggtctcttttctgacagtttgttgtaaaatagacatgaaaaccagaggcagctggagttaatgacagcagcaagaagaaacattggtaaggaagctcgcagaagcacaccagcttggtgcaatttagtaaaaagggaaaatgagtagttgatacctgttgtttaactttttattttgaaataatttcagacttacagaaaagttacaaaaaggccagtcatggtggctcatgcctgtaatggcataacttgggctggctgaggtgggaggatcgcttaaagctaggaatttaggaccaaccaccctgggcaacatatcaagaccatgtttatat

SEQ ID NO: 237054 - DNA, 406 bp, Homo sapiens
gaatcaggcctctgagctactgagctggaatctgccttttggccggacccggttgattggaaccgcgttcatttgaggaatgctccctgcgaccagagctccaccaggacactccttccctccgccggccacgtttgcagggagcccctgagaggcagcggcagcccggatgctgaatcccattcgccccggtcatttccggagcgtcttccagcccgttccccgccatgacagcgacgtgtgctttgagctcagtccacagcaaagaccaccttggttctgtcccgccgcaaccacatccgaagaaaggggtcaggtattctaggcgtacggggactgataaattccaaaaatatgttgcctagaaaaagattgttaaaaatataaaggcaagttttattcaaaa

SEQ ID NO: 237055 - DNA, 481 bp, Homo sapiens
gtcaccctgcagaatcatgagagttaataaaatcaatattgttttaagccactatttggtcattttttatgatggagtagataatgaaaacataatgcttctagtgtagcagagaagaacggcattaagtacagtggtaaaatgtgatgagtgtccaaggtactatgagagtatagaatatgtctccaagttgagatgttagtgtaggagttaaccatttataaaagagatgtgggttccaaagtcatgggcttgtgtgagggcaagaaagaaagagtgcagagcttttctaaggagctgacgtaactttagtgccgcctgatcctgaagtgtgaggaagaggaataagatgagagagggaagtattatttagaatgtcataaatatcataaatgcagtggggggcctttgaagcactgtaagcctagaaataaagtaactgattttgtgatgtttcatcttgactgaggtatatgtgtga

SEQ ID NO: 237056 - DNA, 261 bp, Homo sapiens
aaaaggaaaagaaaataaagcattgtaatataaacaaaggcagtctgtactaagacaagcacaggccatggcagctgtgcagatgaaggctgactgcaagctaacacaagaagactatgatttggaagttgcaatggagatattagaagaaacacctagatacttcactagaagtgctgcaaaaatgacagcataaattgtgcaatttcacaaccctccaactcccccccaccgcaaaaaaaaactacaagcatttaacgg

SEQ ID NO: 237057 - DNA, 679 bp, Homo sapiens
gaatgctgcaagctgaggcttggtgacccaatgaccttgtagagctttgcagatgctatctgggaagaaaaaaagctgggaagggagttttattgtgtaggtagagacctccataagggagaagtaggagagacttctaccccccagtccagtgaggaagcaaggaagctctaaatgtgcactaatagaggagtgatgagagtgacaagtgatcagcctttggaatgtctgacatcaaaagcctgtccctcatttggcaccctcatctgcctgcagcccagctgaggacctaggatctaacacaaaagcttagaagtagcccagaaagttgtcttaacactcttgcagggaaacacaggccctgattcttagaagagccttgttcattctgctcaaagctgccttccaacggctgctggggttcccagcacagaagagaaggaacggaccatgcagctggagatcggcctctgccagcagcaggaagtggctgtggccagggaggagacacaaatatataaaagacgggagcagaaagttaacttgcaaagaccctaggtgggcagtcacggggtggagggcagcgctgtgtcacgtagcctattactgtacggtgtgtaatggtcacaaaaatgcccttggccaagaatcaaggttgaatgacgctgagagtcctctg

SEQ ID NO: 237058 - DNA, 512 bp, Homo sapiens
atttacatgctatgggggttagaaaagtagtcacttatgccttactctggcttagtgaaacaatagagcagagaaagccatcagatatgcatttatctcacgtgagcagagggatgactttgagttctgtctgtcctttgtccacaaggaatttccttgtgggcaaatagtgagggagttatatagcttttttttctcttagtagctaccttgtttaggaataaaatgggaggcagctttgcctgaggcagttcccagcttgacttccctttggcttagtgatttggggtcccaagatttatttttctttcacaatgtcctcttcagaactctgagcggggaccagattagatgaagccaggagtccagactaacgattcattcattaggctgggcgcggtggctcacgcctgtaatcccagctctcagaagcaagaggcaggaggatagcttgagcctaggagttcgagacttgcctgggcaatatagcgagaccccgttctccagaaaaa

SEQ ID NO: 237059 - DNA, 416 bp, Homo sapiens
ttgatgtctagtgcatattttgactaaatgtttatatatttttccacaaataaatacatgacttaatgtaattgaaagtcaaacactttttaaaaatgctttttgcataaagaaattcacatctttacaactccttaactaggatggtgtcaattaaattaatgtttgattcaggacatgtgtactttggaggtaagtatttcatattcctcccctctccattgctcaattgccccactgggtgacgtaccaagataagccacatgtttgattcttgtttgctggatgtggacatatgcacattgcaggtatgcctataagtacatgcctgaaggatctatgtgtgtggtgggaattggtgatgccaaagaatgctaaagactttcatgccccttaaaggggaaaataaccacaac

SEQ ID NO: 237060 - DNA, 234 bp, Homo sapiens
tttgtgaattggcagtagctgcatttgctgacatggtgagttacaggaaatgccatcatgttcctatcatgtgaaacaaagtgagaaataggttcagggtgggaggctgaaagggaggaatgcagacagccccgctccccacacttgctccaaggctgggaggaggaacgggaaggtgtctcccctcctggattcagtcaccttcttctcttcattcccctgcagtatcccctc

SEQ ID NO: 237061 - DNA, 223 bp, Homo sapiens
cagtctgtagtgcctataatattaaagattaatgcatatcttttaaaatagtcctcataagaaaacagaaatgttaattacacttattttaaaaattggaagatgaaattaatgtaaaatatcaaagcagaaattatataaaattaatgaatataagttcaaaacttctatgaagataccaatgaagcaaataagccactgattaaggagaggatgagtagca

SEQ ID NO: 237062 - DNA, 493 bp, Homo sapiens
ctaaggaaagagtaaagaaccagttgcctgtgactctcacacatgccatcatcccaaagcatcccaactcagttgtctcctgaccaggagaaaaaggaactcatcatgtcttctttatttattgatttaaactttttgtatagcaacctgtgtgagcagagcactattccagatgctctgaagagaccaaaaaggggttaaccaagccaggtgcagttactgtcgcctgtaatcccagcgctttgggaggccaaggagggaggattgcttgaggccaagagctggcaaccagcctggtcaatatagtgagactctgtctctacaaaaaaaaattttttttaatcggtcaggcatggtgttgcatacttgtagtcccagctacttgggaggctgaggcaggagggtcacttgagcccaggaatttgagactccagtgagctgtgatcaccctgtactccagcctgggtgacagagtaaggccatgtctctattt

SEQ ID NO: 237063 - DNA, 487 bp, Homo sapiens
agggacgactcaggagagggagtgcccatctcagagcctttcaggaacctggcatttaataaatgcctcctccagagggaaggattcaggcagatcacttctagaaggggtcaccgcctctccaggttctgcatggtccacagcatatgtacagtccccagaagctagactccttccaggcctggtgtggagggaacctaagtgtgtgatggaggagagtcttccacgggctatgaactctttgtaaaaaacaaaacaaaacaaaacaaaaaaacagcatgcatgcgatgctgggggcttaggacaatatcttaaaacagaactgaaacattggtggataaacctcaggacaggcaggaaaagagccgtagctcatccaccatcagcattagcaatgtaatcagacacaacggaaaatcaatgaagtaaaaccaaccagcaggattatgttgttgagcctccaataaatgtcttaagtgtccaatag

SEQ ID NO: 237064 - DNA, 503 bp, Homo sapiens
ttgcctcccaaagtgctgggattataggcatgagccactgtgcccagtctgaacttctatcttctttaagccactaaatctttactttagatacttgaaagtttttgataaatcatgttatgtacacaacattgaatattacacaactcttaaaaagaatgagtcaaatctattgaggtatacatgtagaatacccagatatagtgaaatgaaatgctttacaaaatactgattttatgtgaaacaagtttctaaaaggttgttattgcttgttaccatctgtgcaaagaataaaaatatcaagatgatatgtctgtaagtagataaaatctctctttctggaatggcacaagacactggtaacaggagttgcctctgagcaagagaactgaagagctagggaagggaatgggagagagactgctagctctaggacttttttgtacctttttgtccttttgcatgtattatttaaagtaaataataaagtttaaaaaattaaa

SEQ ID NO: 237065 - DNA, 372 bp, Homo sapiens
attcctagaaaaatgtttcttctccaaattgcatggaattttcttccttgcatgtcactattcttcaaagcatttagcattttggagtgttccttctttttccttgcaaagccaacaatcacagctgaccaggacttcaattcttcaattgattcacgcaggataaaatgacctgcctgtgacttgacgttttattttaaacagcttgtggttgtgatagaacaagaggcccagaccaactcccatcccactgccatgtgatttcctatgaaacagcgatttccctgaacaccagagcaaactatgcgatgataatgctccaagcagatgtttggagaagatgtgggttttcacagcttatgctgtgatcaa

SEQ ID NO: 237066 - DNA, 175 bp, Homo sapiens
ggactttctgcagactggtctcttctaacaggctggatgtccttggggggcccatcctgtcccgagccaacatagcaggccatggacaaaggcgcgataagggactggccagcgtttactatctagtccctcttaggagatggatgaggtggctttgagtgatgggcttccctgc

SEQ ID NO: 237067 - DNA, 538 bp, Homo sapiens
taatttcctcacctgtaaaataaggaaaataacacccaccccaaaggcttgatgtgataattataatgaggtaaagtatttatgatcctagcagatggtgaatgcccagtaaatattagtttctgccccctcctggccccaccatagacgcttgcggcctgagccccactgtctgctaactaataaaacatgagcttggtctttaccatcttgatctccctgttgcttttgtgtgtaggtttttgttttatttaatctttcggacaatgagagaagggaagagaaaagagaaagggagaggaggagggacacggaatgatacaaactcaatttagaactttcctaagtgaaaatgttgcctgaaagagtaccttcaggtgtcctgcctcagttctttctccaagagaaatattaacctatgtgacaataatatgtgtctacagtacactttgggaggcggaggcgggtggatcacctgatgttaggagttcgagaccagcctggctaacatggtgaaatcccgtctctactaaaaata

SEQ ID NO: 237068 - DNA, 413 bp, Homo sapiens
ctgagatgcagtgcctgagaatctgggatccacaatgtgaacttctcaacaacccctgcacctgccacttccctgaatcttccactaagcaccagaagacacatgcattttaaatcaaaggaatggctcccatgcagaaaccagagtgttaaaatggatccctcccaccctgaactctgactggtttggttcacctcaaagaccatcctcctgctatatggtttcgataagtctaaaaagatgagccattcaagccacagtgtcttctatctccaagctggtgagacacactgcagtcctctacagaacagaagagagacagtgcacaagattgctcttgggtaagttttctttttcttatgtaatgaatgggttactcttcagcccttagaataaaaatactataataactt

SEQ ID NO: 237069 - DNA, 302 bp, Homo sapiens
gcgctctcttctcctggcccgcagccgggagccaaggcccgggggtgggcggggaaaggggagaaacgaacaagataggatgaccgcgcagccgacgtagccgcgagggggccggagccacctcaggccctggcctgaaaccctctgaggcgggtggccggcagaagggccccctccaaggtgcgtgcggcgccctacggttcttgtgggtggtttacagtatctagtgcagaagaaatgattaataaatattggctctgtaattctctcctctttgagcattgaataaagatgcatatgct

SEQ ID NO: 237070 - DNA, 551 bp, Homo sapiens
caagcaatggacgctggcctgggtcccatctgcacttgccagtgcccgtcccgtcagcagcagcgccctgctgcggtgatgcgtggagttgcaacagccctggttctggaagggaagcacctccctcgttctcccttgacaccagctcccgtggaggcagaggggaagggaaggccaaagcggcgtcctccccacttggccgccctgccctgcacccatgtgcaggcacctccttcagcattgtcagagtcttgtggactcaaaccaaaaaacgtgacctgcaacggggccaggttcacaaaatgagcccctgagagacagtggagagcggccaccattccaactgacacagtgggagcggcgccactgggtgccagagcccggccgtccacgtgggctcaggtccccactctgtctcttaccagccatgtcatcttgggcaagttgctaaacagctccttgcctcaatttacccacccatgaactgagcgtcagaatgctgcctccttcctagaactgtgcagatctagtttactaataagatgcttaca

SEQ ID NO: 237071 - DNA, 370 bp, Homo sapiens
ctgaaaagctggcatatacctggctgccaaaccataaagggacatacctagagtgaaggaccaactgcccttaaattcactgccttgtgccagctcctaagttactgtagggatctgtgtgggtctggcccctcttcatgggccctgggacccttcagaaatctattcttgtgcttggcatcccatcttatcttctccttgctctgctgttaggtgatgggtgaacctatcaacaccctatctcatgtcaccaagtactcagattcaaaattgaaatccagttcctactagatcactagccctcctcttttacttcaatttctcatagcctacaaagaaaagaagaaacaacacatacgaacaaaagatc

SEQ ID NO: 237072 - DNA, 390 bp, Homo sapiens
agacttacttgcattttatgatcgtaaggaactaaatgtgaatgggatgggactgactggcaatttataaacacatcccctccaataaccagcagatttctgagacctgtaggaaaaccaacattattgtgtaattgtgtgaggaattctaactacataataatttagtttcgaagtttaagatttgagaacaaattcctgtcttttcgattagcttaaatttatttgattaatttataattaatgcttcatatgcttccaaacagatatgggatgagttgattaaacaagggattctacagatgtttttactcatgcaatttttaaatacacatttatggttcaattgcaataaaagaatttacagattgatgaaatttttttaaaaaa

SEQ ID NO: 237073 - DNA, 642 bp, Homo sapiens
ctcaactttgccagtattagttgcaaaaccccatgcagaatatggatttttaaagaaaatgggttaaggtggttttttttctttttttaaatcccagtttggcttaaaggagtgaagacatttcatgaactattaagaatgaaggtaaatgcaacagtagacagtaaaatgaactcgaagttattatggtaacagtgcctttcagtataatgaaattctttgccttatacctttttaatattcatgaaattgtttaggaacaggagtacaaaaagttgccttaagagtttcttggattttatcagtaactattttgatgtatagtatcttaccaaggcattttttttaagtgcaggttttgtttagggataaatattcagagttctaccaccctacttgtgttttcttgaattctttagagaatatggtatctacttaatcttccttcagtgtcagtgctgtgaatgaggaatgctaactccaggagtgagttaatcctcttgcaggtttgaaatcagcaaattgtttactcagctacataacataggccttttctccgtcatgagacagttacctaggtgccgagcagtgggagaggataaagaactaaacgcgtgtagagaaggggtcccatatcctttt

SEQ ID NO: 237074 - DNA, 396 bp, Homo sapiens
gaaaactgttgagttctcaggtacctgtgtgtccgtctttgccgaatcctgtggctcttccggctcactgccattcttcaggatacagctgtgaaaggagaacagatccagcagccccctcatgctcatcttggaggtgtctgtccaggttaatgggacccaggtccacctgcggagggacagcccaggcatggctcagataagcaccagctttgggacgtgtcgtttctaggaaccccaacccttcacccaaacccataggcccaagggaaaaacttattctgtctccattatttctacattttacctctattttctgattatatgcccatttttgactatatccatcagatgcattcagctaatataacagaaacactctcagaccagcttaag

SEQ ID NO: 237075 - DNA, 2077 bp, Homo sapiens
ataatatgtgcaaaatccttaacatcgcattgaaagattctttggatctgatcttaccatatatttctagcctaattaatcttctacatttaccctgccagttctctgttcctactcattgattccctaacaatgtaagcagagttcctttgttaagtcattcacagaaagttttccctattcttctctatctgaaaaaaaatgtcctctatccttggagatctaacccaaagtccatgaagcattttactgatactttcattttctgttgcagcacttgctatttcttttatgccatggagtgggcacattttgtatttgtgtcttgtattattgtgacttgatccttggattggatcttattttacttttgatgtatgtggtagtcagaggcctaccaacagatagaacccacacagtaatttggagaaagttttacataaagaataagtagatataatacagtatttatgtaatggaagattagctagtaataactaaagaggagtctaaagaatatagtaataataattataaggagaaaccattgcctctgaagctgagaggtacccaaaaagaacctcttcatcccctgcaaggctgatatccaaactttatttgtgaggacatgcccgtggctcactggctggtggacaaattgctgaggtgctggaacagcaggacttgttggaaatgttttcctctgggattccaaataagtcacccatagggaggatcctaaccagcagcactcctcttcaaagccatctaaggggtgccatcttcgtagaggtgcctcattggcaacacttcactgctatgctatctgagagggtaatggaaaatgctatccacaaggagactgcacattgaaagttaatgcaaagcaacttaagggggtgtggaagatgccatccacaggaagtgctgggcttcggaactcactgaaaagccatcagacacagtgtctgggtgcttctagccaccatgttctataggagccaggtattaaagaagctgcatgctgagaggagcacactaggaccagaaagagaaacctttctccctctagtgtccccccaatgtcatgtactgacagagctcaaaatgtgcaagttcacaagggagaaatatttatcaaacccatctccattattgtagagcaggcagtggggggtggatttggatgtgataatcaatgtattcataattggcacaatatacttgtttattgactctttgaacaaatcagaatttcttacaagatagaaatacattcttaactttccttttgtgcccaggatttttaaaaaatctcaaataaatattactatatttctccatcatattcttattaatatgatataaactttgacattttatgtgcacaagatatatcctaagcattaaagataactgtgttacataagtgcacattattgtgcttagtaagtgtatgagcatgtgtgggcatatatgggtgtatataaagtcaatatttgatttatgattgaccaatttgaaaattaataaaatgggcttgctgaaagctagaaggtagctactttaaacatcagaaagacaaatgacaagtcttggtatcagctagttaaaaacataagtttctacctttgaaaggattatgccacacattgattttcctattaatttaaataaaggtaggtgtaggaaatttactttagtttccatctttgaatgttataaaatattgtactaacacatgttgatttctgaaatgttataatcttattatacttaaaggataacattggggctgggtgtagtggctcatacctgtaatctcaatactttgggaggctgaggcagggggattgcttgagcaaaggagttcaataccagcctgggcaacatgatgatacttcatctctacaaaataaataaataaataaaaactaactgggcattgtggtgtgtacctgtagtcccagctacttgggaggctgaggtggaaagatcacctgagtccaggaggctgcagtgagccgtgaccgtatcactgtactccagccaaggtgacagtgcatgaccctgtctc

SEQ ID NO: 237076 - DNA, 348 bp, Homo sapiens
aatgtgtgctctggagccaggcactctagattagaacccagcttcctggagaatcctcctggctgcttgacccaggataagaacttgattgcctgtagttagtagactagaaaaagaagaacattttgaacccagagcagtaaccagttacggaagtaaatgtgggtaagattcccagagagaaggtaaccatggccagcagctatacccacagagccccttcataaaataaggtgtgagtcaagtgctgttgattcattgttttgagatagctctctaaaacttacagtcatgatttctcacaaaataattaacaattttgttgcaaatgaggacatagattgtgtt

SEQ ID NO: 237077 - DNA, 236 bp, Homo sapiens
agagtatttgcccatcaggatcgattggttcccggcttgttggccaactaatgaattctgcagaacagtctttgggtttgttttgtgtggcactcgtgatggccaaagcacttttctctctattgtttcattgtgtcctcaaggattccccatcccccctgccaccaggaaaggaaaaatgtcataaaatagtagggctgaggctcatgagaaattatctgaacaccctcatttta

SEQ ID NO: 237078 - DNA, 1702 bp, Homo sapiens
  misc_feature (1572)..(1572): n is a, c, g, or t
  misc_feature (1619)..(1619): n is a, c, g, or t
  misc_feature (1624)..(1624): n is a, c, g, or t
  misc_feature (1627)..(1627): n is a, c, g, or t
  misc_feature (1630)..(1631): n is a, c, g, or t
  misc_feature (1651)..(1652): n is a, c, g, or t
  misc_feature (1657)..(1657): n is a, c, g, or t
  misc_feature (1659)..(1659): n is a, c, g, or t
  misc_feature (1665)..(1665): n is a, c, g, or t
  misc_feature (1669)..(1669): n is a, c, g, or t
  misc_feature (1673)..(1673): n is a, c, g, or t
  misc_feature (1681)..(1682): n is a, c, g, or t
  misc_feature (1684)..(1684): n is a, c, g, or t
  misc_feature (1688)..(1688): n is a, c, g, or t
  misc_feature (1691)..(1691): n is a, c, g, or t
  misc_feature (1694)..(1694): n is a, c, g, or t
  misc_feature (1698)..(1698): n is a, c, g, or t
aagtagatataatagggtaaaggagaagtggtggtaaagacgaaaagagtagggaacaggtggttgaaggaatcagattatccccagtagaggggaaatttatggttgtttgctttagaataaggagttagttgctgaaataaaagagcattctaatataagtgctagaagctattttaactgtatgaaatggatactgagccaagatggctgaataggaacagctccagtctacagctcccagcatgagcgacgcagaagatgggtgatttctgcatttccaactgagggaccgggttcatctcactggggagtgctggacagtgggtgcaggacagtgggtgcagagcaccgtgcatgagccgaagcagggcgaggcatcacctcacccgggaagcacaagaggtcagggaattccctttcctagtaaaagaaagaggtgacagatagcacctggaaaatcaggtcactcccaccctaatactgcgcttttccaacgggcttcccaaatggcacaccaggagattacatcctgcacctgtcttaaagggtcctacacccacggagcctcactcattgctagcacagcagtctgagatcaaactacaaggtggcagtgaagctaggggaggggtgcccgccattgctgaggcttgagcaggtaaacaaaacggcccggaagctcgaactgggtggagcccaccacagctcaaggaggcctgccttcctctgtaggctccacctctgggggcagggcacagacaaacaaaaggcagcagtaatctctgcagatttaaatgtccctgtctgacagctttgaagagagtagtggttctcccagcatgcagcttgagatctgagaacaggcagactgccacctcaagtgggtccctgacccccaactagtataactgggaggcaccccccagtagaggcgggacacctcacacggccaggtactcctctgaggcaaaacttccagaggaacaatcaggcagcagcatttgcggttcaccaatatccgctgttctgcagccactgctgctgatatccaggcaagcagggtctggagtggacctccagcaaactccaacagacctgcagctgagggtcctgactgttagaaggaaaactaacaaacagaaaggacatccacaccaaaaacccatctgtacatcaccatcataaagaccaaaggtagataaaaccacaaagatggggaaaaaacagagcagaaaaaccggaaactctaaaaatcagagcgcctctcctcttccaaaggaacgcagctccccaccagcaatggaacaaagctggacggagaatggctttgacgagttgagagaagaaggcttcagaagatcaaactactccgagctaaaggaggaagtttgaaccaaaggcaaataagttaaaaaccttgaaaaaaattaggccgggcgcagtggctcacgcctgtaatcccagcactttgggaggccgaggcgggtggatcacgaggtcagatcgagaccacggtgaaaccccgtctctactaaaaaaaatacaaaaaattggctgggcgcagtggcnggtgcctctagtcccagctactcgggaggctgaggcaggagaatggngtganccnggnnggcggagcttgcagtgagcnnagatngngccacngcantccngcctgggnnanagancgngantccntctc

SEQ ID NO: 237079 - DNA, 453 bp, Homo sapiens
ccttgatgaacatagatgaaaatatttttaacaaaatttcgataaatcaaattaattgctatataaaaaggataatgtatcataaccaaataggggcttgaaccaggaatacaagattaatttaacattacaaactcactgtagtttacatataacacaccaaaaaggaaaaacatctcaatagtaacagaaaaattatctaacatccattcctgatgaacactatcagcaagtgcgggatagaagggaacttcctcaaccaaataatggtcatctatttaaaacctagagccaacatcaaacggagtagtaaatcactgaatgccttcctcctaagatcaagtatagggcaaggatgtctgctctcactaattctattcaggattataagtatagccaaggtaacaagacaagaaaaataaataaaaggtacccagatttgaaaaaaaaaaa

SEQ ID NO: 237080 - DNA, 2157 bp, Homo sapiens
aacacacccccactgggctcctgcattaagcccggggttcgcagccgcagccgggatcgggcacccaggggcgggcgggcacggtagggccatggcagagggtgaggatatgcagaccttcacttccatcatggacgcactggtccgcatcagtaccagcatgaagaacatggagaaggaactgctgtgcccagtgtgtcaagagatgtacaagcagccactggtgctgccctgtacccacaacgtgtgccaggcctgtgcccgagaggtcttgggccagcagggctacataggacatggtggggaccccagctccgagcccacctctcctgcctccaccccttccacccgcagcccccgcctctcccgcagaactctccccaagccagaccgcctggaccggctgcttaagtcaggctttgggacataccctgggaggaagcgaggtgctttgcacccccaagtgatcatgttcccgtgcccagcctgccaaggtgatgtggagcttggggagcggggtctggcagggcttttccggaacctgaccctggagcgtgtggtggagcggtaccaccagagtgtgagtgtgggaggtgccatcctgtgccagttgtgcaagcccccaccactagaggccaccaagggctgcacagagtgccgcgccaccttctgcaatgagtgcttcaagctcttccacccctggggcacccagaaggcccagcatgagcccaccctgcctaccctctccttccgacccaagggccttatgtgcccagaccacaaggaagaggtgacccactactgcaagacatgccaacgcctggtatgtcaactctgccgggtgcggcgcgcccacagcgggcacaagatcacaccagtgctcagtgcctaccaggccctcaaggacaagctgacaaagagcctgacatacatcctgggaaaccaggacacagtacagacccagatctgtgagctggaggaggccgtgaggcacaccgaggtgagtggtcagcaggccaaggaggaggtgtcgcagctggtgcgggggctgggggctgtgctggaggagaagcgggcatcactgcttcaggccattgaagaatgccagcaggagcggctggcccgtctcagcgcccagatccaggagcaccggagcctgctggatggctcaggtctggtgggctatgcccaggaagtacttaaggaaacagaccagccttgctttgtgcaagccgccaagcagctgcacaacaggattgcccgagccactgaagccctccagacattccggccagctgccagctcctccttccgccattgccagctcgacgtgggacgtgagatgaagctgctgacagagcttaacttcctgcgagtgcctgaggcccccgtcattgacacccagcgcacctttgcctatgatcagatcttcctgtgctggcggctgcccccccattcaccacctgcctggcactataccgttgagttccggcgcacggatgtgcctgctcagccaggccccacccgctggcagcggcgggaggaggtgaggggcaccagtgccctgcttgagaaccccgacacgggctctgtgtatgtgctgcgtgtccgcggctgcaacaaggccggctacggcgaatacagtgaagatgtgcacctgcacacgcccccggcacctggaatacaaaacttagccaggcgtggtggtgcgtgcctacaattccagctactcgggaggctgaggtaggagaatcgcttgaacctgggaggcggaggttgcagtgagctgagatcgcgccactggactccagcctggacaacagagcaagactccgacgtctcggaaaaataaataaataaataaataaataaaggccaggcaaggtggctcacacctgtaatcccagcactttgggaggccaaggtgggtggatcccctgaggttgggagtttgagaccagcctgaccaacatggagaaaccccatctctactaaaaatacaacattagctgggtgtggtggcgcatgcctgtaatcccagctacttgggaggctgaggcaggagaattgcttgaacccaggaggcggaggttgcggtgagccgagatcgcgccattgcacttcagcctgagcaacaagagtgaaactctgtctcaa

SEQ ID NO: 237081 - DNA, 2195 bp, Homo sapiens
aacacacccccactgggctcctgcattaagcccggggttcgcagccgcagccgggatcgggcacccaggggcgggcgggcacggtagggccatggcagagggtgaggatatgcagaccttcacttccatcatggacgcactggtccgcatcagtaccagcatgaagaacatggagaaggaactgctgtgcccagtgtgtcaagagatgtacaagcagccactggtgctgccctgtacccacaacgtgtgccaggcctgtgcccgagaggtcttgggccagcagggctacataggacatggtggggaccccagctccgagcccacctctcctgcctccaccccttccacccgcagcccccgcctctcccgcagaactctccccaagccagaccgcctggaccggctgcttaagtcaggctttgggacataccctgggaggaagcgaggtgctttgcacccccaagtgatcatgttcccgtgcccagcctgccaaggtgatgtggagcttggggagcggggtctggcagggcttttccggaacctgaccctggagcgtgtggtggagcggtaccaccagagtgtgagtgtgggaggtgccatcctgtgccagttgtgcaagcccccaccactagaggccaccaagggctgcacagagtgccgcgccaccttctgcaatgagtgcttcaagctcttccacccctggggcacccagaaggcccagcatgagcccaccctgcctaccctctccttccgacccaagggccttatgtgcccagaccacaaggaagaggtgacccactactgcaagacatgccaacgcctggtatgtcaactctgccgggtgcggcgcgcccacagcgggcacaagatcacaccagtgctcagtgcctaccaggccctcaaggacaagctgacaaagagcctgacatacatcctgggaaaccaggacacagtacagacccagatctgtgagctggaggaggccgtgaggcacaccgaggtgagtggtcagcaggccaaggaggaggtgtcgcagctggtgcgggggctgggggctgtgctggaggagaagcgggcatcactgcttcaggccattgaagaatgccagcaggagcggctggcccgtctcagcgcccagatccaggagcaccggagcctgctggatggctcaggtctggtgggctatgcccaggaagtacttaaggaaacagaccagccttgctttgtgcaagccgccaagcagctgcacaacaggattgcccgagccactgaagccctccagacattccggccagctgccagctcctccttccgccattgccagctcgacgtgggacgtgagatgaagctgctgacagagcttaacttcctgcgaggctgtggccaccgcggactctgctccggagcaccccagtgcctgaggcccccgtcattgacacccagcgcacctttgcctatgatcagatcttcctgtgctggcggctgcccccccattcaccacctgcctggcactataccgttgagttccggcgcacggatgtgcctgctcagccaggccccacccgctggcagcggcgggaggaggtgaggggcaccagtgccctgcttgagaaccccgacacgggctctgtgtatgtgctgcgtgtccgcggctgcaacaaggccggctacggcgaatacagtgaagatgtgcacctgcacacgcccccggcacctggaatacaaaacttagccaggcgtggtggtgcgtgcctacaattccagctactcgggaggctgaggtaggagaatcgcttgaacctgggaggcggaggttgcagtgagctgagatcgcgccactggactccagcctggacaacagagcaagactccgacgtctcggaaaaataaataaataaataaataaataaaggccaggcaaggtggctcacacctgtaatcccagcactttgggaggccaaggtgggtggatcccctgaggttgggagtttgagaccagcctgaccaacatggagaaaccccatctctactaaaaatacaacattagctgggtgtggtggcgcatgcctgtaatcccagctacttgggaggctgaggcaggagaattgcttgaacccaggaggcggaggttgcggtgagccgagatcgcgccattgcacttcagcctgagcaacaagagtgaaactctgtctcaa

SEQ ID NO: 237082 - DNA, 514 bp, Homo sapiens
tcttgggataggtggtggcccgactccagcacttcaggccctgggaagccaccatcccatggcttctgagccgcagggaagtgagcctaaccccaggtgcgccatcacgcccagccacacaacaaaaaacttaaaaagatgtgtttggagtcaaagtccaccaaacctaccaacacggtgcggcaccatctgatcccctttatctctgatctgtggctaccccagctgaatcccctctggccctggctgtcctgctcaaggcctttggccactccctttcctggatccctttccccaaatagccacagctttactcccttttctcctttagcttttggctgaaatgtcacttcttagacttttcctcagcaccctatttaaagcaatccccaccaagacaggaggattgcttgacgctgggagtttggggccagcctgggcaacatagtgagacttccatctctacaagaacacttaacatttgccgggcatggtggcgtgcacctgtagtccc

SEQ ID NO: 237083 - DNA, 666 bp, Homo sapiens
cctgcctcggcctcccaaagtgctggggttacaagcatgagccaccacacctggcctattatgacctttttcatttttctctgagctacacattatttagatatttcccctagagattagaaacctcctttcatcctgtccactttttgttagcatactttcattggatttactggtacatgttttgtgatcatgataatgtgatcttgttttggtggtgtccccctactccgtctctatgccatgacagccttctgccccaaagcctggaagattactctttggtcaagggcatacaaatagaaagttaataaaggggaatggtgttgaaatagaacctcatacatttattacagttctacttatacagaaaatctagacaccttcatccttctcacagctctgttttttagtagagtagtctttagagtagtcttcactgttatctatatacctagaaagttaactgggagctttgactcttactgtgccttcactcatagtgtgccttcttagctgctggagaatttggggagaggatgtacacagcactggtgcctcagccctgccaaggtcttcactgtatatattttgtgtgttcttctgaaactcttgatttcttatatggcaataaactcagcatgtattaaatataattattgaaat

SEQ ID NO: 237084 - DNA, 598 bp, Homo sapiens
gatccctaaaattgaccttttagaaaaagggagaaatagaaatatagtggccactgatccatagcaatttgaaagtaccacttggcaaaaataattaaatctctctgctatagttcatgaatatattccttggtttgcctatcaggcaacccctgattcacctttctgagaggaattcctttacctaatgtcctcagggggccttggttttactttctgggaggtttttattgtacattaattttcagacacaatctgaatgggcattggaaagtatacccttcttggaggctgggcagccttagcagtttacttcctataattgtgagtctgggggcaggcttgggaattagagtatagatccgtaacagctacagtctattgcaggccaggtttgggtttttgttgttgttttgttctgtttcttggccaagtggattcctaaaactttagtaagtttctggtctgttgtcttcagtcatttacatggacagtattaaccaaggtaaaatacattgtttttaacaaagaacctcatcatttacttgctggcctctgtgtgctctccatcccctttgttcttacaggaatggtacct

SEQ ID NO: 237085 - DNA, 392 bp, Homo sapiens
aaggaccattgccacctcacactcctgtcttccatccctgactattctcccaaagaagaacatggaagttaacgactgggagacagtggacatcacaggcttacagactcttagccaaaattgcagccatttagaaatgtggatttggggagtcatagaccattcgaggcacagacttttagcataatgtaagtacttgagaagctctattaggaacacagactttaaaaccatataattttagaatcccaacctctcagacatattccagaaataacagacaaacagactcctggtctctatggtcacagagtccggtggtgctcagagcctggagagggacaggggtcctcatggcacaggcttgcctgccaggaagtagctctctgggc

SEQ ID NO: 237086 - DNA, 270 bp, Homo sapiens
tcctcttagtattaagatttcttaaaaagctatacacagttttaagatagattgttcttgaagataatggggcaaataattacctgctaaacaaattatgagtcctgtgattctttttttggttgaaataatttcaagaactccagcatatgttgcagttttggctagaaaggtgattgtgacatacatccattcatccattctccctctctccttccctccttccctcccttccttctttccactttcaatacatagggctggggtagc

SEQ ID NO: 237087 - DNA, 781 bp, Homo sapiens
tccattttaactttaattccgtctaattactgtattgtgagctcagtcagcaatcttgcatgaactctgcagtaacttctgaagactcttgctccaagtgtttgataatgaggagatgtgcaggactaaggcgactgtgtgatgtctgcacagttcgaaagcccgctttcctgttactttcaaatctcgggtcagcattttggaacttttctgctttaatttttccacacacacctctcactgcgaccacctaccatcaccacaacccaaaacaaagcaaacaaacagaaagcttgaacaagaatttacatctgggaaaacgcttctactcatcaagagtggaattcctttttattcctataattgactcacagcttcaaaaatctgtgaagtcatactttggtcacggaagttgcaagaaaccatatttgcaaacgttttattttaaagaaggtatttaaaaatatttcacatattagccacagatttctagaagtgaagttataaaaattagaaattatatttttccttttgatgatagcaagtgaaaagagattgctccaagcatgttttcaataaattcagtataactgcaacacaaaaattctgcatgcaggcttcatacacacacgttataattttatgcatttatcttgagagttgtataattaattttaaaaatgcaacagaaatgtgaagttaagtctactttgccaataatggaaatgtctcatagataattttgaatacaattaaaattttgtttttatcataaaaggaa

SEQ ID NO: 237088 - DNA, 405 bp, Homo sapiens
cttttgtttaatcctgtgtttccagtaaatatctacactatttaaaacaataaaagcaacttgattcaaaagggagtaaaaacaattattatctcatgcctaacaatctatatttacagactttctaagtattgaaatttgttattttggtattagaaaaatctattatgtaaccgtggtttgattccaagcacctaataaccttaacctatttcaggttaaatgggatattttttcaattattcaacaaataattattgagttattctataatccaggcactgtataggtggcgaggacacaatgataggcaaagtagtacaagtttctacttttggatagcttacattctaatagagactatcaataaacagagtttatatagctctgatggtgataaaccca

SEQ ID NO: 237089 - DNA, 1971 bp, Homo sapiens
tttgttttcttttctcctcaacccagcattttatttaaacaaaatttagaatttggccgcaatgggccaacgctggggccaaaaatccacaggtttctctctccatccctgctggtttctagtcccccctccccctcttccctcccaggcttaatcatattttggaacgggtgaggtcttttgttgggtgggcaccccctgattgcttgtctgtttattttttaatgtgcaactaatttgatttgaatttccttcagtttccaggccttcctagggaaagctaagggagagggaatatgctttttaaaaatcgttttctttctttctttctttctttctttctttttctttctttctttctctctctctccttccttccttccttccttccttccttccttctcctcctcctccttcttgttcttgttcttcttcttttttttttttaaataaatgtggcaggaggtggggcgttgggaatggggaggcacggtggttgtgggcaaagagtcaggaggagcagacagacccggaagaaaaggaatctgctctggaataacacttttttttttgaggcctcaggccttgggcaaaattgcttcgctctgtaatgatttctgctgccggagttgctcctccacccctaagttaaagctatgaacctgggtgcccgggcaacgccccacagtggatagcagccgggagcgctggttttgtgccttttgtgggggcccttggttccccctcattggaggctgactctgaaatttactggatcagtaaatttcctggctccctgggagcagctgttaacgaggataaagtctctgggcatgtttctggccctgcaaaaggacctcacccatgaaggtacaattctcactttgtttagataccagaggggcacccacaggctggctgagaatgaggcatagttgattaaaaaaaaaatcagtcattacaaaattgtttttaaactcacacgtgcttttaaagtgttgtggtttaaattactttaagataaaaaaaattcatctgtaaggatagcgttcatttaaaagatgctaaaactgcaggatctcatcatgaaataggaggttgtagcttctaattacagtatatacaatttcagaaagatattccggtaatcttttaatacagactttataaatagctcacatcagacgatgggttatattggagagccagtcttctgcggtttcttgaagaatgcttgggatctgtgaggaagctctaggcccttggaggctaggtagcagttcactcagtaggagtttgtgctccttttgctcagtatttaacctggtagcatttgatggataagttcattaggagctaactagaaggacttaccacacttgtcagtttggaaaatgaggcccgggaagggaagtgacttgttgagggtcaccattatagacgaaagtttaatacaggattgtgttaatagctcctttctgggatatctgatgtgtactaagcactaattcctgtgcttttatacattatctcattaaaattctagtattttcgatttaggttgtgttatgcacacttcacaaacaaggggattgagatttacagagagagagtaacttgcataagatcacgtagctaccaatggtgtcatccaatggaattttcttcagtgttggaaatggttctgtctgtgctgtccagcatagcagccacaagccacatgtaactgagtctttgaaatgtagctagtggactgaggaacaacagtttaagtttttttttttttttttgaaatggagtctcgctctgtcgcccaggctggagtgagtgcagtggcgcaatctcggctcactgcaacctccgccttgctggttgagatggattctcgctctgtagcccaggcggaggttgcagtgagttgagatcatgccactgcaatctagcctgggtgacagagcaaaactttgtctc

SEQ ID NO: 237090 - DNA, 1060 bp, Homo sapiens
gacgctgtgggggcagtggctgtggagagcagcgctgcctgcctcctggcttcatctgcaagtttccctcgctgcagaagtcaggcatgcctactgatggagctcctacttctgccccaagccctgggcttcctctttctgagttgctcatggggttcagtcagggctccgcgtgctgcctgtactcaggtggcatttcccgtcccccgggctgagttgtagcatgcaattgcatacttgcccaagcattacaggagctgtggctgcaggacagggagggccacatggacatgacagaccactcaggtggccggctgctcctgggagtagcaggagggccccagcaggaagtgcttttcaagtggtgagcttggtggctgtggccgagacatgcaccttcccgtcattgttcctcccagtgtcattcttcctctgagaagctgtgaacttgaggctttgcccctggggtttgaggctcccatgaggtcccctcagaggaaggtgccttcactgggcagagcctggtggacctgcaccagccccatgaggctgagcggagagtgcagggtggggcccgcctgagggtaagcacagcagcacccctcagggctgcgctttccagagctgagagggagggcagagctggggtcttggggtggaggtggggtggggatgcaggtgccgcctcttgtactgacttgcaccagaggcagtttggctcccagctgcctgggaacacgtgcggagtttgtcagaagcaggaagacttggtgtggcgggaaccaaatcacagacacacactctcccagcaaagccctgtttgattcacccgtgtgtcctcagcagacacgactgtgtgttgggggttggggggtgggcgaggtgactcagccgcggacggcattagaatgcttagcacattgaaggcagactgtctgtttctgggtgccatctgtggcatgtttgggtttggaaggacagcttgcttgctgatgaacacttccacagtcttttgagctaagtagtttttgtaaattactgtctagaccattctgcatta

SEQ ID NO: 237091 - DNA, 334 bp, Homo sapiens
gatatggtttggacccagtaggaggtaattgaatcatgggggcaggtctttcccatgctgttctcataatagtgaataagtctcacgagatccaatggttctataagggggagttttcccgtgcaagcactcttcgcctgccaatatccacgtaagatgtgatttgctcctccttgccttccatcatgattgtgaggcctccccagctatgcagaactgtaagtccaattaaacttctttctttagtaacttgcccagtctcaggtatgtctttatcagcagcgtgaaaacagactaatataatatctatcagttaagattaggtttggctgct

SEQ ID NO: 237092 - DNA, 297 bp, Homo sapiens
ccttccataatctcagtgcaggtcccagattcagtaaatcgaatgcagatatgacactcatgtctctaagctacaatccacgttccacctttccaacttgtcccaataaagttgatggctaatctttccccaggacaggatccaagcccaggaccacacatcgccacgggacgtgtgggccagagccaggctgagggaaaggaggacctaggagggagatgcggtggaaccagggcacgtagtttccttttgaaaaattgcctgattagagttaaatcaataaaatcataaatccaa

SEQ ID NO: 237093 - DNA, 254 bp, Homo sapiens
atcttcatttgctaagataattttacatactatagaattctaggcttacaattttcttcaaatctttgaagatgttataccactgtgttctgcttgcctacttcttgacaaaaagtctgcagttgttcatatttttttccctttgtacataatgtgttttccccttcctctggctgattcaatttttattttttattatactttaagttctgggacacaagtgcagaatgtgcagtttttgtcagataggtata

SEQ ID NO: 237094 - DNA, 681 bp, Homo sapiens
tagaagcaacctgtcaagatgcaatgggcttttgtaacaggctctgcaacctcttctcaaaaaagtagaattgttagtaggctaaaatgctgtgggattttaatacacaggtttaccactgaagtttttaatttgggatggctaacataaaaatgatcttctatcaacactttagaggatggtttctttgggatttatttataattttactgaaaaattactgtgtagggaagagagagtgactgtttctgaatatcattgaaattacgctatgcaaaggccttaaactggagaaagaagaggagcttaaagagaaaatagaaaacctcccatcgatgggatgattatttcaaaaactaaaaattttgtgtcagtcactttggtgcaaaattacaaagactctctgttggttccttacacatttcaattggatttgtttttggcattttattactcagtcccaaatccaaagggaatttcataaaattaatttgttcacttccccaccaccccaccaacaaaagcccccaaacgcaatgttgtatccaaggatagtcaggcttcctgctgataaaagctgatcttgttcttctagctaatgttctagggaactatttctagaagcttaggaatgtctttaaaacttagaagctcaagtcaatgtcatgtaaatgaaactaa

SEQ ID NO: 237095 - DNA, 486 bp, Homo sapiens
gcaagcatttcttgatggtacatctctgtgtgtccagtcctgggttaggctggagatccccaggggaagtccaggtcccaccctctcaaccaggtcccaccctctcaaccactcacagcccgttctgtggtcagaccacgagtcctagcccttcttggaaaaggctgcttggcccacccactctaagaagcccagccactctcagcacagatgaaaccactggttttacaaacctttccagtgactcacttgacacccttatacccttctggtcattcttccctcttccttttctccgtcactatagtattgggcctctaattattatcaactctgtgtccctaggatgcggtggtagaattaaaataaattatctaacatattttatttccattcacttctgttggttgttgttattgttgcagtgagccgagaccacgcccctgaactccagcctggcaacagagtgagactgtctcaaaaaaa

SEQ ID NO: 237096 - DNA, 661 bp, Homo sapiens
aaggccaggctgcttgtctcactctaggaccacttagaaaggccttctcagctgcagagttcctggtaaaatgggccaggggctcacatgcagccacatgggtgcagcctcttcctcactcctctgcctgtctcacctctttacaggtgaatctccccagagtgcctcccaagaagccgtcaaaaaacaattttcacctcaagatctgttcccagggaacccaatatctaccagttatggatgtgaatattttggggtaatgattctcaaatttgagtgggcatcaaagtcacccagggagcttgataaaataaaaattgctgggccccaccctgagagtttctgagtcaagtggtctggggtggccagagaatccgcatttctaacaagaacctctcggtgatgctaccactttcagaatcactgttttagaactcagtaagttgctgccctcctcttattcctcttctgaactaaagctaaatcatagagtttattgaaatgaaattgataaaccttatttctgtaaaatgttgtggtgtgaccaaatcgacttgcttagaaagaaaaaatgcaaggatcaaccataaaataaaatggagtcctagaaggagggattggatttgacttgggaaccatgtaaatatttaatataattata

SEQ ID NO: 237097 - DNA, 1793 bp, Homo sapiens
  misc_feature (69)..(69): n is a, c, g, or t
  misc_feature (378)..(378): n is a, c, g, or t
  misc_feature (1563)..(1563): n is a, c, g, or t
taaaaccatagtgagataccatctcacatcagtcagaatggccattattaaaaaactgaaaaacagcanatgtttgtgaggatgaagagaaaagggaacacttatacactgtttgtgggaatgtaaattagtacaacctctgtggaagacaggatgggtatttctcaaagaactgaaagtaggatctaccatttgacccagcaatcccactgttgagtatctacccaaaggaaaataaatcattttatcaaaaagacacctgcacttgtatgtttattgtgacactattcacaatagcaaagtcgtgaaatcagcctaagtgtccatcaatgaatgattggataaagaaaacgtggtatatatactccgtgaaatgcnactcactcataagaaagaataaaatcatgtctttgcagcagcatggatggatttggaggccattattctaagtgaaaaactgcaatggaaaatcaaatactgaaggggtgcgttgcccctccacacctgtgggtgtttctcattaggtggaatgagagacttggaaaagaaaaagacacagagacaaagtatggagaaagaaataagggggcccaggggaccagcgttcagcatacggaggatcccgctggcctcttgagttcccttagtatttattgatcattcttgggtgtttctcggagagggggatgtggcagggtcataggataatagtggagagaaggtcagcagataaacacgtgagggaaggtctctgcatcatagacaaggtaaagaattaagtgctgtgctttagatatgcatacacataaacatctcaatgccttaaagagcagtattgctgcccgcctgtcccacctccagccctaaggtggttttcccctatctcagtagatggaacatacaatcgggttttacactgagacattccattgcccagggacgggcaggagacagatgccttcctcttgtttcaactgcaaagaggtgttccttcctcttatactaatcctcctcagcacagaccatttatgggtgtcgggctgggggacggtcaggtctttcccttcccacaaggccatatttcagactatcatatggggagaaaccttggacaatacctggctttcctaggcagaggtccctgcggccttccgcagtgtttgagtccctgggtacttgagattagggagtggtgatgactcttaaagagcatgctgacttcaagcatctgtttaacaaagcacatcttgcatagcccttaatccatttaaccctgagttgacacagcacatgtttcagagagcacggggttggggtaaggtcatagattaacagcatctcaaggcagaagaatttttcttagtacagaacaaaatggagactcctatgtctacttctttctacacagacacagtaacaatccgatctctcttttccccacaaatactacatgttctcacttataagtgggagctaaacaacaggcccacaagaacatacagaaagaaatagtaggccgggcgtggtggctcacacctgtaaccccagcactttgggaggccnaggtgggtgcatcatgaggtcaagagattgagaccatcctggccaacatggtgaaatcccatctctactaaaaatacaaaaattagctgggcatggtggcatgcacctgtagtcccagctactcgggaggctgagacgagaatcacttgaactggggaggcagaggttgcagtgagccgagatcgagtcactgcactccagtctaagtaacaagagtgaaactttgtctc

SEQ ID NO: 237098 - DNA, 442 bp, Homo sapiens
tgcctgatggtttggcttaaaaaaagaatcatcagaatcaccatgatgactttacccctagggtgatagtttataagctcagtccaaagagaccagattaatgtttgaaaattaaagttccctaacaattcccaaactgttcagctagctcatagtcaatggacattccagtacctatgacaaatgctaaaatgatacagtccttcctctctctctccctccctctctccttctctctcaggatgagaacagggccaactctgctgctgctgaagcttatcaaaggcctttaacttttcagcagattgtgaacaatgggtaggacatcatttgcttcattcagagatcctcaagaaggcactgccgatcactctcctctaggcacagatcaagggtggcattgtttaatgtcttatttaaataaaatccagaaaaactggag

SEQ ID NO: 237099 - DNA, 451 bp, Homo sapiens
cagacctctgtgtccatggtccgcatgtctaggtcaggggaccagtatcaaagtgaagactgggcaagtaagccccacctgcccttgaacctcaggcttggcccctcccgaggcccagagctgattgaatgttaattagcaactaattggatgtccatgagactctctacataaagaacacaccaaggtcaggtttagacagtgtgtagtgccaagtgattcattcttttcttccagacgtgatatttcctgtatgtgaagcatataaagaagagtcattcattcactcatctagcagatatttactgagtgtcaactacgaatcaggcatgcaggcactgcgaatactactgctcttatttgcatatgggttggaaagagaaaataagcaagtaagctgttgaatgacattatttcagagagcaataaatgctgaaaacacaaaactgaa

SEQ ID NO: 237100 - DNA, 123 bp, Homo sapiens
aatctagacacacattttcaggcatatcagattggagagtaaataacgatggaatgcctgttatgtacacggcctggtgctagaagtacaacaacacaattttgataaacaaaagaacacaga

SEQ ID NO: 237101 - DNA, 663 bp, Homo sapiens
  misc_feature (18)..(18): n is a, c, g, or t
  misc_feature (49)..(49): n is a, c, g, or t
acatatttaatcactttnaatttcaagtccctctacacaactgccattnccatacagtttgacagaatgtctatttttggtacagctcagtactttcgtctgtcctcttgataacctcctacaaatctgcaacttgatccagataatgcagcagacttttgtcaagacaattagtggtatttggcagtgttataggaggcacataatagctgtcacctctcttaggtgatcttagcagctgttcatgctaagtgtccgtatccattcattgggaattgcaaaatggtgtcattctatcattcatttttcatttattacttggaatactttgtgatggttaatactgtcaacttgattggattgaaggatgcaaagtactgttcctgggtgtgtctgtgagggtgttgccaaaggagattaatattttagtcagtggactaggagaggcagatacaccctcaaacccggtgggtaccatctaatcagtgggcaccatctaatcacttgccagtatggctagaacaaagcaggcaggagaagatggaagagcagacttgctgagtcttctggccttcatctttttccgtgctggaagcttcctgccctcgaacataaactccaagttcttcaacttttggactgttagaccagtggtttctcgtg

SEQ ID NO: 237102 - DNA, 326 bp, Homo sapiens
acatctttcctcctgttgcatcctctgtaggctttcactagataactagtgataatgacagtttgccaaccccctttcttttcctttaagtgaacccaatttgttcacatacatacacatgcaaatcccaaaagaaggttttatttgaagtgttcctgacaaataaaggggtaaaggagattttttttaaaaaagaagaagaagaagaaatctattctggaacatagctagagcaatgttccctaacctgtgttggggtggatcacctggttaaagatcagcaggagagaagataggcatcagacagaaattataggaccaaggta

SEQ ID NO: 237103 - DNA, 422 bp, Homo sapiens
aaaggcaggtttctccatgcattgactgattttgctggaaagtttttccatttctctttctccactgaaagtctcctcctcagtgagaagggaagctgcccattgaacactggggcaaggaagctctctgggccttcttaactacacgggccactcttgctgagcacaaagatacagatttaactaccccttaacaaagaagagaattaaaaatgacccaccaaagaaaactagaataaaaacaaaggcaaagcggccaccgcgagctgtttgattattttctctgactttgctctttgattggaacctgcctcatcagaaataaaaataaataagaacacaaaacgttgattggttcttcatcagtgaatgtgtccatggctgatacagagagaaaagaaaataaatcctgattgcttaat

SEQ ID NO: 237104 - DNA, 637 bp, Homo sapiens
atctctgccaacaagaaaaaaagtgcttttaataacatctataatatgaatgatgtaacttctagaattatcaagcttgagaactagtgtgcagaaaagagttaacatagcaggtctgactaccatccttcaaaagacctgcttaaaagatgtcccttagttggcatttgggaacttagatttcagaagagttcctaccactctgataagagtggctcactgtacctaaataatttggtttatgctgaatatttgctttccttctgggagtttggaatttcagtgcatactaggcagaaagtgtctacgtggccatccccgataaaaacctaggttttgagtctctaatgatcttctccagtaacacgaaatttcacgtgttacaatttgttgctgcaaaaaataagtacaccctctgtgattccactgggagaagactcttagaagttcgtacctgttttcttgggacttcaccccatcatgcacctttccctttgctgattttgctttgtatgcattcaccgtaataaatactgctatgagtatgaccatacactgagtactgtggatcctctgagcaaatcaaagaatctggggtggtcctgaggatcctgacacaactagttatccactttca

SEQ ID NO: 237105 - DNA, 935 bp, Homo sapiens
tcctacaggtagactagaggcagggtaagagctccatgatagttcagatcacacttctgtgagctatggatttgtgaccatctagggcttggttcttagctgctctgtgctttggtttcccatctctatgcccatctccatctttaacagattgtgaatatcagggaactagggtattgtttcattcttcttcaatccagccccctccgctgtcacaatatagtgcctagcatagcatctagtccacggcaggcactcaattgactatttactggatgaatgaacattcataattctctaatctgcctccccttctttctttctttcttcctttctctcctctctctttctctctttctctctctctctctttctctctctttctttctttcaaggcaaggtctccctctgttgcctaggctggagtgcagtggcgccatcttggctcactgcaacctccatctcctgggttcaagtgattctcctgcctcagcctcctgagtagctgggattacaggtgcctaccaccatacctggctgatttttgtagttttagtagagacagagtttccccatgttggccaggctagtctcgcactcctgacctcaggtgatctgcgtgcctcggcctcccaaagtgctggtattacaggcataagccaccatgcccggccctgcctcctcaacttgaaaaaaaaactgggattaaaagagtgaaaatgatgccacttaactgttgggggagagagacacagcgtttctctacattatgcgtgtagaaaactagatcgtgaggctggaaagagtgacaaaggatattgaaaatagaaataaggttgggaacttaccaagaccctgtccatggaaaatgtgaatgctacctggaacctttccagcccagttcctgaatcttttgtaacaaaaggtctaacggg

SEQ ID NO: 237106 - DNA, 769 bp, Homo sapiens
tcctacaggtagactagaggcagggtaagagctccatgatagttcagatcacacttctgtgagctatggatttgtgaccatctagggcttggttcttagctgctctgtgctttggtttcccatctctatgcccatctccatctttaacagattgtgaatatcagggaactagggtattgtttcattcttcttcaatccagccccctccgctgtcacaatatagtgcctagcatagcatctagtccacggcaggcactcaattgactatttactggatgaatgaacattcataattctctaatctgcctccccttctttctttctttcttcctttctctcctctctctttctctctttctctctctctctctttctctctctttctttctttcaaggcaaggtctccctctgttgcctaggctagtctcgcactcctgacctcaggtgatctgcgtgcctcggcctcccaaagtgctggtattacaggcataagccaccatgcccggccctgcctcctcaacttgaaaaaaaaactgggattaaaagagtgaaaatgatgccacttaactgttgggggagagagacacagcgtttctctacattatgcgtgtagaaaactagatcgtgaggctggaaagagtgacaaaggatattgaaaatagaaataaggttgggaacttaccaagaccctgtccatggaaaatgtgaatgctacctggaacctttccagcccagttcctgaatcttttgtaacaaaaggtctaacggg

SEQ ID NO: 237107 - DNA, 2304 bp, Homo sapiens
  misc_feature (1626)..(1626): n is a, c, g, or t
  misc_feature (1718)..(1718): n is a, c, g, or t
aaaaagcctgtttggtggtctcttcacacggacgcgcatgaaatttggtgccatgactcggatcgggggacctcccttgggagatcaatcccctgtcttcctgttctttgctccgtgagaaagatccacctacaacctcaggtcctcagaccgaccagcccaaggaacatctcaccaattttaaatcagctccaggagaatgggtgacttgaactggcaaggagcaacctgctctctccacgggcctctggaaccccggcaagagaagatcccttgatcaccatggacactcaagttggcaagaagagctccttagagaagtcgtgggagggcaagcaagctgatgtggagccaggacgatttgatgtgggagcacctgcagtggagcacagccagggagagccatctccccaggcctgacttgctcccataggagactttagccctaggggaactgtccatcctgatctctgcagggtggtcttgtccatcagacagggctgattcgacctgagcaccccttggtctgctggcctttctggggtcccagcctggccagacctgcttgcagggcagtcttgggtgccctggaggccacgccatagcttctgtgctggcagatagtatctgactggtggagagctccagcaaggctgcccctaggccacacaccagcccatccaccccctccccacactgcagcttccctaggcccaggaaactcctcacgtgtctttgctggcacaagtctgcacaggtaggttttgccttccttgccctgccagtgcatgggagtgtagtctgcccccctgccccgtctggctgtcattgaagacagagccttggtgggcacagagcaagccagctcccccgcaacgcccacctcaacacctggcccttgtgctaacactgtgcagagaacagtggaccctgctcgcaccctgagtgatcactcctgcttgtggggcacagagaaggtgtccagacctgctcacgccagtgccctgcccccaagccaacaccacatccaacaggagcctgcacccagtcttcagcatagaggtgaaagatctctacgaggagaactatgaaacactgctcaaaataatcaaatatgatacaagcaaatggaagagcatgcaatgctcatggataggaagaatcaatatcataaaaatggccatactgcccaaagcaatttatagattcaatgctattcctattaaactaccattgatattcttcacaaaactagagaaaactattttaaagttcatatggaaccaaaaaagagcctgaatagccaaggaaatcctaagcaaaaagaacaaagctggaagcatcatgctacccaacttcaaactatactacaggactacagtaaccaaaacagcgtggtactggtacaaaaacagacacatagaccaatgaaacagaatagagaacccagaaatggttctctatttcacacacctacaactatctgatcttcgacaaacctgataaaaacaagcaatagggaaatgattctgtattcattaaatgatgctggaataactggctagccatatgctgaagattaaaactggaccccttccttatactgtacacaaaaatcaactcaanatggatgaaagacttaaatgtaaaacccaaaactataacaacaatagaagacaacctaggcaataccatcttggatataggaacaggcaaanatttcatgacaaagacaccaaaagcaattgaaacaaaagcaaaaattgaaaagtgggttctaaataaaactaaagagctcctgcacagcaaagaaaatacaaacagagtgaacagacaactacagaatgacagtatctgcaaactatacatccaacaaagatctaatattcagcatctataagaaacttaaacaaatttccaaaaacaaccccattaaaaagtgggcaaagcatatgaacagacacttttcaaaagaagacatacatgcagccaacaaacatgaaaaaggctcaacaccaccaatcattagagaaatgcaaatcaaaaccacaatgagataccatctcacactagtcagaatggctgatggctgttattaaaaagtcaaaaaataacagatgctggcaaggttgtggagaaaaggcaatgcttatgcactgttggtgggagtataaattagttcaatcattgtggttgacagtgtggtgattcctcaaagatctgaaaacagaaatataattctacctagcaatgctactactgggtatatacccaaagaaaaataaattgttcaattataaagac

SEQ ID NO: 237108 - DNA, 277 bp, Homo sapiens
ccaaagcggaggcccgatcggggttccggtgccccagggctcccgaggcgcacatctggctggcgggcccgcagcccacccaagggcggcaccagctgtgggctcgacgccgccgtccccagcgctgggcctgggaccaggagtcctgagggcgccagactccgaggggcgggcggccggggggcggcccgcggcgcagaacaagccaggccccacccgggccgcgtgagcgagctgcgcagcctgcgccttcccagccggccccccgccgcggccg

SEQ ID NO: 237109 - DNA, 474 bp, Homo sapiens
tttcctcaatatttacagcatttatggtttgtatcactcatttggcacctccagatgtagcctctcactatttatctgttgatctctgtcctgttcccctaacaagatgatgaaatcctttctgaaaggcagagacatatgttttcagcatctaccagtgtgttctacacggagtctgttatggttgatctttaatatgaacctggtttagttttgaagatctcatgagtggtttgaacttaacagcaccagacgctatagatattttatcatatctgagacaacattcccaatgttcaaaattactttccagttgggtatgcccaaaaaaatcactcaggcaagagttttcatttcaaatattataaactctatatagctgaacaatgtcaggacaagcagttactattccccttcatatagtttaggtaagctctcttcatagaggagcaagttgcaccttctcatgcaaat

SEQ ID NO: 237110 - DNA, 698 bp, Homo sapiens
tgactcaggtaaggatcctgaaatggggggattatcctggattgtactgttaggtacaatataatcacaagagtccccgcatgagggaagcaggaaggtcagaacctgagaagaggcagaggtcagagtgatgcagttgctccctggaggacacaagtgaaagaatgtgaacaacccctagaagtcagaaaaggcaaagaaatgaattcccccttagagattccagaaggaatgaaatcttagtgacattttgattttagcccactgaaatccattttggacttctgaccttcagagctgtagataatacatttgtggcattttaagcactaattttgtggtaatttgtcacataagcaacaggaaactcatacacttagttcctcacattgaaccctacccactctagctctctcgccatccctgttccctattagctagattccccaattcacacacctggaatctccagagagggagttctagagtgtgggactctcccaccaatctgtgtggatcatgagtaggtagatcagagatccatggaaggccatcaagaccatcagtggttggagtaggtcatgaacgtgatagggccttgagggtgagtagttactcctctcccaatttggtaaagaataaacttcttccaggaaaatcacagatattgtcatagactgcaagaagaaaaaaagcaa

SEQ ID NO: 237111 - DNA, 547 bp, Homo sapiens
tcgaggggaaagtctccggatgccaagagtcacaaagggccgaacagggtgaggaaacccgacgcagagtccggagaaggcagcatggaatccctccctcaggcctctctggacggtgttggtgggggatcaagatgaacacactgcagacgaggacacgagccccacaggagctctttgtcccgccggagaccagcggacccacgtcagagaagatgcttgtatcttttcacggctcttctctgagaaatgaagccacaccacaatacggtctggaagaggaagccgggaatgggagatggcaacagtccctgtcactggaatgctggcctctctggacaagccacccttttggaaccccatcccttatgaccctggcagtggaacggtgatatatcccgcctggccgccggcgtctgccctgtcctccctcctgctctgcctcacctgtttctcaagtgcctcaatgcctctcgctgacgcccaatgtcttcaacaaagatgacttcccagtccgtcagggagacatttcttcgaaaaaaatgtc

SEQ ID NO: 237112 - DNA, 696 bp, Homo sapiens
tggcagtgcttgggtgtcaaggctctgaggctccggcctgacggctccactgggtcgaggggaaagtctccggatgccaagagtcacaaagggccgaacagggtgaggaaacccgacgcagagtccggagaaggcagcatggaatccctccctcaggcctctctggacggtgttggtgggggtgagtctccccaaaagtcgtgacgcggtgatctcgaggacaggacggcctgcgtgcccctggggtgctctctcaccgaagggtcgttctcgtcgaaagcagaaccccacagcctcaggggttgcctgggtgtgtgtctttcaatgcctttgctataagactctgtgtgtgtgtctgtgtgtgtatgtgtgtgtgtgtctcccattctctcttctctctctgtctctcagtctctgtgtgtttctttccctctctctgtcagtttgtgtgtgtgtgcccgtgtgcgtgtgtgtccttggccgaatgtgccctgtgcaccacaaagctgtttctcgcatggcggcctgtctttggtgagcctgtttctgcctctctgcctgggtcatgagaccggttgtcaatccttttcgccgacgcgtttccgctttgggtgtgtgaaggcctggcccacgtgaggagattcttcggtcccggagcaattgaaatatccccatcctgagcggtctcttttctag

SEQ ID NO: 237113 - DNA, 807 bp, Homo sapiens
ccggtactgatccagctttgcggaggaggctccgcctcctgcctccagctgggccagaagctctggggcccttcccgagcactcgggagccacctgtgcacatcttctcagtccccacggccccggtgcaggcctgccaagagaaggatccccgcggaaacgtctcgactgactcagtccctttctgcacacctgctcttccctgggcgcgctctcgccttacttattcctgtgtggttcaggcgctgcggaaggagaaggcacctagactgcactgggaaggctcctggagttgacctggagcgccaggaaaggtcagtggaggaaagtgctccaggcagagggaatagcttgtgccaaggccctgagaccccggctggggagcctaataatggcaacagtcagcacttgccacgccaaggcatgttctgagtgtgtgtctcgtgtcatttctgtgatgctcgcacatcgttagggggtacataccactggaacctcctcttttaataaatgaggaaactgaggcacacggcggttaagggacttacgccaggtcacacagcagtggagctgcgctcgggcaggggggcagtggaaactggagagcccagggggcaaacggcggaggctggaggggctggcaagggaggcaccgcaaagggcctcacaggggctagacgagggccctgggcaccagagattatggtgccccgccatgtggattgaagattaaacctcgaagcaagtgtataatgcccccaaaaatcacatttggaagtcatcacttcaataaaattttctacaaca

SEQ ID NO: 237114 - DNA, 1538 bp, Homo sapiens
ctcccggggagaggccgcgccgcgcctccgcgtctgcccgcgccgggcttcgggggcctggggagcctgaggcggccaggaagtggggcgaggaagggcggccacacggcccgagctgggagtcccacagtcccgcagcggcgacgccgccacccgccgagtgccgaggcccggggcccactcccagcccagctccaggagaggccgcgccggaggaccgcgaggacggcgccgcagcgccaggtcgggctgagctaagggaggaaatggagcgaaaagtggcggcgggcagagggccccgggcgggcggagaatcgctgacgagggcatttcggaaggaactgaacctaggagcacagggctccctcccgggaaggcagggcgtgaccctggagccgccggtccctcttgccgcggccccaggcgtggctggcgcgctccaggatctggagcttctacaagtttgctttgtttcctgcttttgcatctaaaaacccgctctctcctcgcccgcctgccggagaccaggactctggcccgtctgcctccctccggcgtcgtctccgggagcgcgggcgcggtggggcctgcaggccgggctgggaccaggcgcgccttggggcgcgagtggctcggccgtcgccgcagaacccgctccctgcgaaacagccgcacccgctccctgggagagtcatgagaactggggtcgcgcctgacccccgcgcccgaagaaaaccagcccgcggaccccgccacacgggccgtgacccgagccccgcgcgccgtcccgaacgcgcgcggtgaaaacgccccgctgcgccggccttgctcggtccccctcctccacccccacttctccggaaaaaaaaaattctgaattgggaacgaagacccgaaaaactcgccatgaccattcccctccccggcccctagcttcggcccggaaggcccctcagggcagcggccgtgggtaccacgacccggccagttcccctcgccgcggaccgaccgggcagggccaacccaggactgttccggggaggggagcagggtaggggagcgaatgttggggttcgttcgtgggtcacccagaactgggcgcacgctggcggcgcccggacttcgccgactgtccgcccggtgccacccgcgcggctcgcgccagacgcagcctggcggtccctgtcctgtcttcgagtatttgtttttaatgctgggtgtcgatcgagacaacaagcgctcagagcaaagcaaggatgcattacgggggtaattttaaaccgatcgataagatttttcagagaaaaaaaaatcgctcatagtccatattttttaagaaaaaaaaaaagcctcaacattttaacggattttgttaaaagggaagatatatacttcttgaacattcacaatcctgaatttcttttgctaaaaaaaatgtaaaaccccaaagccagaataaaaaataaaataataataaaaatacaaaaacaaaaaaaaaaatgaaagcaatttcagttacttactggaggctgtttcct

SEQ ID NO: 237115 - DNA, 306 bp, Homo sapiens
ttttatataatgggcttggttgaacaatctagttctaccttactctctgaaggacctctcttagtaggaaatgggcttatgttaagatgttttaatccaaggggtaagccacacagttggaatagaatttttaatatatccaaaggaaatgaaatcagtatgtcaaaaagatatctgcactccaatgttcattgcagcaccatttacaatagccaagatacagaatcaacctaaatgtctatcagtgaacgaatggataaagagaatgtgggatatatacacagtggaatactattcactcttaaa

SEQ ID NO: 237116 - DNA, 389 bp, Homo sapiens
catcaattaatttttttccaaataatcccccactgattgctgtatgctgaatactgttgtacaaggtgcaggaactacaaagagactcagatgttatccttcctttcaagaaacttcctatcaaattaggaggttaccatttgaaatccaagttctctttacttgccctgagcagttgttacttgccttttggggtcccatatctctttgagaatccagttaaaatgcacatatacataatcatttttttaaagagtgtcattaaaaaaatctttgtacaaagcagatattcctccctgtagttcatttccttgaccaatttaagtagtcatattgaggaaagagagagaccctctcatattgttttatactcagtacctgttttaagg

SEQ ID NO: 237117 - DNA, 434 bp, Homo sapiens
gatataaaatgctttcgtatgtagtagtaaatgtttaatgaagttggtttaccaaccaaggcttgagtatatacatgactaagttaagagtcataatgtagtaataacaaaagcattgcacatgtgatgaagatataattaaaaatgtactcagagccgggcgtggtggctcacacctgtaatcccagcactttgggaggccgaggcgtgtggatcacgaggtcaggagatcgagaccatcctggctaacacggtgaaaccccatttctactaaaagtacaaaaaattagccaagcttggtggcgggcgcctgtagtcccagctactcaggaggctgaggcaggagaatagcgtgaacccgggaggcggagcttgcagtgagctgagatcgcgccactgcactccagcctaggtgacaaagcgagactctgtct

SEQ ID NO: 237118 - DNA, 236 bp, Homo sapiens
gtggctcatatctgtaatcccagaactttaggaggatcacttgagcccaggagttggagaccagcctggacaacataatgagaccctcgactccatgcatggtgatgtgtggcagtagtccagactactaggaagctgaggcaggagcttcccttgagcccaggagggaatgctacagagagcaatgaacatgtggctgcgctccagtctgggcaacagagtgagaccctgtctcc

SEQ ID NO: 237119 - DNA, 379 bp, Homo sapiens
cagattcaggaccacggccagcacccacactgccttccgtaaacactgagctaaataaacctagagccttggtgatgagatcagcactgcctttagcactctggctgtcaactgaaaacagcagcagcagcagcagcagcagcaacaccaccaccaacaacaacgacaactgttgcatatataactgaagatccacagagtccctctttccagtgttagttgctacaaggagtgagagaatgaagatctgacctcaaggaatacaagagttttgttcaaagttccaagactaagctattagaagggagggagggcctggtgccatgtcatctctgaccaagagaattggtagaatagaaataatctatttctcacgtgg

SEQ ID NO: 237120 - DNA, 457 bp, Homo sapiens
cgagagagcattctttataaagtgcagataatctaaacatctcaatttactcactttattttattctctttccttctctttttaaatccaggtaaggaattgtgaaattagtttgtaagtcactttctcctcccccggctttgtctgttcccttttgggacttaataattgggctggaggaggcaaggggaaagattaccacatgcccagaagtatgaatcttggaagaggtaaaactggttaaaagccacaacacagacacacacgtaccaaaagcagggaggagaaaaagaaggatgagaaatgatgaaaaagaaaaatttcagggttgagggtgaggggagggaactcagagtacaggtcaataggtgcagcaaaccaccatgacacacgcatacctatgaaacaaacctgcatgttctgcacatgtatcctgttttgttttgtttttttagaa

SEQ ID NO: 237121 - DNA, 299 bp, Homo sapiens
gaaagaagtcagtcactacagaccacatattatatgatgccactcatttgaaatgtccagaacagaccaatctagagagaaagtagattcgtgttcaaccaggattaaggggaagaggtgagggaaggaaatgggaagtgagtgctaataagtgggggatttctcattggggcaatgaaaatattctaagcacagattgtggtgatggttgcacagctctactatattaaaaccattgacttgtatactttaaacaagtgagttttgtggtatatgaattctatttcagttaagatgtt

SEQ ID NO: 237122 - DNA, 431 bp, Homo sapiens
taggtactcaaagaaatatttgtggaagtaaattcaaaggattctccatgaccttgtttcatacggacatcatgaagtgggaccctctccaaaagctccctggaagaacaaaagaagttttgaagcatgtcaaagctactcatggttacaatctttaggatgaggcagacagacaaaaataatgctaaaaataacaatagtactaacattctgaagtaaaatttcctaggtggagtgctgttgctcttcaggaacagcagtagttgaggattgtcaagtaccctgaagcacaagggacaataaatgtgacaagaacagctcctgggtttgggggattattcaacaacgattagattggttagagacagtgcacttttgtatgtatatccttgcttaagagtagagaaaataaaatgtaagatttttgaata

SEQ ID NO: 237123 - DNA, 1066 bp, Homo sapiens
gcacatctgtctcccttcctcccaagtcccgggccagtacagccggcaccacccaccaaggaagcctcaggcaacctgatgaatggaggcattcaacaacacaaaccgagcacctactgtgtgccaggccacagacagggccctgccctgaggcacacgtgtgatgagggcggagagtgcacaaaaagagatataaacgctgggcagaggagtgccaggcagggcaggtcacggtctgtgtggagagcctcctgagggggtgaggaatcggccggaaagaaggactttaagagtgtccaggaatgacgtgcaaaggccctgtggtggtgaggagagggaggggccagcgtggcaagtaaggtggtcggcccccggggacacgtctgcagtgcctggccacccacggccggatgaggattagggggcgctggcctagcaggcctctcactctcagactccaagggccaagaaaaactacggacaggaagcccgggtctggaggcgtcctttgttcggggccgccatcaaggagcactcacccctatcccaggctcccggggcggctgttccggaagccccgcccctttccagccgcgcgcggccgcgcccgcctgttaatcacaggcagcgcgcgccagtacaagaccagcctcgccccgggggccccgcccacaggtcagccccgcccctttccgctcaccccgccccgcccctccgcagtgtgacggccaatcaggggcgtctgcccgggctgggggctggggcatgtgcgaacacaaaaggcaggaaatacgagtagtctggggcgctgtcaccatggctacctgcgcccgcgcgccgccccgcgcccagtcccggcactggcccgtgggtatgccgggcgggaggctcctgcggggcgctgggcagccctctccccacagggctgcaagaccctgggcctccacttcctagtctgtgaaatggggtcacgttttgcccagggctgaattcactcatacttcaacaaacatttattgagtgcctactatgttcgggtgcttgagatccaccactataagagatt

SEQ ID NO: 237124 - DNA, 873 bp, Homo sapiens
tggagtcagagtcttgctctgtgcccaggctggagtgcagtggcacaatctaggctcactgcaacctctgcctcccaggtttaagcgattctcctacctcagcctcctgggtagctgggactataggcacgcgccaccacatctggctaatttttgtatttttagtagagacggggtttcaccatgttggccaggctggtctctaattcttgacctcaggtgatccgcccgctttggcctccaaagtgctgggattacaggcgcgagccaccgtgcctgcctcttatctataatttttatgaagctaatatgacaaagttgtctccttccctccacaagggcaaatacgctcatgccctcctaatcctgtattgaaccatatccttggcatattttttcaaacttttacatacatttatgaataaatgtatgttatggttttgtgtattttaaaaatattgtctaagtggcaccatattatatgtataattctatagcatgtttatgtttttgaggtctatccatggtgacatctattgagttcattcacgttagtagttctgtaatgctccatcatgagactgtagcagaacatccatctcttcctccatcgatgggcgactaggttgttccctgttttgcttttataaacaatgctttactgacagccttaaaaatgtgtgagaagatctctagggtttatacctggacatgtaattgttttgggaatagtagttgttatgtgttgaaatgtgcccccaaaaaagatacgtttaagttctaacctggggaacccattaatgtgatctatttgaaaatagggtctttacagatgtaatcaggcgaagatgaggcaattaagatgcaccctac

SEQ ID NO: 237125 - DNA, 286 bp, Homo sapiens
tggtgtggacttgaagagggtgctcttggatccaagaacttgagaccaactctaactatcttaatctatttattgagagtgtatcagagcttgcagaaccaacccaatgtgtgggtttgggtgtggagagcaaacacagtagtcctgaaggctggaaagctggtctttcacctggaatgggtgggcttggacatcacctctgcattgctggactgtggtatggtctcacaccacaagaagatttaagcaaccttattaacttaataaagatttaaagacgttgagc

SEQ ID NO: 237126 - DNA, 1645 bp, Homo sapiens
  misc_feature (1011)..(1011): n is a, c, g, or t
atgaaatgcttaggtttccaggccagtctacagaggaacatttatctcttatggtagttaaactgtagtactgtggactctggccacaatgtaaatcaatcttcatgggaatatgcctttgctataggacctcctctccccttcagagctgcagtagcatttgtgactctgatctgcagaccctgtagtgactctaaaccaggagcaactaccactactgtggcatggagtggggaaaaaggtaattggaaaagggtggagatggggaaggacctaccaaatgcctttgttgacacagtagagaagtcatcagacataacattgaatggaggcaataagagagttcctatggccctatcaagcttattagtaggtgttttaacaagaaatatgtaaaaattattacttgtcggccgggcgtggtggctcatgcctgtaatcccagcactctgggaggccgaggcgggtggctcactaggtcaggagttcaagacaagcctggccaagatggtgaaaccccacctctactaaaaatacaaaaattagctaggcgtggtggtgggcgcctgtaatcccagctactcaggaggctgaggcaggagactcacttgaacccgggaggtggaggttgcagtgagccgagatcgtgccactgcactgcagcctgggcgacagagcaagactccgtctccaaaaaaaaaaaaaaaaaaaaaattgtttgcctgcataccctagcacagagtactgtaccttgaaatattcactttgtaacctcaagaaaagacgttgagggagctgtggaattagcaaagagaatgcagtgccacccataaacggagtgatgttttgaggagcagaggaactttgagggaggaaagtgcaacaggaaaaataactgcaggtgtggaaaaacaaatataaatatcttctcaattccaatcacctcctaccttcctataccaggcctcagaaggcagcaggctatgataataaatttgattttatatggcnttgaacccaggattttattttataacatatacacttactgttattcctggtcttcaagagttcttgtcatcctcaaaaagacaaaaaaggtaccaaaacaaaaaattaactacagtattttatagatgtgagagaagtgggcagaaataatacggctttaggctaaaaaaggaaatgaggttatttcttgggggagccaatattggcgatttctgagggagcgatccttacgtgaatataaaaaattgtgacagccaccattcctcctgctaactgatctaaatccatccccttgggaaacgcccctgaggtatctatcaggtgtagttcagccagagggagtaaacccaccgggccctcgtcctttcctagcaccaccatttaaagggatgtttgaggggtagggcagcggagcattccagacacggagttaaacccgccccaccccgctggcccacgtccagcccgatcaagaattggaggagagaggagcagggcgtggtggcgcgggcctggagtcccagctacccgggaggctggggcgggaggatcgcttgaggctgcagtgagccgtgattgcgccactgcactccagtctgggcgacaaagcgagaccctgcctcaaaaaaaagtg

SEQ ID NO: 237127 - DNA, 641 bp, Homo sapiens
gtgagccgagatcgtaccactgtactccagcctgggtgacagagtgaaactccatctcaaaacaaaacaaaacaaaaaaagggcaaaagaaagagaaggcactgagattctgctctcggtgggaagtctgatacctctagcatacatactttaagttggaccccagaagacagtaccctcaaggtcaaggtgggccaaaagtaagccggccctcaggtggtcttgtatggattatataactaccaggtggtccagagaacctcaagtgttgaatgtggacaaaggtagtccagaattgtttgtgtccccaggtacctgataaaaacaaaagaaaactatctctggaagaaagtatcatcatcctaactcttaagtttttcctacacttaatttttcaaatatgagaccagtccaaagtataagataatcatgcacacaaagtcatcactataaattggaactagcacactagaaagactcacaagacttcagccaaattattagatacagactgtcaaaaactaggttttcttttaaaaaaaaaaacacaaaactcgaggcggggcccggtacccatttcgcctatagtgagccgattaccattccttgcccgcggtttacaacgtcgtgactggggctgg

SEQ ID NO: 237128 - DNA, 553 bp, Homo sapiens
ctgttcctattcggccatcttggctcctccgaaagcataacttttatatgcactgagaaaccaaaaaattgtgtgacttgctttattgtgatattccctttatttcagtggtctggaatggaacccctcacaatatctctgagatatgcctgtatttctgagtgtgtctatgtgggtatttccagaagagattagcatttgaatcactagactgagtaaaaaggatcactgctgatgtaagcaggcatcctccaatttgttgagaacctgaacagagcaaaaagtccgagtaaggacaaattctctctttcttcttgagtgaggacatttatcttttcctgggaaatcaaagctcttggttctcaggcctttggacttgaaccgaattatgccactggttttcctggttcttcagcttgcagatggcatattgtgggatttcacctccataatcaggtaagccaatttccataagtctgctcttatatttataaatctatatattggttccgtttgtctggagaactctactaataaagtatcaaaattttgt

SEQ ID NO: 237129 - DNA, 348 bp, Homo sapiens
ctcaccatctgccgtctgcaagcttgaggcccaggaaggctggtggtgaagttccagtctgaatctgaaagcctgagaaccaggagaaccaatggtgtgagtccaggtctgaagacctgagaaccagcagcatttacgtccaaggtcagaagtgttctattcagaccttcaacaggtgatgtacacgggggagggtggtctttttttcagcccaagtcaaatgctaatctcatccagaaacaccttcacagacatgcccggaaatggtatttagcaaaaaatctgggcatcccttgaccctatcaagttaacacataacattaatcaccccagggagtaagaaagaat

SEQ ID NO: 237130 - DNA, 412 bp, Homo sapiens
gcactttgatgctggctgcgcccatttgtgggcctctggcctccccaggccaccttctgagagcacagggagctgtgtgggccagaaaaggagcaggggctttggggccgccaggcgggcgttgcctcccctgaactgggtaacttttctcttcccctccctagcctccagtttccaattctgtaaaatgaggatactggctttttctccttgagttatccttgagattaaacataaatatttaaagtacctagcacatgacaaattaacaaatggtatgtcttaaaataatcactgggcatgatggcatgtacctgtaattgcagctactcgggacgccgaggtgggaggctcgcttgcgcccaggagatcaagaccagctagggcaatatagtgagaccctttctccaga

SEQ ID NO: 237131 - DNA, 611 bp, Homo sapiens
gagtcttgagcctttcttcatcacctcagtcagaagactctgtgattggagattccaagagatcatcctcgatcaccattttatgcgggcagagcaaagaataaaaatgcttaatacctggacagatggcccaagagtcattggagtgtgaagctggcaatgtttccttcgtagtgagcacatgcttatccactttagaataaacaaacccagtggtataggtttgtttatcaacaggagattagaggtggaacatgaacagttcaaatgcagtccaatctccacacattgggtctggagtaacatcagcaagataattacatataaaagttgagcttcaattaattgggagttctaggcctataaactaaggtttaggaaatttgcctttgctagagcttttgaagagcaagaggaaggaatcaaggcacagcacctgaccaacttcgggagaacaaagcctccatctggaccaaagggaaagagagctggtcgcctgtggagcagcaaagaacaaggctttgcttccctttgaagagctggcgttcttgttaatcacctggcaaagtcttaatttaaagagggactcttagagaaggggagaatcccaa

SEQ ID NO: 237132 - DNA, 152 bp, Homo sapiens
caatcaaatgagatttatcacaagaattggtttaaaatggaaaattaactaatgtagtccaccatgttaatagagtaaatagtaaaaccacatgattattcaatagatacagaaaaagcacttgactaaatccaatgcctactcatgattaa

SEQ ID NO: 237133 - DNA, 1498 bp, Homo sapiens
tttatctgggaattttgaatgattccaactccttagtatagacatttacaggcttttgggcattatgaaatcgtactatttttaatttgatttcaccacttctcctctgtcttataaaaagctgacattgagcacatgtgtccttataatttttaaggtgaatcaaaagtaaacctgttttgagtatttggatatagttttgcagtagctcttgaggttactagggttgcaaaatcaagtttgagaattatagtgctagatttatgggtgaaatggattacactaattagtctgacatttagtcaccttgttttaaaaaagcaaggcaatattctggcagtgatattgaactccagatttctttccatatactcacttatgaaatttacttcaacatggcataccagaactgactactaatttctttccccagaataatttaaattctttacgtctcattgtatttagtacttgtcagagctcctggaaggacagataaaagataaatgcagacaattattcattgctcagcttaggttcatttcagccggtcattctcttgaccttaccctggacgtccttattccccagaaccactcttcctaattcagaggaacgtgcgtggctcctaatttctggagctaacacccactaccaccagttttgaactccatgctcttttttattttccagatggagtcttgctctgtcacccatgctggaggacagtggcgccatctctgctcactgaaacctcctcctcctgggttcaagcaattctcttacctcagccccccaagtagttgggattataagcgtgtgctaccacacctggctcaattttatattttgtatttttagtagagatgttggccaggctggtctccaactcctgacctcaagtgatccacccacctcggccctcccaaagtgctgggattacacgtgtgagccaccgtgcctggccagaaggctgtgctctcttagctcttcaaggatgctctattgttattcttcttctccctatatctctactggagattttgtcttgtgggtaaaatatgcttaagtttaccatatcttaagcaaaagaaaacacacaaacaacaacaaaaaaatcactcctctctatactaatactttgcctcttggtctcttattatccgtctccaccaggccctgtctctggggtcaagggtaagagctcacatagaggcacaccatatatctacatatttgaaagttgtaatatcaagtttgaattaaagtggttaagtaaatactcttaggtgaaatttgtgcaaattatgagtataaagagggtgagctacagaactctccatgaccactcaagaatgggacccaaaggcaaatgataacttattcattcatcaagggataaacttgagttatcaaatggttaatagataaagatcccactctgccttggatttagccatcgcagtccctgtgtaaaaccccaccggcttcaggcagg

SEQ ID NO: 237134 - DNA, 477 bp, Homo sapiens
tgaggtcaggagtttgagaccagcctggccaatatggcgaaaccccatctctactaaaaatacaaaaattacccaggtgtggtggcacgtgcctgtaatcccagctacttgggaggttgaggcaggagaatcacctgaaccccagggggtggaggttgcagtgagccgagatcacaccactgcattccagcgtgggtgacagagtgaaactctgtctcaaaaagataaataaaatcgtttatttgtaatactggattagaaaatgtccatgagctcttccgtgggctctgattgttggttaaaatatatgtgctcaaatacagaatcgttgttatactgtgactttttgctatgtttgtgtatgtatgaaaaaaacgagagagaaagaaaaatgaagctggagctctaaggaacttttttctttatgtaaaatttctataatgttataatattcattttataaataaaataatgtct

SEQ ID NO: 237135 - DNA, 408 bp, Homo sapiens
tgaaaaaacatggagtcatttcaatctcatttgatggcgctccatcattcagctgctcaggccctactcctttcatagtccactggcagattcttttagctcctgcttcaaaatatatccagaatccaaccatatctcaccatctctattgtttctatccttgtccgaatctttctagcctggactactgcaaaactggatgcttgaaggtaatagtgaaatgtcttcaaaattctaaagaaaaatgagtttgaacatagaactgcaggcccaataaaaataaagtgtgaggaaaaaataaaggccttgtcaaacacacaaggactcctagtttctctcccatgcaccctttctgggggaaaaaaaggcacctgtaaatatacttcagcaaacagaaaagacaaattc

SEQ ID NO: 237136 - DNA, 446 bp, Homo sapiens
ttgctttgcaaagtactagagaagtcagtgacttatcacttcattttatagttgaggaaaccgaggtcctcagaggaagagcaacttggaaacactcagtctgcatcagaactaatagtggagtccaagttctcccatccatgatctggagctttttgtactatccagctggtctgcagtaccatcctgtctgtcagtttcgtgctcagtagagatgggaaatagctgtttaaaacgatatgcttaatggatttcttggcccttccttactcttaaatggtaacttgcaagaagataagttcataattcataaaatgtattatatgactatgcctttaagtgtatttttaattcaattagaaacatattacttgctaattatcaagcagtgctgttcagtggtgtgagccacatacataattttaaattttctagtagccacgttg

SEQ ID NO: 237137 - DNA, 215 bp, Homo sapiens
agtagcagggactacaggcatatgccattgtgcctgtaggtctcacatttaatgtgagatttgctctcttaacagatttttgagtatacaatacaatacaatataggcacagtgttgtacagcagatctctagaattcatttgtcttatataactgaaggtttatacctattgagtagcacctcacaatttcccctttctcccagcccccagaaa

SEQ ID NO: 237138 - DNA, 430 bp, Homo sapiens
atgtcttctgccacctgccaagtttttctcaggctttggtgacatcagcgccctgggtacatgtgctgggcaggggatcacagctgcgtggtctgggaccctggtgcagggaaccacacagtacctccaaagcatctcacccttcactggcatttcagaacagccagagaccccaagtttcaatcctaaggaatgagccattcaccccagcacacacagtgctggaggaacatgccaccctccacttccagaagcccataaattgtacctgtcccccatgtggggaggataaggtgtctggggagatgaagggcctgtcccactgtccatctagatggctgggccaggccaggcaattttgctgatgtcacctctctggagatattaaatattgataatacaataaattttccatggaccttctaagact

SEQ ID NO: 237139 - DNA, 1707 bp, Homo sapiens
  misc_feature (822)..(822): n is a, c, g, or t
tggtagagatggggatcttgctgtgttgcccagggtggtggtctccagctcctggcctcaagcaatcctactgcctcagcctcccacactgctgggattacaggtgtaagccaccacacctggccactgatccctttcagtctaaatttggtttctcttaccttccccaaaatgtcaggaaaaattacctccacccatctccatctcagtaaacaatattcaatattcttcccacatcaaagctggccttaagggacaggttcgctgactctcaagattaagccttcaacccctagttcccaccttcaacaaggcatggattcttagcttctttgggaaaggtcaaatgggaaggaagctagcagcttggaggtaagctctgcctcaaggcaatcagattatgtcacaataccaaccaattctatgctgataacaggcagggaagatgaaacactttcaggccatcgagtagggggattaggagaccaagcactggtccccagagggatggcaacagaatacatatcgatttcatcacagctttctagtatgtcgtagacacaaagaaaaaaacaatagggctaattctacgcttgatttatcaggtatggtgttgttttttttgtttgtttgttttgtttttttgacacggagtcttactctgtcaccaggctggagtgcagtggcgcgatcttggcttactgcaacctctgcctcccgggttcaagcaattctctccctgcctcagcctcagcctcccaagtagctggtattacaggtgcctgccaccacacccagcttatttttatattatttagtagngatagggttttaccatattggccagccttgaactcctgacctcaggtgatttgcccgccttggcctcccaaactgctgggattacaggcgtgagccaccgcacccagcccacacccagctaattttttgtattttactaaaacagggtttcaccatgttgtccaggatggtcttaatctcctcaccttgtgatccacctacctcggcctcccaaagtgctgggattacaggcgtgagccactgcgcctggccagatatgttaacatagctccacacctacaggtcctcccctctgggccaagtttgaagaaacagattctcaccttggcttaaaggaccctagtggtttctacaaagatagtatttctgggtggacttggctcattttctgttcaaaagacccaagtctccccaagggcagacatgaaacagctaagcaaccaaacatctgggggctggttttctggattttggttgatctttttggacagaaaagcaccaacagcaaaagaaaaggcaagggggaataggtgaaggtgagccactgtcactacaacaactgagttcatccatgatgactaaggaatatcaggacattctagtttttgagaattcttcctttcagagtaaatgcttcttatatccttctggagaacagaactaaatccagaagctgtagtatcattaactttgcctagaaatctagaaatctcaacctcatatctgttcataactccttccctttctccaaagagaatacggaaggcaaagtccattttctgaatatggcatttttccttttctatttttttgagacagagttttgctcttgttgcccagactggagtgcagtggcacaatcttgactcaccgcaacctccgcct

SEQ ID NO: 237140 - DNA, 399 bp, Homo sapiens
ccatgcttgttacagagctgtcaccgtcatcagctttgccaatcattcatgcaacctatgagtaaaaaaaatgagtgggctggagggcctcagtaaggggaagacagtgttcataccctcctcatgtacggagcctgggagctgtccgaaccaagtacccagggaagcatcggccctccccacatcaaacacagagacacacagagtctgaattcttctgatatggccagtgctgacctgccagcctccaaaggtgtttcatttgcttatcaagaaatctggataaaatggcttgtgaataatgtcccagcatgctcctgacgaaccccaaaatgagattcaaaagcattaaacaggattggattgtcaataaatgatatgtaagaacattaacataaa

SEQ ID NO: 237141 - DNA, 4606 bp, Homo sapiens
  misc_feature (181)..(181): n is a, c, g, or t
  misc_feature (1425)..(1425): n is a, c, g, or t
  misc_feature (1816)..(1816): n is a, c, g, or t
  misc_feature (2669)..(2669): n is a, c, g, or t
  misc_feature (3505)..(3505): n is a, c, g, or t
  misc_feature (3579)..(3579): n is a, c, g, or t
  misc_feature (3696)..(3696): n is a, c, g, or t
  misc_feature (3855)..(3855): n is a, c, g, or t
  misc_feature (4488)..(4488): n is a, c, g, or t
aatgaataaggggataagcaaatgaagtgtatagggaaggacacacacattggaaaactctagatactgagtgttttcacagcctttgtccagcctgtgttacaaaagggtcatgttgaggtagattaactgggcctccagtatcatcttagctcaggctgctgtaacagggtaacatacngtggttcagacaacaggcatttctctctggtggttctggaggctgggaagtccaagatcaagatgctggcagattcaactcctggggaaggctctcttcctgctttacagatgattgccttctcactgtgttcctcacatggcagagagaaagagagagaaagagtatgtggtctctgttccttttcttataagacactaatcccatcatgggggcccatcctcatgacctcatctaaaccgaattacttcccaaagggcccacctccaaataccatcacattgggagttaggacttcaacaaatgaattggggtgaggcaaggcacaaacattcagtccataatgtagtgcattaaaattacacattttgggtccctgctttggcacaaaagtttgatcgctgtaatagaattctaaagtgacccccaagattccctcacccagtgtgcacaacctgtgtaatccccatcccttgagtgggtgggcctggcctaatcaagtgaactctttaaaagagggtgtagaggttagagatcaaagaagtcagagagattggaagcatgagagggatttttcttgaaggaaccaatagctacattataagagggctacaggatgagaaaataggagaggcctccaggagctcagagcagtccccagtaacagccagcaggaggtgggcaactcagtcctacaaccacaagcaactaaatttttgatgccaatcttatgagaccctacgcagagaacgcagccacaccacacctgcacttctgcctcactttcttgctggctgttactggggactgctctgagctcctaggtgatcacaaatttgtgtttcattaagccgctaggtttatagtaatttgttacatagcgtagaaagcttatctcctttctacaatagatcagtccacctctcctgggtcccgtcttattaaaaatagctctcatgtggttgttgattacatttttccctcgcattaatatataacctgttccttttaatctataaccttcttcttttttcccctactgtttcctttgggaatttacatagcaatttagaatctactacacacattgctatttgaacactcacagaaaactattatcttccccccgccctctacaaagcatctccagggctcatattattgtgaggcctctattttcatccttgcaaccaatgttcagagcttacagagcttatcatgtttattatataacaataagacanaagccaaaacaacttgctgctgggcttttaaacatagcaacagcagaaatcttttctgggcttgaggaagagccacttcaaatgtctactaatttcagcaattttctggtctatggaatgaaaagtctaaaactcacagccctctgctccaccatcggacttcatgacgcaagggggcgggtggggaagaaagtggcgcgctccctggttgttgggattcacaggctgcctctcaaaggagtattgcctgggtggcgaatgctcttggaggagaaaagagaaaggcatgaaacggggacccttcaaagttgccaccatggtaatgtcactcagtggcacagggcttgttcctcccttttgttctcttttcttttttttttttgagacggantctcggagtctcgttctgtcacccaggctggagtgcagtggcgctatctcagctcactgcaagctctgcctcctgggttcacaccattctcctccctcagcctcccgagtggctgggactacaggtgcctgccaccacgcctggctaattttttgtatttttattagagacggggtttcaccatgttaggatagtctcgatctccggacctcatgatccacctgcctcggcctcccaaagtgctggcattacaggtgggagctaccgcgcccggccccttttgttctcttttctaatgggaggaccatcagcagttgtattcaaatgaagagctcatttagttataagcactgaaaacctaatccggtttaagcacagcaggtttcttggctgacatagtggattgagccaaggctgtgctgttcccttgacctccctgtttggtttcattctcaggcacccactccccacacaatgcccttcacttccccacccctaacccaaatctctggcctcaccccatggaaaaagggtgcctctttcctccattccagccatgaacgctgggctgaccatttgagctttggtcacatgtcctccccttaaatcagtgcagtggccagggagatggaacccactgtttggccagcacagggcatgtgtgtctatttctagagcaggaagacgaggtcacgaggactgagtgtggggaaaggctgggtccccagaggaaaaccagggtgccattaccattggatggtggagtggacactgggtgaaccacggatggcctccagcagcaggacctgtcccagtaccagatagagctgggaaggcttgaagcccggagagnccatggggagcagaggcttctccccagctctgtgcttccactgagccaccccagcatcctgcacgttcatctatgtgtgtgtgtacctctcacccaggctgcctgcctggaagtagagtcaacgtggaggtgcatagcacagtgtttctctgcctcgggccttctaatttcctctcttggcccacaaggggtgggaatttctgtgccctgtccctgtgttcctctgagagtggactgtcttctctcccttcacaaaaatctgagggctgtatgaagacttcacgtggggggcctggcctgctgtgggtgggggtctgtgtgcagcaggaagtgggaagctggagtaaccctgggtcccaagcctttggaaagccacattgtccctagagctgtcactcgtggggttattccgtctctactcgtgtcctgttggatctgccacacagcaggacctctctgtatccacttcctatgggttctccccagagcatctttcaggggtgccatgacccctgctttctggattgaggcggtaggaagggctctctcttgtttctaattgaacattggcctatgccagactgaccaaatactccctgatcattcaaagtgtctcctccatgcccttgggcaggttccatttctgcttagccggagagacttccctattcaccaacaatgagttaaacactctttgatggggaaggtaaaagattttccctatgtaggatacatacttggaaatttagctcttagcagttgggtgtgctatatgcaaaagtaaagtgccaattagttttgctgaattttattaatattgggggtccattataaanccacccattaggtctataacagcacaacttaagatatatcctagtggggttatctatttgattcatgatgcttnaatcgttaattttatacttaacacagggaatgtgattgaatgattcatttatgtagcaaagttgtacttattaaatatttactcagtgtaaggtactgagccaaggaatacaaaganagctaacactcatttcttctcctccaaaagtttataatctactagatgaagcaagtgcgtagcacaaaaatagctaaatctgtttctttgggaagacagcttattggaagttcacctaacttcaagcttgaggagcttttactgaaactaactaaggtntggctcaggtgtctggtattaaaaagggccactcagaagctccaaatcccaggaaaggttctagatactggggaggggctatagagtttcagggattcttttgcttcaaaattaagtaagaattttttgactgctctgaaagaagctatgtgaaacccagtgggaaaaaaatgactaaattattcttgatcttttggcatttaacagagcaaaatgtaagtggaaaggaagcaggaatatcagattattaatggcacattaactatttgaagaacgtgttggtccatagagtgtgcagagaatccagtaaagggaatgtatcatgtgacgtcagaacagatggatgtcacattgagtcagcaatgatgaggggacaggtgttggacattgacagggtctgctatagtcaccagggagaagctgtctcaaagacttgagccccaagtctaaacatctctggaaagggccctgatttggcctatctttcgtcacaagtcacccttgggccaatcaccttgggcccaaaatagctgatgattctgtagtagccatgggagctactggggtgggaacatgtggggaaagtaactgtgaggggtgtgttctaactggggagttagtcctagaaaaagngtgtccagtatgcctgactttagctggagacatttctgtagctcagctttaattttccagtatttggcattgagttactattgttgcttctacaactctgacatgaagtcccagttct

SEQ ID NO: 237142 - DNA, 394 bp, Homo sapiens
aagcttgaaaagggttgtaatctctataaaatcccttggatcagaagttctctatctacttgatggaactcaaagacagctagtgtggaaatacccgagtctgaatggacacttggccctcctctgaagatgggctgcaagctgcctgccagatctgtgggttgaggatacccagagctacagtgaacttacatagttcccttatacaaattggaaaaagatagtcttctgcatgcaccttttttttttttttttttgagacggagtctcactctgctgcatggaccaactttttaaagttatccttcaagttgactcatgaggaaaacaaaagttatccctttgtgagaagaagcaggtttcctttcctatggattgatgtgaccctctacca

SEQ ID NO: 237143 - DNA, 1994 bp, Homo sapiens
atcctatgtactcaagaatgcaaactgtaaatcaatacctatgacttaaaggtgacatttcaacaattgtacatcctggagcctctcaggatctcaggatcattttgttcctgtcaaatatctaactttttaaataatttatgagcatttaactccacttcttacaattccaggatgaactttcttcattttagatgtgtatgttgtcattcaaagagccagttatttattcatcaaatattattgaacaagtactatgtgccaggcactaactatattgtgcagtgtggatataatagtggaaaaggcagtcacaacctagacctgaagcttacatggggaggaagagagaataaacatcaacttaggggttgtaccgatagttgttctttttttttgtttgtctgagacggggtttcactctgtcacccagattgtagtgcagtggtgtgatctctgctcactgcaacctctgcttcttgggctcgagtgattctccagcctcagcctcccaagtagctgggactacaggtgtgtgccaccaacgctcagctaatttttgtagagacagggttttaccatgttgcccaggctggtctcgaactcctgagctcaaagcaatcggtccgcctcagcctcgcaaagtgccgggattacaggtgtgagcctgtgccagacctaattgttaaattgtaattgtaatgattgttaaaaataaaaagaattggacagcgtaggcttcttatgtgaacatttaccaagaaggcatgatcttgtcttagatgaatggagtcagaatagagatcaaggagtgcttcctggaggaagaagcttttgagttgggctttaagtgtgaacaaatgtatttggagggtgctaatatttaagatgccatgagaaaaccccacattgaggaaagcagagatacagtctgatgaaactagcaaggtctgtaataagcagggctgtgttaagaattttggcttgatcaataaataaaatcagtggggaagctattaaggaatttgcactatgcagggatatgaccgtctggttacagtgtgtagaatagacaggaaagtatgggtacaagcagtggggagaccagattgaagacaataataataaacaagtgttcctattaatttccaaggagagacgtgctctgaagtccatagactatcaagatagagctaatttgggacttagatagtcctactgtgaagaattagcaaatacatggcactgctttgtggacaaaaatcagaaatctaacaggtttagcagaaaaagtgaaagaagagtgagaagaagaggatataagaataaacagacccaagaagatggcctcagaagacaaacacctgggataagctatgtgccagtttttctttttaatttttatttagatttagcaattaataagagctcattctgcctcaaaagtgcaccaagggctttatatttatcacagaactggaggtttagggaggtagagtaacttactcagggttacaaaatctgtaggtggcagagacaaaacttgaaccaagggctttctagtgtgaaatgttgactcctcacactacatgatggtcctctttaatggttacctcctgcccttggagttctccattactccaagcccattatgtttggaacgattctgagttcttctatacttcaccatggatacatgaaccttagccctaatggagccttagaaattgaccgggcgcggtggctcacgcctgtaatcccagcactttgggaggccgaggcgggcggatcacttgaggtcaggagatcgagatcatcctggctaatgcagtgaaaccccttctctgctaaaaatacaaaaaattagccaggtgtggtggtgggcgcctgtagtcccagctactcaggaggctgaggcaggagaatggcataaacccggaaggccgagcttgcagtgagccgagatccagccaacagtgcgagactccatctca

SEQ ID NO: 237144 - DNA, 453 bp, Homo sapiens
ccttgcaggcatgttgttaggaataaataacatgctgaattatagagattcacagaacaggtgacatttaagctggatcttgaaagaggagaaggggtttgccaggtggagatggcgcacaaaggaaggttacagacggttaatgtcaggaccatcctaccctaaccaaatgttctcagcatcaaataaggttgggaaatacttggaaagtagaagtaccatataagaatacggtactgataaaacttgatcagccattcaagtgaagtcagagcgaccacaccacccagcttatttttaaaattttttgtagagaattacaactccccatgccaccaaagaagatttgtaaatggatggtaaataagcacatgaagagttgctcaacatcattagccattagggaaatgcaaatcaaaaccataatgaaatacaactacatgcctattagcc

SEQ ID NO: 237145 - DNA, 805 bp, Homo sapiens
ataaatctgtattttgtttttcgtaatggctatcctcatttacgttcacaccaacagtgtgcaaggattccgttttcttcacatctttaccaacaagaatgaaactctgtctcaaaaaaaaaaaaaaatttgctgcccagaacaatgttatagggcttttgctctatattttggcagtagtagtttcagagttgtcaggccttacatttaagtactaatttatttcgagtttatttttacatatggtgtgagatgagggtctcaatttttatctctgcatgtggatatataagttttcttaattgaagattctgttctttccctttaatagtcacctgtactttaaaatcaactgtaaatacatggatatatttctgctgtttttttcttctgctccattgacctatgtctctgtttttattcaagtaccatactgttggttaccatagctatgtagtgtatttcaaagttagtcacttcttttgtcttgattgctttggctattcagggtcttttgtgataccatatgaattttagatatacttttaaaagtcattttgtgtaatacaaatattaatgtcagttcatgaatagtccatttatgtattaatttctatttagaatgtaaggcgtttcaactttttggttaaatttatttcaaactatagttattgtagatgtaattgtttttgaatttcattttgggatagttattaatgtagagaaatgctgtgactttttgatggtgcttttgtattttgaaagtttaataaattttgtttatttatttatttattttgaaatg

SEQ ID NO: 237146 - DNA, 833 bp, Homo sapiens
acggcttggacccagagtcggaggttgtagttgagccagggttgtgccattgcacttcagccttggcaacagaatgaaactctgtctcaaaaaaaaaaaaaaatttgctgcccagaacaatgttatagggcttttgctctatattttggcagtagtagtttcagagttgtcaggccttacatttaagtactaatttatttcgagtttatttttacatatggtgtgagatgagggtctcaatttttatctctgcatgtggatatataagttttcttaattgaagattctgttctttccctttaatagtcacctgtactttaaaatcaactgtaaatacatggatatatttctgctgtttttttcttctgctccattgacctatgtctctgtttttattcaagtaccatactgttggttaccatagctatgtagtgtatttcaaagttagtcacttcttttgtcttgattgctttggctattcagggtcttttgtgataccatatgaattttagatatacttttaaaacttttctatgaagtatatcacgtatttcgatagaggttgcattatacctgtaggtcattttgtgtaatacaaatattaatgtcagttcatgaatagtccatttatgtattaatttctatttagaatgtaaggcgtttcaactttttggttaaatttatttcaaactatagttattgtagatgtaattgtttttgaatttcattttgggatagttattaatgtagagaaatgctgtgactttttgatggtgcttttgtattttgaaagtttaataaattttgtttatttatttatttattttgaaatg

SEQ ID NO: 237147 - DNA, 424 bp, Homo sapiens
attcaatgttaacttgaaatagttcctgctggtaaacttgcatcatcatcttttctattcaccaacttgctgaggtcaactttcttccttggatcttggttgtctaactttattcttttcatttatatttattcctagcttttttgtatgtgctcctgatgagtataaaggaaaccaaaggctctcagcaaagttgcaaaacaagaaaagactgatttgtaaagacatgatgcagacatattttctagaatataagtgcagaatctctgcagcttcactacctgtactaaatatgtctacagatgccagagacttaaaaatatttttaaatgatttatgttatttattgagtcagtttcccttagaaacagactgaagtgagaatttgtgtgcatggaagatatctattaagggtgatcttagg

SEQ ID NO: 237148 - DNA, 433 bp, Homo sapiens
ttaccttttctcccagggctaccattaaatagaaaagcactacagaaaagttggccccttatatggaagagttctgtgtgatttggtgagacagtgaattttgctatacttttaatgaagtacagatttgtgtttaggagcataggctctgaagctggacttctttgattcaaattctggctttgtccctttctatatagatgacttaggcaaggagcttaaactttctgtgcctcaattttctcatttataaaatgatgagaataagagtacctgcctcaaaaagttgttgtaaagattaaagcgctgttgtatgaaaagctctttgaccaatgcttgacatataataagtgctagatgtgtgtgttattattaattattcttagaagtttattgtcacaaggctttaagttcttaagtaatatgaatgaaa

SEQ ID NO: 237149 - DNA, 342 bp, Homo sapiens
  misc_feature (331)..(331): n is a, c, g, or t
aaattgcaggagtacagatttcaatagagctcgaggaggcatttctaacagaagccagtgtttgactgcgcagggatgtctcgtgaggtgatgtggtgctgcagacttaagctatctgccttgaagatattctatgggatatttatttatttatttttgagagaggctctcactccattgcccaggctggagtgcagtggtgcaattttggctcaccataagctttgcctcctgtgttcaaatgatcctctcatctcagtctctcaagtagctgggactacaggcacgtaccaccatgcccagcctgggcaacatagggaaacctcatttntgcaaaaaaaa

SEQ ID NO: 237150 - DNA, 531 bp, Homo sapiens
ttcactctgctcctttctcctgatcttctggaagtttctttctgaatctagagaaactctcctcaccagagaggaatgatgtaagcaggctcaattaaatgcccgctatgtataatgaagcatattgttaggtgcagcatgggacatagaagttcaaagactatagctcttgaggatatctttatttagttggaaatacaagacagaaacattcaaagtaaagtaaatttattccttatatttaggtagcccttgttcatctacctcttctgaaattttgcaataattctgtgatgttggtaggaagggaatgtgatgttagataagaagtcagatggccggcacatccatctgacagccacaccactgatattaagggatttgttaatgtcatatggctcctaaagagctaggatatgcatccatatcttccagctccaagtacgagtttttttctttttaaaaaatattgtgtcacattataccctctaatgccaaattcatttaaaataaagaaaaagccatataaga

SEQ ID NO: 237151 - DNA, 459 bp, Homo sapiens
catttctacttaaaaaaagaaaaagataaattagccaggcatggtggcaggcgcctgtaatctcagctacttggaacgtgaggttgaacctgggaggcggaagttgcagagagctgagactgcaccactgcactccagcctgggtgacagcagagcaagactccatctccaaaaaaaaaaaaaaaaaaaaaaaaagacattttaaaatatagtttgttagtattctatttgcctttatatgtatctagtatatgaaactgcaggttttagagttaatcccaaagatcattaataagtctggacaatatagcaagaccccatctctgcaaaaagtttaaaaatttagctgggcatggtggcacctgtagtcttagatactcagtgggctaaggcaggaggtttgcctgagcccacgagtttgaggctgcagtaagctgtgttcacatgactgcactccag

SEQ ID NO: 237152 - DNA, 548 bp, Homo sapiens
tctgaattaatttataagtgatcataaatacagtcatgcactgtataatgatgttttggcatctatgatgttggtcccataagataataatggaactgaaaagttcctgtcagcaagtgacattgtagccattgtaatgttgtagcacaattcattactctattactcatgtgtttctggtaatgctggtggaaacaaaccagctgcgcgacccatcatttaatatttgataatgataaactagtatgttaactagtatatgtatttttacacgtttaatcattattttagagtgtacgccttctacttctaaaaacaaagttaactgtaaaatagactcaggtaagtccttcaggaggtattccagaagaaggcattgttgtcatgggagataacagctccatgcatgttattgcccctgaagaccttccagtaaaacgagatgtggaggtagaagacagtgatatttgaccctgatcctatgtaggtctaggctaatgtgtgtgattgtgtcttagtttttaacaaaaaagtttaaaaagtaaaaa

SEQ ID NO: 237153 - DNA, 671 bp, Homo sapiens
gtataggtacatttccaaatgcatgctgctgtggtaagcaacctctgaaatggccccccagtaatccctgactcctggtattcaagttgttgcaaaatacccacctcttaagtgtgggctggatttattaaatagcttctaatggatggaacatggcagatgtgatgggatgttacttcctagatctggttacaaagattgtggcttctatcttggggtgccctcttttgctcacttgctgtaagggaaactagctaccacgttacaaactcctatggagaggtcaacacgaaaagaaagtgatgtttcttagacaacagggagcaaggacatgggggctgccaatggccattgagtgagtgcagaagtagattctctccccggtgagtcttcagatatctgcagttctggccaacactttgactgtagcctcatgagagatcctaaaccggaggcacctagctaagccatgccacaaattgtgaaataataaatgtttgtggttttaaactactaaatttggggataatttgttacacagaaatagagaactaatatagctgcttatctttgagacgtatccatccgtgctgagaaccttggatatccctgactcctctctgttacatctcaaatctagttaccgcaataaatcatgttgtttctacctt

SEQ ID NO: 237154 - DNA, 450 bp, Homo sapiens
aaactctaaggaactggaatccttcctcccaaagtgagaggtcggattcccccaagggcaagaagaaggagcagcagatgcccagagaggcactgatgctcctcctctcatataaagtcccctggtgagcagggctttggactaggggtggggatggtgtaaatgcctgggcaccaagcactaggacttcagtctctagggccacagagggggtccttctgcttagccaggctctggggcagtgcatatagccagtagggccagcctctttttcttggattggtaagccctgtagtggaagcttctgagagtggctgatgtgggcagctcaattttgcccagactgtgtaagcccttgagtcctggtacaagcccaggaacaaagaggagtcactgggggaaaaaagccagacattagaagtgggggcttaaagcaggttttatccaatt

SEQ ID NO: 237155 - DNA, 567 bp, Homo sapiens
caaggaaaaagtattgaagcagcaagagcaaaatgaagatcacttacaagggaagttcacaaataaacggctgacttaccagcagaaacactgcaagccataaggcagtgggatagcacatccaaagtgctcaaaggaaaaaaaccctgccaatcaagaatcctatatccagcaaagttactgctgaaaaatgaaagtaaaaaataaacactttcccaggtaaacaaaaatagagagaattcactgctagcagacctgcctcacaagaaatactaaagaaagttcttcaggctgaaagcaagtgaccccagatgataatctggatcgacacaaaaagtgttagtaaaggtaattatgtaattagaaaagacactataaatgaattttttaacggatttgaacagcaactgtataaaaataagatgtatataacgtattaagcttgcatcatatagaaatgtaatatatgtgcaatgtatttgccaataaaagcacaaaggaggtgtgtgggagcaaaagtgtaatggtctaaggaaatgacagtgaagcaaaagcaacaattgtaac

SEQ ID NO: 237156 - DNA, 448 bp, Homo sapiens
agtgttgggccatggaggacgtgttcaggcttggtcagacaaagggaaggaggactggattttagttactgggaacagaacaagcagagatttttgccccaatatttaataatctattctttacctgcaacattatgttacctccagggctattcaggtcagccttaacaaaaatctgccttccggtttcccactgattccctagtatcatctctcccattcttgcctctgcttcaatccattatgcacttctttcccagcttgtgtttctcctttgtatcttcactagtttgctagcactctcatttgaaccttgagtaggtaagagctttttacttacatttcagagcagtttataaataggctgcttagtttcagccagcaggtacaagctttcattaaattcttcctccttcccatagtgctgttatctggagctcccaggaaa

SEQ ID NO: 237157 - DNA, 680 bp, Homo sapiens
gctttggctcccttggcctgatgacgtccgtcctggtctgccctgatggaaagacgattgaggctgaggccgctcatggaccgtcacccgccactatcgggagcaccagaagggcgggcccaccagcaccaaccccatcgccagcatctttgcctggacacgtggcctggagcaccgggggaagctggatgggaaccaagacctcatcaggtttgcccagatgctggagaaggtgtgcgtggagacggtggagagtggagccatgaccaaggacctggcgggctgcattcacggcctcagcaatgtgaagctgaacgagcacttcctgaacaccacggacttcctcgacaccatcaagagcaacctggacagagccctgggcaggcagtagggggaggcgccacccatggctgcagtggaggggccagggctgagccggcgggtcctcctgagcgcggcagagggtgagcctcacagcccctctctggaggcctttctaggggatgtttttttataagccagatgtttttaaaagcatatgtgtgtttcccctcatggtgacgtgaggcaggagcagtgcgttttacctcagccagtcagtatgttttgcatactgtaatttatattgcccttggaacacatggtgccatatttagctactaaaaagctcttcacaaaat

SEQ ID NO: 237158 - DNA, 450 bp, Homo sapiens
atccatctgtgtatttctggaacttagcaaaatactttatagaatatgtttcataactgttgatttaaattgaatcatctggagatttctcataaaacaaccaaaggtttacaggtcgtatttgaggaacccattgattttgatgaatacatttttaggaaaatgttgtttcatgtcttaatatctctgacactttgtagtagtagttcactctctttaacagtcttttgtttatctcctaattgtgctagttcattatgctatttggaaaaatgaactatttattcacttagaatgaaagttaattgagttaattctcattgtacattttaagaggcaaatcatgaatatattgtacaaatttttgcaatatgcaactttttaacatcctgatcaacaccaatagtaacatttcattagatttttaaataaaaattaaatatgacttta

SEQ ID NO: 237159 - DNA, 604 bp, Homo sapiens
gaagtagataatctttcagcggatatatccactagcatttattatagtcaggccagtgttaaaagtgaaaatatccaccagaaaagaactctgattctttaaagtcacctatgttaaaatgtaccaccaaaaaagaattacatgtgtataaatatgaggctattctgttaaaaatgatagtttaatgttactagtaatttgcttaacctaacaagtttcttaacgaaagatccaaatctaaaaaggaagcacacatgtttagatttaactgattaccatacaaatgtccggccaaacttaagagaaacccccttcaaaaatgattaaaggaaaaaggattcaacagatgttcaataataaatagagaagttcctagagaaataaaatttaaaaattgtttaatagtttacccaaatttgtaagctgtttgcacttagtcaagctttaaagtaactgcaaaggaaccatctatactaatctatattgattctaaatacacctttatcgtggctcatacatttagaaaatttcagacaataataaaggtcaaagccttgttcatgaagagttaataacccaagtgttaaataaccttcagttacca

SEQ ID NO: 237160 - DNA, 185 bp, Homo sapiens
caaagcctcagctcaggaagaccaactccaggaaggcctcctgggctgccccccacttcagatggggacccacgtctgttcttgctgccctgaggacacagtgcgcttggttctctcacaacatgcccttgcagaatgacagttctctgtccctgggtgtgcagcccctccagcctgggaattcc

SEQ ID NO: 237161 - DNA, 406 bp, Homo sapiens
agcaagtgtgttttatttatatttttttaaagtcatcccagggctgtgtccaggcaactgagggcctgtcaaagaaccgaatgtctaattccctttagaaaaaacaaagggattaggtgtccctgggactttaacaaatgcattgttggtggttttgatttaggtttcatttagggaaggcaagtgcagaaacgaggatgccaaagatccaggctaccagtgttgcgaagatgcctggagacaggcatgcataaaatgttggcggggatgtaaattagtgcagccttttggagggaaatttggcaacatctttcataaaaaatgagcgtgacctttgatgcagtaatttcatgctttgtaaactacactacgttaatagttgcacgtgtatacaaaaacctatgtt

SEQ ID NO: 237162 - DNA, 343 bp, Homo sapiens
atttcgctaagtaatttatgaaagggaaaactatttttcatgagcatcagaggagagatattgtacccactcttcagagacagaaactgaaattcaaagagaatttttaaaagcaagcttaaatggatcctgcagccatagagaaataaattctgcctgagggagcttgcaagtgaatcttcccaggctcacctgagaatgcatgatgagagtgcagcccagcagccaccttgactgcagccttgtgagacatcaagcagaggacccaactaagttgtgcccacacttctgactcacagatactttgaaataataaaagtacattgttttaccttgctgctca

SEQ ID NO: 237163 - DNA, 363 bp, Homo sapiens
tgtgaagcagaaactctcattaactgtcaagtggtttttgaaataaggacaaatcagcttatttttaaaccattccttttttaattacaaaataataaaagatcattgtagaaacttcagaaaatgcaagtaagcttaaaaaaaaatgttttgtttgtttgttttttgagacaacagtctccagtctgggcaacagagcgagactctcaaaaaaaaaagaggcaagctgaagtcctacctatggactgggcatggtggctcacgcctataatcccagtgttttgggaggctaaggcaggaggatcaattgagcccaggagattgagaccagcccaggcaacacagcaaggcactgtctctacc

SEQ ID NO: 237164 - DNA, 507 bp, Homo sapiens
tatatatatatatatatatatattatgcatatatatatgcagtaatatatttgagttactaaaggaaaggaaatgcaacaagaattttacatctaacaaatctgtccttgaagcataaagggcacaaactgctatctacatgtaaggattcaatgaatgagattcatgttcctcaggctgtactagaaaacaagtgttagacaaacaacagaactagagagacactgatagaaggactggggttagcattcaatatgtagctacttacaaaatgagaccaaatgaaggtttagaaattggagagaatattatgtcatcaccatatgctctgataaagaagaaatggtacaaaagtaaacatgaggagagcagggaagggagggcattagtaaaaaatgtacaaaactctttttggcaattgtatggaagatgatagtattactataattattcttaggttgttccatacataatgtgaaataaagaaaattagtaattatggaatat

SEQ ID NO: 237165 - DNA, 681 bp, Homo sapiens
ccaacataaagtaaggattcaataaatactattgagagtgagagggctgggtgcggtggctcacgcttgtaatcccagcactttgggaggctgaggcaagcacatcatcacttgaggtcaggagtttgagaccagcctggtgaaaccccatctctactaaaaacacaaaaactagctgagtgtggtggcacatgcctgtagtcccagctactcaggaggctgaggcaggagaattgcttgaacccaggaggtggaggttgcagtgagccaggatcatgctactgcactccagcttgggtgacagagcgagactccacctcagaacaaacaaacaaacaaatatatatatacacacacacacacacacacacacacacacacacacacacatataattattaagaatgggagatagtactgagatttttttttttacttttcagattcctccaatatataaaatttcatctcatagttttaaaacatgggaaatattcaaaatacccattctgtcactgtagctaaagaatgactactagaatcagctcatatttttctggttcttcttgaaagttattcaatacatcaataattcaatatatgttactataaaccaggggttgggacattttttctgtaaaggtccagatagtaaatactttacacttttcaggctgagac

SEQ ID NO: 237166 - DNA, 606 bp, Homo sapiens
atatatctgcataatagatgcagtgattttgccaacttggagcctgtcagttgatcatctacattggaaggtgatttctgtctgtcctgcttcaacagctataccaaagttcgtgataattcttaatcatcattcaacatcatttagcagctataccaaagttcatgatgattcttgattgagagcatactacaattgaggccttcatagttctgctggaattccaacagggctggcctgagaaaaatccaaatgagagtaattagcagtcagaattgaggaaaccttctaataggaaaagagagaatgggaaaatgatttctacctaaagagcatgccaaaaatggattatacccgtctctgaaggacagaaactttaatgcagccttggaggcatcactcatttctttctccttccttaatgattcatggccttaccgttttctgatggattttgacagcagctactgtgagagcagagataagaggatttaaaagagatcaaacttagccaaaatctgactatacctagcaacttttctacagtttgatctttttatgtgaagagaaaaagaagtaatgattgagggattgttgtacttaatt

SEQ ID NO: 237167 - DNA, 221 bp, Homo sapiens
tcttcatttattagagacattaattttataatattggacatagggattggcaatttttaataaagaaaatggttttacatatcaatggcaatagatgggttaaaatatcatttgtaattcactatccatatcctaagataaacccaggaatatacagtacttctgtagtgtccagccattacttagcaagggaagagggagggtgggagggagggaggggg

SEQ ID NO: 237168 - DNA, 437 bp, Homo sapiens
cacttttttttgtatcatttacaaagaaatatttcttagccaattgagacctactctgaaaaactgaaaatcccacaatggaaactaggagcaagatatttgtaaaaatgccttgcaatatgtggattcatctcacaaagttaaaactttgttttgattctacaagttggaaacgctcttttcataggatctgcaaagggacattttctagcccattgaggacaatagaaaaaaacacacaaatatcccacgataaaaactagaaacaagctatctgtgaaaatgctttgtgatttggggattcatctcaccgagttaaacctttcttttcattcaacacattgaaaacacttttttttagaatctatgaagagacatttcttgtaactaacctgcacaatgtgcacatgtaccctaaaacttaaagtataataata

SEQ ID NO: 237169 - DNA, 366 bp, Homo sapiens
gttagagaggagaggaaatctttgggattaaagcctgacagcagttaccatcatatcacctgagatgactttcccaacccttaaagtgagaaggataaaccatttttccaaagatataacatcacaggagggaaatttcctgggcttatttgcataaatgatgagtcaggttaggagaacactgactgactctgatgtgtccgccctattacatatgtgatggacatgttgaacaagggggtctcatgattagtaactagctcttccctgtagcgtgaatgaactcaagagcaggtactgtgatttttctgttccctctcaaataccaatgtcatttcatcatgagaatggctagttacatttaat

SEQ ID NO: 237170 - DNA, 1562 bp, Homo sapiens
attatgacacccgtctgtgtcactgctcttgacaatgacagaacctacaaaaggatccagggtcctcagcccccatctgcctcccagcctcacttcctgcacttccatgaaaataacctttgttccccctacaaggaacttcttgcagttatccaaatgttccctgtcctggtgcacactgaggcccctgcatggagccaatccttcacttaaatcactatgcccccatgccttcatctggagaactcacacttctgttcagaccctcagatgtgactgcttccgtgttactgctttctctgccatttcactgggcctggaaaataccttctgcaaactccagggagagttactcagctcccccttccctggtgctttgctgatgcctctgtcacagcactcagcacatgacactcggattactggctcacagtcccctgcttccaaaggctctgcctgcatgcctccaggggttatttccagagcacccagctcagtgcctgtccagtggtgaacgtccatacatgtgtgttgaatgaatgagtggacagatgtgtgcagggagaatgtgaattcactcccacaaagcttgtatgtgccaaaaaatattggttatttttcataattgagctaatcttgtttccctagccctatctcctacatggcaggagcatagagaaatttttatccagctgagtaaatgtagcccagtgctgtattttaaacagtcccttaaggtaaagtgatttgtctctcagattgcctctctcccagctcctctcttggacggagctggacacatggcggagagggactttgagatcccaggaagcagggaatgatgagggctggtcctaggagccacgcgagccctctggatgcttgctcatctctgctgcatggggctaggctgaactgctgtctgaactggtacctgctgaggtccatctggttagggcatccactgctggagtccatgcccttagggcatccactgctggagtccatgtcctctacttgcctccggccttgaaatctccacctctgctctctgacccttgagttctgttggcccactgactttagcacctctatacctcagctgaggacatggacacttccaggtccctcacactccgtggaggagctagaggagacagcagccctatgacaggctcattggcctatcggtgtcccatcacagcctctgtaacagccaggataagcttcaagccaagggctgaccttctcccagggtctgccgaggcactccaccagccccagtgttgctgggcttccccgtggccatctgggtgtttctaaagcaactccccaccaacctcttgggctgtggtgaccaagggctaaaaattaagtggggaccctggtatctgacttttgctccacttctgacaccttctttctctcccgtttcactaggactggaaaatacaggctttttttcccaatccttgtttctctcaaaccaagacctcatctacataaaacatctagggtcaggcccatccactctagctcttattacagagaaagagctccag

SEQ ID NO: 237171 - DNA, 540 bp, Homo sapiens
ggaatctaaacctgtatttccactaggagcagtggcttggtatttggtaattcattgcttgaggtgactttatagaatataactaccacaaataatgaatcaactatacatacatgggtgtgtgtgtgtgtgtgtgtacgtgtgtgtgtctgtgtctgtttatgtgtgtgtgtgttttggagtactttagtgcaaattgctgacatcttaacattttatctgaaaatgtttcattatgtctctctaacatattggttcttaaagtgtagtgtgaggagtcctggagacacctgagacagaccctttcaggtgactgggaaatcctttttccaactacatatctccatgaggttggatttgtcttcatatactttatccaaaacagcatgttacaacattaaatgcagaagcaaatatgggaatctagctgtcttgtactgaggcagacatttaagagattttcagaaacgtaaaacattcctaaattctttgtttctgaaaatgcaattattttaataaaattttatttacgataatcag

SEQ ID NO: 237172 - DNA, 1075 bp, Homo sapiens
cttggctcaccacctaagactgaacaagcactaaaggacagaccagcccgctaacagctcactccaaaaatgagcgggactcccagagaaactatttttattggagcatcctggttttgccacctgctcaccccactgcctgttcttctctccaaggaggcttctgccagccctgcttgtccttccctagaaaaggaaagccttttcctgtttgatcctgagacacctgtagattgagtttggaatattctccctattgcaatagtatttttgaataagttttatttttccctacctctggttgatttttaattaataccagtaagcttggatgaaagcctgcacaccttaggtgtgtgtgtgtgtgtgtatgtatgtactttagcattatcataaagtaataacagtaaaatcaaacaaacacagatggataagcaatatgttggactagtatgaaaatggcattgccagcagtgatatgatttttttttcaaaatggtacactttttgaagtataatcttattttaacctaaaatcttactatcagaaaatgcagtgtacattaaaatgttctgaactgcttttattcatatattaaatggttgtactcaaatatctacaaatttgtttttcacttatgtaattgtcttatagaatgttcaaaagtcttgcagaatgtgagacaattttctattgaatacgatcgctttatcattgcaagacatcaaacatccctgtttcctgccaaataaatgtacaatagcaataaatgtaaagatgtgttttgtaaaaaagatatatttttgagttacaaaacaaggattttaaaacttgaattgttacagtgaatatgtcttaatacaggccagagtcatttaggtaaaaaattacctcatatctattctttgcagtatcacttaaaggtgtttatttagcggcaaagatttttttttttgtgcctagaggcagatattttgccccatggctatttacggtatgaaactgtatttaaatgagtgtacatatataaaagctgccattctggctgtaaactattgcaggttatcaagatta

SEQ ID NO: 237173 - DNA, 1893 bp, Homo sapiens
  misc_feature (1520)..(1520): n is a, c, g, or t
ctttttcttttgagtccaatcttcagtcaagccttccgtgtgaatgatagtggccacttggggatctccatctgcattttattgtatggccacgcaaaaccttttatctaattcctagaagacatcgattgctgcatagcttggtgggtgaagaatggaaaagcacaatctcactttattttgctggtggctttgccctccctttcctacaagcagtcattcaggcctaatggttctgttcctcctaattattcatttgttcattcgttcattaattcattcagtctgccattcaatatatatttatcaagcatccactatgttccaggtgcgattccaggcttcagagatagaacagtgaatcaaactgataatgcccccctctccaggagccagcattctagcgagagagaatgacttgctgaattgtttcagttggaactttttttagactctgaaccttggaaaaagtccactttccatgggcttattaaatgtgctgaatcagacagttggtgctgtttactagagatcagggttcaaccagctttagctgcatgacccagaacatttgattttatgatttacaaaataaaaagttatggccctctgcagatgtcccatctaatttgctcattgtgttccttagaggcaatgtggtattgtgaaaaaagcaagaccaagctttgcggttcaagtggcccgtgcttgctgggcctcagtttcctgatctgtagaatgaggctggataaatctaagtttctctccaactctacagtctgatggttctagtactacaagatcaagatttttttcctaaagagccatttgtcttattttagcttcaagccaagccagggcatctgagaaataccaagcctccgttgtgatgtgtcgccatgaaaatgttggctgccctctggatgcaagtctgcttgtgctgtgctgtggctcagagttaaatttagataaaaatcagttaggagctaagaatattcccagctttcctgacaggttgtatccatcattatgggaggaaaaacaaggaactggctgcctggcgacagggagcgggccaggctgagtgtgaggtcaggcctcggctggaatctcacggacttgaaaggacagagacgtttcctgagatgtctgcggcagaatgtgggaggcttcagcctgaggaaagttcaagttggagagaaaggttgccagacctttgagtgacccacactgcttataacttctagaaggttcttttagggaaacctgcttagaatgaaaccctgaaacgtcctttgctgcctccttaacaacttgcattagagagtttcttcagccaaaaggcgaatgtctgttgagtggaaaggagaggacggagtcgatgttgtcccctgtgagatgtcatgtctcaggcagtatgctggacattcccgagacgccagctctgctcaggtgacttgtgtgccctgcccttgtaagcctcgaattactcatcgtgaaattgaggtcaagccactcantcacagacagggctgtggtaacaataaaatgaagggtgcttagcacattgaaaataactcaggcagtgttccattattgctatgggctgggcgtggtggctcacgcctataatcccagcactttaggaggccaaggtgggtgaatctcttgagcccatgagtttgagaccagcctgggcaacatggtgaaacttcatctgtacaaaaaataaaaaattaggcaggcatagtggcacgtgcctgtggtcccagcaactagggaggatgaagtgggaggattgcttgagcctgggaggtcgaggctgcggtgagctgtgatagcaccattgcacaatctaaactgggccacagagcaagacctcgtctccaaagg

SEQ ID NO: 237174 - DNA, 379 bp, Homo sapiens
cagggttgctggtcattactttcctcctggccccatgccctttgggtatgcatgacctgataaggagcttaagcaaacccacattaatagcactaaattaggctctatggaaagagaactccacagtcaggatctttgtgcactcaggacgggaagcatggacaccctggagagcatttgtattagcatgagccactgtgcccgacccctgtcagcagttttgctcttcccctctctccctccaggccagaggccatgatctacatccaacttctctgcaaattcctgaactctgactcgattgtccctgtcaatcctgcctttgtgtcttccctttgaacctcactttctgattctcctggcttctcttcttgactgt

SEQ ID NO: 237175 - DNA, 378 bp, Homo sapiens
agtccccatggagtctgttgccccaggaaccctgaatctgaggcttctgtcctgggaagcagactcttgaaaggcagcagtgtgaggctctggtgagtcaaaatgactgcgataaggtccctgttctccaggtgcttacaggctggcagacttggaaatatttttttggggtagaagacagcatcacaattaaatatatgcaaactctacaacagacatcccctgtgagaattttagagaaatataaagccctgaagtacttaggcactggatcaaatacagtttaggagatacaacttttgtataaagttaaggcttttttgaagattgaaataaaattgttttaaggttgaagcatccttaatgcaaaaaatttca

SEQ ID NO: 237176 - DNA, 1476 bp, Homo sapiens
aacgtaatgaaacctcgtctctacaataagtagaaaaattagccatgtgtggtagtgcatgcctgtggtcccaggtacttgggaggctgaggcagcaggatcacttggacctgaggggtcgaggctgcagtcagccctgattgctgccactgcactccagtctgggcaacagagaagactgtctcaaaacaaaaacaacattactcaggaatgaaggaaatggtggaattgagaagacgggactaaagccaattaatggggtatggcaatagtctagttggaagaggttaaggtcatgcagtaggacataatagggctgaagaagtatggatggaattgacaaacttttaaagggtagaattcacaagatttgatgaacaaatgcatgtaagagaacatatacaatgcattgtaagggacttactgctataattaaccattgtatgtttccaaaatgtatgtgtataaatagtcaacagtgataacaggatccaatcatggacaaccagtttgattggatataaattttgaaagaaagtgtgtgtgtgtttgtgtgtgtgtatgtgtgaatgtgtctggggaagttaagaaaaattttgagtttgccctattgatggcagccagctgcagcagggaggtgtgactggggctgcacactccatggagcctgtgggagccccgccccttctgagttgaggcaggagcccctggtgccattgtggctgccctcccaggtgcaggacctgggcatctctgcagcctgcacccttgggggaccagcaagacaccctactgcaatccctgcaggctcaggagtgtctgttcccaccgcctggactctctctactcccggggcctgctccaatctcagagcgggcttggggccaagaatggcaatgggaggcagattgattccagggtagaagtgggtgagtccccagtaagaccccaccttcaggtcagggagggcctgaagacaggggtccaggctgccagtcctgcagactggagtagggactcgtggtgcatcttctggcctgcccatggaccaatcggcatgtacttcctcccctcggaggtccataaaaaccctgggttcagccagagtagggcagaggactgccagaggaccaagagggcagagacctatgggtcaacaagcctaagagaggagctaccctctctgctgatagttggagatgatggaacagccagttgcagaaaggacctaccctccctgctgacagctgcagagacaacctgtgggcagagaagagccaccctctccagggcctcctctcttctgagagctgcagacattaggacgatcagttgcagagaggagccatcctctccagggcctcctctctactgagaactgaatacctgatggacaacctgcctacagagaggaaatacccactggaggtctctgagctgttgtaacactcaataaagttcatctttgtcttgttc

SEQ ID NO: 237177 - DNA, 891 bp, Homo sapiens
ttttgagacggagtctcactgtgtcacccaggctggagtgcagtggcatgatctcggcttactgcaacctccacctcctgggttcaggcgattcttctgcctcagcctcctaagtagctgggactacaggcgtgtgccactgtgtacagctaatttttgtattttttgtagagacaaggttttgccatgttggacaggctggtcttgaactcctgacctcaggtgatctgcctgccttggcctcccaaagtgctgggattacaggtgtgagccaccgtgcctggccgccaaacttgcatttgaatctgtccctaagacatctctctttggatatctaatagtaccaacaagtgaaacatgttcataatggtatttttgacctgtattgtgcaaatctccctcccgtgttaccattttagtaaatggcatcacaatgtgtaaaaccgtccaaaacaaaaaccagtactcacccttgagatttctttttccattatccagtatatccaatacattaggaaagcttatcagcccaatttacaaaacaccagtccaatccacccatttctctccttctcccttgccagcccttgttcaagccatgtaaagtgctttaaaccattgaatagcttccaatcacacttaggataaattcaaactctttactatggcttaaggccctacatcatcttatctctgtttcttctacatcatcttggtatacccttcacctccctaactcttttcagttcctagaacttgctaaagcttacctgtcttggtgcatttgtacttctctttcttctgcctagaatgttctcccctgacctgcctttttatccttcccaacctttaggtctctgttcaaaatcacctctgccgagagggccttcc

SEQ ID NO: 237178 - DNA, 709 bp, Homo sapiens
ggagctacaagggacatagaataatttggactccattactaccttaagagaccttcccctgacttctcttttaaaaaacctatgagtctctgtacccctgaacttactttccacacctatttctctcttcacccccaaaatccatattagaatgcccctgcaggctataaagcctttcataaaagtaaaatacccagtcttttcaagagaacaataaaataggcagtctcctacctcttgtcttactctaatataaactccatgaagataagtattgtatccatactgttcatgctgcacagcagttgcccttatctgcagggcgacgcatcccaagacccccagtggatgcttgaaactgcagagagtaacacacgtgattgccaccatcggaacacatttctgttcacgtcttccacccacagatttaatgccttttccatcttaactaagcactcatcatggactgtggccataacttttgcagttttagatgcaacagcaaaactaacattaattttttcttcttcttcacaatttcatgggtagatttgttcttaccgtagatcttagcaacctcagcatatgatgttttttcttttgagaactttcaccttttctcttaaagaaagcactttacagcttctctttggcatatctcaactgccagcatcactgctcttgaactttggggccattattaagtcag

SEQ ID NO: 237179 - DNA, 1386 bp, Homo sapiens
agtctctggtactcaggctggagtgcggtggtgtgatcttggctcactgtaaactcaagctcctgaactcaagcaattctcctgccttggcctcccaaagtgctgggattgcaggtgtgaactgccacacctggctccccgactattcttgtatcagaaatgtaactcacccactcaccaccagcccacactctgggttctcctatcactccactgcctgctcctcggctgatcacaatggaagaagagatcatggcacttgtcattgacaatggctccagcacatgcaaagctggctttgctgggtatagttccccgagccatgttcccctccatcactgggtatccctggcaccagggcatgatggtgggcataggccagaaggactcctacctgggtgatgaggcccagagcaagtgcagcatcctgaccctgaaagtgccccgtggaccaccgcatcatcaccaactgggatgacatggagaagatctggcaccacaccttctacgattagctgcacgtggctcccaaggagcacccagtgctgctgcctgaggccccgctgaaccccagggccaacagaaagaagatgactcggattgagaccttcaacaccccagcaaggtacacagccatccaggctgtgctgtccctgtacacctctggttacaccactggtattatcatacacagctgagacccacacggtgcccgtctacaagggctatgccttcccccatgccatcctgtgtctggatgactggcacctgaccaaccaccccatggagatcttcagggagcccagctactgcttcaccaccacagccaaacgggagatcttgtgcaacatcaaggagaagctgcggaaatggccaccacagcgtcctcctcctccctggagaagatctaggagctgtccaagtggttccagtgtctggaggtgctgttccaggcctccttcctgggtatggaatcttgtggcatccaccaggccaccttcaactccataaagtgtgatgtgcacatccgcaaggacctgtttgccaacatggtgctgtctggtgacacccccgtgtacctgggcatcacctacatgatgcagaagatcacgaccctggtgcccagctccaagaagatcatcaccttccctgagcgcaagtccttgtgtggattggcagcaccatcctggccgccttccagcagatgtggatcatcaagcaggagtaggatgaatcaagcccctccatcacccactgcaaatgcttctaaatggactgcaagcagacacgtgtcatgtgcttcatggattaatgcagaagtataaatttgcccctggcaaatgcatacacctcatgctagcctcaataaaccagaataagcctttc

SEQ ID NO: 237180 - DNA, 606 bp, Homo sapiens
ccaaagtactgggattacaggcatgagccactgcgccagtcctctggagctattaaaaaggcttctaattggtttccgcacttccactctggtttccgcacttccactctgatttgttattatatcttgttattgaggtgttattcacatgccatataattcatcctttaaagagaatttttttaaaaatttttgtggatatatagtaggtatatatatttatgaggtacatgagatgttttgatacaggcatataatgcataataatcacatcatggaaaatggggtatccatcccgttaaacatttatcttttgtgttacaaacaatccatttatactcttttagttgttttagaatgtataaattattactgcctatagtcaccctgttgtgctatcatgtagtaggccttattcattctttctatttttttggtacctattaaccacccctacctcccctacccttctaaaatatacagtttggctgggtgcagtggctcacacctgtaatcccagcactttgggaggctgaggtgtgaggatcacttgaggttaggagttcaataccaggtgggccaacattgtaaaacctgatctctact

SEQ ID NO: 237181 - DNA, 422 bp, Homo sapiens
gagactgagtctcgctctgttgcctaggctggagtgcagtggcgtgatctcggctcactgcaatctccccctcctgggttaaagtgattttcctgcctcagcctccctagtagctgggattacaggcgcatgccaccacacctagctaatttttgtattagtagagatcgggtttcaccatgttggccaggctggtctcgaacacctgacctcaagttaatccacccaccttggcttccctaagtgctgggttttacaggcatgagccaccacgcccagcctccctttgcatgttttttaaaaaggcattaagcatcttgcacatgttctttagtttcagtttgcatgagtcaacctgtgtgcatcattttccctttcactatttcttgtctttgctggtgaaattttaaagcttcagttta

SEQ ID NO: 237182 - DNA, 239 bp, Homo sapiens
ataggtatgggagaagacaataaacagataagcaaataaatacagctgacccctgaacaacacagaggttagcaccaatcccccatgcaatcaaaaatatacatatggtcaggcacagtggctcacacctgtaatcccagcactttgggaggccgaagtggatggatcacttgaggtcaggagttcaagacaagcctcgtcaacatggtgaaaccccgtctctactaaaaatacaaaaa

SEQ ID NO: 237183 - DNA, 447 bp, Homo sapiens
ggaggatcacttccggtcaggagttcaagaccagcctggggaacatagtgagaccagtctctacataaaattttataatttaaccgggtgtggtggtatacaactgtagtcccatctcagccttcaaagtgtgggattacagattcgaagcttcttgagcctgggactgtatcttgatcattgcagaatccttgccacctaatgcattgcctggcccaccatcggcacttggagaaatgattgttgagtgggcaagaagagggcaatatggcatagttgaactagcatgggatctggagctggaaagatcttcccagtgactggcagtcaccttgggccatccccaaactccccaagccccagtttctttctcagggaaatggggtggaggacatcacttcgcaactcaccaggttgttctgaaaaatacagtgagatgacataagg

SEQ ID NO: 237184 - DNA, 1712 bp, Homo sapiens
  misc_feature (137)..(137): n is a, c, g, or t
  misc_feature (1093)..(1093): n is a, c, g, or t
  misc_feature (1270)..(1270): n is a, c, g, or t
ctgagcgctgtgactttggaccactgtccatgtccttgagggggtcatatcctgaggagctggcacacatttcagcagatatctccatatgactgggtttagtggtggcctgtgggaccacgtgggaaagagacccncctgagatgggaaattctgaaaggtcagagatggtgggggaacggaaaagtttaacagttgttgactgtgaagtgcctgcaggaaatgaaagggaggtgcccaagagctaagaagtctggtataggagaagcatgagtaggagctgcaacagggggctaagaggtgacctgtgcagtagaaggaaagcactcgcgttctcccaggtgcggaacgagcaaacgttgatgacaaatgactttgcctaccatcttgaaccctttcggcttctcttcttgcacaggtcttcattctcaccctgctacacagcccctaccagaacgttctgaaatgcaaacctaacaactgtctcaccccagcaggaaactccccagggtcccgggccccctgcggggttgcaggcctcactcttcgcgcccatccctccgccctgaccgccctgagctcgcccccagtgctggcccttcacgtccagttatccctcccagcctccaaggtccccgttaccgaagaccgccaccatcacgacatagcgcagcacatatgggtaaacaaatggactgagactcaagcaaagaagtaacccgagacgcgcgttacacggaaaacgactgcgcaagcgcggtagagcaggggcttgcaggtgagtgggagcagccaatccacgcgaagggggtcgggaccacttccgcggaggaaagccccgcccacacctcctgggccctcgcctcactggcggtttctcccgcgagccagcctcatagacattccttggtgctgattggctggcggccagcgcagtcctccttcctctggctctctcgcggccccttgcgggaaggcctcccagaggccgtggggtcgtttctggcggcctaagtgggcctaacttttagagtcccgagggtcgtcgctgccggggagatctccgccccatttccgtgccgccttgtcctcngggcccaaagccccctgcgctaagggccctgtcccatctctgccctacacgcgggagtcagcctaaggcggagccctaggacagcagccgcgcctgacgctgctcgcctgcctagcacaggcagggggtgagcggagtcggctgcctccctccccagggccctccaagggagtgggntccacatccatgggcccgaggaatctgcggagagacgggaagagcaggggacactcacagggcgggggtccaggcgggagtccagtagtcctcgtggagacagctgggaaaggcctcggggcaagggacctcggatttcctcctctgcctcaaaacagacagtctaagctgggtgcggtagcttgcgcctgtaatcccagcactttgggaggacgagttgggtggaccaccaagtcaagagatggagaaccatcctggccaacatggtgaaaccccatctctactaaaaattagccgggcgtggtggcgcgcgcctgtagcccctgctacttgggaggctgaggcaggagaatcgcttgaacctgggaggcagaagttgcagtgagccgagattgcgcctctgcactccagcctgacaacaacagagcaagactccgtctca

SEQ ID NO: 237185 - DNA, 299 bp, Homo sapiens
tatgtgcattttattgtaggtcattgtttaccttgttagaactataaataaatagcttgcaaataaatagttcaattatcccttagaataatttagtagaatgcagcactttataaaagtaataaacttacaagctatttatttaagctcttcctattaatcagagtgattcatcattgatggtaaaggaataaataatcacccatagtgaaaaaatatctgtgttcctagtaacaaacagagaaagggtgcaaccatgaataagagagtaaagaaagatgaattgtaagttatgactt

SEQ ID NO: 237186 - DNA, 411 bp, Homo sapiens
tgttctgctttgctttgtttgtcaccactgacaaataacctagacagacttactaggtttttttcccagctttattgaggtataattggcaaatagaaattgtatatattcaaggtgtacaacatgatgattggatatacatgcacactgtaaaatgattaccacagccaaattaattaacatatccatcacccaacctaagaaattaaacactgcaaaaacttaaaatctattggtaacaccctttgatcacagccaagtccctttaccttcatggcatagttaatttggtgtttatgatttaagtatatgtataaaattgtactatatacatatatatcattaaataaaacataatgtatcaatacttctaaacttatatacttggttacatactatatgtgtgttctg

SEQ ID NO: 237187 - DNA, 213 bp, Homo sapiens
gagacggagtccagcccaggctggagtgcagtggcgcaatctcagctcactgcaagctccgcctcccaggttcacgccattctgcctgcctcagcctcccaaagtgctgggattacaagtatgtgagccactgtgcctggccagatttcctcagttttatttgtcccctttggttcatttacgtctttaaatggacgtgctgcactccacaga

SEQ ID NO: 237188 - DNA, 692 bp, Homo sapiens
gtcagttgggccaggtttggccccacttcaggccagggttagattggccgccaccactgaaaacttaccgaatttttctatagcactcaaatgtcagcatttttccatctgttgggggcctttcctcgttttccattctccccaaatattttatcgggttcaaagtttagagggttattgtgagattgttgttattcaggtgccggattcctcatgtgattcagcgtgccagacaggacacacacagagagaggattgatgtggtctgtggggaacagagaccacacatctcttgtaaaggcacaacagttgcccagctccaattagatgtctcctgctaaccagagtacactatccacagaaatttccttgtttccaacagaagctagaaaaacagatttttggccaggtgcagtggctcactcctataatcccagcactttgggaggtggaggcgggcagatcacgaggtcaggagatcgagaccatcctggctaacacggtgaaaccccgtctttattaaaagtacaaaaaaaaaattagctgggcgtggtggcgggcacctgtagtcccagctactcgagaggctgaggcaggagaatggtgtgaacccgggaggcggagcctgcagtgagccgagatctcgccattacactccagcctgggcgacagagcaagactccgtctcaaaa

SEQ ID NO: 237189 - DNA, 926 bp, Homo sapiens
ggcgggatcactagggccacggtgctaggcagaagggaacctgggatgacagagccactatggagcgctccttccactcctctccaaattgtcctttgttgctctggagctgacggtccctgccctgcaagaaggtgcgtttcctaaaacacccgggaagccaacccagctacacttaagtaacccagccacggacagtgcccgacgcgtccgtgggcctctgaggttggccttcaaagaaatagagccgtccaaacgtgtcatcaggcccacacaaagctggtgtcaaagagaaagaggttctccgtgccttgcaaaaaaagattctcacaaaagacttaagacttggcagcaggtccgactgtgccctttcaggataggaactgctcaggtgtgtgagagaaagagactcgagcacaaggtgtgtcccttccccctgtatttaaacctaaattaatttcactgggaggaaataccatgcagattttttttaagtctgtttcacgctcccagcgggctaatcggttctttcaatcctaaagcaacagaaaactgtgaaatttgaagagaaattgttagatcaaaggaaaaagcaaacattaaaggaatgaaagtactctcattatatagcaaaaatggaaagtgttcacattggggtagttcaactttttaaaacatggttaaaagaacatagtcaatttaaaaattatcaggagtgacacagaacagcagctaggccctggggatccacatcaaccaagcacctaacatacagtgaataatgaatgttaaataatcacagtacgcacccacgtcacattttctagttgattagaacttaaaaaaaaaaatccctccaggatactatcccagtgtgtcttctcattaaggtccattttttaaaaatacaccttgctaaactgtta

SEQ ID NO: 237190 - DNA, 486 bp, Homo sapiens
acaagttaaagtaaataatttttctagatgccaggaagatttttatgagaaattgaactttgaaatattttgaagcaaaaagcagtgtttcctttgtgtttgagggtgcagtttttagataaaggagaaatatttacaaagaaccccaagtacaaaacagcacgttatgctttgcaagatgtaaaatgctgtatgatacaaagtgatttattcacaaccccaaaatcagaaaaactcagaacattgagctggctttaccatgtttggtgaaaaactgagatgctacccaaattgatatgttcctttataatcttgatttaactcactaaatatttatataactttgatatagaaatattaatacacttggctgggcatgcctgtaatcccagaattttgggaggccgaggtgggctgatcaatttaggtcaggagatcaagaccagctgggccaacatggttaaaccctatttctactaaaaatac

SEQ ID NO: 237191 - DNA, 721 bp, Homo sapiens
caatgtcagtctatagcattttgtgcacttttagctttaactttttgctaaaatagctcgtttattaattttgcaatgttatctccataaacttagcctagaattctttctgtggttacatttatagtttttagatgaaatattatatttgttaaacgagccatttactgttgagactatcacctcattggtctttcttccctttagtggctcataatgaaagggggaaggtaatcgttcatattccatcactgaaacaaaatttagcaaatactataagccgagacgtattagaaacatctgtgcttacatttactgtatattccaaaccttttacatgacataatttgttataaaacttgtttattcagatcttttgcaatgtcgactgtgtttttactgggaaatacattcaaaggaatgtattttagcctgctaaccacgttgttttccaaggattctttcagccatttttactaaggcaagatgaacatgtttcctcaatgagtctttagatcattggctattcagtgaagtttttcattaaacattaattgggtgttacataactaaacatcacaggagaaatcacagaatatatttaaaatgtcttgctaacagtgatgactttgctctatccttagctaacatctcaaggcacatttttcctctaggtcaaggttcactttgaaaaagagtaaggggctatctatattttaat

SEQ ID NO: 237192 - DNA, 524 bp, Homo sapiens
tgggtttgtttttaagggtatccttgttttagaagggattgccatgctgtacagctgttagaattcacttgccaaagaatagaatttagctgccctttaggatttgacggtatctttgttctaaaacaaatccaggagtttacatttgttttgttttgttcctttagggtaaacactgacattttatggactagaattatgagatccccaaaattgtgggaagtgaaatacaagcaatttcagaaaataggttgggaatgtttctagcacaaagaaaagacaaatatttaaggtgttagatatcccaggtacagtgatttgttctttataaattatatgaatgtactaaattatcatatgtacccccctcccaaaagaagaaaataggttggatgcacagtacttctggctgtcccaggaaatactcattttcctttgctccttaaagttcttaaatggaaatatttgataagcaaatttgataatggactgggattaaatcaagttcatttcacacatgaaaa

SEQ ID NO: 237193 - DNA, 434 bp, Homo sapiens
ccttctcttttctaagtttcttcttgctcaactatttccaactgtatgatttggctcatcttccttactacatttttcatgtcatcagtttaagttgtcgagtggcactaaatcttaaaacaaatcagaagaattattagggtaaactgaaaacaccaagtaatctctcttagcttcttttagttagatgttcaattttgaagtatctggatatctctttagggcatatacttctaataactaactgcccttctccttgaagacactattttagcaacagcgggaacttaaagtcccataatgtctgtgctgacacattttaggcatcgtctaggctaacccaagctccttatcttacaaatcaataaactgagcctcagagggaaaattttttcctaagatctttacccaataaatgatttctcaccttgcga

SEQ ID NO: 237194 - DNA, 1137 bp, Homo sapiens
agttattttttctccttaatgctgataattggatctcaattataattagtttattgatgtatttcatttcttaggtgtttaaggttctttatttgctctcttgtctttcttttttcataccatctctttatattacatttttaatgtagtttcccaaaacttaatcataattattatagttatgtttctgtaccagtctggtgttccttttctattgaagtaattcattaaaatttccattccatttcttatcttttccttcttccttctgaaactgtgtagattttcatgtgaggtcaattaatcatcttgcttttactcatgtagtaagcacatttttctttgcaataactatcttcctctgtagaaggagaatggtctaattttaacaatgggccaaattcgtaactggggaactactcctacttattacttaattggtgattctctaactagagtttaaaatatttgtaattctttcaaagattattgcttaaagactgaaaacactgtacatgcctgggtggggaataggaatatagtgatatttagagaaatctttaagaccagcataattctttaaataagctcgagaccctggtccttgttcagttacaataaaagattaccattgggatttttaatcaactaatttatgatgcctttagtttcctattatattaaaatgtttcttaatgtcttaatttttagaagtattttatagttaaataatttgagaagcctcaggagaataaaatcaaattaatgatgaattctcatggcaaaggaaaaaatgccctttttttcccactgcagtttccttttttaaaaaataagaaattagttcggccaggcctggtggctcatgcctgtaatctcagcactttgggaggctgaggcgggtggctcacctgaggtcaggagttccagaacagcctgggcaacatggcaaaaccccgtctctactaaaagtacaacaaaattagccagatgtggtggtgcgtgcttgtagtcccagctacttgggaggctgaggcaggagaattgcttgaacctgggtggtggaggttggcagtgagccaagatcacaccactgcactccatcctgggcaaacagagtgagactctgtctctatt

SEQ ID NO: 237195 - DNA, 291 bp, Homo sapiens
gaagagggacaggctggtcaccagcaggctcctgcggtgagcccacctgtggcaagcactagacctcaggcccccagttggcagcgctcatgggtgggtactaaaggtcagttccctatactcagagctcccccagactccttcagatcaaatgtcaccttttccatattgcaaaagcctttattgctctaaggaaaacatgctaaattaaaaagaaccaaattattcttttaaaaatagaaatattttaaatggaaaagttcaaagaaaataaaaggctttccaatcctc

SEQ ID NO: 237196 - DNA, 247 bp, Homo sapiens
cagcagcagaagcaagtctcaaaagaccatatactgtgtgagtccatttacacgggatgtgcaaaataggcagattcatcgacagagaccttggatcggcggtcctcaggggctgggtgggatgtggggagtgactgctaatcgggagggggtttccttccctttcgagacggtgaaaatgtttcagaactaggcagaggtgagggttacataatattgcgaatatactaaaatgaactgaattgta

SEQ ID NO: 237197 - DNA, 302 bp, Homo sapiens
aacagttgttatactatactgtttagggaatagtgacaagaaaattgtgtgtgtgtgttcagtacacgtagttttttttctaaatatttttgatctggggtttggttgaatccgcagatgcggaatgcatggatgcggagggctgactgtgtgtgtgtgtgtgtgtgtgtgtgtgtgtgtgaagtcttaaatgttttattagtctacagctaatcagtttattgtaatattgtatgtacagtgagattaatgtcttgcgttttcatcctttgtgaattaaaaattctcacttgttttgtaat

SEQ ID NO: 237198 - DNA, 554 bp, Homo sapiens
gacgagggctcagagcctggcactgccgacccctttgtcagggctccgtgcggcacagcagggccaatctggcctggggtgggacgacacctgtgccagaggctgtagacggacggtcccagcgtgcccgacacaccctgcaccggaaggcaccttagcatgtggcatctcccagcacaccgtgcctggcaggaggctccgagaaagtcaggcccctggcatcccggcccagaagctaccccagagaaacccagtcctgcagggttcattccggcataactccaactctttactagactttcctgataccaggaagggagcacgtggcacccatcaactctcctgaaagcccctcctcttcctccactccccttaggcacgatgcccaatgcctttcgtctgccccaggcttcttgaaatcaacacaaaacaagcctacttctccccggtccctaaattctccccagcctctaacttctccccagcccctagccctggggtttctcatccttgttaatattccttcccttctgctaagcctgtttaaagaatga

SEQ ID NO: 237199 - DNA, 423 bp, Homo sapiens
ccgcgaaggtctgcagcttcactcttgaagccagcaagaccacaaacccaccagaaggaagaaactccgaacacgtcggaacatcagaaggaacaaactgtggacacactaactttaagaactgtaacactcacggcgagggtccccggcttcattcctgaagtgagaccaagaacccaccaattctggacacagaagaactcaaacacccttctcattatcccttcctggactctttcttggctctcaacttatatctcatgcaccagctacctgaagatttcttacagcctcagcacatgaagattcccttcaagactctcattgtcctttcttctagagagtcttccttatcctaagcttaaccaagtgagagaaacttctgaacctccaacatttgggataaaactctataatggctta

SEQ ID NO: 237200 - DNA, 220 bp, Homo sapiens
aaaacaaagcaaacataaaacagcctgagtgtccatcagtgcaagactggttaaataaatcatgatctattcatacagtgggatgttatgaagctggtaaaaacaggtaaatttccaagtgccgatttaaaatgtattccaaaatatattttgtgagtaaatcaaagtggaaatctgcgagttcatacttttgcaaataaaaaaagatccattaacatat

SEQ ID NO: 237201 - DNA, 2187 bp, Homo sapiens
ttcagattgcaaagttatataagaaatttcacaaaggggaaaacacaaaactggtacaactaagtgactgggaaagatataaaatcatgtagactcacttcacccacaaaatggtaactcctgaattaaacttcatgtgttttatttaggctttgtcaagttagctatggttgtattaaagcagattgtttgattttgataaatagttttccttaatacatgggaaaatcgagttgtgtgaataaagaaatataaaatagcttttactcagttgtcccatttgtcagcattgatgggtaataaagattagtgttactttttcttctctagtgtagatattttctcaaaattgtgtgtttgctattgttttatttttgaaggggaaaaaggtatacattttatagctactaggagttcaaatacagtaattagaaaggacacacgaattttgaaatagtattttatgcctcttgatctcaggtacaatacacgagatgaagcagttaaatagcaaagcaagacagaagggtcagagaattaaagtaagtgttttctatatattgcatctgtgttcccattaatctctgttttgttatgtaactgctccttctgaatgttctgaatgtgaagaaaactatgagtaagaaaaagggtgtgttttaaagttaggtttaaataaagccagaagagtaaaatgtttttactcttagttctgtttgaaacagcacctgcctataaattataacctaaatgtttttggataagaaaaaattgggttgtgatgatgtaagcacctttaaatctcttgctagcagatatttaaagtgaaagaaagcacatactgatcagattgcccatgtttccattttaagacaattaaagcttctgtttttttcagactagcctttcttcctggggacaacacttactgagaggctttgctgtggatctttttggaaataaccttcatgtcaatttctcaccttactgtgattaactttctaggcccatgaaataacatcttgatcaggactgatctaatctttatagttttcttttttaatcttctaactgttcagattttaaagttaacaagtaaaaatcaaagcatattaatctttgaatctttatgtccctttttgtaattgttgaggtctttcttgacagcctgtttaatattttttccctaagtttagagattgcttatttgtgggaataaaaagtagggtgacacttttttgtacccacttgggtttttaaattaataacaatgaaatcataaccagcacttgtcacaatttagtttacacactttcatgttacctgctttgatcttcacacgagctcaccaagaagccatttttaaaatcttctccattttagaggtgacagaattgaagctcagaaaaggtagataacttatcagatattaaatgcttaggactttatccaggctgtctctaaattactttccctttttactgtgttgcatttgccaaattataaaagagacccccagaacagttatttctacttgtgcaggacttgaaggacagagtcactagaagtttttttgtttgtttgtttgttttttgagacggagtctcgctgtgtcgcccaggctggagtacggtggcgcaatcttggctcactgcaagctctgcctcctgggttcatgccattctcctgcctcagcctcccgagtagctgggactacaggcgcccaccaccactcctggctaatttttttgtatttttagtagagacagggtttcaccgtgttagccaggatggtctcgatctcctgacctcatgatccgcctgtctcgtcctcccaaagtgctgggattacaggcatgagccaccacgcccggccttagaagtttcaggataacggtactgccatcttacttcttataaaagcagtaattcgtattttatgtattaaaataaatgagccataggatgaatcagacaggtttgcttctagttttcaccactctatttgaccttggacaagagagttaattcccgagcctcagatttctcatctccaaagagctttttctcataggaagtgtgcaagaattaatagaggaagttttatacagtatttagctcatatagaaatctatacattgttcttctttttacattcccatgagaaatttcatgcccattttgatt

SEQ ID NO: 237202 - DNA, 489 bp, Homo sapiens
agtaatgggattgttgggtcaaatgatatttctgtctttaggtctttgagaaattgccacactgtcttctacaatggttgaactaatttacactcccactctcagtgtataagtgttcctttttctccataacctcaccagcacctgtttttcttttcacattttaataacagccaaagaatggatgattttcaaaacaggatttattggagaaactttattgttcaagtagaatcttacctaagtgcttgatacacaagcaaaactagataatatcagatctgctgtgattgtggaaaaataagacaagaaacttccttcacataagccttgagatgcaccttaaagcaacctctcagagtccagctctttaggattacctcggaaaccactgggatagatcaactctacatttaataacagtttatgattatgcttctaatttccttctttgatctcaacatatagtattttctcagttccaatgct

SEQ ID NO: 237203 - DNA, 438 bp, Homo sapiens
tcaatttaatttttttagtattttaggcttaaatatattttgatatatgtcaaaaaatatggatatatatatatcatatatctcaagaatgaatgctagctaacattgaaacttgtagatagtagaaggaaaattaatttgccaataggacattgttgagaattatgttattgccaacctttaacatttattgtaaagtctatgcaatagctgttcttgcttatgtattgaagtgctcaggtagataaattcagcggaatccttaacacttgcccgtagcttggcacctagcacctaggataatagataacaagaaaggccaggcacagtggctcatgcctgtattcccagcactttgggaggccaaagtgggtggatcacctgaggtcaggagttcgagactaggctggccaacttggcaaaaacctatctctacta

SEQ ID NO: 237204 - DNA, 1733 bp, Homo sapiens
  misc_feature (882)..(882): n is a, c, g, or t
  misc_feature (988)..(988): n is a, c, g, or t
  misc_feature (1013)..(1013): n is a, c, g, or t
  misc_feature (1021)..(1021): n is a, c, g, or t
  misc_feature (1029)..(1029): n is a, c, g, or t
  misc_feature (1042)..(1042): n is a, c, g, or t
  misc_feature (1050)..(1050): n is a, c, g, or t
ttgagcaagtggcatgtaaactgagagtgaaataatgagaaggagccagtcatgagaaagtggaaaaaagagctttccagcgtagggaaagcatataagaaggccctgatatggagcagagctgaacatattggaggaactgaaaggaaggaagtggctggtatgtgctgggcatgagggaacacaaaataagtgaagatggaaggaacatggagccagaaaataaaattcgttgtggactgtgtatattagggttccctagagggacagaactaatggaatatacatacaggggagttgatcaagtattaactcacatgatcacaaggtcccacaataggctgtatgcaagctgaggagcaaggaaggtagtctgcaccaaaactgaagaacttggagtccgatgtttgagggcaggaaacatccagcatgggagaaagacgtaggctgggaggctaggccagtctctcatttcacatttttctgcctgcttatattctagccgagctggcagctgatcagattgtgccaacccagagtaagggtgggtctgcctttcccagcccactgactcaaatgttaatctcctttggcaacacacccacagacacacccaggatcaatactttgtatccttcaatccaatcaagttgacactcattattaaccatcacactgtataagaggttataaagccagtaaaaggttaagtggcattttaatttaattaaattgatcagtttatttattttgagatggtgtctgaccctgtcacctaggctggagtatactggtacagttgtagctcactgtaacctccaactcctgggttcaagggatcctcccactttagtcttctaagtagctggaactatagatgtntatcccatactcagctaagtttttatttttagtttttgtagagacaggatctcactctgttgcccaggctgatctcaaactgcggaccttaagtgattgttctgcntcagcctcccagaagtgctgggatnatagttgngagccacngtgccgacattanggcatatntagaactacatatatatatatatgtatgtatgtatgtttatgtatttttttttccattaacttttaagttctagggtgcatgtgcaggatatacaggtttgttatataggtaaatgtgtgtcatggtgatttgctgcacagatcaacccgtcacctaggtattaaccccagcatccattagctattcttcctgatgttctccttccttccaccctgcacccccgaggggccccagttcgtgctgttcccccgacagtgtgtccatgtgttcttatcgttcagctcccacttataagtgagaacatgcagtgtttggttttctgttcctacgttagaactatatttttaagggattatactgattgctatgtagagcacatgaggtaaaatgaaagcagaggtgggcgcagtggctcactcctgtaatcccagcactttgggaggcgaggcgagcggatcacttgatcccaggagttcaaaaccagcctgggcaacatggtgagaccccgtctctacgaaaaatacaaaaattagccaggcatggtggctcatgcctgtaatcccagtcacttgggaggctgaggcaggaggatcacttgagcctgggaggccaaggctacagtaagctgtgaacatgccactgtaccccagcctaggtgactgagtgagacccctgtctcaag

SEQ ID NO: 237205 - DNA, 614 bp, Homo sapiens
gttagaaaggacgtcttagtaaaacatggtctgatttttatcaatctagagtgggaagactcttattctcttttctccacatttagcccagaaatgcaggttgggggaatagaaatgatgcctaaggctccttgctgactcttcagatggaactaacataggaaaagaaattagatcagaaagtatttcaagaaatcccagtcacctcactttgtcatcaagctttataacatcgagcagcttacctcactccttgggtttgtttcctcatcttgagtttgtcatcttcaaggtttcttgtgactgcttacgttacatggcttttctatgctagattttctcgtgaagctcactgagcactgaaaataattctaagaatgtatttttaggattgttataaatgttcagcttcttttgtgacatctttggacgccattgggtgaatgagttctagtgtgttggtcatttttagtcattttttatataaggaggaagtcagtggtatgtggtatttatattttgaaggagcaatctagaaaacaaaacacaatcacagtatcagtaatgaaagcactgaaatcattgcagatccttacagatgttaaaaggataac

SEQ ID NO: 237206 - DNA, 381 bp, Homo sapiens
gggcaggacaagacagctgaatgatatccatctgagccactgtgaatgcactgcagaggctctccaatacctggggacagaaaagaaaggcagaaaggagtcttctgagaagcaaaaggctggaagttgaactggagagcaaagagagttgtccagcaacccaaaaggttggcagcctggcttaaagctgatacaaatctcccatagctaaaacatgagggctgggcaataaagcacaaagagatctttagagtctctccagtgctcatatcccaagcccagtttgagggaaagtcctaatcccttcctcaaaatatttgcagccaaggtgagtgaatctagctaaagctgcaaccaagtccaactacagattaaattgac

SEQ ID NO: 237207 - DNA, 534 bp, Homo sapiens
ccacaggtttacctctgcagctttactctttcctaaacattgctttcgtgtattgcttatgcatgctttctgcgtcccaaaaagtatgtagagaataacagtttaagtcctccagaggagttactacctctactacatgtttcattctcattacatgttgcattgcttattaatatctgtgttttgtagtggacttcatgaggacaggtaatgttaccaactgaattgtgtacccccaaaattcacatgttgaaaccctaatccccaatgtgactgtatttgaagtagggcctacagcaggtaattaaggttaaatgaggtcataagtgtggggccctgaatcgatgagattagtgtccttataagaagaaacagcagagaccttgttctctccaccatatgaggacacagtgagaatgtagccatctgtgagcaggaagggaggcctcaccaggatccaaatgagccagaaccttaatcttggacttctcaccctgcagaactgtgagaaaataaatttctgttgtttaagcc

SEQ ID NO: 237208 - DNA, 661 bp, Homo sapiens
  misc_feature (450)..(450): n is a, c, g, or t
ggtttcaccatgttggctaagcaggtctcaaactcctgacctcatgatcggcctgcctcggtctcccaaagtgctgggattacaggcgtgagccaccacacccggcctatgctcatccagtatttttagcacatggtattggaatgcgggaaaggccatgggggcccctctgttttcagaccctccatgcctcctccagtccctctacctcttgaccctgccagcctgtcaacctgtcctgacctcactcccccctgcacccccatctgttcctgtcctctcctgctgtatcttatcctggatctgaagccagcctagctctgggctcccctgctcctgtcctggggcttctgagggacccagtgggccctgctcagctgcctctcccccaccatatctgggctatttcacattttctcagacttccccaaagctgctctgtactctttnttttttttaaatcagcaaatggcttgatctgctgcttgatagcagacccattaaccacccgtgtatccacatatcaccccttggctggggtggggtcctctccttcctggaggacacctccacttcttcaccaatccagctgtccagcctattcaggtactttactctgtcctttttctctgcctttatcttcagcccatcctttctatcg

SEQ ID NO: 237209 - DNA, 757 bp, Homo sapiens
  misc_feature (450)..(450): n is a, c, g, or t
ggtttcaccatgttggctaagcaggtctcaaactcctgacctcatgatcggcctgcctcggtctcccaaagtgctgggattacaggcgtgagccaccacacccggcctatgctcatccagtatttttagcacatggtattggaatgcgggaaaggccatgggggcccctctgttttcagaccctccatgcctcctccagtccctctacctcttgaccctgccagcctgtcaacctgtcctgacctcactcccccctgcacccccatctgttcctgtcctctcctgctgtatcttatcctggatctgaagccagcctagctctgggctcccctgctcctgtcctggggcttctgagggacccagtgggccctgctcagctgcctctcccccaccatatctgggctatttcacattttctcagacttccccaaagctgctctgtactctttnttttttttaaatcagcaaatggcttgatctgctgcttgataggtaaaataatcaacacttcctatgttcagctcaccctcttgtccctcttaccaccagacccattaaccacccgtgtatccacatatcaccccttggctggggtggggtcctctccttcctggaggacacctccacttcttcaccaatccagctgtccagcctattcaggtactttactctgtcctttttctctgcctttatcttcagcccatcctttctatcgcctataaacatactgaagtttctccactgaaaacaacacaaa

SEQ ID NO: 237210 - DNA, 504 bp, Homo sapiens
gaaatatgctgtttgagattttaagaacataatttttaagttaatgctggcgatgtttcttttgcattttttaaaaatgttgctgactgagaacccaactctcaccaacccctcccttctcaccgtactatattcctggaattcacactgcaaaggcgggtgctttcaaaattcactttttcccacaagcggattcagaaatgcggaggttgcctgccgccttttctaccggacaacattcccgagttattggtgagctggaatgtgactgacttgcattccagggtttcttaaagtcaaaggttgactaaccagcagattccctcagggaaaagaggcagtaaatgtatctttttcaaggtaacattgcatgaacttgtcaaaagacaaaaaggatagaggggtttgtattaaaagaaatgattccaaggtacctagaaataaaagtaatcttgctattcttccaaacaagtgagaaggtctgtggctttcaattttgtgtct

SEQ ID NO: 237211 - DNA, 527 bp, Homo sapiens
tctacccccattttctgtgttctttctgcaactcttgctattagatgctgaacctcttagattgtcatttaaatatttttctcttctcttttccatctctgtttttctttttgtttgttcttccgcaaaattccctttatttcccaagctttctatcagtgtttcattcctgctgtaatatttttttgacatcaattcttctgatttttaaattaacctttttattgtaatataaagcacagatatcagtcatgcccataatcccagcactttgggaggccacggcgggcagatcgcttgagtccaggagtttgagaccggcatgggcaacgtggcaaaatcccatctctacaaaaaataaactgagccgggcatggtggcacgcatctgtagtcccagctactttggaagctgaggcaggaggatcgcttgagctcaggaggttgaggctgcagtgagctgtgattatgccactgcactccagcctaggtgacagagcaagaccttgtctaaaaacaacagcagcg

SEQ ID NO: 237212 - DNA, 2012 bp, Homo sapiens
  misc_feature (1508)..(1508): n is a, c, g, or t
taatgcattatttgttgactgacttgctcatacagtttgcatgactttgcagttctttggaaaagaggtattgctggaaagggagttttatctggaagtgtttcataaagcctactcttatctccattgtgccccaggcaaacttagccactgtgtcctctgtgctcactctctctctcttacacacttcattgccctccttctttcagtcttttttcctcagtatatctccagtgttgaacacagggcctggtagaccgtagacacttggtacatctttgtaaaagaataaatgatgaatgaatgatattgaggtctaaaagctcaggatgagaaagagaggcaaattcagttgcaagtctggcaagtggctcagttggaactcctcagcaggcctggcttgctagaggcctgtgttgagtttgtctgggacaggcctcctgtgaagactcacatctatgatccagcagtaacagctttcactgtcaggcacaaacttcttggctgactgaaagagcaacgtgttagtctctagaagtggagtggactggtgtctgaggtgagtatagcccacttggatacagatgcccagtatttggttacctgccctggggagaggactggtttctccctggtgtatagactcataggctggctacagacatatatacacacacacccaactactgatttgccttgggagtacactgtgcttacttaatattgtacaagctggtgaccagattaccttatgagaaggcacatgatgtagagtgtaaaatccactagatttgaatttagaagacacagattctacttccaactctggtttgccctgagtgtgtaaccttagaagggtcacttcactaggcctgacttctgtctgtaggatgaaggcattaggctacataatctcagagtttaaagctagaaatttccaaagctggaatgagttgcctttgtaggcagtgagtttccaatagctggctggaagttccagaacagggattcttagccttagaagtgtagttgtgttgggcctttccaacccgattgagtaactttcagctgatttggaatcccatcagcatgggccaaactgacgtcagcagggagacagacacagcattacgttgtttactctgtacaacctataagtgaattaatgacctgccatgtcactattttgatagcaacaacatcacccccattgtctaccatttatgaattatcttttttgggcttgtcaattgattggacatctgcatatcctagggcatgtgcagatccacatggtcacatgctcattctctgggtcttcctcctctgagaacctagcatgtggtgttctttgtgacttgcccatataaactgctattaaagccaaagactgggtgccctgtgctggctgtgtccctctgtgagagactcagatgctgaggtctccagtggcacttaatgctccaattgccattgtttgaagaacgacatctaccctgtagtcatangtgcctatgttgacatctctttccacttactctttgcaattctcttctggtgtccatgctgctggtgatctttattaacagtaaaattcttcaagagctccatagccctgaaagaagaattatgccatcacttccattttactcaatttcatttttctggaagcattagaagatgagtgttcacattttccataaatttatttgcagcttgaaagaaggaaagattgagcgctgtggctcacacctgtaatcccagcactttgggaggccgaggcaggcagatcacctgaggttaggagttcaagaccagcctgcccaacatggtgaaactccatctctactaaaaatacaaaaactagctgggtgtggtggcacatgcctggaatgccagctcctcaggaggctgagccaggagaatcacttgaacccaggaggcggaggttgcagtgagccaagatcatgccactgcactccagcctgggtgacagagcaagactccatctc

SEQ ID NO: 237213 - DNA, 3830 bp, Homo sapiens
  misc_feature (3239)..(3239): n is a, c, g, or t
  misc_feature (3562)..(3562): n is a, c, g, or t
  misc_feature (3802)..(3802): n is a, c, g, or t
gactagggaccgcctgggtgaggtgaggacctggtggccgcagttgtggcactgtgcgcaggcgctgaactgaccggacggagcgggcggctgtggcctcgccagctggtttaaaaatatccttttttgctgaaggaacacatttgctggtatagtttcagaatgtcaagtactgtgtcctactggatcttaaattctacaaggaacagcattgccacattgcaagggggtagacgcttatactccaggtatgtctcaaataggaataaattaaaatggaggctcttttcccgggtgccacccaccctaaacagttccccatgtggtggctttactctgtgcaaagcctacagacacacatcaacagaggaagatgattttcacttgcaactcagccctgagcagataaatgaagtgcttcgagctggcgagacaacccacaagattcttgaccttgaaagcagagtcccaaattcagtgttgcggtttgagagcaaccagctggctgccaattccccagtggaggaccggcgaggtgtagcctcctgcctgcaaaccaatggactgatgtttggcatcttcgatggacatggtggtcatgcatgtgcccaagcagtgagcgagaggctcttctactatgtggcagtgtccctgatgtcccaccagaccctggagcacatggagggagctatggaaagcatgaaacccttgctgcccatcctgcattggctcaagcacccaggggacagtatctacaaggatgtcacatctgtgcatcttgaccacctccgtgtctattggcaggaactgcttgatttgcacatggaaatgggactaagcattgaagaagcattaatgtactccttccagagactggattctgacatctcgctggaaatccaggcccccctggaagatgaggtgacaaggaacctgtcactccaggttgctttctctggggcaacagcttgcatggcccatgttgatggaattcacttgcacgtggcaaatgctggtgactgccgagccatccttggtgtccaagaggacaatggcatgtggtcttgtctgccccttacacgtgaccacaatgcctggaaccaggccgagctgtcccggctaaagagggagcaccctgagtcagaggacaggacgatcatcatggaggacaggctactgggcgtcctcatcccctgcagggcctttggggatgttcagctgaagtggagtaaagagttgcagcgcagcattctggagaggggcttcaataccgaggccctcaacatttaccagttcacacccccacactactacactccaccctacctgactgctgagcctgaggtcacataccacaggctgaggccccaggataagttccttgtgctggcctcagatggcctgtgggacatgctgagcaatgaggacgtggtaaggctggtggtggggcacctggctgaggcagattggcacaagacagacctggcccagagacccgccaacttggggctcatgcagagcctgctgctgcagaggaaagccagcgggctccacgaggctgaccaaaatgcagccacgcggctgatcagacatgccatcgggaacaatgagtatggggagatggaggcagagcggctggcggcgatgctgacattgccagaggacttggcgaggatgtacagggatgatatcactgtcactgtggtgtattttaactcagaatcaatcggtgcatattacaaggggggttaagaatctcccatcctattgtcaaggttaacataaatgctcttctaaaatgtttcacttactcctaaactagctatccaaaccttactattaaaagcgcaggcagatttaatttgctaaatagactaacaggaggaaaaaaacaaacagcctagctttaaaaaacagtgaaatagcagtgatttcatgtccctgtatgttctgattaagtcttatatgcagagaggacagagcataaagtctatagaattggcttgggcttgtgtagccccagtcatttgataaagatgttgttaaactgtgtcagcctgagccttcaaagggtaaatttaatcatgattctgagaataaagaacttcaggagcttcttaggtcttgccacaaaaatctgcaaatttgataattctcctgaattcacaatcatggacttgtagactatgaagagatattttatttgtttgtcttttatttaaattactaaggtctaggtttacaaagcatactacaggacccttttctatgcaatatcctaacttttttttttgtgattatgcttgtgagaaattttgtaatactacattctagttctgttttcgtttattttaaaactgaatccttaaacttgcaaacacgcctactgtaagcatgcttggaatgacttgttttggttttcagctgataggatctatgcctctggaccagctgaacttactggtgcagctttttgtgccctctactgagtcccattccagaaactttgagccatgctaggaggtaactagtctatgccttaactcctgacctttcctgcattagtaaaatttcctcctgggctgagcctttgggggttgattcacagcatttaagctttctgattatacctctcaaacattcttctgtcaattccacacaatccttctacctctgctatgctgaacccctcattcaccctgcacctgccaactgcaaaatattgtctgaaagaatctttcacatgttcctgcttcctatggctgcaggaaaggagaaaatgtgattgcatgtggtagttgtggtgatagacgtttagacaggacaggttaatttagcggattgtggacttaagattcaacctctatctggagaggtgaaaacacaaaggcttaaggacaacagtttctaaccaagtttctctgaatcctttcctgagaggtggtgggcaggagggaggagtgagacttatcagatgggacgcttgccccaagactgtgggataaaccaccattgctagtcctcaggaattagaccatatttagtataggagttggggcaaaaataaaagtgtaatttgtaatggtttctgtgggctgtagactctttgtatttacttggaaattcagttatgtggatccattttggagatgaatttcatctcatgagttgctgtggcatttaaacaacaggaaatgtgtccctaaatggaaacaaatataatcccacaaaaccaacanttttatttgcctctactacgtcaggcagaattcttcaattaagttgaactacatttgttgatcccttttctcatcttacccctttatgccacctactgaaaagaaaaacaaatagctaggtttggtttcctgttttttgtctatgtcccagctgacattcagtcaaatgttgggatacttctaatttggtggtgtttctttgtacatttttcagtgcaactgtttagtcatgtgttttcatctaagaaattatcttttgaatatttaagccttgatccttttattctgaaaccattaatattccttcttggctgggtgcagtngtttacgcctgtaatcccagcactgtgggaggccgaggcggatggatcacctgaggtcgggaattcgagaccagcctgaccaacatggagaaactccatctctactaaaaatacaaaattagccaggtgtggtggtgcatgcctgtaatcccagctactcgggaggctgaggcaggaaaatcacttgaacccgggaggcggaggttgcggtgagccaagatcgcaccattgcactccagnctgggcaacaagagtgaaactctgtctc

SEQ ID NO: 237214 - DNA, 3778 bp, Homo sapiens
  misc_feature (3187)..(3187): n is a, c, g, or t
  misc_feature (3510)..(3510): n is a, c, g, or t
  misc_feature (3750)..(3750): n is a, c, g, or t
gactagggaccgcctgggtgaggtgaggacctggtggccgcagttgtggcactgtgcgcaggcgctgaactgaccggacggagcgggcggctgtggcctcgccagctggtttaaaaatatccttttttgctgaaggaacacatttgctggtatagtttcagaatgtcaagtactgtgtcctactggatcttaaattctacaaggaacagcattgccacattgcaagggggtagacgcttatactccaggtatgtctcaaataggaataaattaaaatggaggctcttttcccgggtgccacccaccctaaacagttccccatgtggtggctttactctgtgcaaagcctacagacacacatcaacagaggaagatgattttcacttgcaactcagccctgagcagataaatgaagtgcttcgagctggcgagacaacccacaagattcttgaccttgaaagcagagtcccaaattcagtgttgcggtttgagagcaaccagctggctgccaattccccagtggaggaccggcgaggtgtagcctcctgcctgcaaaccaatggactgatgtttggcatcttcgatggacatggtggtcatgcatgtgcccaagcagtgagcgagaggctcttctactatgtggcagtgtccctgatgtcccaccagaccctggagcacatggagggagctatggaaagcatgaaacccttgctgcccatcctgcattggctcaagcacccaggggacagtatctacaaggatgtcacatctgtgcatcttgaccacctccgtgtctattggcaggaactgcttgatttgcacatggaaatgggactaagcattgaagaagcattaatgtactccttccagagactggattctgacatctcgctggaaatccaggcccccctggaagatgaggtgacaaggaacctgtcactccaggttgctttctctggggcaacagcttgcatggcccatgttgatggaattcacttgcacgtggcaaatgctggtgactgccgagccatccttggtgtccaagaggacaatggcatgtggtcttgtctgccccttacacgtgaccacaatgcctggaaccaggccgagctgtcccggctaaagagggagcaccctgagtcagaggacaggacgatcatcatggaggacaggctactgggcgtcctcatcccctgcagggcctttggggatgttcagctgaagtggagtaaagagttgcagcgcagcattctggagaggggcttcaataccgaggccctcaacatttaccagttcacacccccacactactacactccaccctacctgactgctgagcctgaggtcacataccacaggctgaggccccaggataagttccttgtgctggcctcagatggcctgtgggacatgctgagcaatgaggacgtggtaaggctggtggtggggcacctggctgaggcagattggcacaagacagacctggcccagagacccgccaacttggggctcatgcagagcctgctgctgcagaggaaagccagcgggctccacgaggctgaccaaaatgcagccacgcggctgatcagacatgccatcgggaacaatgagtatggggagatggaggcagagcggctggcggcgatgctgacattgccagaggacttggcgaggatgtacagggatgatatcactgtcactgtggtgtattttaactcagaatcaatcggtgcatattacaaggggggttaagaatctcccatcctattgtcaaggttaacataaatgctcttctaaaatgtttcacttactcctaaactagctatccaaaccttactattaaaagcgcaggcagatttaatttgctaaatagactaacaggaggaaaaaaacaaacagcctagctttaaaaaacagtgaaatagcagtgatttcatgtccctgtatgttctgattaagtcttatatgcagagaggacagagcataaagtctatagaattggcttgggcttgtgtagccccagtcatttgataaagatgttgttaaactgtgtcagcctgagccttcaaagggtaaatttaatcatgattctgagaataaagaacttcaggagcttcttaggtcttgccacaaaaatctgcaaaattttatttgtttgtcttttatttaaattactaaggtctaggtttacaaagcatactacaggacccttttctatgcaatatcctaacttttttttttgtgattatgcttgtgagaaattttgtaatactacattctagttctgttttcgtttattttaaaactgaatccttaaacttgcaaacacgcctactgtaagcatgcttggaatgacttgttttggttttcagctgataggatctatgcctctggaccagctgaacttactggtgcagctttttgtgccctctactgagtcccattccagaaactttgagccatgctaggaggtaactagtctatgccttaactcctgacctttcctgcattagtaaaatttcctcctgggctgagcctttgggggttgattcacagcatttaagctttctgattatacctctcaaacattcttctgtcaattccacacaatccttctacctctgctatgctgaacccctcattcaccctgcacctgccaactgcaaaatattgtctgaaagaatctttcacatgttcctgcttcctatggctgcaggaaaggagaaaatgtgattgcatgtggtagttgtggtgatagacgtttagacaggacaggttaatttagcggattgtggacttaagattcaacctctatctggagaggtgaaaacacaaaggcttaaggacaacagtttctaaccaagtttctctgaatcctttcctgagaggtggtgggcaggagggaggagtgagacttatcagatgggacgcttgccccaagactgtgggataaaccaccattgctagtcctcaggaattagaccatatttagtataggagttggggcaaaaataaaagtgtaatttgtaatggtttctgtgggctgtagactctttgtatttacttggaaattcagttatgtggatccattttggagatgaatttcatctcatgagttgctgtggcatttaaacaacaggaaatgtgtccctaaatggaaacaaatataatcccacaaaaccaacanttttatttgcctctactacgtcaggcagaattcttcaattaagttgaactacatttgttgatcccttttctcatcttacccctttatgccacctactgaaaagaaaaacaaatagctaggtttggtttcctgttttttgtctatgtcccagctgacattcagtcaaatgttgggatacttctaatttggtggtgtttctttgtacatttttcagtgcaactgtttagtcatgtgttttcatctaagaaattatcttttgaatatttaagccttgatccttttattctgaaaccattaatattccttcttggctgggtgcagtngtttacgcctgtaatcccagcactgtgggaggccgaggcggatggatcacctgaggtcgggaattcgagaccagcctgaccaacatggagaaactccatctctactaaaaatacaaaattagccaggtgtggtggtgcatgcctgtaatcccagctactcgggaggctgaggcaggaaaatcacttgaacccgggaggcggaggttgcggtgagccaagatcgcaccattgcactccagnctgggcaacaagagtgaaactctgtctc

SEQ ID NO: 237215 - DNA, 406 bp, Homo sapiens
agaaaagggagtcctgctggagcaatgttcttgagtagataaaagggactggtacctagttcacaagtggagggattagttttagtgtaaaaaccgaaacagtcaatttgtagtctcactctgctggaaggcaaagtttctgggcaaagatgctgatgggtaggtgtggctcactgtttagaattcaactcagatgtcaccccatctgaaaggagctactcctgccaccattttttttttttttttttttttttttttttagtcagagtctcactctgttgccaggctggagtacagtggcacgatctcggctcactgcaacctctgcctctcaggttcaaacgattttcctgcttcagcctcccaagtagctgggactacaggtgcatgccaccacactcagcta

SEQ ID NO: 237216 - DNA, 727 bp, Homo sapiens
aattgtcactttttcatttgtttatttccttctaaaaatgtgagtaaatgttttttggtgttaggttgcaaagtatgtactttaaaaaaatcattaggcattcattttcagggatcttatctactttctcatctccatattttgttaaagataatattgccagatgtaaagaaaatggtttattctacctaaagagtggataaggagagaaaattatgatgaaataaaaattataagcaaagtttatttaaactaaatttaaatgtgaaacatcacctttttcctaatcagatttgatattgctacgaatatatattgatgatattgtcactatataaacataagagaatttaactttctattaccaaatataattgaatatatttataagttcatctgtactgttttattgtaatgagttaaaaatatgagataggggctgggcacggtggctcatgcctgtaatcccagcactttgggaggccaaggcgggtggatcacctaaggtcaggagtttgagaccagcctgaccaatatggtgaaaccctgtctctactaaaaatatgaaaatttgccaggtgtggtggcatgcgcctgtagtcccagctacttgggaggctgagacaggagaattgcttgcacccgggaggtggagattgcagtgagccgagatcgcgccactgcacttcaacctgggcgatggagcgatactctgtctcaaaaaaaa

SEQ ID NO: 237217 - DNA, 405 bp, Homo sapiens
aaagacagagtctcgctctgtcgcccaggctggaatgcagtggcgtgatcttgtctcactacatcctccacctcctgtgttcgagtgattctcctgcctcagcctcccgagtagctcggattataggcacctgccactgctactggctaatttttctatttttagtggagacaggtttcaccatgttggccaggctggtctcgaactcctgaccgcaagtgatccacccacctcagcctcctaaagtgctgggattaccggtatgagccaccacgcccagcaccttcttaactctttctgggctacttttgattttgggtaaaattgtttgagatttcaagccggttgcagtgatgtgcacatgtagtcccagctagatgggaggctgagagaccctatttcttt

SEQ ID NO: 237218 - DNA, 411 bp, Homo sapiens
atgtaaatgagattattctgaaatgtatatataaaggcaaaggaactagaatagctcaaataattttgaaaaagaacgataagatgggaggagtctgcccaatttcaagattactacatagctacagtaatcaaggctgtggtatggatacagtgatagacacatagatcagtgaaacagaatggaaaacccacagacctgagtaaatatgcccagtcatgttacacatgattttggacaaaggtgcagaaacaattgagtggaggaaagatatctttcagcaaatagtactggagcaattagacatgcgtcggcaaaaaaatggatatcaacccaagtctcataccatataccaaaatgaattcaaaatggtttatggagttaaatgtaaaaccataaaacttctagaaa

SEQ ID NO: 237219 - DNA, 1381 bp, Homo sapiens
ctttaccactctaatttttttttgtttgagtaaatgagagcaggccttctcagaggcagctgacatcagacagagacttcctttgcggcctctctggttctgttcctctcttccccgtagctggtatttgtagtgacacctgggagccacagatttgcttagcaacctttctccagggtgaacagggtattcacaactcctgaaccaaggcgtgtggctggtatcattttgtggggccagaacgcattgcgtggagaaattcagtgatgacctggtccccacgcctgctgctcagggccccatcaccctcgtgactgtcagtggtgctgcttcccacgtctcctaagagggcttcaggagaacgtagaacgaggtatctgtctcttcctttcggacctggcctttccatttggccatatgtcagaatttccagctgccctaggggcccaggaatctgtattttagttgctttccaaataattctgctgcccagctgtatttggagactatagccttaaatcagtgattccccgtcagtggtgactcatgaagagcttagatgtgggcctggtgtgtggttggtggcaaggggagtctttcagatcccttctgcttgttgctgttggtggcaggagcgtgcatgttatggtggctcaggcctaatcccatctgtttgggcatctcgcctgtctggaaaacaggtcccggagccatgcacaccaagctcctagggaaggcagagagcactccccgactcttaacaaagacatgtggaggtggacgtctgcccttaagcactcagggttcaagaaatgctgcaaagaacaagagctgcagccaccaggagatgcaggtgactcccatggaccagaaaaaggacagaaacatgacagaaaactggtagaagaaccaaagaggtttggcatttcacagggcacctgactctggagcccacagtcaccctcctcggggccctctccatcaacgtcatggatcaagttcctcctgatgaccaagccaccaaagagagctgatggttatgttcagttgactctgctgaggcagtcagggcagtgtgatctcctcctgggaattgctgtatttgaaatgattgaaataggctgggcgcagtggcttatgcctgtagtcccagcacttgggaggctgaggcgggcggatcacgaggtcaggagatcaagaccatcctggctaacgcggtgaaaccccgcctctactaaaaatacagaaaaattggccaggcgtggtggcaggtgcctgtggtcccagctactctggaggctgaggcagaagagtggcgtgagcctgggaggcggagcttgcagtgagccgagatcgcgccactagagtgagactccgtctc

SEQ ID NO: 237220 - DNA, 478 bp, Homo sapiens
gtagccaggaacatggaacttgcaaagtccttttatgaagaaacaagatattctcaatcccattggcagactacccctttgaagactggctaaattgggtcctgttgcccttaccagctgtgagggagcctgcaagagggagtgttgagcttttccagcagctatagcggaaggaaggaaggaaagaaggaaggaaggggagaagggctagaattgcctgttgggtaagctaaccaacagtgcgtgctatcaagggctaggctgggatgtcacagcttcatggccttgctctggagtgacagaaagtgagctccatcaaaaaaaacatggaaactactgtttcagaacagtgatttttgggccaggcatggtagctcatgcctataatctcagcactttgggaagctgaggtgggaggatcacttgaggccaggagttcgagaccagcccggccaacatggcaaaaacctgtctctac

SEQ ID NO: 237221 - DNA, 613 bp, Homo sapiens
acagattgctaaattttatcaatagatatttctgtttactgggcacacagttaaattctatttctctgccagcctccttgtatcaacttacagctaagtggttgagtctgactgattgaatgtgggctaaagtaatatataccactttagggcctgactcgtaaatatatccttatgatctctctatctctacctctaattcctttccagtcatagtggtaggaagcaaatgatttcaaagcccagatgatgacagagacccatcttggaaggggcttggatccctgagtcactgcttggaggagagctgcctgagatggcttcctgatcatgaacatccacgttggactttgcctgagcaaggaataaacatcctatcttaagacaatgtgatttggagtttttggcatatgaccagcttcaattacgctgcataatttacatgtcttttccctctttcccaggtaactcatatgcctcccagatgtttatatttggaaagagggaagaagacccaaataataactgagatcaaatttctcaccaactcactgggactctgagagatgcatttcatttgatttaaagaaaataaattactttgaaactagac

SEQ ID NO: 237222 - DNA, 449 bp, Homo sapiens
gcaaattccctggacaaagagacatcctctgtcttgctctctatcttagggaggaaacatttgatctttcaccattaaatatgttagctttaggtttttggtaaatgttttttaaatcaggctaaggaagttcctcttttccccctagtttgctgagagtttttcttatgaatctatgttgacttttcgcaaatgatttttctgcatctcttgagatgatcatttaaggaagaaataataccaattctacataaacataaaagaggggagacggccaggcgcggtggctcacgcctgtaatcctagcactggcgctctgggaggctgaggtgggcggatcacctgaggtcaggagttcgagaccagtctggctggtgaaaccccgtctctgctaaaaatacaaaaattagacgggcgtggtgatacactcctgtaatcccgggtacttg

SEQ ID NO: 237223 - DNA, 386 bp, Homo sapiens
tgctatctacacatgatttgacttaatttcattatttcacttgaatattacctgtattttactacccacattttctatttccgcttgaagcccaataacctgcatcaactttttcttattattaaaatcactggttacactgatgagataaaaagtataataacaatattaatttcaggtataaattggaaccttattaactaaaaaattttaaggcttataattgattttagagaaattaaattagttgaatgctgtttataaataccacattttataaatcctgatagggcttataaatgagtccattgtttttcttttactcacactcagtgattaagtaattagcaccctgttattgtcttacgtgagatatagtacatgtt

SEQ ID NO: 237224 - DNA, 500 bp, Homo sapiens
tgttatcattatctcactatcacataaccactcagtaagatacagaacactcacagaccactgagaccacttttataactgaaatgtaaaagttaagtgattttccatgattgcatagctgtagaatggtggatataaactagattcggatttcttgacttttcatcttttttcccccaatatgcctatacagaatgtttgtttccttttaaagtactgagtttaagagtttaaatccaaatcaaacctgagaattaattttcatttctgatgctaaataccaaggatttctccattagtccaggtaacttcattgtgaagaaatgataaagagaataaaagggagtaagataaacactgtgcaggtataacattaaattaccctttttttctaattttatacaaatgaaaaaaaggatacccaactgcaaagtccctgagatgctatttaaattcaagtacttctgaaatacaaatacatgataacttaattatttgca

SEQ ID NO: 237225 - DNA, 439 bp, Homo sapiens
gtgctgggattacaggcgtgagccccatgcctggcctccagtcctgcttctttgggttcagccctatgctataaaatctcaccttcctcaggccttttgcagacacatcagatcctctggctttgtatctgttcttggtgctttggacaccacctccaccccaatgcctttgtttttctccaggccctctttcttcatttattcatctgcctctgcatttctgtaactttctgagtagtgggtgctcaggttgttcacgtatcttcatcaagaagtctgtctgggataaagcagaagttgcaatgattgccttctgaatcacccctcagctgaggagcaccagcaggcaaaaccagtccactgagcttgtaagcaggtctgtggcatcagcttattcttgttgctagagagaattcggagtaggtgctacaaggtgctt

SEQ ID NO: 237226 - DNA, 504 bp, Homo sapiens
tgcttctatttcataggagctagaaagggtacatagctgaacagaaattatatccaatcctccacgttgtttaaaggttcaaacttaggggaaaagtgtgtctggtctttcaaagtgaaaaaaggaaggccaagatcaaaaaatcaatcacatacctcccaaactcatccaatgactaatctgtactactgatctattactggttggtttacggtggggactaagtgaaagagttttataaaaatatatatccctggactctacactgaggtaactcctgtaaaatcagattaataaaggattcgtgcactttttaaattcagacatttctgtaggaaaactacattcaccttgatgtatctgagataccttatagagagaaaaaaaagaatttgggaagcacttacagaatggcagaaaaaagtataacttaatataaactcaagtgacaagacagccaaagtgctgtagtgggtaattttctttaagtgaaaggaagctgag

SEQ ID NO: 237227 - DNA, 406 bp, Homo sapiens
gattatttgaaaatcaatgtttcaatgtttcctatttccatttacctcttgatgaacatttgagttttttcgagtctggggctattataaataaagctgctgtgaaaatttgtacacaagattttatgcatgtatgtttttatttgtcttcagaaaatagctaggcttagaatttccaagtcattaagtggatgtgtatataattcttttccaaagtagatgtattatattacaatcccacaaggaatatatgagagttccagttgctccacatcatccacaacacttggtattttcagctttaagacttcaatctagtgagtatgaactggtatcccattttgcttttatttgcatttttctgatgagtggtggcatgcatccttcatgtacttattggtcattt

SEQ ID NO: 237228 - DNA, 152 bp, Homo sapiens
caaggacattctggtgtgtcggtcatgggctgtacggatggtcacacacacagctgactcaaaatttcagatgtgcctcaattactctgaaaatgaaagtactgatttcttccaattttatataaaatatatatttaggacttacagactgt

SEQ ID NO: 237229 - DNA, 251 bp, Homo sapiens
catgcataataaacacagctaaagacaattcactctcttcttttatgtatctacagctggattcagatagagctcacctaataataaatgctaaaagataaaattaataataaaataattatttaagatatctcaacactaagagcatgcatggcacattattttgaagactcaaggggtaaatatgatctctgaaatatatataacaggaatgaagaggaaattttagaatcttatgtttcccaatctca

SEQ ID NO: 237230 - DNA, 187 bp, Homo sapiens
attttaattcatataaactacagatcctttatgcagaaatcacataccattaagacaaacaataacttaaaaaaatccagctagtgtgttttgtatctgttaaaatgttgactctcaaatgttaaaaataaaaatgaaatgttcatgctcttcttaatttattcccttttctctctctctgtctcta

SEQ ID NO: 237231 - DNA, 1824 bp, Homo sapiens
  misc_feature (1747)..(1747): n is a, c, g, or t
ggcacgaggctgggggtcagagagaagggagaggcctccttctgaggggcggcttgataccggtggaggagctccaggaagcaggcaggccttggtctgagacagtgtcctcaggtcgcagagcagaggagacccaggcagtgtcagcagtgaaggttctcgggacaggctaaccaggaggacaggagccccaagaggccccagagcagcactgacgaagacctgcctgtgggtctccatcgcccagctcctgcccacgctcctgactgctgccctgaccagagtcatcatgtctctcgagcagaggagtccgcactgcaagcctgatgaagaccttgaagcccaaggagaggacttgggcctgatgggtgcacaggaacccacaggcgaggaggaggagactacctcctcctctgacagcaaggaggaggaggtgtctgctgctgggtcatcaagtcctccccagagtcctcagggaggcgcttcctcctccatttccgtctactacactttatggagccaattcgatgagggctccagcagtcaagaagaggaagagccaagctcctcggtcgacccagctcagctggagttcatgttccaagaagcactgaaattgaaggtggctgagttggttcatttcctgctccacaaatatcgagtcaaggagccggtcacaaaggcagaaatgctggagagcgtcatcaaaaattacaagcgctactttcctgtgatcttcggcaaagcctccgagttcatgcaggtgatctttggcactgatgtgaaggaggtggaccccgccggccactcctacatccttgtcactgctcttggcctctcgtgcgatagcatgctgggtgatggtcatagcatgcccaaggccgccctcctgatcattgtcctgggtgtgatcctaaccaaagacaactgcgcccctgaagaggttatctgggaagcgttgagtgtgatgggggtgtatgttgggaaggagcacatgttctacggggagcccaggaagctgctcacccaagattgggtgcaggaaaactacctggagtaccggcaggtgcccggcagtgatcctgcgcactacgagttcctgtggggttccaaggcccacgctgaaaccagctatgagaaggtcataaattatttggtcatgctcaatgcaagagagcccatctgctacccatccctttatgaagaggttttgggagaggagcaagagggagtctgagcaccagccgcagccggggccaaagtttgtggggtcagggccccatccagcagctgccctgccccatgtgacatgaggcccattcttcgctctgtgtttgaagagagcaatcagtgttctcagtggcagtgggtggaagtgagcacactgtatgtcatctctgggttccttgtctattgggtgatttggagatttatccttgctcccttttggaattgttcaaatgttcttttaatggtcagtttaatgaacttcaccatcgaagttaatgaatgacagtagtcacacatattgctgtttatgttatttaggagtaagattcttgcttttgagtcacatggggaaatccctgttattttgtgaattgggacaagataacatagcagaggaattaataatttttttgaaacttgaacttagcagcaaaatagagctcataaagaaatagtgaaatgaaaatgtagttaattcttgccttatacctctttctctctcctgtaaaattaaaanatatacatgtatacctggatttgcttggcttctttgagcatgtaagagaaataaaaattgaaagaataatttttcct

SEQ ID NO: 237232 - DNA, 1856 bp, Homo sapiens
  misc_feature (1779)..(1779): n is a, c, g, or t
ggcacgaggctgggggtcagagagaagggagaggcctccttctgaggggcggcttgataccggtggaggtaagctggccgaggctctgtgaggagtcaaggagctccaggaagcaggcaggccttggtctgagacagtgtcctcaggtcgcagagcagaggagacccaggcagtgtcagcagtgaaggttctcgggacaggctaaccaggaggacaggagccccaagaggccccagagcagcactgacgaagacctgcctgtgggtctccatcgcccagctcctgcccacgctcctgactgctgccctgaccagagtcatcatgtctctcgagcagaggagtccgcactgcaagcctgatgaagaccttgaagcccaaggagaggacttgggcctgatgggtgcacaggaacccacaggcgaggaggaggagactacctcctcctctgacagcaaggaggaggaggtgtctgctgctgggtcatcaagtcctccccagagtcctcagggaggcgcttcctcctccatttccgtctactacactttatggagccaattcgatgagggctccagcagtcaagaagaggaagagccaagctcctcggtcgacccagctcagctggagttcatgttccaagaagcactgaaattgaaggtggctgagttggttcatttcctgctccacaaatatcgagtcaaggagccggtcacaaaggcagaaatgctggagagcgtcatcaaaaattacaagcgctactttcctgtgatcttcggcaaagcctccgagttcatgcaggtgatctttggcactgatgtgaaggaggtggaccccgccggccactcctacatccttgtcactgctcttggcctctcgtgcgatagcatgctgggtgatggtcatagcatgcccaaggccgccctcctgatcattgtcctgggtgtgatcctaaccaaagacaactgcgcccctgaagaggttatctgggaagcgttgagtgtgatgggggtgtatgttgggaaggagcacatgttctacggggagcccaggaagctgctcacccaagattgggtgcaggaaaactacctggagtaccggcaggtgcccggcagtgatcctgcgcactacgagttcctgtggggttccaaggcccacgctgaaaccagctatgagaaggtcataaattatttggtcatgctcaatgcaagagagcccatctgctacccatccctttatgaagaggttttgggagaggagcaagagggagtctgagcaccagccgcagccggggccaaagtttgtggggtcagggccccatccagcagctgccctgccccatgtgacatgaggcccattcttcgctctgtgtttgaagagagcaatcagtgttctcagtggcagtgggtggaagtgagcacactgtatgtcatctctgggttccttgtctattgggtgatttggagatttatccttgctcccttttggaattgttcaaatgttcttttaatggtcagtttaatgaacttcaccatcgaagttaatgaatgacagtagtcacacatattgctgtttatgttatttaggagtaagattcttgcttttgagtcacatggggaaatccctgttattttgtgaattgggacaagataacatagcagaggaattaataatttttttgaaacttgaacttagcagcaaaatagagctcataaagaaatagtgaaatgaaaatgtagttaattcttgccttatacctctttctctctcctgtaaaattaaaanatatacatgtatacctggatttgcttggcttctttgagcatgtaagagaaataaaaattgaaagaataatttttcct

SEQ ID NO: 237233 - DNA, 300 bp, Homo sapiens
attgatgggatgttaaggactgacaaggaaaaaggaagagaaaagagaagattatgaaatgcaaatgtgtatatttagcaacaaatcagatggccagagtaaatgacaaataccaataaaaaatggctgagatttcattctttggaaagtcagtctcagatgaggaagctgtaagtattcacaaagttcatggaaaacactaaatttctttaggtcatcaaaaaaatatgagaagatactccttcaaacatgaaattattctcacattcataggagtattctaatttaaaagtattccta

SEQ ID NO: 237234 - DNA, 455 bp, Homo sapiens
ggtttttttgtttgtttgttttgttttttacatctttgccagcatttggtattgtcagactttaaaattaaaaaaaaaattcagatgtgaagtggcattttactgtggttttaaaatgcatttccctgattgtttccccttttcatgctttttggtagtttctgtttcctcttctgttaatgcctgtataaggtgagaatttgtccactttttactctcccttctgttacttctttttcacgaatttatggtagtggctcatacattagtttgcctgcttttgcctttgtccctatagtctgctttcacacacagtggccaagaatgagccttaaaataagtaatttatgttctgccacttctgtattctaaactctgtagtggctcctcatttcatgcagagtagaagccaaagtccttatagcgtcccttctgtcttacatgatcattctcca

SEQ ID NO: 237235 - DNA, 453 bp, Homo sapiens
aggttcatgtagactggacacggctctccttcgcgagatattcttggagtcattgcatttgtgctgttgatcctgggagctgggctatacctctggaagaaatgtgggaagaagaagaagaagaaagatgaagaggaagaagaggaagaggagcagaaggaggaggaggagcgggaggagacaggaataggcaggttgcatttctccatcgaggcccagatatctcccctcccccactagaatctgggttctctttctcctgaaagaatgtcattgtttagctatatgaataaccctagatatagcatcgagttaacatgtccaagatatttgttactggaaaaaactgaacagcaatgcatggtatgatttaatttttgtaaaagtgtatagataggtagatagaaagataagcacagaataaaatctatactacatgacagattaaaaaca

SEQ ID NO: 237236 - DNA, 2210 bp, Homo sapiens
  misc_feature (1738)..(1738): n is a, c, g, or t
aattccctaccctcgacctgtcgatgccccgcggccccgcccgccctcttaagcctggctcagccctcagggcccgcccgaagtctaccgagcccgagtggcctaccgagcccgagtggccccgcagcgtccaggaggcgcccgctccgcggtggcgctcttggaggtggtgtcggagagccgccgagcgtgcggtcccgggatggctctaccccggccaagtgaggccgtgcctcaggacaaggtgtgctacccgccggagagcagcccgcagaacctggccgcgtactacacgcctttcccgtcctatggacactacagaaacagcctggccaccgtggaggaagacttccaacctttccggcagctggaggccgcagcgtctgctgcccccgccatgccccccttccccttccggatggcgcctcccttgctgagcccgggtctgggcctacagagggagcctctctacgatctgccctggtacagcaagctgccaccgtggtacccaattccccacgtccccagggaagtgccgcccttcctgagcagcagccacgagtacgcgggtgccagcagtgaagatctgggccaccaaatcattggtggcgacaacgagagtggcccgtgttgtggacctgacactttaattccaccgccccctgcggatgcttctctgttacctgaggggctgaggacctcccagttattaccttgctcacccagcaagcagtcagaggatggtcccaaaccctccaaccaagaagggaagtcccctgctcggttccagttcacggaggaggacctgcacttcgttctgtacggggtcactcccagcctggagcacccagccagcctgcaccatgcgatttcaggcctcctggtccccccagacagctctggatctgattctcttcctcaaactctggataaagactcccttcaacttccagaaggtctatgcctcatgcagacggtgtttggtgaagtcccacattttggtgtgttctgcagtagttttatcgccaaaggagtcaggtttgggccctttcaaggtaaagtggtcaatgccagtgaagtgaagacctacggagacaattctgtgatgtgggagatctttgaagatggtcatttgagccactttatagatggaaaaggaggtacggggaactggatgtcctatgtcaactgtgcccgcttccccaaggagcagaacctagttgctgtgcagtgtcaagggcatatattttatgagagctgcaaagagatccatcagaaccaagagctccttgtgtggtatggagactgctatgagaaatttctggatattcctgtgagccttcaggtcacagagccggggaagcagccatctgggccctctgaagagtctgcagaaggctacagatgtgaaagatgtgggaaggtatttacctacaaatattacagagataagcacctcaagtacaccccctgtgtggacaagggcgataggaaatttccctgttctctctgcaaacgatcctttgagaagcgggaccggcttcggatccacattcttcatgttcatgagaagcaccggcctcacaagtgttctacatgtgggaaatgtttctctcagtcttccagcctaaacaaacacatgcgagtccactctggagacagaccataccagtgtgtgtattgtactaagaggttcacagcctccagcatactccgcacacacatcaggcagcactcnggggagaagcccttcaaatgcaagtactgtggtaaatcttttgcatcccatgctgcccatgacagccatgtccggcgttcacacaaggaggacgatggctgctcatgcagcatctgtgggaaaatcttctcagatcaagaaacattctactcccacatgaagtttcatgaagactactagccctgccaggcacaatgactcacgcctgtaatcccagcactttgggaggcagaggtgggtggatcactcaagtccaggagttcgagaccagcctgggcaacatggtgaaatcctgtctctaccaaaaaaatacaaaaatcagctgggggtggtggcacatgcctgtggttccagccactcaggaggtcgaggtggcgggatggtttgagcacaggagacggaggttgctgtgagctgagatcgccccactgcttttcaacctgggtgacagaaccagaccctgtctcaaaac

SEQ ID NO: 237237 - DNA, 332 bp, Homo sapiens
aacaggaggcaaaccctcctcctctactccctaacgtccccaacctcttgacttaataccagcaaagaccattgttacgttggagtcttgtttgctaagctacacaacttacagagccattcatgccagtgacatcactgacaagagacaaagaaatcatacgggacaatttgaacaataaagaacgaactacctttgtttttcccagtacccagtgatctaatctggacttttccaagatagccacacagctctctttgctagcaagaggtgtttgatgtgctgtgaatgccaagtaataatacctgcaaaataaaagaattaagtgaagc

SEQ ID NO: 237238 - DNA, 1705 bp, Homo sapiens
  misc_feature (1128)..(1128): n is a, c, g, or t
  misc_feature (1218)..(1218): n is a, c, g, or t
  misc_feature (1321)..(1321): n is a, c, g, or t
  misc_feature (1414)..(1414): n is a, c, g, or t
  misc_feature (1440)..(1441): n is a, c, g, or t
  misc_feature (1578)..(1578): n is a, c, g, or t
  misc_feature (1580)..(1580): n is a, c, g, or t
ttccacctgacagcaatcgagtgaactacgtctactgcaggctccaaaaagtcaggttagaacccagatgagtctgatttcacagcctgagcacctaatgtcactctgacactctgcccgccacggccctatgttgttcctggcctggccagaacctgctcatgatggcctcacatcttgcttatggaccatcctagcagtttctcatctgcgagtgactggattcatcctgcagtcagcatcctgctcacccactcctgagtggccacctaccacaagtgggaggaagtacagctcctcgtttggctccttgggcctcccagatctgtcctgactttccatcctaatcactcccagttgtcctgactgtactgtctccacagccttcccatggtgccgaagtcagagctgactttgtacagcctttgctcataccctgttctgatccttccctctgacgtcctccactgcaacccagcccagttccaacttacttgcatagagctcccataagcattcagcccatagaacccggacatctctcccttcctctggacttaactgcattgatctctttcagttatctatactctgcataaacttccttgtggcatactttacactggtgttttgtttaactgaggtactgtggataacaccaaaaccttcttgcataggtgtggaaaaggccttttgtgagctggtccctgtctggctttacatagaacaggctacttaacttcgctaaacttcagtttcctcatctgtaaaatggggaagaataatagtatctaccacatagggttgttttgaggattaagtgtacttaacttagtgcctggtatgtagtaatgctcagtaaaatatattgtgttgtcatttcccaccatttcttcccacctgcccctgtatttgttactccagtcatgttgagctacagctctctaatccctctgcctggagattcctcctctgaccattaacccatttatgccggaagttgcaagttttttttttgtgaaaactcagaccttggcgatgaccgtgagcgtcggatataaataattccaccaagcttaatttttttttttattttgagactgggtctcactgttgccaaggctggantgtattggcgcgctcacggctcactgcagctttgacctcccaggctcgtgtgatcctcccctgtcagcctccctagtagctgcgcctacnggcatgtgccaccatgcctggctaatttttgtattattttatagagacagagtctccctaggttgcccaggttggtcttgaactcctgggctcaagtgatccnccttcctcggcctcccacagtgctgggattacaggcataagccattgcacccagcctaaaatgcaaactaatttaacattgagtcacatttangctgggcgtggtggctcacacctgtnntcccagcactttgggaggccaaggcaggcggatcacgaggtcaggagatcgagaccatcctggctaacacggtgaaaccttccctccgtctctactaaaaatacaaaaaaatagctggacatggtggtgcgcgcctntngtcccagctaccccagaggctgaggctggagaacggcgtgaacctgggagacagagtgtgcagtgagccaggatcgtgccactgcactccagcctgggcgacagagcaagactcagtctcaaaag

SEQ ID NO: 237239 - DNA, 607 bp, Homo sapiens
aaacagaaggtcatatgcaaagcatagtaattcatttcatgataaactggatgctgtggaaagtgacttgagcaggcagagttcctttcttctcagttaatttactcacagctgtagataacattcatggaaaggaaaagagatatttggatgatatgtaaacagatggatttatgtttgactatgtgcatgcaagagagttaagtatacatgatggacatgttttctgaaatgtattgtttttcaagtttttccacttccttgggcgactacctcttcccctgctacatgtacccattttctctgaatagaatttgtacggcaaaaacatagaaacaaaaaaaagccccacacaaacaaaaaaaaaaaacaggaaagagtcgaagttaagcttttgacatttaatatatacttttctgagctcacggaatacaacagtcttcaaaacaagactgttgagggagaaaggggttttctaggttcttgatgtttttttggtaaacttttagattctcttgccccagaggcagggaactaaaaaagtagcaaccctagaaaatttgaatgtaagctcaaagcaaataaaacgaaaaacccacttcctgta

SEQ ID NO: 237240 - DNA, 392 bp, Homo sapiens
ggaattgaaggtttaaccctacccagtaggtcctccgatactcaagaactccttcccggagcggagacacagatcatggctatcagatgggtcccttggcagctcagctgcagtgtcactctgtccacccaggctggagcgtaatggcacgatctcagctcactgcaacctccatctccagggttcaagcaattctcctgcctcagcctctcgatgaaaccaacttcataaaggctgtggcatttcttccaagacactacgatgaagatgacatcatcaggagacttagggaaagctacgacttttcaagtaactaaagtgggtgaccctcactactttgtgggctcaatagctgtgtcttcatttataaaaataaaatggtagagactgta

SEQ ID NO: 237241 - DNA, 1881 bp, Homo sapiens
  misc_feature (890)..(890): n is a, c, g, or t
  misc_feature (1114)..(1114): n is a, c, g, or t
  misc_feature (1535)..(1535): n is a, c, g, or t
attaatatatgaagaaaactgaacagtccttaatctgtgtaggcattacatccatttgtaggaggtatttggtgacttggtacaggtttctttgttttgtgtggtttgttgaagatgcaatgaccgggatgaatgagtgaacagctgggtgaggcaggggatgggcattatgaagttgggggatatattgtagatgaaacagatgaccctaaggaggtaatgagggggtggactaaagaatgacgaatgggagaagggaaaatattgaattcatcttagcacaagtatatcatcctttgaagaataatccaaaacacattccagacattaattgtgaaattcctgaaaaatgtgggtgtgcttaacatctcccaggctatggtgcaagcagagatgatagtgttgctttagcctgtaaatacaagagggtaggaggtggtaaaatgagtggaagggaaatacatttagtgaagcgggttcctgtaacactgtgttccgtatggcacgtttggtatcaggattttggagacaccccagtaaagctcatttaattatttgagggagaaacagtagactagccaagcatgcatgaataacacattgaaagctttccttctcagaggtctaattctgcaaagctgcattttcaaagatctgacttgcctttgcatggaaatcagtcattcattcattggtcttctatgctgtacaaggccttctgctggggtgagggggaaactagggagcccggggacctctccaacatattctttgctctgtacacttaatcaagataagaaataaagacagcaagactgcaaaaagtctattatgtagacttgcaaaaagtctacataataatataaattcaagccaagtagaagtgattntgcaagtctgtatgattaattggctagtgaaatatatggataaaattagttgtaggaattaaagcatctgaagtgatctcttgaggctctggtggcaaagcagaaaggggaatttgaatttgaactaggtttaaaagtgtgagtagtagccctttcttttggcaggggaggtgatcctacccattctccttagagcctgtgcaattggtctcagtgtttctcancatctaagaatgaagctgcattcttaatgctttagtagctgtgcttcaaaacggcaagtttccttttgagagtgattttctctttgttctagcttgtttcactaggcggataagcgtgggcagtaaactgggaggtgtccctttatcagcacctctcagcttcacccaccctgctgcttgccctgggcagtagcctggtcacatctttgaaaacctctgtttagtcaagacttcctaagtcaagacagaggaatggttgaatatacctctatgtaagaataccctcaaggtaaacactaaactcttacgtgttttatcttgggcccacatgaaaaaagtaaatgtttttaaagaacctattttcctttgttagttgcaaagtgaacaggtatcaattccttacctccctcctccagtcccngttaattccccacatgaaaatacctacatgttggtggaaaagtgtaatgttcaagaacttggggccggccgtggtgtctcatgcctgtaatcccagcactttgtggggctgaggcagatggatcgcctgaggtcaggagttcaagactagtctggccaacatggtgaaaccttgtctctactaagaatacaaaaaaattagccaggcttggtggcaggcccctgtaatcccagctactagggaggctgaggtgggagaattgcttgaacccaggaagcagaggctgcagtgagctgaaatcgcaccactgcactccagcctgggcgacaaagcaagaccctgtctc

SEQ ID NO: 237242 - DNA, 330 bp, Homo sapiens
caaatgttaattcagtaatggttgtagaatggattgtgtacaggacagtctaggttagtggcctcaaacttgatcatgtagaagaattacctgtgtgttttgtaaattcctggcttttattccaccttccccagaactggttcaggccacacttaagcacctgaagtatgctgatccaaattgtaacatgctgcaagtgtaaaataccagatttcaaagacatctaaactaatggatataaagtattatgttaatatgttttctaattgattacatcttgaaataatattttacattcattgaattaaataaaatgtattattaaaatga

SEQ ID NO: 237243 - DNA, 429 bp, Homo sapiens
tgtatctaagaccttccttggacatctatgataaatcaaaatatctttatcatgacaagaacagtgatatacacccgggtggaatcttgatttcatgagtatgtatttgacataatttattacgaaaaagtgaattaaaactttgtgttacaagtctttccatctaaattagaccccaagatcaagagatttggtgtttgtcttccttacatctgccattggtagccccaactttccagagaaaaagcaacaactgttagaaatgttatagatataccaagggtatgctaaatcaaccagtgatgtatgttgtgaaagtgacaagcttttgatcaagatagaaaacaagataaaaactatgagtgttttaggatgaggcatcttctcattaaagttcagttacattgtctctgcccagcttttttactg

SEQ ID NO: 237244 - DNA, 439 bp, Homo sapiens
gtggggatggaggtatattgtgtttttttaaaggccataagaaaataattgtcttgataaaattttaacttaggactgggtatggtggctcgtgcctgaaatctcagcagtttgggaggctgaggcaggaggatcacttgagcccaggaaggagaccagcctgagcaacatggcgagacccctaatctctacaaaaaatgttaaaatttgccaggcatggtggtgcaagcctgtagtcccagctgtttgagaggctgaggcaggaagattgcttgaacctaggaggtcaaggctgtagtgaacagtgtttgctataccacattccaatctggtgacaaagcaagaccctgtctcaaaaaaaagaattttttttaacttgagggaaaaaaagttttacaaactgtagacacacagcaaaacagaaacaggaaaaaaagta

SEQ ID NO: 237245 - DNA, 238 bp, Homo sapiens
gcttgaggccttatcatagttagtggtctgtgaattttgtcaagagagggtcacaggccaagatgcagactgacttcctttttacttgtctggaatcttattactcagttcctcaattattttttactcaataattggacattttccttagaatccatgttgttcgaggtctcgtcctgtaggtaaggtgtgtagctcattgaggctttgagaatatggagagaatgttaagagtttg

SEQ ID NO: 237246 - DNA, 435 bp, Homo sapiens
ggttttaagctacccagtttgtattaacagtactaggcaatcctaggacactaataaagggactgtgcagcttttgcagtaatttaaagcatgttcttgactattttaaggcaagaaaaactgcttacaatatattaataactgaagagcaggttataagacattctatatgctctgtcctattatctaaaaaatacctaaatgtatatacgtatattccttcaatttatttcctatacatcatagagttaaaacaagttttttttctaattagtagcatattgaactttatttcctttattatattttcctgaattattcaaattttataaggagatacaaatctatgaattttttttgaagaacaatgtattttacttggttttttctgctgtgatttaggcatctatgtcacctaataaaaaacacaattat

SEQ ID NO: 237247 - DNA, 254 bp, Homo sapiens
gaagatatggtggttgaagttacaaggactccttgttgtaaccaggagccgatcttgatcaatggagctacataaagcatgttgaaatgcaaagaaagatagaaggagcctgtggtactgaaaacattgaggattctctgaaccagccttggctaccccaccatttaacttgagaaaaaatatttctttcctctttaagctcttcttctaccaaatgtatcaggaaataaaaatatattaaattaaaacaaata

SEQ ID NO: 237248 - DNA, 401 bp, Homo sapiens
agtcatttgcaggataaatgtttgtatatattcctccttatattaacttaggttaattttcttacagagggattaagtcctagcaaatagattatccacataaggtttatacttctgttgtcaacaattatttctttacgtgtggtattcttaactgctctcattccttctgacatgtaattatataatgtattatactatttaaatgtcttgtgtgattataaagtatctctttaatttgattaaaaaggtaagatataaattactttaaaaggtaggatttatccttttcttcatgtgcaactgtataaactggcaaagcaataagatttaaattgtttttattgtattaattactccaaataattgatatttgatgtgaataaacttaatttcggtta

SEQ ID NO: 237249 - DNA, 528 bp, Homo sapiens
ccaacaagtctgaattgctcccccatcacctacactgataaacaaccaccagtgatctgatgcatttcccaattcatgagccacagctctgacttaaacagtacgtgccagccttcatggagtttaggatctaattagtaaacattatcaataccaggacaatctaaataaaagcggaagggaaaggacactctaagcagaggaaatagaaggagcaaatgtgtccaggcaggtgtgtgcttatatgagcacctatccaaattggacagcaggatttgttataggggaactgggggagatgaggcaagtctcaaggacacagaagaacagatttggggtgggggtagggcttatatttaggaccaccaacctaagagaagccagagttttctcatgagaagtgtccaacaataaaatttgttaccttgctagtggctgtgcattcccagtccttgaaataatctgttcaaggagcatttgtgtgacttttgtctgcctggataataaaataacttctaaagaaaaaaa

SEQ ID NO: 237250 - DNA, 238 bp, Homo sapiens
ccaacaagtctgaattgctcccccatcacctacactgataaacaaccaccagtgatctgatgcatttcccaattcatgagccacagctctgacttaaacagtacgtgccagccttcatggagtttaggatctaattagtaaacattatcaataccaggacaatctaaataatctgttcaaggagcatttgtgtgacttttgtctgcctggataataaaataacttctaaagaaaaaaa

SEQ ID NO: 237251 - DNA, 1008 bp, Homo sapiens
  misc_feature (800)..(800): n is a, c, g, or t
  misc_feature (805)..(805): n is a, c, g, or t
catttctacagagtggcttgggctgaggtaaaagaagctagagaagagagccgctgatgcactgcacctgcctaggctggagttaaggtactaatcacagcagcagtgctgggaaagatgcctaggaaggatgaggatgacaggcactattttggtgtgctccccaccacagcaataacagaaagatagtccaggtgcagtgtctttcacctgtaatctcagcctcccgagtagctggaactacagccatgctacacctagctaatttttgtatttttagtagagacagggtttcaccctgttgcccaggctggtctcaaactcctaagctcaagagtctacctgccttggcctcccaaaatgttgagattacagttgtgagccactaaacctggctagttttaaaagtttgctagctgatgccaaattggtttccatagaggttgtaccaatttacagtctcaccaacaatctgtgagcctgcttgtttccccacaccctcacgaacacaatatgttggtctttgccaatctgataggtgaaatatagcatctcattattttaatatgcatttctcaagaggcatggtgactcacacctgtaatcccagcatttagggaggcagaggcaggaggatagcttgagttcaagacctgcctgggtgatatagtgagaccccccccccattctccacaaaaaggaaaaaaaaaaagaccaaaaaacagtgtaatttgggattcctttccttatgaatatggttccctgtgtttaaagccatttgtatttccatttctatgttnatggnatgcctgcacattgaaagcggctgatgtatcataccaaaagccttacatttacagatagccttgccggatggttcaattctttcccggttaaaccacaagggggcgctaaaatccgagccagtacgtccctttgacaggccctatggacgataacagcaggccgcacagcggcgacgcacgaactcgcgacaccgggcaggca

SEQ ID NO: 237252 - DNA, 823 bp, Homo sapiens
aaacccactctatgtaaaatgcactatttatttctcataatatactctttaatgtgcttatattctaggtatcattgcctttaagttgcttttttaaatgaagtatcattattattattatttgagacagattctggctctgttgctcaagctggagtgcagtggtgtgatcttggctcactgcaacctctgcctccctggttcaggcaattctcatgcctcagcctcccaagtaagtgggactacaggcgtgcgccaacatgcccagctaatttttgtatttttagtagagacagaatttcactatgttgtccaggctggtctctaactcctcaagtgatctgcctgcctcggcctcccaaagtgcctgtgcccagccttttaattggactttaatgtgcaaatgcagtctcttcagaaagcctttttttcttctttttttaaatcagcctacatcatgctatgacaattttcatataaagatgctgtctcggaaagaaaaggattgggagtttgaaagatctatggcttccattccaaaaaggattactacagaagtaattactttgaaagaaaagtgatatatgttttggagaaaggtggaaatgaagcaaggccctgaatatattaccaagatgcatattacactgaatgaaatcatccgttgcccttccggatctatcccgtggatgcagagcaagagcaacccatctttgttcagcatcccaggagacaggcctctattgacagcatcagtctggctcctttgccctctgatttcccattgaatgtggccagtgggagggcccagcagatggagggc

SEQ ID NO: 237253 - DNA, 775 bp, Homo sapiens
catttctacagagtggcttgggctgaggtaaaagaagctagagaagagagccgctgatgcactgcacctgcctaggctggagttaagataccgaaactggcaacacccagagacatttccctcctagtcataaaggaagccagcagcagagccagaaataatattcaaattctggatccactagaccatattgcccgtctgacaaattatacgcttacatcctgcttcagttctaataaggtacccacaatgccgggttctctacccactgggagcaaacaagggaacgtgcagacgctggacagcatacgatggatgcctgcaactcctgtacctgcccccgaatgccaccagaaatatgccatctctactgaaacagcttttccaaccctgagcacgtttatgaacacggaaaagagtgtaaaggggtcaaatgcagactttacaaaaagaaacccaagatggagattcctgttcgggatatactgcaggtggggttcataacaacatagtcctttacttgccaagtaatctgaaagcaactaattagagaacctgtaagggatgccaatcccagttttcaaaatggcatttcaaggaaattaaatcttatcatgtaaataggtcaagaaatccgtttaaataacgtatctgcttctctctaggtaatctacaatgttgttagactatcaagccagtagttttaaatatgtgttggagctccaggattaatccctggttgatctgagggagtcactttgtctaaccaaataca

SEQ ID NO: 237254 - DNA, 1154 bp, Homo sapiens
catttctacagagtggcttgggctgaggtaaaagaagctagagaagagagccgctgatgcactgcacctgcctaggctggagttaaggtactaatcacagcagcagtgctgggaaagatgcctaggaaggatgaggatgacaggcactattttggtgtgctccccaccacagcaataacagaaagatagtccaggtgcagtgtctttcacctgtaatcccagcactttgggaggctgaggtgggaggatcgcttgagcccaggctggtctcaaactcctgagctcaagcgatctacctgcctcagtctcccaaggtgctgggattacaggtgtgagccattgcgctcagcctggtcattatcatttctatcaccagataccgaaactggcaacacccagagacatttccctcctagtcataaaggaagccagcagcagagccagaaataatattcaaattctggatccactagaccatattgcccgtctgacaaattatacgcttacatcctgcttcagttctaataaggtacccacaatgccgggttctctacccactgggagcaaacaagggaacgtgcagacgctggacagcatacgatggatgcctgcaactcctgtacctgcccccgaatgccaccagaaatatgccatctctactgaaacagcttttccaaccctgagcacgtttatgaacacggaaaagagtgtaaaggggtcaaatgcagactttacaaaaagaaacccaagatggagattcctgttcgggatatactgcagcctacatcatgctatgacaattttcatataaagatgctgtctcggaaagaaaaggattgggagtttgaaagatctatggcttccattccaaaaaggattactacagaagtaattactttgaaagaaaagtgatatatgttttggagaaaggtggaaatgaagcaaggccctgaatatattaccaagatgcatattacactgaatgaaatcatccgttgcccttccggatctatcccgtggatgcagagcaagagcaacccatctttgttcagcatcccaggagacaggcctctattgacagcatcagtctggctcctttgccctctgatttcccattgaatgtggccagtgggagggcccagcagatggagggc

SEQ ID NO: 237255 - DNA, 1117 bp, Homo sapiens
catttctacagagtggcttgggctgaggtaaaagaagctagagaagagagccgctgatgcactgcacctgcctaggctggagttaaggtactaatcacagcagcagtgctgggaaagatgcctaggaaggatgaggatgacaggcactattttggtgtgctccccaccacagcaataacagaaagatagtccaggtgcagtgtctttcacctgtaatcccagcactttgggaggctgaggtgggaggatcgcttgagcccaggagttcaagaccagcctgggcaacatgagatggggttttgttgtgttgcccaggctggtctcaaactcctgagctcaagcgatctacctgcctcagtctcccaaggtgctgggattacaggtgtgagccattgcgctcagcctggtcattatcatttctatcaccagataccgaaactggcaacacccagagacatttccctcctagtcataaaggaagccagcagcagagccagaaataatattcaaattctggatccactagaccatattgcccgtctgacaaattatacgcttacatcctgcttcagttctaataaggtacccacaatgccgggttctctacccactgggagcaaacaagggaacgtgcagacgctggacagcatacgatggatgcctgcaactcctgtacctgcccccgaatgccaccagaaatatgccatctctactgaaacagcttttccaaccctgagcacgtttatgaacacggaaaagagtgtaaaggggtcaaatgcagactttacaaaaagaaacccaagatggagattcctgttcgggatatactgcaggtggggttcataacaacatagtcctttacttgccaagtaatctgaaagcaactaattagagaacctgtaagggatgccaatcccagttttcaaaatggcatttcaaggaaattaaatcttatcatgtaaataggtcaagaaatccgtttaaataacgtatctgcttctctctaggtaatctacaatgttgttagactatcaagccagtagttttaaatatgtgttggagctccaggattaatccctggttgatctgagggagtcactttgtctaaccaaataca

SEQ ID NO: 237256 - DNA, 1067 bp, Homo sapiens
catttctacagagtggcttgggctgaggtaaaagaagctagagaagagagccgctgatgcactgcacctgcctaggctggagttaaggtactaatcacagcagcagtgctgggaaagatgcctaggaaggatgaggatgacaggcactattttggtgtgctccccaccacagcaataacagaaagatagtccaggtgcagtgtctttcacctgtaatcccagcactttgggaggctgaggtgggaggatcgcttgagcccaggagttcaagaccagcctgggcaacatgataccgaaactggcaacacccagagacatttccctcctagtcataaaggaagccagcagcagagccagaaataatattcaaattctggatccactagaccatattgcccgtctgacaaattatacgcttacatcctgcttcagttctaataaggtacccacaatgccgggttctctacccactgggagcaaacaagggaacgtgcagacgctggacagcatacgatggatgcctgcaactcctgtacctgcccccgaatgccaccagaaatatgccatctctactgaaacagcttttccaaccctgagcacgtttatgaacacggaaaagagtgtaaaggggtcaaatgcagactttacaaaaagaaacccaagatggagattcctgttcgggatatactgcagcctacatcatgctatgacaattttcatataaagatgctgtctcggaaagaaaaggattgggagtttgaaagatctatggcttccattccaaaaaggattactacagaagtaattactttgaaagaaaagtgatatatgttttggagaaaggtggaaatgaagcaaggccctgaatatattaccaagatgcatattacactgaatgaaatcatccgttgcccttccggatctatcccgtggatgcagagcaagagcaacccatctttgttcagcatcccaggagacaggcctctattgacagcatcagtctggctcctttgccctctgatttcccattgaatgtggccagtgggagggcccagcagatggagggc

SEQ ID NO: 237257 - DNA, 539 bp, Homo sapiens
tgcaaaatatcaggttgttaaaggtgacttaatgatatgttaaatagctgacactcattgctataaaaatgtagtgcatccatggtccgcatgcccagccatggcaggtaggttaagttcagccctttggaaagcaatatggcaacttgtgtgagtaatcaggaaaatggctggaaccttggttcccatcattgccactgtgggaattttactttgaggaataatcaccccaaagggagagaggaagtgagcacggacatgttcattataacattatttgtaattgggataactggtgaaaaacccatgtcagtcaaaagcttaaagaagaatctaaatggagaatggatttgtaaattacaccttctcagtggcatatcattatccttaataatgataaaagtgtatggggacaatgacaatgctcatggcataatgacggcaaaaacggtctctgcattgtgattacaatgaaataaacttatatttgtttaaaagatttgaaaccaaatataaaaaataaaaacaatatgaattct

SEQ ID NO: 237258 - DNA, 472 bp, Homo sapiens
  misc_feature (357)..(357): n is a, c, g, or t
  misc_feature (377)..(377): n is a, c, g, or t
cctttcatggcaggctgagggggttatactatagggaggattttaaaaagaggagctggtggactggtgagcagggcatataggtgacacctagccaacttgagaggtcagaatacatgattccagaaggctaaggagaaggctgccagttttgctcaaacctgcaccgtcacaagatattcagaagatgaaaacgtagaagacacccctgaattaaaaacacttacatagcagtggctggaattactccaaaacgtgcccagtgatcgcactgtaacatgggattttctcacccaaataggcaactcatgcttcctgagtgtaatcaaagcatgtggtgttttggggccatatgcnccaggtttctattttagaanccttcagctgtcttgcttatgtactgtatgtaaatttattctttttaaaaatcacttttatttgattttgacttattaaatgctttaaaagccca

SEQ ID NO: 237259 - DNA, 397 bp, Homo sapiens
gcggttatctacgtctgttgtgtctatacggtggagtatttgcagacgctctgccagtgtgcaatgcttcccagccctgcattcagggataccaacttgggtgctgaaaagcagcgatggcaggactatttacaccacggaaacaggcaaaaactactgatcaagccttcactgttttgtttatattgtcttgacttagaaagtgattgcaatgttaataatgcagattaaattgaagcgtacagtgcctataaaccattacattatgaatagtataaaaaattgaggaagccgtgtggctcacaaattcagcactttgggaggccgaggcaggaggatcacttgagcctgggagttggaaaccagcccaggcaacatagtgagacctcatctcttt

SEQ ID NO: 237260 - DNA, 477 bp, Homo sapiens
tgttccaaagaatatggtgacagccatgaggtaagaggcacaggtggagaaggctttgtgcctgccctctaacgaaggcatcttcaagacggcaatgaagatacacaggtaggaaatgaggacaatcataacacagctgatgacaataaaacttgagaatgccatgatcacaatgccattgaagtgggtatcagagcaagagagtttgagcagtggcggggtgtcacagtagaaatggttgatcctattagaaccacaaaaggacaacctaaaagtcatccctgtatgtatggctgcatttccacaacctgctaagaaggaggtagctattagcaaaaagcaaattctcccagacacgagaactgggtagagcagggggttccaaatggctgcatagcggtcatatgccatcatggccaacaggaagcactcagtccccaggaaggagccaaagaagtagaactgggcagcacatcc

SEQ ID NO: 237261 - DNA, 307 bp, Homo sapiens
agcatgttactgtctgtaatttatttatttatttttaaattttttcaccagtagagcgctgagaggaatctgtaatttagtatttgctttgagataagcgaatgcttcctttgtagtcactccttttcactcattttctgaaaacgttttcctttagaagtatgaaacttctggttttccttctttcaaattcgaatctcttcagacatatctaagatgattgccctacaagccaaccttgtatagctgaggagaaaagaaaatcagacttgttcccagcaactaaataaaattgtttttaaaaatc

SEQ ID NO: 237262 - DNA, 562 bp, Homo sapiens
acattggggattaacacttcaacatatgaattttggagggaaacattcagtccataacatatatcttttaaacttacaacatctactcttaggagatgaggtgtttgaaattgtttccatgctttgtgacagagtcctgaagaataaactgttttgaatcatagcagttggttttcaagtcaaagaacttagagcaatttaaaaaagaaaagaaaacaaataatgcatttgccagagtaataaaggcatcttcacatcggcacacacaaagttattgagaaaagtacaaagaaatgatcaaatggaatttcactgatgattgtataagatttcagttaaagcacaaaaccactaatgatatccatttaagagtcatcctccttcactgcctacttcctcctccacttccttccccagcatttcagaattgtgactgtttatgtcctgtgggcaaatattaattgcagtacttactcctgcatgcatgaaatgtttccatatttttcattagttaagaaatctttcagtctcccaacttggaacatatagtatctttaaaaaa

SEQ ID NO: 237263 - DNA, 502 bp, Homo sapiens
caccctgactttataatttttagtacacaatatttctactccccatatctttgctctgcacggtcaccttgcccctcccccaccacctaagaaaaaacgatggtcatatggtcatgccaacaggtgaagtgtataaggtgtctgcatattttgtgtaacttcagagttagattgaaattaccaggcacagatttaggcttgtcattttgtttacacataggggaaaacaattccatttattaaacgttttgtgtaactgcaccacccaagttttgccaagccgaaaacttggaccttttctatttagtgactttttagttttagttttcataacctggagatgaggccgttgtttttgcatgatgtatgtagtgtctcataactggagtttgctttagttttacagtatctgtactccttggatttttcaagagttattttataaacaggtgatgtatttctcattgaaaacaccatttaaaaaaacagccaatctcaaaaa

SEQ ID NO: 237264 - DNA, 412 bp, Homo sapiens
ggtctggtggtttgtttgcttgtgacagagtcttgctctgttgcccaggctggaatgcagcggcacaatctcagtttactacaacctccacctcctgggttcaagcgattttcctgcctcagcctccagagtagctgggattacaggcattgcaccatcatgcctggctaattacaattttagtagagatggggtttcaccatgttggccaggctggtcttgaactcctggactcaagtgatccacccacttcagcctcccaaagggctggggttacaggtgtgagccaccatgcctggccctgaattcatttttggtatgttagagtccttgattgaagagtaaagcaaagagtagaaataaatagtcaagtatgcaaatgaagcagcactcacagtgaggactgctccac

SEQ ID NO: 237265 - DNA, 585 bp, Homo sapiens
cccaaacataccccatatcctggaagcaccttacttgattttctttgtagtaattttttctgctatggaaataagccgatttcaggaggagtagagatggggaaggtaggggaaaatattacagaaaagttaacgtttgagaccatttatgccatccatcaaagaaggctgtgtgatctgaaattacacaatatgatcagaaaataattgacagacgtgatggatgaatctgcttcgacacagccgtgtaaaacgaaacataatttcttcttgtttactggcacacgtactgttcgatttgatttgattcatctgaaccatgtgattgcaacagtttcttcttctttccctcatactttctctctgtggactgtattcacatatacagtgagtaatacccgtgcgtttatttttatgcgttagaaagcaggaagggtaaacagatacgcatgtctgatgctcagttttatagatagaatttatgatttcaaagaggtccctgatgtgttctgtctgtggtcttcagatattgttcctccgttcagaagggagtgaaatcagagtgtaggattctgcattaatctc

SEQ ID NO: 237266 - DNA, 245 bp, Homo sapiens
gatacaagtgttccaaaattgattgtggtgatggttgcacaactctgtgaatatacaaaaaactattgaattgtacacttcacacaggtaaactggcacgtgaatacctcgacaaagctattgaaaaaaagaaagagatccttttgtagttcatgggcataatgattggtattcacgcacatgtgtgagatgtgccacactcaaaccttgttatgacctcggcacattacccatctgacctgaaa

SEQ ID NO: 237267 - DNA, 1938 bp, Homo sapiens
  misc_feature (935)..(935): n is a, c, g, or t
tgatatgtcatttttttgtttgtttgtttttgttttgttttgttttgtttttgagacggagttttgctcttgttgcccaggctggagtgcaatggtgcaacctccgcctcccaggttcaagcaattctcctgcctcagccttccgagtagctgggattacaggcatgtgccaccacgcccggctaattttgtatttttagtagagatggggtttctccatattggtcaggctggttgtgaactcccgacctcaggtgatctgcctgcctcagcctcccaaagtgctgggattacaggcgtgagccactgcgccttgcctgatatgtgatttttaatcatttgaacaagactgttattctgggatcaaaagattttattatgtttttaagtgttattataaagaagatgtagttatcactgctgcaatcctagtgggatttgtacacattggtgtatagcttggtataaaatttgagtttataatggaaataaatatttaaaaagttaacacttaaaaaagaagttaagtggtatgagagtttttataatgaaaccttttagacatttagagaatagcaccacatccccattgaaaatttaagtgaaagagagagagagaatgtgtgtgtgtgtgtgtgtgtgtgtgtgtgtgtgcacatgcctaccagttttttactatggagtctctgttttcttaagttataaatagaaacaacaaaaatatcttattagattactgtgaggataaaataatatctaaactggaaggttgtaattacttgataaatggtagccattattagaattgttattattaagaacaatgtacagtttctatcttttcagcatcttaaggaatttcataaatgtcatatacctatggtcccatgaacttatcctccttcttatgtttaaggactataattagattattnccttaacttgattcagtattacgtttgttctttcttaagagcaaaaccgaaagaaaaacacaaatttaaaaacaattttatcaaaattgcaaatgcagttaagaacttcgacaaaacaataaaaaagaagcacccaggggaaataataataatgtctataattatattatccagaaatatcctctgctaacaccttggaccatttctttctagttttgtgtgcataggcatgtgatcttatttactaaaatggattcatattgtagatatagtagcatttcagatgtttaatgatgatgatggtgttgatggtggcagtgacaatgatagttaacaatttatcatgtttactatgtgtcagtcactgtgctgagaccttttcatagattgactcatttaactcttaccctgagaagcaggtgctcttattatcttcatgtaacagatgaggaagttgagattaatgatttgctcaagatcacatagcaagtcacatgtgctcaaggtaacacagccagtggcagagtgggcttaacccctaatttatacgtatctgctcaattaaactttctattaagtcattagtgattcatctccttttatcatatgaaaagttaatgattacaacatataatatagtaatttgttttggaaaatgccctctttcaaacactgttagtgtttcacaaaactttaaaaaaaaaaaaacttactaggggccgggcgcagtggctcacacctgtaatcccaacactttgggaggctgaggtgggtggatcacctgaggttgggagttttcaccagcctggccagcgtggtgaaaccctgtctctacttaaaaaaaaaaaattagccaggtgtggtggcgcgcgactgtaatcccagctacttgggagactgagggaggggaattgcttgaactcgggaggtggaggttgcagtgagccgagatcacgccactgcgccactgcactccagcctgggtgacagaaacagacgtctc

SEQ ID NO: 237268 - DNA, 809 bp, Homo sapiens
ggttgttgttttacaccgtagataaccaggcaggcagaattcatctccgaggaactggttctttttccttgaaagctgattcatggccctttggttatggcaggaagggtcccagttcatctgcagagatgagctgctctgcacagaggagcgataggaattcaggagttgtcttcttgcagctaaatgatgagttgtaggggtaagattggaactgggagaagagaggatacaggagaaaagcttgagtaaaaagaaggtgaaatggtagaaagctggactctaagaaggaaagtaactggtgagaaattctgacggatggccaaggaactcgaggaatggagatgtctaatgttctattttaagttggttcctgctccttggtgctgctctattacctcgaaactttcagaaaaagtctgacagaagagacagaaactataaactataatttggtttcagttcaggtcactaaatgccatttctggcatccctgaacttgtgaatgaccaatgatcatatgatcatgtgagttactatcatctctaacctgtgtacaactgccacagcatgaattagtgaaaggatacagagtaaagtcagcaaagaagaaaggctttggagcaaagccaggagaaaccacaggcttccaagtgaaccctcccggtggagttgcatgaggactcacttcattctcccagcaacagtgtgtgacaacccatggtggtgttgccaattggaaaagctcacccaagccttgttgtccaaagctcttaatgaggagtcagtcatggagacatacaaaaaaa

SEQ ID NO: 237269 - DNA, 1575 bp, Homo sapiens
tggatagagtttcactcttcttgcccaggctggagtgcaatggtgcaatcttggctcaccacaaccttcccctactgggttcaagcgattctcctgtttcagcctccccagtagctgggattaaaggcatgtgccaccacgcccggctaattttgtatttttagtagagatgaagtttctccatgttggtcaggctggtcttgaactcctgacttcaggtgatctgcccgcctcagcctcccaaagtgctgggattacaggcgtgagccaccgcgcccggccaagatcctgtatcaaaaagaaaaaaagaagtagcagacacagtgtagtccccgtggaccctgcactggcctcccttggtgtggtcactgttcttcactgtggtgttatgtgtcacagtcacagagccacattgggacactctgcagaccacactaactgaagactgtggctttcccatgcgtgccctttctgttctgggaccccatccagcaaccacactgcatttgtttggttttttgagagagggtctcgctctgttacccagagtgcactggtggaatctcagcttttaatatactttgggttttggaataattttaggtttacagaaaagttgaaggcgagtacagtggcttacgcctgtaatcccaacactttgggaggccaatgcgggaggattgcttgggcccaggagtttgagaccagcctgggcaatatagtgagacccccatctctataaaaaaatacaaaaattagccgagcatagtggcacatgcctgtagctccagctacttgaggggctgaggtaggaggatcacttgatcctggaagtacaaggctgcagtgagctgtgatcccgccactgcgctccagcctagtgacaaagcaagatcctgtatctatttatttacttattttgagacagtctcactctgttgcccaggctggagtgcagtggcaccatctcggctcactgcaagcttcgccttccgggttcacgccattctcctgcctcagcctcccgagtagctgggactacaggcgactgccaccacacccggctaattttttctatttttagtagagacggggtttcactgtgttagccaggatggtctcaatttcctgacctggtgatccacctgcctcggcctcccaaagtgctgggattacaggcgtgagccaccgcgcccggccaagatcctgtatcaaaaagaaaaaaagaagtagcagacacagtgtagtccccgtggaccctgcactggcctcccttggtgtggtcactgttcttcactgtggtgttatgtgtcacagtcacagagccacattgggacactctgcagaccacactaactgaagactgtggctttcccatgcgtgccctttctgttctgggaccccatccagcaaccacactgcatttgtttggttttttgagagagggtctcgctctgttacccagagtgcactggtggaatctcagcttttaatatactttgggttttggaataattttaggtttacagaaaagttgaaggcgtgagccaccgcgcccggccaagatcctgtatc

SEQ ID NO: 237270 - DNA, 617 bp, Homo sapiens
cacagcaatgttgtgggggaaacatgtataaatagcaaacttaatcaatcccgaggatagacatagatgactttagcttcctatataatcgttccctttaaattttaggaaatgcaattttcattgccccattttctttggagaaaatcaagacttgaattcattaacatggaggaagtaatggaacagatagtcgtgatgtgaaaacttattagtaaacaagagctgcatctgaaaaaatattgtcattaaaagctatgtagtagttaattgagtttgatatgaaatttagtgctggaaagttaatgactaatgcagctatttcacagagcttggttactgcaggctccataatgatctccttctgctttggagcaacaatgaaattaacctctcttttgtcctgcaggtgttgtgttctgataatgcatattctttacaactttgggtaaattatttgctttgcatataaattaactccaaagctgaatcaatattagaataataaaaatgtagagaatatttttattccaaggaagcaaagatttatagcaaaatatatccaaatcctagatgcaatttcaggaggatagatttaaaactatttatcatactcc

SEQ ID NO: 237271 - DNA, 414 bp, Homo sapiens
gcaaatgttttatgtgtcaggttgagacgtatttaaatctctttaaaagctaaatgagtctcttgctagtttttcatttcagttatttttttttcttggggatgtttggaccttctttttgaaacgcaaacatcgaggaagatgagctctgtcttcctgttcctgtgggagtttcagcctacgtgcttgactcctagtgtaacttcctgcttttcacaaaaatataagaagttttattattatttttgataaagacaattcacatgtatgtaatggattgcatctgctttgctatacaaaatggtgtgatttctttccatttttacaatccccttagccagttgcatgtgatgctccttacattatagtttaatgcttatggaataataaaattgtttttttttcttctacctt

SEQ ID NO: 237272 - DNA, 333 bp, Homo sapiens
catagcaagaccccatctctacaaaatatttttaaaaattagccgggtgtcagccaggggcggtggctcacgcctataatcccagcactttgggatcacaaggtcaggagttcgagaccaacctggtcaacatggtgaaaccttgtctctactaaaaatacaaaaattagccaggtgtggtggcggtcgcctatagtcccagctactcgggaggctgaggcaggagaactgcttgaacccaggaggcggaggttgtagtgagccgagttggcgcgacagagtgagactccgtctcaaaaataaaataaaataaaataaaaattagctgggtgt

SEQ ID NO: 237273 - DNA, 590 bp, Homo sapiens
tttctctatgcattcattcattatttcaacaaatatttatcgggtgtttaatatgtttatagccatgtgctaagcactgaggttatactttgtcgtgactccatggttaaactccacagggacaagatccacacaaatattctgtgtgaaggacacataaatagtttgggggtacatcatgcctatgactgatatgaagaaggtgtaaacaaatgtatattgaattaaagaataccttaaatatttgtttgtaagagatatagttttaggatttgttacaatagttagaaaagggtttcatgaatatggaatgaaagcttagactgcaactgttttacaaagcgcttttaaaagtaactactaaaataatctagtaacacttttagagtcatttagaaaagaataaaataatcttagcctagctaacaggatgttccaataaaactattgtgaagtggtaggactcttgattatggtgagaatgggtcagaatggatgaatcaacacatttgtgtaaagaataatatctagaaatgatgacaatgtatatttgaaagaaaagagtattaaaaatgtctttaaattttcca

SEQ ID NO: 237274 - DNA, 360 bp, Homo sapiens
tgccatgttggccaggctggtcttgaactcctgacctcaggtgatccacctgtcttggcctcccaaagtgctggtacaaagcaagggaacaggctcaaagtgattaagcagcttgccgagggtcacacgctagtaagaggcagaactgactcataaatgagggttttaggaggcagaggaaaccatgacataggtgggtaggtatagagggaggtgtggggagatgctgctgcctcggttcctcacacctccctgttgcagcccgcacctgcccagcagcaggggccgctattccttgcctgagattcctgtgcttttttccagagccatcttgtatgggcctctgtagccttcgaccag

SEQ ID NO: 237275 - DNA, 233 bp, Homo sapiens
aggtctttgagtgcttagtagttctgctctagtagccattctattggttggtttggtggctgtctctttatatcaagccagcagttgcttttattactacaaatattccagtttcctgcaatatacctttatattttaaaagggccttctgcttatgtttatagttcttaatttttcgagtaggtttgcttttaccattgaccttgatagtaggaaaaaataactgttgaaca

SEQ ID NO: 237276 - DNA, 1764 bp, Homo sapiens
  misc_feature (747)..(747): n is a, c, g, or t
  misc_feature (1007)..(1007): n is a, c, g, or t
aaaacatgaccaggataggcatgccctcagggcagaagaaattatattctgcatgccaaagtcaaatataaatggcgtggtatatttccattttttgtgttacccagaccactgcttccttgtattttcttaaattatatagaatcattttgcacctatttcgttgttctttagtttttaaattcaccactgtgaagctgcagtatcagtttagaagagattagtataacagtctctttatatctctagaggtagcacatagtgacgcggcagtagctgctctttcctgcctgaatcatattgctgtccacctgcacactaggccctgtctttgaaagttgtctggtgtaatgaccagtaggaagtgataaaatgtaagtgacccatcagggaattataaggatgttctgggaaggtaatgatccttcatcaaaggtgtgtccagcctcttgacaagcagtagctatccagcatccccatgccagacactcccttccagaatagctgtaactgccaggtgaacagtcttggtgacttcgtccatgatgcacagagttttagagaaagtaagcccaaggctggcagatccccagtccaggttagaatcgactttataattttagaaagtcttaggttttaaaacttgatgtctgttaagaattcatttagatattacatatattgctgttgtccaactgtgtcaatgtggccaaaggccctacagcactacagcacagaaagatatcngttcataaagaaaaattgccactgctgtgattctatattaatcagacagcaataagcatgtttgttgtttaagaagatccctaccgttttttcaaagctggcctcacaaaccagagtcaaagtcataaacctggccacatgcagtggcttacgcctgtgatcccagcactttgggaggccaaggcaggaggatggcttgagcccagaagtttgagatcagcctgggcaacatagtgagacctcatctctatttaaaaatnaataaataaataaacataaacctttcagcactcaagagtagtgaggcaaaatcaagtagggaagctacaaatttgtacccaggtaaatagattaaaaaaaaaattttattttgcaatgccacctcattcttctccaaaatcaacattaagcacaaaacaaaagtttaatacacacctctaataatatacaaaatgatttgatagtaccagcacacatttagggagttatatgtgatgactcgatgaaaaatttattcccttggtacacaatttgggttgtctgcaaaataagaactgacgatatctatagcacaaaaataatattttgagtgttcactgtctgccaagcacttaacatatttaagcctcctttcatccctatgaccacattgtaaagcagggaagtaatgctatgtctactttggagataaggaaaatgaaattcccagaagcaatgtgcccaaggagaggaagaggcaggaagagctcggtgagcatgatcatggctcaggttctccatccacatgcctaagacaggggtgagtgtgaagatgggaactgactcagaattaactgtgtgatcatgggcaagttgccaagttaaccctcatatctaaattcaggtatccttgaacaaacatagacagatactgatgatccgccatgtttactataaccataaactctttgtgaattaaaaatggcctctcaacctggaaaaaatgtaaaataatattgagaatggaatccactaaac

SEQ ID NO: 237277 - DNA, 461 bp, Homo sapiens
ggaggtaaagggacagtgaaataagtatcctctatatcctactactaccaaacagtttttcttcagctgagccaatagctaccatcttccaactaattcttagccagactaagatgacaaaggaaatacactaagcatgatttagctttttcttatgtctccagttgttgttttgaaagtgtattcatggcagggaaatatcccaaagccaggcagccccaaggaggagtgcctctagcatgagtattccagaaagtcatcaacctctgaatacttaagttgaccctgtgatttatgtatctaggactgaaataaaacatttctgactttctatacaagattttgcaatgtttatattagtcaagatcagctttttccaaaacatgctcgatggatcactcccttctcaggatgctgtataagaaagaagcaaaaaagctgtgatcaaataatttttgttt

SEQ ID NO: 237278 - DNA, 718 bp, Homo sapiens
ttcctagtaacaataggaagtgtccgtagagctgggagtagactcctggctcatgccagctgcgccctcttttctctacctccttcctcttccccccttctcctttccctctttcccttccctcccacctcccgggaaccctggctgagtgtgcgtgtgtgggagcgcgagagcacccccgacagccaccccttggggcgcgcggctgcagttagggtaagggtcccagtgcgcaggcgcgctcttgttcgcggtccccaactgacgcgcccgcggcgggaaggagagggggccgccggtgcgaggtaggcgtcctgagaggaaattggcagacgagatgagtgaggtcagaggacttcattggtggttgactaggggaggggacttttgatcaaaggggctttgtgaggtgagaattccgggggcaggttcagtgaaggggtttacggtcggagacagttgtactggggtcccatgggaagaagagtcagagttggagaaggacaagacgatgtagggggcatgagagagcaagggctttgggatgaagaccgcctcagtcagggggtttgctgttacgtgaactagaataacaggcattgccgtgtgttctgaggattgagtaacacaatgaatatagttagcacagtgcctggcacatggtaatataatactcttcatgagttgctgtcatcatcagtattaagagaggaggcag

SEQ ID NO: 237279 - DNA, 559 bp, Homo sapiens
aaaaaaaaaaagttctgtgtacatacttaggacttgtaattggtaggacatactgcagtatttttcaaacttctggtcgcaaacccattagtagtttgtgaaatcaatataatcagttttatttcccccaaatgacagaacagaatagaaaacaccacctcagaatacatctacatggaaagagaattattttatgaaactttggtttcttacacatatcatatatacatattatgtactggtttgatcccataaaatgggagtttttttttttatcgtgggtgtttcttcaaagaaatttgaaaaagtacaacttaggataatcaaagagatctccaactgtcaggacaggtaggtcttttctcttagagaggttaagttccggcccagtgcggtggctcatgcctgtaatcccagcactttgggaggctgaggcgggcagatcatgaggtcgggagattgagaccatcctggctaacatggtgaaacctcatctcttctaagaatacaaaaaataagtcaggcatggtggcacgcgcctgtaatcccagctactcgg

SEQ ID NO: 237280 - DNA, 374 bp, Homo sapiens
tgaaagtagtatatgcttatttaaaataatggagaatatgaaaaagttagagtcttattcttgtcactcaaatacaatttttgttagcattttgttgcattttcctgtcattttctcattcgtgagtgttcagtttttataaggtatattactaattattatatacacacagttttgtatcctccctttttcgcttataggaggcatttttcatgtagttatgtaatcattcatcttctaagaggtgcttaagtaacattccttataatggacaaatcgtagtttacttgataattctactactattaaacatttcgtttcccccctagtttttaatattattagtaatggtatggtgagcatctttacgtata

SEQ ID NO: 237281 - DNA, 244 bp, Homo sapiens
agttttctgtggctgaagagctgtcagcatctgattttcccctcatcacagggctctctccactgatcacacagtcactgagttgcgtgactatagcatagttcccagcctacagtccccagagccttagtgttcctcaggatattttcagtttttgtttcttaaatttaaaccaaaacataacatttgttcatggaaggcccccaggcaattatataataaatgtagtttgttcattaaacaa

SEQ ID NO: 237282 - DNA, 624 bp, Homo sapiens
  misc_feature (21)..(21): n is a, c, g, or t
  misc_feature (493)..(493): n is a, c, g, or t
  misc_feature (556)..(556): n is a, c, g, or t
atatcagctcggtaccgtcangccacaaggactaaaggggagaatccagaacagtcactgccacacctaacagtgaccacagtgccctggggcttctgaggcagagccacctatgggaatctgagtcaggggataaccaggaggtgaccctgcccgccttaatagagaagccagccgggcatggtggctcatgcctgtcatcccagcacgttgggaggctgaggcgggtggatcacctgaggtcaggagtttgagaccagcctggccaacatggtgaaacctgtctctactaaaaatacaaaaaattagccaggcgtggtggcatgtgcctgtaatcccagctactcgggaggctgaggcacaagaattgcttgaacctgggagggggaggtttcagtgagccgagccgagattgtgtcactgcactccagcctgggcaacagagtgagactttctagaaaaagcctaacaaacagataaggtaggactcaancaactgaaacctgactttccccctgtaccttcagcccctgtgcaggtagtaacctcttgaganctctccctgaccagggaccaagcacagggcatttagagccttttagaataaaactggtgttctttaac

SEQ ID NO: 237283 - DNA, 419 bp, Homo sapiens
gtggagaatagggtctcgctatgttgcccaggcaggtctcgaactcctgggctcaagctatcctcccacctctgcctccctgagagctaggattacaggcatgcgccactgcacctggcaaaaccagaaggttctattgaacagcactgctcttggagaaatcatctgactgtctgaaaatgtaagcctgagccatggtgctaggggacctgagtttctgtccagccccatcactgactggccaggcagtcttggacaaaccacatacctctgcgcctcattctctctatgaactgtgggcagaggtgggatcaggcaatatgtgagtctccttcaagctctgaccttctggggtgaattccatgagctctgaattcagtttccagctacctccaccccagtccctctggagtgtctca

SEQ ID NO: 237284 - DNA, 492 bp, Homo sapiens
gtgacaggcggcccacgctgtcccacccagcatgtctgcacagggaaagaattgtcccagctccaggaggtcatgattctgggtccacatcttagggccctcttacctggcagccccagagttcctgtgtatttggttggctctgcgccttggcattgtgggacactcctaggcgacaggctgcaaatcccccctgcagagttgggtcatggcttggtttgtggcatctgtgccctgtagtccctgaacagtgtactataactgatgacatcagccatggagatcattttgtttaaatgccgtttaagggtgtagtctgtgggtttcaccaaataaaataattaccatcaccatttatcattgaattaagccatgtaatttagcattaattctgtagatatgtggctttgagaggctaatatttgcataccaataaagattcaatttctggtatattttaaccgccattcaataaaatctcatgttatttga

SEQ ID NO: 237285 - DNA, 658 bp, Homo sapiens
tgaatggaaatagaatgcaaatagttacttgtgaattagattctggagaaagagaagtactaagtactactgaagtatttagataatagggaaagagtagtccaattgctactaaagaactttttaaagaatagtataattttctcttcctgcttcttaggctaaagtatgtttgcaattctataataaaaaaaagaattttattttatattaaggttgatactttgctagatctgtaatgatttattagagacttaactttcattaacttatgtgctttgtgagttaggaaagtagagtaaagatgaggaactggaattttaaaagagaacttctacttactcggagctattataatttacttttacgcatgacacactgaagtactttcttcagactgaaacacttcaggtcccagaagctgtgacatactgggtcgctaagataggatttagaaaggaaatcatctgagttgtagtaatatatgatctgtatctaaaaatatacaaactttaggagatatggtataatttcctaaggaattggtccgttaagggaaaatgttttactatggaagtaaattgtgaattctcatttcttgttattttttcttttttctttttatttgtttgagatggagtcttgctctgtcacccag

SEQ ID NO: 237286 - DNA, 234 bp, Homo sapiens
gctttctgcccaagtgtcttcttcaaacactaggctaaaaatttactggttttgcaactagcaaaggttaaaaggtacctctccagactcctaattgctattcaaacaagtttccttaaatcttcttaaatttaaaatggtttaaaaatataattagagtgtttacatttccagtaaaggaagactggcttcctgctgatgagttctctaactgagatcaactataattgctgg

SEQ ID NO: 237287 - DNA, 500 bp, Homo sapiens
tgagtagctaaggtcacaggcatgagccaccaagtcaggcaagttttgtacatttttggtagaaacgcgtttcactacgtttcccaggctggtctcaacatcctgagctcgaaggatcttcctgccttggcctcccaaaatactgggattacaaggataagccaccacacctggtctacatagtacttttcaaaagggatatcaaaacgtggtggcccctgccattaaccacagcactttgggagacagaggcgagtgggtcacctaaggtgaggagttcaagagcagcctggccaacatggtgaaacctggtctctgctaaaaatacaaaagttagccaggcatggtggtgtgcacctgtagtcatagctactggggaggctgaggcatgagaatcacttaaacttgggaggtagtggttgcagtgagcaaaaatcctgccactgcactgcagcctgggtggcagagcaagtctccatctcacaaaaacaagcaaacaa

SEQ ID NO: 237288 - DNA, 484 bp, Homo sapiens
agagaaggggtctcactttgttgcccaggttggtctctcccgcctcggcctcccaaagcgctgggattacagctgtgacccaccgcgcgtggccaaatctgtctcttctcacactgctgcaccaccttcccttcaacctccttgggtcttcacccctccccatttccctgggaccctccctgcaacaaccaagggtcttaatttcacctgctgctgtcactagtaactcctaagtccacacaggactatgggcacactcatctctacctattatcctcatgacagaaccctgtgcgccccaaggatggagaccatctctacctattatcctcatgacagaaccctgtgcgccccaaggatggagaccggcagtgtccttcagactcagctgcacctccaaactctgactctgtactcccaagtacaaggctgaagctaaatctgcctcctcagagtctccacatggcctcgtgccgaatcctgc

SEQ ID NO: 237289 - DNA, 538 bp, Homo sapiens
agagaaggggtctcactttgttgcccaggttggtctctcccgcctcggcctcccaaagcgctgggattacagctgtgacccaccgcgcgtggccaaatctgtctcttctcacactgctgcaccaccttcccttcaacctccttgggtcttcacccctccccatttccctgggaccctccctgcaaccccctaggctggctttggcccttggcttcccagcatccttcccactcttttaacaaccaagggtcttaatttcacctgctgctgtcactagtaactcctaagtccacacaggactatgggcacactcatctctacctattatcctcatgacagaaccctgtgcgccccaaggatggagaccatctctacctattatcctcatgacagaaccctgtgcgccccaaggatggagaccggcagtgtccttcagactcagctgcacctccaaactctgactctgtactcccaagtacaaggctgaagctaaatctgcctcctcagagtctccacatggcctcgtgccgaatcctgc

SEQ ID NO: 237290 - DNA, 374 bp, Homo sapiens
tttaaagtggtctttttgaagaatgtttatgcaaaggaaaagaaacgaaagtgaaaaaaggaggctgcaaagcgtacgagcccactcttaggaagcatgtatagaggaatgaatgacatagctacatagaaacatgatggccatcaaccacgcccatctgtggcagggagagcaagaccctgaccccatcccctgctctcctgaggatggtagggatgccacaagcccatttagtgtttcagagggtagaggtgaggctgggaacctgggaagagcctggcgaaaggttgacggggagagggcaagagagcaggatgtttgtgttcaccaatgacagtggccatggtcccatggtaggtcagtggcccagaaag

SEQ ID NO: 237291 - DNA, 408 bp, Homo sapiens
tgaactgatagtgaactgtgaccatgggcatacagctagttgaatttttttgcacataagcacatatgcatgtatgtgtgtatatgtgtgtgtgttttctaattatagtccaaaatccaaaatgaaaattgtatgtttccaggggttttagaaggagctggagagtagtatggagtccagggtatgtgtagcccattactaggcagcaaggatatttgtctggcaggtatggatgacccctcagcccccatgcagtggagcacctgttggtgaggatggcagctgtttgcttcagttaacagctcctcccctggtttactgccagggccaggccacttcacctgatacttctcaccatccttgattaagccttctgcattcatcagtatattataggtaacctctttc

SEQ ID NO: 237292 - DNA, 513 bp, Homo sapiens
gggcgcctggagaaaacactcctatacgccgctctgcattcgtagatggtctcctgggtagtaaaggtcttagcgagcgcaatgatgaacagggaggactcgaggttcagctgggccagggtttaggcaatgtgagttcagctcttctgagtttttgcacataagcacatatgcatgtatgtgtgtatatgtgtgtgtgttttctaattatagtccaaaatccaaaatgaaaattgtatgtttccaggggttttagaaggagctggagagtagtatggagtccagggtatgtgtagcccattactaggcagcaaggatatttgtctggcaggtatggatgacccctcagcccccatgcagtggagcacctgttggtgaggatggcagctgtttgcttcagttaacagctcctcccctggtttactgccagggccaggccacttcacctgatacttctcaccatccttgattaagccttctgcattcatcagtatattataggtaacctctttc

SEQ ID NO: 237293 - DNA, 2111 bp, Homo sapiens
  misc_feature (435)..(435): n is a, c, g, or t
  misc_feature (1165)..(1165): n is a, c, g, or t
  misc_feature (1168)..(1168): n is a, c, g, or t
  misc_feature (1177)..(1177): n is a, c, g, or t
  misc_feature (1182)..(1183): n is a, c, g, or t
  misc_feature (1189)..(1189): n is a, c, g, or t
  misc_feature (1191)..(1191): n is a, c, g, or t
  misc_feature (1199)..(1199): n is a, c, g, or t
  misc_feature (1207)..(1207): n is a, c, g, or t
  misc_feature (1212)..(1212): n is a, c, g, or t
  misc_feature (1221)..(1222): n is a, c, g, or t
  misc_feature (1228)..(1229): n is a, c, g, or t
  misc_feature (1237)..(1237): n is a, c, g, or t
  misc_feature (1243)..(1243): n is a, c, g, or t
  misc_feature (1270)..(1270): n is a, c, g, or t
tgacaggtaaacagaagtaactatcatttggggttgtcaagatatgggtagtagatacctaattccatgaatgccttctctgtgcaagtgctggaaagtaacctcagacttccagactcatcactgagattctttttcttaagcaaaatagtgacgctctgcaggatttctataactgaagttctctaaaagataaatttatattgcattaagagggtagagggtagtatttagagctatgctctcttaaaaagagtaaagatttcatgtatatgaaggaacagaaagcatggggataagttttatacaccctagagtggacttttatgataaaaagtaatttacttgttaatcaatttaattcagcaatgggaaaagatctttctcttctttctgaaatcttacacagtgaagggatgaaaatggttatactantggtaatcagagatgttcctattttgttttgatgtgtagattccgtagtacctagtgttgttggatattaagaaaaattctaatccctgttcttgtgggaattgcacaaggagcaatgtaaacacaggtagtggaggtagagatgtgctgtcgtctacttctgctctaacttgagcagccacatctcactcagggtcatcccataggatgtccaggctgtggttggagagaagtggggggatgaagacgtggggtgcaataatgggaggaggatgggctttgggaccagaaggttgtgaatttgagttctggtccatcttcttggcagctgggtcgattagggtggtgaattagctggctgaattacttcacacatcagagcctcactttcctggtttgtaaaatgcagattgtgcccctctcccagggctgccatgagggttagggaggccaggaattaaaacatgtaaaccatgcattacactgcatttcaacccctgcaagggtgatgcagctagctttacctgattttacttggattgtttcttttttttttttgagacggagtctcgctctgtcacccaggctggagtgcagtggtgtgatctcggttcactgcaagctccaccttccgggttcacgccattctcccgcctcagcctcccaagtagctgggactacaggtgcccgccaccatgcctggctaattttttgtatttttagtagaganggngtttcaccntgttnnccaggntngtctcganctcctganctcangatccgccnncctcgnnctcccaangtgctnggattacaggcgtgagccaccgcgccnggccttttctttggtggtaatttcctgatctgttgaaaggccaaaagtacactgtggattttagaagtgatgtcttttttttagtgatgagggtttttggtggtggtgtttgttttttgagaaagggtcttgctctgtcacccaggctgaaatgcaggggcacgatcttggctcactgcatccttcactttcttgggctcaggtgatcctcccacctcagcttcctatgagtggctgggactgtaggagtgtgccaccacacgtggctaattttaaaatttttctgtagagatgaggtcctcactgtattgcccaggctggtcttgaactcccggactcgagtgtttcttctgccttagcctcccaaagtgctgagattacaggcatgagctactactgcacctggccttttttttttttttctttttttaaaaagacatttgtggtgagtaagaattgctttggggtttatgcccacctgttcctcagagctggctatgggtgatcttatgagtgagttgtcactaatgtttgtatcgggactggaattctcagatggttgcaagtcatttgaggtcccagaagtccagcatagagatagggagattgtgggcagatctcttgagcctaggagttcaagacaagccttggcaacatagtgaaaccctgtctccaccaaaaaatacaaaatttagccaggcgtggtagtgtgtgcctgtagttccagctacctgggaggctgaggtggaaggattgtttgagcctggaaggttgaggctgcactgagccaagatcatgccactgcactccagcctaggtgacagagtgagaccctgctaag

SEQ ID NO: 237294 - DNA, 313 bp, Homo sapiens
aaagggggaggggggggtaaatcatgttaatgttgttaaggatctaacccatgcattgctaactttttccagatcgagggctcagatgcacatcagtatctataggcacacagaaattattgcacagcgctgttcacagacagatgtgcttcttgaagactctattactgtgagactcgaagaagtttcttaatgtctgagcctcagttccattatctgtagcctgttagtgatccatattgtacaggggtgttatatacaataccagttgagaagatgcatataaagtgctttaaaaataaatgatatagaa

SEQ ID NO: 237295 - DNA, 371 bp, Homo sapiens
gacaaaagcagatggcacaggtgatgcacttggctccatgcctgacgctgagtgaaccctcaatagtcgccttggaattctcacaagctacgattagagtccgctgcccccctccctgcttcccaagagaatcttcttttctgacctgacccactgggatttggatccagcatcatctgatccccggatccaattgctagagggtatgcgggctggcctagcactctgggaaagccactgggcggtaatgagggaaatgaagatgctgctgccctgtgacccaggaatcccacttctgggtatatttcccagacctgggaccacaaagggttgtggcagacattgtcagtaataaattatttgcactcaaa

SEQ ID NO: 237296 - DNA, 311 bp, Homo sapiens
tgctaaattagaatttattttaatttttttggacatggccttgctctatcacccagactggcattcagtggcacaaacatggcttattgcagcctcagcctcctgggctcaagtaatcctcctacctcagaccagcctgggcaacatcaggagatcccctatctaccaaaattaaacaaacaaaaaaacccaaaaacaattagccaggcgtggtggtgcatgtctgtagtcccagtttctcaggaggctgagatgagaggataacttgagcccaagaggtccaggtttcaatgagtcatgtttgtatcact

SEQ ID NO: 237297 - DNA, 428 bp, Homo sapiens
aaggttccccatgttgccatggcgggggtggggggcaatacggggccgccaagactggttgaggggcaggtcataagtctagggtttcccctggggccggtccaggattctcacccttttgggggaacctcagggcaaaatgttgaagtgggggaggagaagccagcaccctgcgcgcctgcggggtctccccgcggagaaccggggaaggagaaccgggaggcgggaagtggggaccccggggtaggtgaaggagcgaggaggtcgccgtgtggccggggccgggccccatccccgcgggcctcagtttcccccctgtactgtggggggccggtgggctgccgggaccgctgggggctcgcagcgggtcgggggaggccacgtctccctcgcggcgcgctgggagcagggagggggcgcggcggccg

SEQ ID NO: 237298 - DNA, 175 bp, Homo sapiens
cccgtgataccagcaagcctcccaatggccagatcccagtatgccatgtccctgtgtgaccccctggccccagtgtgtgccaaccaagatgtctccttggtgacaaagaaaaggggccttatgacataagacgacacagggaagaaaatttgggcaattaagaatgtgtagattg

SEQ ID NO: 237299 - DNA, 1799 bp, Homo sapiens
ctgtcagttcatcaaactcatcctccgtccagttttgtttccttgctggctaggagttgtgatcctttggaggagaagaggcgtttttcagcctttttcagctggtttctctccgtcttcatggatttatctacctttggtctttgatgttggtgacctttggatggggttttggtatggatgtcctttttgttgatgttgacactgttcttttctgtttgttagttttcccttttctgtttgttagttttccttctaacagtcaggcccctctgctacaggtctgctggaggtccactccagaccctgtttgcatgggtatcaccagcagaggctgcagaacagcaaagattgctgcctgttcctttctctggaagctttgtcccagaggggcacccgccagatgccagctggagctctcctgtgtgaggtcctgactgtcccccagtcaggaggcacgggggtcagggacccacttgagggggcagtctgtcccttagcagagctcaagctctgtgcggggagatccactgctctattcagagccagcaggcaggaatgtttaagtctgctgaagctgcacccacagccaccccttcccccaggtgttctgtcccagggagatgggagttttatctgtaagcccctgactggggctgctgcctttctttcagagatgccctgcccagagaggaggaatctagagatgcagtctggctacagcggctttctctggctgcagtgggctccacccagttcgaacttcctggcagctttgtttatgctgtgaggggaaaactgcttattcacgcttcagtaatgacagatgcccctctcccaaccaagctcgagtgtcccgggtggacttcagactgctgtgctggctgcaagaatttcaagtcagtggatcttagcttgctgggttccttgggggtgggatccattgaggtagaccacttggctccctggcttcagccccgtttccaggggaatgaacggttctgtcttgctggcattccaggcaccactggggtatgaaaagaaacccctgaagctagctcgatgtctgcccaaacggctgcccagttttgtgcaggaaaccagggccctggtggcataggcaccagaaggaatctcctgttctgagggttgtgaagactgtgggaaaagtgtagtatctcggctggaatgcatagcccctcacagcttcccttggctaggggagggagttccctggctccttgtacttcccggatgaggcgacgcccaaccctgcttctgctcgccctccgtggtctgcacccactgtctaaccagtcctaatgagatgagctaggtacctcagttggagatgcagaaatcacccaccttctgcattgatcttgctgggagctgcagaccagagctgttcctattcagccatcttgccagccctttgacttgctatatttttcatgccgactgtccctgtgcagacaggatacattcttgttcactcttccctgttgataggaggttttgtaggttttgtgtgcagtgtttctattcctgctgatttcttagttgaaaactggtgtaatacctcaagggatgtagacaaatactcaaggttattttataataaactgtgatgtactaaaatatttaaatgtagttttaagaaaaatgaatgcaggttgagcatccccaatctgaaaatccaaaatcctaaatgcttcaaaatctgaaacttgatgagcacccaaatgccgctcaaaggcaatgctcattataagtataatgaaactattccaaaattt

SEQ ID NO: 237300 - DNA, 488 bp, Homo sapiens
ttaaagacaggggacttgctctgtcacccaagctggactggagtgacgcaaccatagctcactgtaactttgaactcctgggctcaagtgatctcctgcttcagcctcccaagtggctggaactacaggcacatgccaccacactggctctcattctctttcattctgatgtctcctctatgcatctcaaatgttgcctctcttcccacattcaacttcccctcagaggaagaatatgataaggtcatttagtccctattctatatggagagtccctattaggtgtctttttcctcaggtacctaatcctcactcattcatcctggccaaggtcaaaactcataatccacaatccataaagaacttcccatttttctcaaaaggggagagagggaagaaccagaaagattaacagaagcatagaattatattgtttattggcacatttaggataatttagtgtctaattacctttaagaaaaagacaa

SEQ ID NO: 237301 - DNA, 434 bp, Homo sapiens
ttaaagacaggggacttgctctgtcacccaagctggactggagtgacgcaaccatagctcactgtaactttgaactcctgggctcaagtgatctcctgcttcagcctcccaagtggctggaactacaggcacatgccaccacactggctctcattctctttcattctgatgtctcctctatgcatctcaaatgttgcctctcttcccacattcaacttcccctcagaggaagaatattcctcaggtacctaatcctcactcattcatcctggccaaggtcaaaactcataatccacaatccataaagaacttcccatttttctcaaaaggggagagagggaagaaccagaaagattaacagaagcatagaattatattgtttattggcacatttaggataatttagtgtctaattacctttaagaaaaagacaa

SEQ ID NO: 237302 - DNA, 411 bp, Homo sapiens
ccaaactataacagggaaaaacatttgctgagccagcgaattatgctgctgctttaaaaaaaaaaaaaaaagagagagagaagcttttttttccttttgttttgcttcttgcagtgatgaggtgctagcttagcccacacagtgtgacctttgttagaaaagtcacctgctgttacaagttactctggtctcctgttgttacagacttacacgtcgattgtgttctatgtttataacttgaattcatatgggatttcacaggaccactgctcttttcttgttaatttaaggaaatagaaaaatagacttcctatctgagggaaatcagacctcatttttattgtcactgaagtcgtacttcctggaagacctatgcatccccagaattttttgaggatcgaatataaaatc

SEQ ID NO: 237303 - DNA, 370 bp, Homo sapiens
tgtgttccaaagtgactgtatgttctcaccagcaaagtatgacagttccaactgttccacattttgaccagctcttggtatcattggctttttatttttcacacctttttttttttgagacaagatctcactctgtagcgcaggttggagtgtagttgtgcaatcatgactcactatagcctcaacctccctgggctcaggtgatcctcccactgagtagctggaactgcaggcacaccaccatgcccagttaattgttttatgttttgtagagactgggtttcctatgttgtccaggctggtctcgaactcctgggctcaagcaatcctcctacctcagcctcccaaagagctgggattacaggcatga

SEQ ID NO: 237304 - DNA, 229 bp, Homo sapiens
actcaagcacttactatctgacagacactgttgtaagttattccaggtatgaatttatttttttacaactagtggcctccaagagctctgaggcctacagtttggaaattattatacctcctttccagataaggaaactgaggttataggtaggagacaacaatcctgattctgggacccaaactttttcctaaaatcctattgagcttggagtccacaccccaggaac

SEQ ID NO: 237305 - DNA, 798 bp, Homo sapiens
cggccgcggaggaggcggcggcggcgggcgggagcagcggcggcggcggcacaggctcggggccagccgggcgcgcatccccgggcgccctgcgcggtggagagcttggcgggctgcgggtgccgcaggacaggagtggacaaagcaagatggcagggatcttagcctggttctggaacgagaggttttggctcccgcacaatgtcacctgggcggacctgaagaacacggaggaggccaccttcccgcaggctgaggacctctatctcgcttttcccctggccttctgtatcttcatggtgcggctcatcttcgagagatttgtagccaaaccgtgcgccatagccctcaacattcaggccaatggaccacaaattgctccgcccaatgccattctggaaaaggtcttcactgcaattacaaagcatcctgatgaaaagagattggaaggcctctccaagcaactggactgggatgttcgaagcattcagcgctggtttcgacaaagacgcaatcaggagaagccaagcacgctgacgaggttctgtgagagcatgtggagattttcattttacctttatgtatttacctacggagtcagattcctgaaaaagaccccctggttgtggaatacgaggcattgctggtacaaaatacccctatcagccaatcacaactgaccttcactactattacatccttggagctgtcgaataataggccctctgatgattactcagttcacctgattatcacacaatcaaccgacttttggcattcatgttccttgaaacacct

SEQ ID NO: 237306 - DNA, 1037 bp, Homo sapiens
cggccgcggaggaggcggcggcggcgggcgggagcagcggcggcggcggcacaggctcggggccagccgggcgcgcatccccgggcgccctgcgcggtggagagcttggcgggctgcgggtgccgcaggacaggagtggacaaagcaagatggcagggatcttagcctggttctggaacgagaggttttggctcccgcacaatgtcacctgggcggacctgaagaacacggaggaggccaccttcccgcaggctgaggacctctatctcgcttttcccctggccttctgtatcttcatggtgcggctcatcttcgagagatttgtagccaaaccgtgcgccatagccctcaacattcaggccaatggaccacaaattgctccgcccaatgccattctggaaaaggtcttcactgcaattacaaagcatcctgatgaaaagagattggaaggcctctccaagcaactggactgggatgttcgaagcattcagcgctggtttcgacaaagacgcaatcaggagaagccaagcacgctgacgaggttctgtgagagcatgtaagttgctgtttttctttttgaaagaaaagacctaagtactcatgccaaccctgaggtgaaaaataaaagatctgtgcaggcttcagcagcccttaaaaagctgcaatctggtgggaaaatagttcaggaaaaacacaggaaacagtagtttgtaagaatttgtgacttcccctttggatacagtaaataaatttcacttcttaatggagtttctacaaagtaagcatattataaaaggatctacaatggtctttttaatcagtcatctttgaaatacagcattaaaagttgttacttttatagatgtgggtagtttgaattttagtaaaggcaaaggcaacttaggttcttcctactaataaaaactgagatattaggatatattatcagagggtcgtgacaatcttctgtattcctggagatttaagaaatggctctattatatttctgggtgagtttaatgaagcattgcttgaag

SEQ ID NO: 237307 - DNA, 428 bp, Homo sapiens
gttaagtgagcacgtaagcagacatgttgagaatgagaaccaggcttcttactgtctgggaaaaaattcacaaatttggaaggagagaggctggaaagaaacctgaagaactggagtagaattagatttcttggtaggaagtcatgggttttcaaatatataggtagataaagaagtagtgattgtgtgtttatataaacacgtgtgctctgtgtatacagttgacccttgaactatgttggggttagcacccctgcgctattggatgtctgcgtgtaactttgacttcccccataatttgactactaatcgccaactgttgatcagaagcctcacccataacagaaatagctgattaccacacattttgtgtgttctatgtatgataaactgtgttcttacaataaagtaagctagagaaaagaaaa

SEQ ID NO: 237308 - DNA, 460 bp, Homo sapiens
caaagatgttcaaatatgtgaatgtgttcaaacaatgcaagcattcactcctatttaaatctgggcgagggttcttccaggtttttctcattccactaagaacatgatacccaattaatggctagaaagcagctatgtagtcaaagaggatgcccattcttagatatcaaagactcctcaaaatagaataaaacacaatggaaagcatcgtctttccaaacctctctgacttcatattcgcaattatcaagagtcaagttaaaaaaacaaactgaaaatatgcaaaattgaaagtcagagtaaattcataatgtgttgtggtgctgcctgtggacttctattgtcattattgtttggatgaatggtgaacagaaatgtaaaataatatgctattaagggcaaataatttttgcctgaatacattaatttggaaaataaaaatatgcatgtttcaacttgt

SEQ ID NO: 237309 - DNA, 374 bp, Homo sapiens
tctctctctctctctctctctctctctctctctctcctcgtgccgaattcggcacgagctcttccatatctcccaagggcccaatagcaatgcacttctgtgtctgacggtgctcctaccttggtccatgctgatccacaactgcagctccagaaatggcttgtaagcacatataaccagtgagccatacattacagggcacttcaaacagcccagtgatttttcagtctaatatttcccaggccatttttttcctcatctggaaaatgcagttactgatgtctgggtttaaatagctaagtagatttgtaaaatttaaaaaattaaaataattttaaagattattaattgtaagatgatataatacaaccatc

SEQ ID NO: 237310 - DNA, 440 bp, Homo sapiens
ttaagagaaagggaattagttaagaggtagcagggcaggcaaacaggcagagaactgacacatttattactttctttgttccaggcactttatatgccatggcaactaatcttaattaacctcaagttatagatgaagacatatatttgcctaaggtcacacagtaagcagcagtgccaggaagtttaggattgccttatttttaaaaaaacaatgtcttatattttcacataaattacttattggaatccctcaaagtctagtgcagactaaatttagggtatatatccaaagaaagtgaaattactattttaaaagcaacatgtgcactcccatgttctttgcagcaatattcacaatagccaagctatgtgcactacttttgttgagtaattcattacagattaaatgtatctgatattaaaaataaagaacagaaa

SEQ ID NO: 237311 - DNA, 367 bp, Homo sapiens
agcttttaatttcccctgggaaggatgaatgttttaaaaatgtattaatatttatttatttatttttataataaatgttattttgtagagcagttctagtttacataaaattaagcaaaaacaggccaggcatggtggctcatgcctgtaatctcaacaattttggaggccaaggtgggtggatcacttgagattaggagttcaagaccagcctgggcaacatggtgaaaccccatctctactaaaaatataaaaattagctgggtgtggtggcacatgcttgtaatcccagctgcttgggaggctgacgtgggagaattgcttgaacccaggaggtggaggttgcagtgagtcaagatcgtgccac

SEQ ID NO: 237312 - DNA, 2053 bp, Homo sapiens
  misc_feature (1301)..(1301): n is a, c, g, or t
  misc_feature (1367)..(1367): n is a, c, g, or t
tgtcttcatgcttgttgcttcagtaacaaaatagctgctgaggctgcaggcatcacaccacattcaaggcaagaaaaaggaagaagtgagaatggtgccagccacatcatcttctcttaccaggaaaggcaaaagtcttcctagatctcccagcaggtttctgcttatatgtcatttgctagaactgtgtgccatgaacaccctggatacaagcaaaaacctggaaaagcacatattttgcctgggtctgggctcattgccatcctgagagaaagcagacttctggtagcaaagaaggtggaaataggtattgggaaggaagctaacggtgtctgctacaacacagcttaataaatagtagttttatatgcataataaatagtagctactccttggcataaagtaaaaataatgataacaaaaatacttacataattatattgtgtaagtgcttactatgtgccaggaactgttctgaatgttttaaatatgttaactcatttaatcttcacagcaattttgtgaggtaaatgttactatccttggtttttttttttttcagtgtttttaattctactttatatacatacaattagattgatcataatccctggttcatgacataccctcattggtccatgcatggctctcttttgtttactttttaaatattagttattgtaaataatatatagacaccttcaaatcccctgtccaaaataaaattagtgtctggtcagcaatttgcatctggctgtatggtacccccaacacattttacttcctcccctggccaaggtgatcatcatccagaattctgagctcattatccttcactttgcttttcatacagttttagagttttcttgcatctatataaagtcctaaaaatatgtgtgtgtagtgtgtgtgtatatatatagagaaagatggttgtttttaactgtatgtctttagtacttttttcacttgatattacattgttaagattctaccatattgttgtatgttgctacagttgttccttttgactcctgtttaacactcccattgtgcaaatatgtagcagtttattcatcctgaaaccattctttactgaagtgcctataacattcttattgattttctcttttctggttattaactggtctaattctgttacattcaagctttgcatatgattctagcagttttccaatatcctttttaatgtctgcatgaagtcctgaatcttctgcaagacttgcaataatttcttgcaaacgacttgccttgtgttgtgtgttgtcagatatttacantgggctaccagagagaggctgaccaataaagattttgacttgatggggtcttggtgcacacagagngcccttcatttcagcaaggaggaatgttgcaggactgagggaggcagagaatgtcaattcacttgtgaatattttcttgtcatgatgacttttgtttccctgggcaacctggcaaatgcgggaactttgattgtgaacactcagatactcagaagtccctacatcttggcaaattctttaacacttctcccacaaaaggtagaatctaattcctctccccttgaatatggccttggtgactcacttctaaagaatagtgtccaggaaacgtgttgctatgggacttctgaggctagaataagaaaaggtgatacagcttccatctggcttgctctttttgggacactcattctggagaagccagtcatcaggctgtgaaggagcccaaaggagcccacacagagagaccatggagaagcccacatggatgggcactgaggcctccaactgacagccaagagcaatcgccaggcatctgagtgagtctcctaggagaggctacaaagtttgaggagaagtagcaagtcatcctggacatgccctgtctaaattccccacaatgtacaaaattaagctaactgtgctctgtctgaaggcctcacccacagaatccattcacataataaatggttatcttatgctactaagttttggggtaatttgttatagaaattaataaaattagt

SEQ ID NO: 237313 - DNA, 208 bp, Homo sapiens
gaaggctcattcctagagttgtctgatttggccatccggcagggtcccacagtgctaggaagtcttgttcctggagtcctctcatttgacggtaatagttttaagtattagcgatttgaaaatggggggagacacagcctgacctgatgtactagccaattctttaaggggtaaaatggagtcaggcttatggtttagacaaaaaaaa

SEQ ID NO: 237314 - DNA, 264 bp, Homo sapiens
agacaagcaactgggtggcactgcagagcctggggattctgatcctcagctgcagctcttactaccactaattcagcatggatgagtggttttctgtggaatcagcagggatgctgggcaaatgccacacacttactttccacttaaaagatgttgccacaggggccaagtgaaatctctgttctgattgacacaggatggacaggtggaggtgaccatccatcagtgtcaggaaggacctgaagcacctggctagtcaggtga

SEQ ID NO: 237315 - DNA, 1753 bp, Homo sapiens
  misc_feature (944)..(944): n is a, c, g, or t
gtgtgctccacttaaatgagaaaagcaacgagcaataagcccagggtgaagatttggttacataccctgcttctcaggttttgcttaagtttagcgcccaccaggaagaaagaaaacgattatctgcctccttgacttttgcatcatttgtctttcttctgatgaaagtgggactaatcactgagttagggtttccttatttttagtctacaccatgttgctttatcctaaaaggataaatatgggctgtgtgatggttgaccacctttcttcttccttctatgaaggtctgaaagggcacaagacaggtaaaaaggaaacagcttttctttagtaactaagttgctagatttttgatctcatggccctgagctacacgtgaatgactttgacctgtaatctgaaataagatagacttcagagttcacctctcccaccatttcactccaaaggtgagataaggtagagttgctaaaggtacagtatgaagggcatgtggcattttagtgttgacagtatgccagctctaagacctgcttcttccatctccaaccattcctggactctgcaggtgacacgagccactgtgctcctggatgcttcagaacctgtgcagatctctgtcttcactcctactatggcatctcctagcatgttctacactgagctccactgggccttgcatgtcagtatcccgaattctgaatgaagcttggaacatgggaggtgcatccactaacaacatgaagaatgaagacatgtattgactacctttgacaaaagtatgtcaaaagcaatacatcttactagtggagcgaagacactgcatgctgacaaaggtgatctcagatgtgaggtcgatggtgcgccatgcaatcagcttgctgagtgagcctacttatgccccatcccgggggcctagggtaagaaaagtgccaagcgangctgaggatcagactaaagctggaaggtgtcaaggcacaggctgagtcatcagaacaccttccctgaattgtgtcaaacaagtgtacatgtgctcaagtgtatctggattctgatttggctgcacagtcactgttttccagatgtttgcagaagaaatatgagctggaggagactcactgaaagctggaactagaaggatgcacactgctcatccaagccaattcacttattttaccaatgataaaactgagtctcagagaagtcatacgcttgcccaaagacacagcttgtggtggaggagtcaacaccagaactctggtccaggactgcaaaaaaacacttaacatgtgctaataatgaggataaaagatacttcaaattctgggagttctataatgtttgagcacatataccattgaatccttttaataacccatcgcttacacagatgaggaaaccaaggctcatagaaataaagtgctttgccaaaaggcacaaaactggtcagtaataaatctgatctccaggttcccagtccagaactttctgcagcactatctttttgttccctttaactaccagaagctttaacccaaaatgaggcttcaactataaaagctatttaagaccttatggctgcgtatctctgccctaagttttctcttgatccttattttatattctaatgtttaaaacttgttccccaaatttttaaagtttgcattcattttatttcaataagccacgccaaaatctgtgtgtcataagctatctatacgtaaataaatgaacgaatgaatgagcaaac

SEQ ID NO: 237316 - DNA, 372 bp, Homo sapiens
caggttgcaatgaggaggaggttgcagtgaggaggaggttgtagtgaggagcaggttgcagtgaggaggaggttgcagtgaggaggaggtcgcagtaaggaggaggttgcagtgaggaggaggtcgcagtgaggaggaggttgcagtgaggaggaggttgtagtgaggagcaggttgcaatgagtaggaggttgcagtgaggaggaggttgcagtgaggaggaggtcgcagtgaggaggtcgcagtgagaaggaggttgcactgaggaggaggttgtagtgaggaggaggttgcggtgaggaggaggttgcagtgagccgagattgtgtccctggactccagactgggcaatagagcgagactatgtctcca

SEQ ID NO: 237317 - DNA, 213 bp, Homo sapiens
gagctggggttcacttctatttctcttttgtctattttgtttcaatattttcatcagctattagattcatcaagcccaacacttatgacttttttttccttatagctatttttattcagcaactatcctaccttgaatttatgatcttgcttacttatttccaagtggaaaactgacttcatgatcacccataccctactgaacgtcagtatc

SEQ ID NO: 237318 - DNA, 437 bp, Homo sapiens
gggagccagtcagagcacgactgaaaattgaagagtctgtgccgtaactcactaaatgctctgtctgcagttagtttatctgttagtgtagcagaattgttactcaagcagcatgataaagatctgcgggagcatgcaaaaacgtaaacagtgttgggcgcggtggctcacgcctgtaatcccagcactttgggaagccgagacgggcggatcaccgaaggttaggagttcgagaccagcctggccagcatggtgaaaccccgtctctacgaaaaatacacaaaatactgggcgtggtggcgggcgcctgtaatcccagctactagggaggctgaggcaggagaatcacttgaacccaggaggtggaggttgcagtgagctgagatcgcacctttgcactccgcctgggcaacaagagcaaaactccatctcaaaaa

SEQ ID NO: 237319 - DNA, 4255 bp, Homo sapiens
  misc_feature (172)..(172): n is a, c, g, or t
  misc_feature (224)..(224): n is a, c, g, or t
  misc_feature (1087)..(1087): n is a, c, g, or t
  misc_feature (2031)..(2031): n is a, c, g, or t
  misc_feature (2475)..(2475): n is a, c, g, or t
  misc_feature (2670)..(2670): n is a, c, g, or t
  misc_feature (2687)..(2688): n is a, c, g, or t
  misc_feature (2692)..(2693): n is a, c, g, or t
  misc_feature (2695)..(2696): n is a, c, g, or t
  misc_feature (2699)..(2705): n is a, c, g, or t
  misc_feature (2707)..(2708): n is a, c, g, or t
  misc_feature (2711)..(2712): n is a, c, g, or t
  misc_feature (2715)..(2716): n is a, c, g, or t
  misc_feature (2719)..(2720): n is a, c, g, or t
  misc_feature (2723)..(2725): n is a, c, g, or t
  misc_feature (2729)..(2729): n is a, c, g, or t
  misc_feature (2731)..(2732): n is a, c, g, or t
  misc_feature (3410)..(3410): n is a, c, g, or t
  misc_feature (3638)..(3638): n is a, c, g, or t
  misc_feature (4174)..(4174): n is a, c, g, or t
ccaaaatggatgccccattatcaactaagacagaaaggtgaaggaaacagagttacctacaggttgaaggttcagggcctgtcggggcaaatcctctaagttcctatggccaaactccctaccaataggagctacagctctgagtcacaacccagaccactgcaactctgantggccagaggaccagccttgaaaacactctttcctgataagcagctgtagancttgagcccatttcggcagctcatagaggctgcatacagactgtctttgtgtcccatagctgaccttttgatgtaaagagccaaatgccattttcttttcatggtaaaaaccccaccccaaagtgaacatgggatgtatggtacatgtatgtttacctattgcacatgtgctcagctccccttataaatatgtatagctttccccccaaacctgctgatatgtatgactctgttgtgtgatacagacctggtgaggcataaaagccaacctgtccttctttctgaagagagagcaccttcagtccatgctggagactcttcccagcttgcaaaccgataacccccataaagctctcctttctactgtccagccatcctggtggtcttttagacaacaccatcttctatccattccatgtgtcagtgctgcattaatttttataaacattggctcctgacacaccactcatctgttcagaatccttcagtgattcctgtcgaatccagaacaaagcccaaacctcaagatccctctattctgtgccttcacagtgtggctctagtctacggcaagcttatttcccagcattctcttacaagtgtttgaagtgccaggcagacaaagtatttgccatttgccacacacgcccagcactgcattccttgtgcttttggtgctgtctggcccatgcacagtggagctctccaggaaaacccctgccagtttggaatgctctaggtctacacagtccctgcagagcctctagtcgcaggggtctactgagtattttcagtgtggttattgtgactgagagattgacttctgaggtttatttcatttgtattaatttaaattgaaatgnccacatgtgactaatggcttttgtctgggacattgcagggacagcacctccttgccttcctccttatgcctgcttaaccagggcccttcatttaatactaattgaaaattccaccctttctaagaaggaaacccgacctgattattcaactggctattttatctccctcatcagcatcctctctgtatgtcacttgccatattctgtcctttagtataagttttagcccttcctcatttatagtaagtcagtcagagaatcagaaggccttggctcttcccatgcccattgcaacatctctgagccccagattcgtcatctgttaagcatagggaatgatgcactaatacccttctgtgtcacgggattactgtaaggattacagaataaattgagcatctgttgtgcctgtttccacttctgcaaactcaccttctcagccattcctgtgcacaaccaccaggctgtgggtccttccaggtaggcccagtagaagcaattggtcaagaacctttccctaaatctggccacagggacggcctctctgttgtcagagatggtggagtttgcaccttgccttgaattccttcaattctgtaggtcatgaattatctgtttctgctggaaatagcagcaattcctaaactagaattgctgtaactttaacacaaaactagaagtcaaagaggagattggcagtgtggcctgtgatgattcccatccagacactgccaggcttcacgccactacccccagcacatcagccaagaaaggaggcactaacgaatactgagctatcagcagcaggagaaaggccttctacagactcctcaacaccagctcctccaggaaagatggttccctggctgccctggtgaacctggaggttttctctgcctgaaaacctcagttcccctctgtaaaaagttcaaccaaagagctcnatttgtcatgttcacaaattagcccaaagataggctttttaatcccttctcagcacaatttaacccaacatttagtgctgtacttactgtatctatgacactaataatccaaagatagttataattcacttgtcctcaaagaatatcacctgtggtcattgagaaccgtatatcaacaatgaactgtgatacatgttcagaatgtgatagtaccaacaaagggactcattctgcctgtggcaatctaggtcttctcggagcacgtggtaaagagctggaccttagtaggaggaaggattttattttgtctttattttagatttagggggcacatgggcaggtttgttaaatgggtatatttagtggtgctgaggttagggcttctaatgatcccatcaaccaaacagtgaacatagtccccagtaggtagtttttaaacccttnccctccttcctctctcctcccttttatattccccagtgtttattcccatctttgtgccgtgtatacccaacgtttagctcccacttacaagtgagaacatagtatatttggttttgtttctgagttaattcacttaggataatggcctccagctgtacccatgttgtaccaaaggacatgatttcattctttttnttttctttttttttttnnggtnngnnttnnnnnnntnngtnngtnngtnngtnnngttntnngagatggagtctcactctgtcacccaggctggagtgcagtggcacgatcttggctcactgcaacctccgcctcctgggttcaagcaattctctgcctcagcctcccaagtagctgggattacaggcacccaccactacgcctggctaactttttgtatttttaatagagatggggtttcaccatcttggccaggctggtcttgaactcctgaccttgtgatccacctgccttggcctcccaaagtgctgggattacaggtgtgagccaccccacccggcccgatttcgttttttatggctatgtagaaaatgtgtatataccatattttctttatccagcctaccattgatggacacctgggttgattccatgtctttgctgaggaagcattttaaatggcaggagtgagacagtaaccacttcagcagcataaggaagggaaagcacaggaaggggaggaaatggcaagatggagaaagagctagtggcctgcctgatgcagctgatgagggaagaactctgaggccgggaagctaactgcaggcttgttgatgaggatttgaaatgtgtttctaggaaggaaggagaggtagcaagtgggcagtgtgtgtgtttgtttgttcactttaatggaaggcattgaggtagtgaatcgtgttctaattggtattgaaaancaatcttggtgaccattaagaaaaggctgagaaaggctatggaagagtatggagacacgtttaggaggttagagcaaggctctaggtgaaagatgatgtgggcttgagtttgggcagaggtgttgggagcttatgaggagtatacagtttgggtgttatggtgggtaggtggtgctgataaggaaggaggagaacttgagaatgaaccagggtttctaccactgtganttgggttgctataaaggatattaaccaagaatgggtatctctttccagcccacccccacacccccaaataaaagtaggtgtaaggagaggcaatgtgtttcatcttggacatgctgagtttaagaagctgaatgagcaataatgtggtgctttccaggaagctcaagagagagatgtgagctgaagacacagaaacaaactatgaaatattagcgtccccctttattcacaagcatctactgtgtgttaggctttggctgcactgaggatatcaagatgaaaagacatggcacaaactatgggacaaaaaggcaaacaaaaaagagtataatgcggctgggcgcagtggctcacacctgtaatcccagcactttgggaggccgaggcaggtggactgcctgaggtcaggagtttgagtccagcctggccaacatggtgaaaccccatctctactaaaaccacaaaaaattagctgggcgtggtggcgggtgcctgtaatcccagctacttgggaggctgaggcaggagaatcgctngaacccaggaggcggaggttgcagtgagcctagatcgcaccattgcactccagcctgggtgacagagtgagattccgtctt

SEQ ID NO: 237320 - DNA, 809 bp, Homo sapiens
aaatcaaatgctctcatgcttccctgaatggacacacacagagtctcttcacctgaggaataaagtgtaagatcttcagaacttttattcaggggagaaaggcccaggtagctgctgctgttcagcttaaggctaatctgaccttctataacaggagttcaagtcccagaaatccctggtcctccatcagaggcttcactcattacaggagaagagagtctgggttgctccctcatcaatcaagtgcagagtccaggaagggagaggcgggcagtaacgtgcatggagctgtcacctcctatgacaacaacaccttctggaatacctcctgaaggacacgcctgaggatgttttacagttaactttttaaaaaatacataagtagaaagagaacactctaaaataaaaataaaaggtatagtataataaacacaataacaaagtcacttattactatcaagcattgtatgctgtacataattgtatgtgctatgcttttatatgactaacagtgcaatagatttgtttacaccaccatcactaagggcatgcaagtaatgtgttgtgctacaacatactacaactatgatgccactaggtaacagaaaatgttcagctccattataatcttatgggaccaccttcctagatgcagtctgtcattgatggaaacgttgttacacagcacatgactatagactaatagccatagatttataatatgggaggatgtactatatatgcattgaaaagagctctggaaggataccaatacattaccagaggttgcttctgggccttagggtatg

SEQ ID NO: 237321 - DNA, 741 bp, Homo sapiens
aaatcaaatgctctcatgcttccctgaatggacacacacagagtctcttcacctgaggaataaagtgtaagatcttcagaacttttattcaggggagaaaggcccaggtagctgctgctgttcagcttaaggctaatctgaccttctataacaggagttcaagtcccagaaatccctggtcctccatcagagggagaggcgggcagtaacgtgcatggagctgtcacctcctatgacaacaacaccttctggaatacctcctgaaggacacgcctgaggatgttttacagttaactttttaaaaaatacataagtagaaagagaacactctaaaataaaaataaaaggtatagtataataaacacaataacaaagtcacttattactatcaagcattgtatgctgtacataattgtatgtgctatgcttttatatgactaacagtgcaatagatttgtttacaccaccatcactaagggcatgcaagtaatgtgttgtgctacaacatactacaactatgatgccactaggtaacagaaaatgttcagctccattataatcttatgggaccaccttcctagatgcagtctgtcattgatggaaacgttgttacacagcacatgactatagactaatagccatagatttataatatgggaggatgtactatatatgcattgaaaagagctctggaaggataccaatacattaccagaggttgcttctgggccttagggtatg

SEQ ID NO: 237322 - DNA, 430 bp, Homo sapiens
agaaacaaacaaaaactaaattgtattgtcagatggagatgaagtgccaggaagaaaaaaaaagcctcttaagagctgtggtctgaggggtttttagggaggtaaaaccattctgtatgacacagtagtgacagatacatgtcatattgcatttgtcaagacccacagagccatgcaacataaagagtgaacctcgtgtaaactatgagctgtagttattcatgtatcagtattggttcattaagtgtaacaaatgtaccacattaatggaagatgttaataatggaagaaacggttaggagctgcaggggaggtggggagggcatgttgaactctgtactatctgctcaattattctgtaaatctaatactgtactacataaataaagtctagtaacttttttaatgccagagtctgagcccatgcaaa

SEQ ID NO: 237323 - DNA, 451 bp, Homo sapiens
cagattaggtgctcatactacaaggcttgccacgtaaaatgtaatacactagctttgttgagggatctcttgcagaggaagaggaggggaagcagaatgcttcctacagaccaggcttcatacccgctgctgcacctttttagtctcatttaattgcaacggaaatcctaggaggtaggcaggtatcatgataaccccaatttaaagaggagagaatagggatcagaaaggttgagtaacttgcttaaggtcacatagctagaaattgaaaccgagacctttttcactatgtaaattttgtagcaggtctgggataagagtgaagtgaggcaggttgagttgtgtaggcagagtggatgctgtctttacttaaaattttgatattttgatgatcataatattttggcacttttattttaaaatatatttcattaaaatatctatctagatt

SEQ ID NO: 237324 - DNA, 448 bp, Homo sapiens
aaatgcttttttctcattgtaaaacaaaattatgaaaatgaagaccaatcatgttgtattttgatgataagaatgatgagtcacaggtaagcccataatgcatggaaattcttggctttcttattatgacatttaacttcactgcaactggaaaaaaatcagtgaaataaacgattcaaatacatcaagtaacaagggcttctgaagtacagtatttctcgagtcgaatggaaatgttaactaagtccttatttagactgaaaaatctagccctttttgttataaaataattgctctggcagacttcttgcactgttctgaagaggtcaggcactcctgccttttgcacccttttgcccgacacccttttttattttaaaagaatatttattaagcgttttttagtacctatagcactatactaggcactctgaattgtgtcagggta

SEQ ID NO: 237325 - DNA, 772 bp, Homo sapiens
aatagccgggcgtggtggctcacgcctgtagtcccagcactttgggaggccaaggcaggtggatcacttgaggtcaggagttcgagaccagcctggccaatatggccaaaccccatctctactaaaaaaaacaaaaattggctggacgtggtggcgagcgcctgtagtcccacctactcgggaggctgaggcaggagaatcgcttgaacccgggaggcggaggttgcagcgagccaggatcgtgccattgcacttcatcctgggtgagagagtaagactctgtctcaaaataagtaaattaagtaagaatgacattctttgttttttagtacaatgttttaatgtctgctctaacagaatacagctgtgttctcatatgtttttgcattcagtctgttgtgataaccacatgtcctataacctctggaaaactccactctatgctcctgagagaacagagggactggcccctggaccacgccctgaaaactattgatagatgtggtactgtcaaccatgaagagtcagacagacctcagcacttacagatgatagttttgtcaccttgaacaaatgactacatctctctgagtctgtttcctcctctgttgagagagaagtgtgctgtaactcataggacagtgtagggattaatagaatacttgttctccttgatagggacataaaatagtagggtatttgttagtgtctggcacttggtaggtgtgtaataagcattattcctcagggtactttttaaaaaattgcttaa

SEQ ID NO: 237326 - DNA, 431 bp, Homo sapiens
gagttctgatgaatccatgcatctgtgttctgccatggtagattacttttgccttttcatagaaatggaatcatacatatacactcttctgtatgtaggttcctttagtcagcatactgtttttgagattcagtcatgctgttgcattttcagtagttcagtcctttgtgtttctcagtagtacatatttcatttcataaaatgacatgcttaatatgaatttactcctataattgtgtatactcttggtttattttcccctcacaagattaccaactatatatttgcacattaatactgaatattgtgtaatcagctgcagatttttgttatgaatttatcacaataggaattgtttcaaaaacagtattaaattgttagcaaaaagtgttttgtattttcttcagtaaatggttcttctttttaaaaac

SEQ ID NO: 237327 - DNA, 443 bp, Homo sapiens
tggaatcgaagcaacggaaggttaaaactgtttttatcaaggccaggcgggcgcggtggctcacgcctgtaatgctaacactttgggcggccaaggctggtggatcatctgaggttagaaattcgagaccagttgggccaacaaggtgaaacccccgtctctactaaaaatacattttatcaacagaatttcgaaacttttatataatagaataattacaatgaactttcataaagaacttgagcatacctggattttggtatccgtaggggtccaggaattatcccccttggataataacggagggctgtactcatcatccaacttcaacaacagtttgctgcctttctcatttcatgtatccctttctgcatttttttttgaagtgctgtatattaaagcaaatcctggacatcatgtcatttcacctataaatacgtcag

SEQ ID NO: 237328 - DNA, 513 bp, Homo sapiens
ttggctccttgatgtgttctggtaactgttctaattgtgtctttgttacttccatggcaaccctttcaggtaagtttcgctgaatatattccacgtagacatctgctgtgcttccagttagatgttctaactctaaacatctgtaaagtgttctcatttcatactgaacccttggaggttcgtgtactttaatagagataccaagttctttagcatcaagcacagcaaaatattcataactgtccaatacagccttaccgtgacctttcaccaaaaccgagaggcgcttatataatatgtctggttcatcagagattgttaccacaggtttggtcaaatcctttggaacatcaacgtgtaggtttgaaaactgtacccacttcatattggtactgagaagcaagccaccatttttggctgtattgcccttagaagtgtttacagaaaaattccccaatccctgccagaggcgccggcacacagcaccgaacgctgtccgcgccgccatcttgc

SEQ ID NO: 237329 - DNA, 2703 bp, Homo sapiens
  misc_feature (93)..(93): n is a, c, g, or t
  misc_feature (1606)..(1606): n is a, c, g, or t
  misc_feature (2030)..(2030): n is a, c, g, or t
  misc_feature (2465)..(2465): n is a, c, g, or t
  misc_feature (2484)..(2484): n is a, c, g, or t
tatagtgttatttgacaaaactgtggtactttttcttaatttcattttctgagaagaattgaatgtaattttaatggcaccacttggcggggntgcaaactccatgatatccatgccttttttcttacgtgtcttttttcttttccacactaggctcttgttgaagctggtttatagctcagttcagaataaccttgtgcaggcattttgtgagctcctgctttcccaccctcagatcaaacatggtcataatgatatggccttcaaaactgtgatgctcacattaaaagttcccataaacatggcagggatcctataattaaaagaaggcacagagcaactgattagatcccaggtatagatcttgtaggtggtcttttcatgctgttaaattggtcatttgtatttatagctttggcagggagggctggaacctaaactagctctaatcccagcactctcccacacttggccttatctcattctccgttaatttcgcttggcatccatgaatggagccaaattctgaatgattctgcatgaaccattctagccctagtctatgaaactattttctaagttcctttgaccagctgagattagagatactgttttttttgttttgttttgttttgtcttgttttttgagacagagtcttgctctgtcacccaggctgtagtgcagtggcgcgatcttggctcactgcaagctctgcctcccgggttcacgccattctcctgcctcagcctccaagtagctgggactacaggcacctgccaccacgcctggctagattagagatattcttaatatcaaaaattgttttagtttacctatgtaacaaaccttcacatgtacccccaaacctaaaataaaagttaaaaaaaagaactattttctagtaaaaaatagataaatttaccaggtttaaaataaacaaaagcagtaattctgattttcaacattgaatgcaaaaggaattatataaatagatgggtattccatgacagctgggactgtgtctgttttgtcctgttcactcacttgtcccaacatcatataggctcagcctgtcccatgataggtgttaataagtgtttgttgaatttatgaacaaacagcttgaattgtgtaatgtacctagaggctattttttcctcctccttgggttttctgtttaaatcctttcagaattgctgaatcatcccagaatctgaagaggtacatttttggtcgataatacatttctgtggtcagacctcctggatatagaatcatctttctatgttgggcatatgcacgtaatctattcttagtaaatactttggtcagattagattgacaaaggccatacttaaatctctaagttgcaaaataagagcaggttattacataatctcttcacttcaacccccagaaataaagaaacaaaactatctgaatcaccatattcaaccactaaggttacagagatcaggaaaggtcagtaatctgaacaatgtaacctgtgagggaaataattctgacgtcctttacaaagcttgtggaaagaagaagtatggctagagaacatgaactctgcctgagccaaaatgggttcttgtntactccactgctactcaagaaaataccgacaggcgtggttccaaagatcattaaatggccaagaattaagataatctcttgtgacttccggatcacttaagtaacagaacagtaatccttggaagatgaagaaagctatttggctaggcgcagtggcttaagcctgtaatccctgcactttgggaggccaaggcaggcggatcacctgaggtcaggagtttgagaccagcctggccaacatggcgaaaccccatctctactaaaaatacaaaaattagccggacatggtggtgtgcgcctgtaatcccagctgctctggaggctgagacaggagaatcgcttgaacccaggaagcaaaggttgcagtgagctgagatcataccactgcactgcagcctgggccacagtgagactcctccaaaanaaaaataaagaaaagaaagctattttatcacaggtctattaggtaggcttttatctaaaagggctagaggggattttttttcccagaaattcctgcaaagagcgtatgttttcccccgaagtcggtttctaatgactatccagtaatggagttgtgaaattatggtatttccatacattggaatactaagcatcttttttaaaaaaaaagtctgtatgtattgacctggaggatccctaatgtatatgtttaagtggataaaagcaagggtcagaagagtagttatgttattattaggtatattattttatcattcagataaaaatgaagcaaaaaatgaatactacctaacagtgagaacaaataagaattaacctaagactggccgggcgcggtggctcacgcctataatcacagcactttgggaggccgagncgggcagatcacgaggtcnggagacgagaccatcctggctaacacgatgaaaccccgtgtctactaaaaatacaaaaaaaaaaaaaattagctgagcgtggtgacaagcgcctgtagtcccagctactcaacaggctgaggcaggagaatggcatgaacccgggaggcagagcttgcagtgagccgagattgcgccactgcactccagcatgggtgacagagtgagactctgtctctg

SEQ ID NO: 237330 - DNA, 522 bp, Homo sapiens
ttgctttgcaagcaatgtccggcaccatcagcaactcctactggactcccaggagtttgcaagcgttcttaaccccttcggacgctccagccagatgccagtcaaacagatgatgctcttgcctgaggggaaaggaaagacacaacctagtgccacaggttttactcagaaactgtttccccagcttctccagctctttgtacttatttgtgtgtttttatatgcaagttagaactaacagtctattaaagctgttagatggagatacatgttccatcccaccctcagccacaccttggattttaatacttctggaacggtgcctgcaggtaccaggaagagctaaacaacttcacctgttgaagactggctagtgatggggaacggtcctcctgcttcccgcttttgtttccacttcccccattaactgttgtactctgttgagggaactcctttcagaaacagcaaaccagagaaactgcctcgctagcaaattcatgggctcagaaaataaacgtcaag

SEQ ID NO: 237331 - DNA, 224 bp, Homo sapiens
tcgatttctaattttatttaaaattgagaagaaatttaaaaacaaattgaggcaaatgctgttcgaaacatcaatttttttaaatgcccttttttttttttcctcttaagagtcagagtgatctctgctgtgctttttctctgctggaaacctaaccttttcacttagagtattaagggcttaatgaagttcttttgtgatttcaattaaatgctgaaacttta

SEQ ID NO: 237332 - DNA, 791 bp, Homo sapiens
gactgaaaaggagctttggaaatcactgcataaggcttgatttatttgcacaactttctttagggttgcagctagaacaaacctgtgtgctttgaaatgttaccttctgctctctgttcccaagtacagagaaataatgttgcaaatctcacttctgctgaacattatgcttcctgatgcatttagcagacactaaacatttgttgtactctaaacaaagttacaaaggactagaagaattcttgttctgtatttagaaacccactcacattacttgatatttgggtatttaagtcatgaaaggtatttcttctaggaagcagtgattctaaagtgtatgcttaaccagtcagttgagtgtctactcttgtgtgttcacaagtgtgcacaaagtttttggtaaattaagaatattatttcaaataaattaatttcatccccataggagccagtttatcagataattcgtttctcatttctgcaaatcaatacacaatgagctcatattcagataaattgagctcatatccagataaatataatagtttttctttatttcaacattgttcattgattgcaacccatttctaaaacaaattatttaatataaccaaactcctttaacttctcaacttttcccactaaaactgtgaaacattatataaaatctttaatcaataggatatgatacatatttcatcattttgtttcaggttttggttgtgataaataacactgaaaaaccatcctaatatatgtattaactttatcattagaaaaggggattgttc

SEQ ID NO: 237333 - DNA, 769 bp, Homo sapiens
gactgaaaaggagctttggaaatcactgcataaggcttgatttatttgcacaactttctttagggttgcagctagaacaaacctgtgtgctttgaaatgttaccttctgctctctgttcccaagtacagagaaataatgttgcaaatctcacttctgctgaacattatgcttcctgatgcatttagcagacactaaacatttgttgtactctaaacaaagttacaaaggactagaagaattcttgttctgtatttagaaacccactcacattacttgatatttgggtatttaagtcatgaaaggtatttcttctaggaagcagtgattctaaagtgtatgcttaaccagtcagttgagtgtctactcttgtgtgttcacaagtgtgcacaaagtttttggtaaattaagaatattatttcaaataaattaatttcatccccataggagccagtttatcagataattcgtttctcatttctgcaaatcaatacacaatgactcatatccagataaatataatagtttttctttatttcaacattgttcattgattgcaacccatttctaaaacaaattatttaatataaccaaactcctttaacttctcaacttttcccactaaaactgtgaaacattatataaaatctttaatcaataggatatgatacatatttcatcattttgtttcaggttttggttgtgataaataacactgaaaaaccatcctaatatatgtattaactttatcattagaaaaggggattgttc

SEQ ID NO: 237334 - DNA, 389 bp, Homo sapiens
catagctagggaacagggcactgtttcccactgtaatctctgggtttaagatggagaggaaaggtagtcctcaaaagaaggaagatcagctgggcatggtggctcaccctgtaatcccagcattttgggaggccaaggtgggtggatcacatgagcccaggagttcaagactagcctgggcagcatagcaacctcccccgagtctctacaaatatttaaaaaattagttgggtagggtggtgcatacctgtgttcccaggtattcagggcgttcaggagagaggatttcttgagtccaggaggacaaggttgcagtgagccgagatctgcagtgcacaccactacactccagtctgggtgacagtgggagaacctgtctcaaaaaaaag

SEQ ID NO: 237335 - DNA, 538 bp, Homo sapiens
gggtacacataatgcatgtggaacttaggtccaaggatctccagagagtgaaagcaggagtcatagtccaatgtcctacagagacagcacagcaaccctagctagcaacatttgtattagtctgaacaatatatacttatagaatacagccaaagatacacaaactgaaacagcttcatggggtggactctaacagtaatagcaatgttatagaatgagacttacttctctgctatctagatctgaactccttggcttctttacttagttcacgccccagcctaggaaagccagttacataaaagttggctcaggagtcttagagctttacctaaatatgagacccgaaaaatatccgccatgcatggagatatggaccaaaaggaacgagacgtgattatgagggagtttcgttctggctctagcagagttttgattaccactgacctgctggccagaggcattgatgtgcagcaggtttctttagtcatcaactatgaccttcccaccaacagggaaaactatatccacagaatca

SEQ ID NO: 237336 - DNA, 370 bp, Homo sapiens
aaggaagagttgaccctggagggtatccgccaattctacatcaacgtggaacgagaggagtggaagctggacacactatgtgacttgtatgaaaccctgaccatcacccaggcagtcatcttcatcaatacccggaggaaggtggactggctcaccgagaagatgcatgctcgagatttcactgtctccgccatgcatggagatatggaccaaaaggaacgagacgtgattatgagggagtttcgttctggctctagcagagttttgattaccactgacctgctggccagaggcattgatgtgcagcaggtttctttagtcatcaactatgaccttcccaccaacagggaaaactatatccacagaatca

SEQ ID NO: 237337 - DNA, 536 bp, Homo sapiens
gtacagctgcaatgcttgagaaaaaaatgcccaggaaaattcttgcctttgagcaggcccaccttatattgaaaccaaaagtctgcaagaaaaatggtagggaatgacctttaagccttggaggaagaatttatgagcacaactatagcttcttcttggcataaagttgtgttctgtattcttcaaaattctcagattttgtgcactgttggttcaaggtcacaacaaaaagcccctatgctctgaggacagaagcatgctgggatttcaagggcatggccagatttgagagaaaggagacctcagagcttacgacttggaaaggcagagtccaacgacaatgggtcattctcctgtttaggataagggcatgcaaatagcatgtgaattgcacattacatttctcagatgtgagtatttggttgaggaatgggggctgttggcaacacttctggaaattgaactatctttatcctgattcacagagttgtagctgagcagggcatagaggagaaaacagggcactgaaataggtt

SEQ ID NO: 237338 - DNA, 490 bp, Homo sapiens
tttgggctaagatttgcattattgcatgaaaacaacaaaacatatcaataaataacaaaaagcttggaattcagacaacagatccaagtctgggcttgatctcaagctagtgttttgatgttgaaaaaatgttatttggtctttctaaccccatttccttatgtaaaattggggatgatgataaattcactgataataagagttaaatgagattcttgaggagtcagaatggttctaacatgtgtaggtattattagcagtcatactgtagcataagaaaataccgtctgctgaaagagggacaataaagattatctacatggtcatcatttaaaagctaccagatataggaagaaggggccataaaatgataacgttatgatgattaattttgatgcttaggtcagagtccattctaggatatctgctgcccaaaaacagcagagactcatttctttggaatcacaggacgctgagtgagaggaaaaaa

SEQ ID NO: 237339 - DNA, 426 bp, Homo sapiens
ctagggcaataaagagaaaaattagtctaatgcatggtcttaacaagagggagagtgtgagcatgaataattaatctcactagtctatggcaatcagataaaatgaagtcccatttgctcaaccttattaaaagagagagagtgcgtgggagggagggagaaatggtaaaggtcgttaagggactcgtaacgtggaaagaactgcctttgagatgggtaatgtgttttctaatctctgtggtctttaactaaacgtcatggtaaaggtactcttcagatagttcggattcgtttgaattattaaacattttagaaaatactggactctggactactaacttagatgtctttatgatgaatttgcagagagtctttttggaaagggattacatctcactatatcactaagaaataatttatccactt

SEQ ID NO: 237340 - DNA, 372 bp, Homo sapiens
ctgtgaagctcaatttcttacctataaaatagggataatgccagtctttctggcttgtcaatacagactaaatgagagaatgtatgtgaaggttcctagtacatgccatgactgctaatctggatgactttatgtggtgctaagttttggtaagtatgattgttgatgaaaagtggatatcagccaggcgcggtggctcacacctgtaatcccaaagtgctgggattacaggtgtaagcccccatgcccggcctctgatttttctatagtgagaacataactatttctgtaataatattaaaaatacttgtcagtatcacatagaattttcaacagcagattcaaataaaatgaatccttgtgaaaaaaaaa

SEQ ID NO: 237341 - DNA, 439 bp, Homo sapiens
ccaggctagagtgcagtggggtgaccacggctcactgcagccttgacctcctgggctaaagttattctcttgcctcagcttcccaagtagctgggcccataggtgtgagccaccatgcccagctaattttatctatgtatctatgcatctatctatctatgggcagggtcatgctatacccaggctggtcttgaaatcctgggctcaagcaatcctcctgtctctgcctcccaaagtgttaggattacaggcatgagccaccatgcctggcctgctattttagttataaagtttcattaaatattatgtaaactgattacataactgtggaaaggaaagcattgttaagacaagtcttttcaaaagacctaatagggataaaatgctaaaaatttactgctgagttagatgtgggcaagataacagaaaaggattagag

SEQ ID NO: 237342 - DNA, 294 bp, Homo sapiens
tgatgttgtggtaacagtggaagaaggaagaggccaaggaaatgcgacacttatgtttgccagcaccttgctcagggcccgctggtggtgggggagtcgggatgttgtggaggggggatcctgggctcagctctgtcccgcagcccagccttggatgcctgcctggagcacgcaggccccagcagtgctggttgtcaggggatctgttttctcaccacgggattgggaagccttggaccagcttcccgtttctctcttgtctcctgccaaaagatctttggttctttgatctta

SEQ ID NO: 237343 - DNA, 675 bp, Homo sapiens
ggtagaggaaatttgcatctatggagaatcttcattaatgcagccatgcttcccctttctatgcctttccaggacctaggagtgattgagagtctgatacctttaaaggtctgaaaagaaacatttaccatctattctctctgagggccacctatgaggcttcatctacttaataagatccttggtctttcccccactcttatctgaactcaggcattcctttctatcgatttcaagactttagacgatagcataactctctcaaccaattgtcaactaaaggatccctaaaagccccttatgacgtacaagctcctaccctgacctacctgcaattacctgcagttggttgtctccttggaatgtataaaaccaaagtgtaacccggttgccttgggcacgctttcagaacctcttgagatagtgtaacccaggccttggtcacttatactggctctgaataaacctctttaaatatattttgacagaatttggtttttgtgtatttttctgtgtatttctacctctgagaagaggagtaatttatactctttaaaaatcatggtcaggtatgactggtgctagaatgaggatgaagggaagagaaagggaagaaataattctccactctttgtttccaattttagttctttaaagtaaaagtacaaaacattt

SEQ ID NO: 237344 - DNA, 482 bp, Homo sapiens
ttttgtagcctagtctgttgccaactcattaactccccatttaaaccctcttattttaaatatttattttttgtctaaaaaaaaatgtaagttcaatggaaacaaagaccttgtcttctttactgactactcaaatccatgccaagtccagtaaagttagtactaaaattctgaatgaattttacagtgaactggtctcactgccccaatccaatccccatcgttcacactgctttaaaaaaatgacgcattctttgggaggctaaggaaggcggatcacaaggtgaggagttcaagacctggctgaccaacatagtgaaaccctgtctttactaaatatacaaaaaattagctgggtatggtggcggatgcctgtaatcccagcactttgggaggcagaggtgagcagatcacttgaggccaggagtttgagaccagcctggccaccatggtgaaaccccatctctactaaaaatacaaaa

SEQ ID NO: 237345 - DNA, 624 bp, Homo sapiens
cattccagtttaacatttggatagcaaaggaactcagagtttataaaatttaaatataagatagacagtcacaattctgtgcaagcagtcagggttaattcagatcgtttcctctgctcttgcattccctgatttcaagcacggcgaggctggggctgtaattacggaatgggtagtactcactgttcaccagttgtgtgtaagctttaaactaataactcagcaattacgagaaaaatgagcggtaattacacccattttactcgcggctagacagatgggacattttctcctcgttattggcaaactgtcaccacatttatttcatttttactgtttactatttgttgtgctttgattaagagtaattataggctaggaaaatatgaaaaacatgaatgttgggtatttttaaaaatagaaggaggcccttctccctgttttatattgatagaattctcattttagatcctattaaaatgatatcaacattctcaagatatttccaggcaggcttcagttctgtgacagcttttcagcaggggattcccatgtttgctcattatttgggtcgtcatagacccataaatatcctgcattttttttttttttacagcagcctct

SEQ ID NO: 237346 - DNA, 2160 bp, Homo sapiens
tctacccttacttgcctgaactttatgccaggtgtgggaaattggggccagtctctctgtattcacctgtcttcaaaactgcttggcttcttccagaggaatagaaccgataatccattcaagcacagaacactcatgaagtggctcaccatgagtccaaacccgactctgtcctggacagctcttacttaaaggacaagttttgggaggacacaccaattttatttataaaagtgtcatcccgaagagacttggccaaagtggacccctcaaaatccttctgccaagggtcttacaatggcatagtttaggggttaagatgaggatgctagagtgagactgctggagttcaggtagctttaccacttattggctttgtggccttgggccgattacttaaactctttgggcctttgttttctcctttgtgaaactgggcaataatagttatacctactgtatggggttttcgtgtaaaggaattgagttaatatttatacaatgcctagaatggtgcctgggtatatagtaagagctactcagtgttagttactattactattgttgttgttatttatcatcaggtccataactgacccacattccttgagcttacaatagatctccaggagatgaccactacgcatgaggacatatttatcaacatgccttgcccaggtataaacctgtataccccttataggaagcaatctggacaaagctaaatgtgacaagtgaaattatctcgttcccacttcaaatgcataattatcaccctgccttcttggcagttttaaaaatgagactaagctcggtaacttgagttctcaaggcttcataatatatatattccctgaatgaaaaaaaaatacacgtttattggaaacccattgtatgtcagttaccagggattcaaagacatttaagccactgtttgttccctgcaaggtcttacaatctagtagagagaggcggataatgtatgattcccatgctgtacactaaatgccgttttcttagggaatttgcattggctccattcatggttttttcaggtctgtccatcagagcaaggtcttggcaaattagtgaagtaggcacagtttgtttttggctcctctctccccttaagacattccctttccctcctccgggaagtcccagttctaggattgaaaacatgattataatctctgctgacatgtttttgctaataatataaggatttgcccctcctgagggtaagtgcatttttgtaaggaggtcttgaacctaaaacatcattctagagctaaaggaatgaatttatacagaaagaatttcaggttacagcttagctgggggaaatgaagccttaagtactggttaatttttattctttaattataattgtttttacactatgcctatctttattttattgcccatgcttttttatgagtgggtttcctcaagtgttcaagtatagacaaagaataagcagtaaagcttttcatttctacttgcatttttactacttatattattgggcaagagtttgaaacactcagccttcaacctattttgccccattctgacagtaggtttcaggcctccttttcaccaaactcaattattatgcttgatattcaccatagaacttctacttcttctgttaaattaaaacatgcaaacctttaatgggaaagggcatattttattcgttaatgaaaaaacatgtttttatcacaatgctttctattcaaaggttgtgttgtagcatttgttgtgcatgtttttgtcctgaataagagcagcaggttctaacaggctagcccattattagaatttatttcttttcatgaataacaagttcattattttagaagtttaatccttttctctaaaaggggcatactatctctttagaaattaatcagtttttgccttcacatttggtcttcaattgctgtatagcattgtttcactctctaaattatgtgtcatagctatagaggtccatgaattgctgcagctgtcgttaagggggcatttttctatggtccatagaataagcactgtttgtatcctcttttcacaaacatttttttaaagttcccatgatggtctaagagaatattcattttcaattggaattaaaatttgcatggtaacaaattg

SEQ ID NO: 237347 - DNA, 215 bp, Homo sapiens
cccctcagtggtattccgggggactgcaagttcacctgggcacaaccatgttcctgctgagtactcctgctgaaaagggccacaaactgtgcagaagtgttgcaagagttgggattcaaatggattctggttaatatgagtgaagaaataagggaaggtaatatcaatataaaatacagggaagaaattgtaagaataaagaactggaagcacta

SEQ ID NO: 237348 - DNA, 343 bp, Homo sapiens
caaaatcatcagttcatcagtgacagaaagaacattctgaggtgcatgttcccaggagttagccaagggtcagtaatagggtcccagtgttcctcagagactccagggctaagcacccagactgctgtattaactctttcttcacagtcccaaatggcttaacgctattagcactttctaatatgtgccttagggtttttttcttattgaaaataaaatactggccaggtgcagtggctatacccatagtcccaacacttcgggaggccaaggcaggaggaacgcttgagcctgggagtttaagaccactcagggcacacagtgagacattgtctctatcaaa

SEQ ID NO: 237349 - DNA, 500 bp, Homo sapiens
cttgacagcttctcaggacttcagcctcaggctgagagttacactgtcagcttcatatttctcaggtctttggatgtgaactgaaccatgctaccggcttcccagagtctccagcttgcagatggcctattgtgggagccaattcccctaataaatcccttcttgtagatacatgcacatatacactgatatggtttggctgtgccccacccaaatctcaacttgaattgtatttcccagaattcccacgcattgtgggaggcacccaggaggaggtaactgaatcatgtgggctggtctttctcgtgctattctcgtgatagtgaataagtctcacgagatctgatgggtttatcaggggtttctgcttttgcttcttccttattttttctcttgctaccgccacataagaagtgccctttgcctcctgccatgattctgagaccttcccagccttgtggaactgtaagtccaattaaacctctttctcttcccagttt

SEQ ID NO: 237350 - DNA, 473 bp, Homo sapiens
actggactgaagatggtgactgtctgtccatgtctgtccttcccatcagcctggggacttacctccgtgtccacagcattacctagcgcagggcctggcaccctggaggcctcagggtgggcaaaaccagggtcacaaagttgacactgatactgcccctgcctgcttagggagtgggctggggaagagggtacaggagccagacttgagcatgaaagtgtcagtgatgatagcagccagcatttagcgggtacttacgtggcaggcatcgttccaagtcctttgcagagattaacccattcagtcctttcagtaccctttgtattatttattatttatttttattttttgagacggagttttgctctttttgcccaggctggagtgcaatggcggaggttgcagtgaaccgagatcgtgccactgcactccagcctgggtgacagagggagactccgtctcacaaaaaaaaa

SEQ ID NO: 237351 - DNA, 246 bp, Homo sapiens
aatttcctagtagcagttagcatggcctacagataccaagtcaataaaggtattttggaaactcagtcattcccacaaaattaaccaagtgacttgggagaatgcctataggttaatgcctgtgatacctgaagaaaagatgagaaaaatagaaagaaaaaaaaggagaaaaaaaagatgaaaggaagggcacagaaaaattatgatctaattgttcacataaagtttatttctttgggagaccaa

SEQ ID NO: 237352 - DNA, 508 bp, Homo sapiens
aaaaatcatagtgtgtacattgcttgaatgatccttttgggtttggctgttactcacagatgaaggagacatttccaaggttgtaaccagagtcattctaagcacagtccttgcagcagtagagacaatcccaatgactacaggaaatcctcaactctcatccagaacctgtaagctcaggacatgcatcataggaaggatgtgaattgctgcagtgcttccatggtagtcttttgctccctgcctacgtgggcaagaagctgtagactctgggataatttggacgatcccagcacgggtatactccactctgcttcatggcacttaccaaggctggagagagaccacacccatcccttctgttttccattgcattcccttccccaaactttccatccagaaattcttctttggttgaccctgccacattgtatattcttgttctcccccccatgatgcattttatttcagtatccttagattcctaataaatcaattatttaaacat

SEQ ID NO: 237353 - DNA, 327 bp, Homo sapiens
cagtttatttatcccaggcacagaaagacaaatactgcatgatctcacccacaggtggaatcttaaaacattgaactcacagaaacagagtagaatggaggttaccaggggctagagtgtggggggttggggtgatgttggtcagagggtacaaaagttcagttagacaggagaaagtttatcttttagtgattttcatgattttgacaaagttgaaacaactgaaacaaagtatctaaatattttaatacttgtaattattttttaattgttgagtgattttaatgagtcaaaaatataaaacaatcatgcataatacatataaat

SEQ ID NO: 237354 - DNA, 367 bp, Homo sapiens
tgacagagtaagactttgtctcaataaataaataagtagcacatatttaaaatgtattaaatttttttttttaattttactttaagttttgggttacatgtgctgaatatgcaggtttgctacataagtatacatgtgccatggtggtttgctgcacctatcaacctgtcatctaggttttaagctccgcacacattaagtatttgtctgaatgctcttcccctttcctcccatgccctaaagtgtatccttgattacttttgacatacgcatacactggtgaaaccatcagcttttaatcaagatcacaaacctatccatcaccccagacatttccactgaccctttttaatgtctcactcttgcc

SEQ ID NO: 237355 - DNA, 744 bp, Homo sapiens
ccgggaggcaaaggttgcagtgagccgagatctcgccactgcactgcagcctgggcaacagagcgagactccgtctcaaaaaaaaaaaaaaggggaagctgtgacttgttcagaaagttgcaagacaaatcagttatggaaagcagtgtgcctcatttcctgcaaatggctgagtgaaaaataactggcaggctaaaaagctgcaattcctcacacctggagtatcatccattccttttcaccatggcccagtctacgctgatcggagtaggggtttttatttccctttaggttccagcatattgggaaagattcctggagaggattcttattccaatctgtcaaggctcgaagaggttgaaatctttggggctagagagctggacgtgaaaatgccaattcctatggcaaacatacatgggctcttccattattagctaggtgacgtgagccaggtcacgtaacccggattgtaatcgagtagctgggattaaggttaagtgtaaaatgaagacatattagtagccaccgcttaaggacattgtgagaattacaggtaattagcactgtgtagaattcacgctaagcactcattgaatggctaccacagtctgatgatgtggtaaatggagggtgttgggaggggagatctctccaaagtccttgcagccagggctagggcctgagaaaacctctgcaattactggtgtgaccgattcatccattaaattaatattcactgag

SEQ ID NO: 237356 - DNA, 486 bp, Homo sapiens
ggatttgttcctgaagtttcactttagacagtctgattataatgttccatgcagaacacctctttacattattatctgcttgggggtacaagtaacatgtaaatttggtcaccttatcttgcctcaaatttcaggaaggctttgctcattcttttttcatctcttttctttatttttgtttgactggattattctgaaagacctgtcttcaagttccaagattcattcttcagactgatgtaggctattgttgaagttttcaaatgtattttgaatttttttcagtgaattctacagtttcagttttttgtttgtttgtttgtttgtttttgagacggagtcttgctctgttgcccaggttggagtgcagtcgtgtgatctcaggtcactgcaacctctgcctcccagattcaagtgattctcgtgcctcagcctccccagtagctgggattactggcgcacgccaccatgcctggctaatttttt

SEQ ID NO: 237357 - DNA, 263 bp, Homo sapiens
atctggaatcgtttggttattcagaaaagtctaatatgttgcattattttctgtgaatttttaccaataagttatttccaaaaaatgaaaaatacaagttttggaataatgcattttaaatttgtagtgtatatgcattcttagactattgcttatttgaattgatgagagttacataattggtctagaaggaggcttgtcatcttgtcaagcagaggaagaaagagatttggaatcatgaataaaagacattttattcttgg

SEQ ID NO: 237358 - DNA, 552 bp, Homo sapiens
tctgagaaatgcatcgttaggttattttttatttgtgtgaacaccattgagtgtacttacacaaacctagatggtaaagcctattacacacctaggctatatggtatagcctcttgctcctaggctacaaacctgtaaaacatgttaccatactgaatgctgtaggcaactgtaacatgatagacatggtaagtattagtgtatctaaacatagaaaaagtaatgcattgctctacaacattatcatagttacaatgtcactagataatagaaatttttcagcttcattataatcttatgggaccactgttgtatatgtggtccttcgttgactagaaacatcattatgtggtgcattacagtatacaatttttaaatttctaagggggctaacatattaccagaggaaaaaaagttcagttttatttcttttcttatgttcccatctgcaggcaaattatccttagattctaacactttctaattaataagaattcttgcaaagtatcatcaacatctatcctcaaataaatgaatacatggaaatttaaa

SEQ ID NO: 237359 - DNA, 2448 bp, Homo sapiens
agtgggtaacgggtgaagaatgtgggggagagtggcagttggccagatgccgaaccaccaccaggggtggttggcaaactgcagccacccaaggggctggagtagttttcaaacagtatcccaggaggaaaagcagacgcgtgacagagtcagagagcaggcatagagtgctgtggcagtcagccagtgcccacatcaacaccaaggagagtcctgcgggtgctgtgcaaggccgggtgcacgcgttactttggctaaaaggaggtgagcggcactctgcccttccagagcaagcatggagcaacaggatcagagcatgaaggaagggaggctgacgcttgtgcttgccctggcaaccctgatagctgcctttgggtcatccttccagtatgggtacaacgtggctgctgtcaactccccagcactgctcatgcaacaattttacaatgagacttactatggtaggaccggtgaattcatggaagacttccccttgacgttgctgtggtctgtaaccgtgtccatgtttccatttggagggtttatcggatccctcctggtcggccccttggtgaataaatttggcagaaaaggggccttgctgttcaacaacatattttctatcgtgcctgcgatcttaatgggatgcagcagagtcgccacatcatttgagcttatcattatttccagacttttggtgggaatatgtgcaggtgtatcttccaacgtggtccccatgtacttaggggagctggcccctaaaaacctgcggggggctctcggggtggtgccccagctcttcatcactgttggcatccttgtggcccagatctttggtcttcggaatctccttgcaaacgtagatggctggccgatcctgctggggctgaccggggtccccgcggcgctgcagctccttctgctgcccttcttccccgagagccccaggtacctgctgattcagaagaaagacgaagcggccgccaagaaagccctacagacgctgcgcggctgggactctgtggacagggaggtggccgagatccggcaggaggatgaggcagagaaggccgcgggcttcatctccgtgctgaagctgttccggatgcgctcgctgcgctggcagctgctgtccatcatcgtcctcatgggcggccagcagctgtcgggcgtcaacgctatctactactacgcggaccagatctacctgagcgccggcgtgccggaggagcacgtgcagtacgtgacggccggcaccggggccgtgaacgtggtcatgaccttctgcgccgtgttcgtggtggagctcctgggtcggaggctgctgctgctgctgggcttctccatctgcctcatagcctgctgcgtgctcactgcagctctggcactgcaggacacagtgtcctggatgccatacatcagcatcgtctgtgtcatctcctacgtcataggacatgccctcgggcccagtcccatacccgcgctgctcatcactgagatcttcctgcagtcctctcggccatctgccttcatggtggggggcagtgtgcactggctctccaacttcaccgtgggcttgatcttcccgttcatccaggagggcctcggcccgtacagcttcattgtcttcgccgtgatctgcctcctcaccaccatctacatcttcttgattgtcccggagaccaaggccaagacgttcatagagatcaaccagattttcaccaagatgaataaggtgtctgaagtgtacccggaaaaggaggaactgaaagagcttccacctgtcacttcggaacagtgactctggagaggaagccagtggagctggtctgccaggggcttcccactttggcttatttttctgacttctagctgtctgtgaatatccagaaataaaacaactctgatgtggaatgcagtcctcatctccagcctccccaccccagtgggaactgtgcaaagggctgccttgctgttcttgaagctgggctgtctctctccatgttggcctgtcaccagacccgagtcaattaaacagctggtcctccactttgctggttcagccttcgtgtggctcctggtaacgtggctccaccttgatgggtcaacctttgtgtggctcctggtaacataacaacaacagttactatagtggtgagatggaaggaatcaaattttgccagagaaactaactcggtggccccaacaggtcttccggggccatgggcatttgtttagagccaaattcatcctcttaccagatccttttccagaaatacctgtctaggaaggtgtgatgtcagaaacaatgacatccagaaagctgaggaacaggttcctgtggagacactgagtcagaattcttcatcctaaattattttgttagtggaaaatggaattgcttctgtgtagtcaataaaatgaacctgatcacttttcaaaaaaaaa

SEQ ID NO: 237360 - DNA, 2433 bp, Homo sapiens
acctcaccgctgccatccccctcctccatctttgagccactaggcttctcacagtctcccaccccgccctgctcgcggagcctgcaggcctcggcctcatggcggcctgaggcaggggcctggaggctggtccgcccgccacgaaggttggggggtccctggccagaagcaggacccgggcgaggctgagggggactctggcagaagctgaaggggacccggtgcacgcgttactttggctaaaaggaggtgagcggcactctgcccttccagagcaagcatggagcaacaggatcagagcatgaaggaagggaggctgacgcttgtgcttgccctggcaaccctgatagctgcctttgggtcatccttccagtatgggtacaacgtggctgctgtcaactccccagcactgctcatgcaacaattttacaatgagacttactatggtaggaccggtgaattcatggaagacttccccttgacgttgctgtggtctgtaaccgtgtccatgtttccatttggagggtttatcggatccctcctggtcggccccttggtgaataaatttggcagaaaaggggccttgctgttcaacaacatattttctatcgtgcctgcgatcttaatgggatgcagcagagtcgccacatcatttgagcttatcattatttccagacttttggtgggaatatgtgcaggtgtatcttccaacgtggtccccatgtacttaggggagctggcccctaaaaacctgcggggggctctcggggtggtgccccagctcttcatcactgttggcatccttgtggcccagatctttggtcttcggaatctccttgcaaacgtagatggctggccgatcctgctggggctgaccggggtccccgcggcgctgcagctccttctgctgcccttcttccccgagagccccaggtacctgctgattcagaagaaagacgaagcggccgccaagaaagccctacagacgctgcgcggctgggactctgtggacagggaggtggccgagatccggcaggaggatgaggcagagaaggccgcgggcttcatctccgtgctgaagctgttccggatgcgctcgctgcgctggcagctgctgtccatcatcgtcctcatgggcggccagcagctgtcgggcgtcaacgctatctactactacgcggaccagatctacctgagcgccggcgtgccggaggagcacgtgcagtacgtgacggccggcaccggggccgtgaacgtggtcatgaccttctgcgccgtgttcgtggtggagctcctgggtcggaggctgctgctgctgctgggcttctccatctgcctcatagcctgctgcgtgctcactgcagctctggcactgcaggacacagtgtcctggatgccatacatcagcatcgtctgtgtcatctcctacgtcataggacatgccctcgggcccagtcccatacccgcgctgctcatcactgagatcttcctgcagtcctctcggccatctgccttcatggtggggggcagtgtgcactggctctccaacttcaccgtgggcttgatcttcccgttcatccaggagggcctcggcccgtacagcttcattgtcttcgccgtgatctgcctcctcaccaccatctacatcttcttgattgtcccggagaccaaggccaagacgttcatagagatcaaccagattttcaccaagatgaataaggtgtctgaagtgtacccggaaaaggaggaactgaaagagcttccacctgtcacttcggaacagtgactctggagaggaagccagtggagctggtctgccaggggcttcccactttggcttatttttctgacttctagctgtctgtgaatatccagaaataaaacaactctgatgtggaatgcagtcctcatctccagcctccccaccccagtgggaactgtgcaaagggctgccttgctgttcttgaagctgggctgtctctctccatgttggcctgtcaccagacccgagtcaattaaacagctggtcctccactttgctggttcagccttcgtgtggctcctggtaacgtggctccaccttgatgggtcaacctttgtgtggctcctggtaacataacaacaacagttactatagtggtgagatggaaggaatcaaattttgccagagaaactaactcggtggccccaacaggtcttccggggccatgggcatttgtttagagccaaattcatcctcttaccagatccttttccagaaatacctgtctaggaaggtgtgatgtcagaaacaatgacatccagaaagctgaggaacaggttcctgtggagacactgagtcagaattcttcatcctaaattattttgttagtggaaaatggaattgcttctgtgtagtcaataaaatgaacctgatcacttttcaaaaaaaaa

SEQ ID NO: 237361 - DNA, 2343 bp, Homo sapiens
atcattgtctggtcacagaacagcccggagatgtgccagcttgctttgtgggacagggtcttgctctgtcacctaggctggagtgcagtggcatgatcgaattcctgggctcaagcgatcctcttgcctcagtgcacgcgttactttggctaaaaggaggtgagcggcactctgcccttccagagcaagcatggagcaacaggatcagagcatgaaggaagggaggctgacgcttgtgcttgccctggcaaccctgatagctgcctttgggtcatccttccagtatgggtacaacgtggctgctgtcaactccccagcactgctcatgcaacaattttacaatgagacttactatggtaggaccggtgaattcatggaagacttccccttgacgttgctgtggtctgtaaccgtgtccatgtttccatttggagggtttatcggatccctcctggtcggccccttggtgaataaatttggcagaaaaggggccttgctgttcaacaacatattttctatcgtgcctgcgatcttaatgggatgcagcagagtcgccacatcatttgagcttatcattatttccagacttttggtgggaatatgtgcaggtgtatcttccaacgtggtccccatgtacttaggggagctggcccctaaaaacctgcggggggctctcggggtggtgccccagctcttcatcactgttggcatccttgtggcccagatctttggtcttcggaatctccttgcaaacgtagatggctggccgatcctgctggggctgaccggggtccccgcggcgctgcagctccttctgctgcccttcttccccgagagccccaggtacctgctgattcagaagaaagacgaagcggccgccaagaaagccctacagacgctgcgcggctgggactctgtggacagggaggtggccgagatccggcaggaggatgaggcagagaaggccgcgggcttcatctccgtgctgaagctgttccggatgcgctcgctgcgctggcagctgctgtccatcatcgtcctcatgggcggccagcagctgtcgggcgtcaacgctatctactactacgcggaccagatctacctgagcgccggcgtgccggaggagcacgtgcagtacgtgacggccggcaccggggccgtgaacgtggtcatgaccttctgcgccgtgttcgtggtggagctcctgggtcggaggctgctgctgctgctgggcttctccatctgcctcatagcctgctgcgtgctcactgcagctctggcactgcaggacacagtgtcctggatgccatacatcagcatcgtctgtgtcatctcctacgtcataggacatgccctcgggcccagtcccatacccgcgctgctcatcactgagatcttcctgcagtcctctcggccatctgccttcatggtggggggcagtgtgcactggctctccaacttcaccgtgggcttgatcttcccgttcatccaggagggcctcggcccgtacagcttcattgtcttcgccgtgatctgcctcctcaccaccatctacatcttcttgattgtcccggagaccaaggccaagacgttcatagagatcaaccagattttcaccaagatgaataaggtgtctgaagtgtacccggaaaaggaggaactgaaagagcttccacctgtcacttcggaacagtgactctggagaggaagccagtggagctggtctgccaggggcttcccactttggcttatttttctgacttctagctgtctgtgaatatccagaaataaaacaactctgatgtggaatgcagtcctcatctccagcctccccaccccagtgggaactgtgcaaagggctgccttgctgttcttgaagctgggctgtctctctccatgttggcctgtcaccagacccgagtcaattaaacagctggtcctccactttgctggttcagccttcgtgtggctcctggtaacgtggctccaccttgatgggtcaacctttgtgtggctcctggtaacataacaacaacagttactatagtggtgagatggaaggaatcaaattttgccagagaaactaactcggtggccccaacaggtcttccggggccatgggcatttgtttagagccaaattcatcctcttaccagatccttttccagaaatacctgtctaggaaggtgtgatgtcagaaacaatgacatccagaaagctgaggaacaggttcctgtggagacactgagtcagaattcttcatcctaaattattttgttagtggaaaatggaattgcttctgtgtagtcaataaaatgaacctgatcacttttcaaaaaaaaa

SEQ ID NO: 237362 - DNA, 2617 bp, Homo sapiens
agtgggtaacgggtgaagaatgtgggggagagtggcagttggccagatgccgaaccaccaccaggggtggttggcaaactgcagccacccaaggggctggagtagttttcaaacagtttgactcttttcatcaacaccagcaccacattatcccaggaggaaaagcagacgcgtgacagagtcagagagcaggcatagagtgctgtggcagtcagccagtgcccacatcaacaccaaggagagtcctgcgggtgctgtgcaaggccgggtgcacgcgttactttggctaaaaggaggtgagcggcactctgcccttccagagcaagcatggagcaacaggatcagagcatgaaggaagggaggctgacgcttgtgcttgccctggcaaccctgatagctgcctttgggtcatccttccagtatgggtacaacgtggctgctgtcaactccccagcactgctcatgcaacaattttacaatgagacttactatggtaggaccggtgaattcatggaagacttccccttgacgttgctgtggtctgtaaccgtgtccatgtttccatttggagggtttatcggatccctcctggtcggccccttggtgaataaatttggcagaaaaggggccttgctgttcaacaacatattttctatcgtgcctgcgatcttaatgggatgcagcagagtcgccacatcatttgagcttatcattatttccagacttttggtgggaatatgtgcaggtgtatcttccaacgtggtccccatgtacttaggggagctggcccctaaaaacctgcggggggctctcggggtggtgccccagctcttcatcactgttggcatccttgtggcccagatctttggtcttcggaatctccttgcaaacgtagatggctggccgatcctgctggggctgaccggggtccccgcggcgctgcagctccttctgctgcccttcttccccgagagccccaggtacctgctgattcagaagaaagacgaagcggccgccaagaaagccctacagacgctgcgcggctgggactctgtggacagggaggtggccgagatccggcaggaggatgaggcagagaaggccgcgggcttcatctccgtgctgaagctgttccggatgcgctcgctgcgctggcagctgctgtccatcatcgtcctcatgggcggccagcagctgtcgggcgtcaacgctgtatgggccgggctgcggctcgggagctggggagggctcggggggcgcggggcgcaggtcctggggcgccgggcgtgggtcctggcgccgaggccgcctcctccgggcagccgcccagccccgcgcttgccctgcagatctactactacgcggaccagatctacctgagcgccggcgtgccggaggagcacgtgcagtacgtgacggccggcaccggggccgtgaacgtggtcatgaccttctgcgccgtgttcgtggtggagctcctgggtcggaggctgctgctgctgctgggcttctccatctgcctcatagcctgctgcgtgctcactgcagctctggcactgcaggacacagtgtcctggatgccatacatcagcatcgtctgtgtcatctcctacgtcataggacatgccctcgggcccagtcccatacccgcgctgctcatcactgagatcttcctgcagtcctctcggccatctgccttcatggtggggggcagtgtgcactggctctccaacttcaccgtgggcttgatcttcccgttcatccaggagggcctcggcccgtacagcttcattgtcttcgccgtgatctgcctcctcaccaccatctacatcttcttgattgtcccggagaccaaggccaagacgttcatagagatcaaccagattttcaccaagatgaataaggtgtctgaagtgtacccggaaaaggaggaactgaaagagcttccacctgtcacttcggaacagtgactctggagaggaagccagtggagctggtctgccaggggcttcccactttggcttatttttctgacttctagctgtctgtgaatatccagaaataaaacaactctgatgtggaatgcagtcctcatctccagcctccccaccccagtgggaactgtgcaaagggctgccttgctgttcttgaagctgggctgtctctctccatgttggcctgtcaccagacccgagtcaattaaacagctggtcctccactttgctggttcagccttcgtgtggctcctggtaacgtggctccaccttgatgggtcaacctttgtgtggctcctggtaacataacaacaacagttactatagtggtgagatggaaggaatcaaattttgccagagaaactaactcggtggccccaacaggtcttccggggccatgggcatttgtttagagccaaattcatcctcttaccagatccttttccagaaatacctgtctaggaaggtgtgatgtcagaaacaatgacatccagaaagctgaggaacaggttcctgtggagacactgagtcagaattcttcatcctaaattattttgttagtggaaaatggaattgcttctgtgtagtcaataaaatgaacctgatcacttttcaaaaaaaaa

SEQ ID NO: 237363 - DNA, 2253 bp, Homo sapiens
ctgcatgtgttggggacacttacgccaaggcgccgcgttctcattaggagctgggaccagaagtgaataagccaggttcctgtctcagggagctccatagcaggactcagaaccacacacggccctctaggcatttgtgaagctctgtgcttcatttttttgctttgcctctagttttgcctttgcagtaccaatgcagccagcccatgtgtcccctctatgtggaatgttaacgatattcccactgtttctggtgtcctttctgtaatcagagctgccgtgaccattccagttcaggcatcctggtggcctggcttctctgggcatagagctgggagtgggcagttgggtcaggccgggtatgcccagctcctccagcccctgcaagactgtcctctgaaggacacggggacgttctcaccagcacatggtattaccggtctcgtcggtgtggtctgtctgatgggcgcaggggtgcgtcgctgctgatccctgctgcaggtgtttcccgagtgtccaccgtcgggagttgctgttcttagggctgggaaagctgtgccctcctggagcctgcaccccactcaggatgacggggctggggccggctctgcagagggcgccttcggggtggtggggaggccgctggtgccagctcgctgccttcctcccaggctggccgatcctgctggggctgaccggggtccccgcggcgctgcagctccttctgctgcccttcttccccgagagccccaggtacctgctgattcagaagaaagacgaagcggccgccaagaaagccctacagacgctgcgcggctgggactctgtggacagggaggtggccgagatccggcaggaggatgaggcagagaaggccgcgggcttcatctccgtgctgaagctgttccggatgcgctcgctgcgctggcagctgctgtccatcatcgtcctcatgggcggccagcagctgtcgggcgtcaacgctatctactactacgcggaccagatctacctgagcgccggcgtgccggaggagcacgtgcagtacgtgacggccggcaccggggccgtgaacgtggtcatgaccttctgcgccgtgttcgtggtggagctcctgggtcggaggctgctgctgctgctgggcttctccatctgcctcatagcctgctgcgtgctcactgcagctctggcactgcaggacacagtgtcctggatgccatacatcagcatcgtctgtgtcatctcctacgtcataggacatgccctcgggcccagtcccatacccgcgctgctcatcactgagatcttcctgcagtcctctcggccatctgccttcatggtggggggcagtgtgcactggctctccaacttcaccgtgggcttgatcttcccgttcatccaggagggcctcggcccgtacagcttcattgtcttcgccgtgatctgcctcctcaccaccatctacatcttcttgattgtcccggagaccaaggccaagacgttcatagagatcaaccagattttcaccaagatgaataaggtgtctgaagtgtacccggaaaaggaggaactgaaagagcttccacctgtcacttcggaacagtgactctggagaggaagccagtggagctggtctgccaggggcttcccactttggcttatttttctgacttctagctgtctgtgaatatccagaaataaaacaactctgatgtggaatgcagtcctcatctccagcctccccaccccagtgggaactgtgcaaagggctgccttgctgttcttgaagctgggctgtctctctccatgttggcctgtcaccagacccgagtcaattaaacagctggtcctccactttgctggttcagccttcgtgtggctcctggtaacgtggctccaccttgatgggtcaacctttgtgtggctcctggtaacataacaacaacagttactatagtggtgagatggaaggaatcaaattttgccagagaaactaactcggtggccccaacaggtcttccggggccatgggcatttgtttagagccaaattcatcctcttaccagatccttttccagaaatacctgtctaggaaggtgtgatgtcagaaacaatgacatccagaaagctgaggaacaggttcctgtggagacactgagtcagaattcttcatcctaaattattttgttagtggaaaatggaattgcttctgtgtagtcaataaaatgaacctgatcacttttcaaaaaaaaa

SEQ ID NO: 237364 - DNA, 1945 bp, Homo sapiens
agtgggtaacgggtgaagaatgtgggggagagtggcagttggccagatgccgaaccaccaccaggggtggttggcaaactgcagccacccaaggggctggagtagttttcaaacagtttgactcttttcatcaacaccagcaccacattatcccaggaggaaaagcagacgcgtgacagagtcagagagcaggcatagagtgctgtggcagtcagccagtgcccacatcaacaccaaggagagtcctgcgggtgctgtgcaaggccgggtgcacgcgttactttggctaaaaggaggtgagcggcactctgcccttccagagcaagcatggagcaacaggatcagagcatgaaggaagggaggctgacgcttgtgcttgccctggcaaccctgatagctgcctttgggtcatccttccagtatgggtacaacgtggctgctgtcaactccccagcactgctcatgcaacaattttacaatgagacttactatggtaggaccggtgaattcatggaagacttccccttgacgttgctgtggtctgtaaccgtgtccatgtttccatttggagggtttatcggatccctcctggtcggccccttggtgaataaatttggcagaaaaggggccttgctgttcaacaacatattttctatcgtgcctgcgatcttaatgggatgcagcagagtcgccacatcatttgagcttatcattatttccagacttttggtgggaatatgtgcaggtgtatcttccaacgtggtccccatgtacttaggggagctggcccctaaaaacctgcggggggctctcggggtggtgccccagctcttcatcactgttggcatccttgtggcccagatctttggtcttcggaatctccttgcaaacgtagatggctggccgatcctgctggggctgaccggggtccccgcggcgctgcagctccttctgctgcccttcttccccgagagccccaggtacctgctgattcagaagaaagacgaagcggccgccaagaaagccctacagacgctgcgcggctgggactctgtggacagggaggtggccgagatccggcaggaggatgaggcagagaaggccgcgggcttcatctccgtgctgaagctgttccggatgcgctcgctgcgctggcagctgctgtccatcatcgtcctcatgggcggccagcagctgtcgggcgtcaacgctatctactactacgcggaccagatctacctgagcgccggcgtgccggaggagcacgtgcagtacgtgacggccggcaccggggccgtgaacgtggtcatgaccttctgcgccgtgttcgtggtggagctcctgggtcggaggctgctgctgctgctgggcttctccatctgcctcatagcctgctgcgtgctcactgcagctctggcactgcaggacacagtgtcctggatgccatacatcagcatcgtctgtgtcatctcctacgtcataggacatgccctcgggcccagtcccatacccgcgctgctcatcactgagatcttcctgcagtcctctcggccatctgccttcatggtggggggcagtgtgcactggctctccaacttcaccgtgggcttgatcttcccgttcatccaggagggcctcggcccgtacagcttcattgtcttcgccgtgatctgcctcctcaccaccatctacatcttcttgattgtcccggagaccaaggccaagacgttcatagagatcaaccagattttcaccaagatgaataaggtgtctgaagtgtacccggaaaaggaggaactgaaagagcttccacctgtcacttcggaacagtgactctggagaggaagccagtggagctggtctgccaggggcttcccactttggcttatttttctgacttctagctgtctgtgaatatccagaaataaaacaactctgatgtgga

SEQ ID NO: 237365 - DNA, 2221 bp, Homo sapiens
gcgtgaggcaggaacgtctggccattcccatcacgcaatgttggagcaacagaatccgagcgatgaccgaaggtaggcttactgttttcttgtgcgccatgggatctcgctgatagtctacctattgcggtcctccttcccggtatgagatacaacagttactgctgtcaactccccagcacgtgtatcatgcgaagcaaatttacagagtgacgacttactatgtgttggagctgatcgacattcatggaacacttcccttaatgttcctgtggtctgtaccgtgtgctgttcccatttgctcagttttcgagctcctcttgctcgggcccattggtgaagtaagtctcgggactcccataaaaggggccttgctgttcaacaacatattttctatcgtgcctgcgatcttaatgggatgcagcagagtcgccacatcatttgagcttatcattatttccagacttttggtgggaatatgtgcaggtgtatcttccaacgtggtccccatgtacttaggggagctggcccctaaaaacctgcggggggctctcggggtggtgccccagctcttcatcactgttggcatccttgtggcccagatctttggtcttcggaatctccttgcaaacgtagatggctggccgatcctgctggggctgaccggggtccccgcggcgctgcagctccttctgctgcccttcttccccgagagccccaggtacctgctgattcagaagaaagacgaagcggccgccaagaaagccctacagacgctgcgcggctgggactctgtggacagggaggtggccgagatccggcaggaggatgaggcagagaaggccgcgggcttcatctccgtgctgaagctgttccggatgcgctcgctgcgctggcagctgctgtccatcatcgtcctcatgggcggccagcagctgtcgggcgtcaacgctatctactactacgcggaccagatctacctgagcgccggcgtgccggaggagcacgtgcagtacgtgacggccggcaccggggccgtgaacgtggtcatgaccttctgcgccgtgttcgtggtggagctcctgggtcggaggctgctgctgctgctgggcttctccatctgcctcatagcctgctgcgtgctcactgcagctctggcactgcaggacacagtgtcctggatgccatacatcagcatcgtctgtgtcatctcctacgtcataggacatgccctcgggcccagtcccatacccgcgctgctcatcactgagatcttcctgcagtcctctcggccatctgccttcatggtggggggcagtgtgcactggctctccaacttcaccgtgggcttgatcttcccgttcatccaggagggcctcggcccgtacagcttcattgtcttcgccgtgatctgcctcctcaccaccatctacatcttcttgattgtcccggagaccaaggccaagacgttcatagagatcaaccagattttcaccaagatgaataaggtgtctgaagtgtacccggaaaaggaggaactgaaagagcttccacctgtcacttcggaacagtgactctggagaggaagccagtggagctggtctgccaggggcttcccactttggcttatttttctgacttctagctgtctgtgaatatccagaaataaaacaactctgatgtggaatgcagtcctcatctccagcctccccaccccagtgggaactgtgcaaagggctgccttgctgttcttgaagctgggctgtctctctccatgttggcctgtcaccagacccgagtcaattaaacagctggtcctccactttgctggttcagccttcgtgtggctcctggtaacgtggctccaccttgatgggtcaacctttgtgtggctcctggtaacataacaacaacagttactatagtggtgagatggaaggaatcaaattttgccagagaaactaactcggtggccccaacaggtcttccggggccatgggcatttgtttagagccaaattcatcctcttaccagatccttttccagaaatacctgtctaggaaggtgtgatgtcagaaacaatgacatccagaaagctgaggaacaggttcctgtggagacactgagtcagaattcttcatcctaaattattttgttagtggaaaatggaattgcttctgtgtagtcaataaaatgaacctgatcacttttcaaaaaaaaa

SEQ ID NO: 237366 - DNA, 1955 bp, Homo sapiens
gtattaacttgtcttaattttgcaggttcctgaaagggttattctgacttaatctggctataaaaatgctattggctgttattagcggatggccaaagtgcacccagaatgtcttctctctccattcagtgcacgcgttactttggctaaaaggaggtgagcggcactctgcccttccagagcaagcatggagcaacaggatcagagcatgaaggaaggggtgtatcttccaacgtggtccccatgtacttaggggagctggcccctaaaaacctgcggggggctctcggggtggtgccccagctcttcatcactgttggcatccttgtggcccagatctttggtcttcggaatctccttgcaaacgtagatggctggccgatcctgctggggctgaccggggtccccgcggcgctgcagctccttctgctgcccttcttccccgagagccccaggtacctgctgattcagaagaaagacgaagcggccgccaagaaagccctacagacgctgcgcggctgggactctgtggacagggaggtggccgagatccggcaggaggatgaggcagagaaggccgcgggcttcatctccgtgctgaagctgttccggatgcgctcgctgcgctggcagctgctgtccatcatcgtcctcatgggcggccagcagctgtcgggcgtcaacgctatctactactacgcggaccagatctacctgagcgccggcgtgccggaggagcacgtgcagtacgtgacggccggcaccggggccgtgaacgtggtcatgaccttctgcgccgtgttcgtggtggagctcctgggtcggaggctgctgctgctgctgggcttctccatctgcctcatagcctgctgcgtgctcactgcagctctggcactgcaggacacagtgtcctggatgccatacatcagcatcgtctgtgtcatctcctacgtcataggacatgccctcgggcccagtcccatacccgcgctgctcatcactgagatcttcctgcagtcctctcggccatctgccttcatggtggggggcagtgtgcactggctctccaacttcaccgtgggcttgatcttcccgttcatccaggagggcctcggcccgtacagcttcattgtcttcgccgtgatctgcctcctcaccaccatctacatcttcttgattgtcccggagaccaaggccaagacgttcatagagatcaaccagattttcaccaagatgaataaggtgtctgaagtgtacccggaaaaggaggaactgaaagagcttccacctgtcacttcggaacagtgactctggagaggaagccagtggagctggtctgccaggggcttcccactttggcttatttttctgacttctagctgtctgtgaatatccagaaataaaacaactctgatgtggaatgcagtcctcatctccagcctccccaccccagtgggaactgtgcaaagggctgccttgctgttcttgaagctgggctgtctctctccatgttggcctgtcaccagacccgagtcaattaaacagctggtcctccactttgctggttcagccttcgtgtggctcctggtaacgtggctccaccttgatgggtcaacctttgtgtggctcctggtaacataacaacaacagttactatagtggtgagatggaaggaatcaaattttgccagagaaactaactcggtggccccaacaggtcttccggggccatgggcatttgtttagagccaaattcatcctcttaccagatccttttccagaaatacctgtctaggaaggtgtgatgtcagaaacaatgacatccagaaagctgaggaacaggttcctgtggagacactgagtcagaattcttcatcctaaattattttgttagtggaaaatggaattgcttctgtgtagtcaataaaatgaacctgatcacttttcaaaaaaaaa

SEQ ID NO: 237367 - DNA, 2480 bp, Homo sapiens
agtgggtaacgggtgaagaatgtgggggagagtggcagttggccagatgccgaaccaccaccaggggtggttggcaaactgcagccacccaaggggctggagtagttttcaaacagtttgactcttttcatcaacaccagcaccacattatcccaggaggaaaagcagacgcgtgacagagtcagagagcaggcatagagtgctgtggcagtcagccagtgcccacatcaacaccaaggagagtcctgcgggtgctgtgcaaggccgggtgcacgcgttactttggctaaaaggaggtgagcggcactctgcccttccagagcaagcatggagcaacaggatcagagcatgaaggaagggaggctgacgcttgtgcttgccctggcaaccctgatagctgcctttgggtcatccttccagtatgggtacaacgtggctgctgtcaactccccagcactgctcatgcaacaattttacaatgagacttactatggtaggaccggtgaattcatggaagacttccccttgacgttgctgtggtctgtaaccgtgtccatgtttccatttggagggtttatcggatccctcctggtcggccccttggtgaataaatttggcagaaaaggggccttgctgttcaacaacatattttctatcgtgcctgcgatcttaatgggatgcagcagagtcgccacatcatttgagcttatcattatttccagacttttggtgggaatatgtgcaggtgtatcttccaacgtggtccccatgtacttaggggagctggcccctaaaaacctgcggggggctctcggggtggtgccccagctcttcatcactgttggcatccttgtggcccagatctttggtcttcggaatctccttgcaaacgtagatggctggccgatcctgctggggctgaccggggtccccgcggcgctgcagctccttctgctgcccttcttccccgagagccccaggtacctgctgattcagaagaaagacgaagcggccgccaagaaagccctacagacgctgcgcggctgggactctgtggacagggaggtggccgagatccggcaggaggatgaggcagagaaggccgcgggcttcatctccgtgctgaagctgttccggatgcgctcgctgcgctggcagctgctgtccatcatcgtcctcatgggcggccagcagctgtcgggcgtcaacgctatctactactacgcggaccagatctacctgagcgccggcgtgccggaggagcacgtgcagtacgtgacggccggcaccggggccgtgaacgtggtcatgaccttctgcgccgtgttcgtggtggagctcctgggtcggaggctgctgctgctgctgggcttctccatctgcctcatagcctgctgcgtgctcactgcagctctggcactgcaggacacagtgtcctggatgccatacatcagcatcgtctgtgtcatctcctacgtcataggacatgccctcgggcccagtcccatacccgcgctgctcatcactgagatcttcctgcagtcctctcggccatctgccttcatggtggggggcagtgtgcactggctctccaacttcaccgtgggcttgatcttcccgttcatccaggagggcctcggcccgtacagcttcattgtcttcgccgtgatctgcctcctcaccaccatctacatcttcttgattgtcccggagaccaaggccaagacgttcatagagatcaaccagattttcaccaagatgaataaggtgtctgaagtgtacccggaaaaggaggaactgaaagagcttccacctgtcacttcggaacagtgactctggagaggaagccagtggagctggtctgccaggggcttcccactttggcttatttttctgacttctagctgtctgtgaatatccagaaataaaacaactctgatgtggaatgcagtcctcatctccagcctccccaccccagtgggaactgtgcaaagggctgccttgctgttcttgaagctgggctgtctctctccatgttggcctgtcaccagacccgagtcaattaaacagctggtcctccactttgctggttcagccttcgtgtggctcctggtaacgtggctccaccttgatgggtcaacctttgtgtggctcctggtaacataacaacaacagttactatagtggtgagatggaaggaatcaaattttgccagagaaactaactcggtggccccaacaggtcttccggggccatgggcatttgtttagagccaaattcatcctcttaccagatccttttccagaaatacctgtctaggaaggtgtgatgtcagaaacaatgacatccagaaagctgaggaacaggttcctgtggagacactgagtcagaattcttcatcctaaattattttgttagtggaaaatggaattgcttctgtgtagtcaataaaatgaacctgatcacttttcaaaaaaaaa

SEQ ID NO: 237368 - DNA, 2265 bp, Homo sapiens
agcggggtgacgccatggctgtgcttgcgacgccctgtcactggcaggaaccggtgcacgcgttactttggctaaaaggaggtgagcggcactctgcccttccagagcaagcatggagcaacaggatcagagcatgaaggaagggaggctgacgcttgtgcttgccctggcaaccctgatagctgcctttgggtcatccttccagtatgggtacaacgtggctgctgtcaactccccagcactgctcatgcaacaattttacaatgagacttactatggtaggaccggtgaattcatggaagacttccccttgacgttgctgtggtctgtaaccgtgtccatgtttccatttggagggtttatcggatccctcctggtcggccccttggtgaataaatttggcagaaaaggggccttgctgttcaacaacatattttctatcgtgcctgcgatcttaatgggatgcagcagagtcgccacatcatttgagcttatcattatttccagacttttggtgggaatatgtgcaggtgtatcttccaacgtggtccccatgtacttaggggagctggcccctaaaaacctgcggggggctctcggggtggtgccccagctcttcatcactgttggcatccttgtggcccagatctttggtcttcggaatctccttgcaaacgtagatggctggccgatcctgctggggctgaccggggtccccgcggcgctgcagctccttctgctgcccttcttccccgagagccccaggtacctgctgattcagaagaaagacgaagcggccgccaagaaagccctacagacgctgcgcggctgggactctgtggacagggaggtggccgagatccggcaggaggatgaggcagagaaggccgcgggcttcatctccgtgctgaagctgttccggatgcgctcgctgcgctggcagctgctgtccatcatcgtcctcatgggcggccagcagctgtcgggcgtcaacgctatctactactacgcggaccagatctacctgagcgccggcgtgccggaggagcacgtgcagtacgtgacggccggcaccggggccgtgaacgtggtcatgaccttctgcgccgtgttcgtggtggagctcctgggtcggaggctgctgctgctgctgggcttctccatctgcctcatagcctgctgcgtgctcactgcagctctggcactgcaggacacagtgtcctggatgccatacatcagcatcgtctgtgtcatctcctacgtcataggacatgccctcgggcccagtcccatacccgcgctgctcatcactgagatcttcctgcagtcctctcggccatctgccttcatggtggggggcagtgtgcactggctctccaacttcaccgtgggcttgatcttcccgttcatccaggagggcctcggcccgtacagcttcattgtcttcgccgtgatctgcctcctcaccaccatctacatcttcttgattgtcccggagaccaaggccaagacgttcatagagatcaaccagattttcaccaagatgaataaggtgtctgaagtgtacccggaaaaggaggaactgaaagagcttccacctgtcacttcggaacagtgactctggagaggaagccagtggagctggtctgccaggggcttcccactttggcttatttttctgacttctagctgtctgtgaatatccagaaataaaacaactctgatgtggaatgcagtcctcatctccagcctccccaccccagtgggaactgtgcaaagggctgccttgctgttcttgaagctgggctgtctctctccatgttggcctgtcaccagacccgagtcaattaaacagctggtcctccactttgctggttcagccttcgtgtggctcctggtaacgtggctccaccttgatgggtcaacctttgtgtggctcctggtaacataacaacaacagttactatagtggtgagatggaaggaatcaaattttgccagagaaactaactcggtggccccaacaggtcttccggggccatgggcatttgtttagagccaaattcatcctcttaccagatccttttccagaaatacctgtctaggaaggtgtgatgtcagaaacaatgacatccagaaagctgaggaacaggttcctgtggagacactgagtcagaattcttcatcctaaattattttgttagtggaaaatggaattgcttctgtgtagtcaataaaatgaacctgatcacttttcaaaaaaaaa

SEQ ID NO: 237369 - DNA, 2340 bp, Homo sapiens
gtattaacttgtcttaattttgcaggttcctgaaagggttattctgacttaatctggctataaaaatgctattggctgttattagcggatggccaaagtgcacccagaatgtcttctctctccattcagtgcacgcgttactttggctaaaaggaggtgagcggcactctgcccttccagagcaagcatggagcaacaggatcagagcatgaaggaagggaggctgacgcttgtgcttgccctggcaaccctgatagctgcctttgggtcatccttccagtatgggtacaacgtggctgctgtcaactccccagcactgctcatgcaacaattttacaatgagacttactatggtaggaccggtgaattcatggaagacttccccttgacgttgctgtggtctgtaaccgtgtccatgtttccatttggagggtttatcggatccctcctggtcggccccttggtgaataaatttggcagaaaaggggccttgctgttcaacaacatattttctatcgtgcctgcgatcttaatgggatgcagcagagtcgccacatcatttgagcttatcattatttccagacttttggtgggaatatgtgcaggtgtatcttccaacgtggtccccatgtacttaggggagctggcccctaaaaacctgcggggggctctcggggtggtgccccagctcttcatcactgttggcatccttgtggcccagatctttggtcttcggaatctccttgcaaacgtagatggctggccgatcctgctggggctgaccggggtccccgcggcgctgcagctccttctgctgcccttcttccccgagagccccaggtacctgctgattcagaagaaagacgaagcggccgccaagaaagccctacagacgctgcgcggctgggactctgtggacagggaggtggccgagatccggcaggaggatgaggcagagaaggccgcgggcttcatctccgtgctgaagctgttccggatgcgctcgctgcgctggcagctgctgtccatcatcgtcctcatgggcggccagcagctgtcgggcgtcaacgctatctactactacgcggaccagatctacctgagcgccggcgtgccggaggagcacgtgcagtacgtgacggccggcaccggggccgtgaacgtggtcatgaccttctgcgccgtgttcgtggtggagctcctgggtcggaggctgctgctgctgctgggcttctccatctgcctcatagcctgctgcgtgctcactgcagctctggcactgcaggacacagtgtcctggatgccatacatcagcatcgtctgtgtcatctcctacgtcataggacatgccctcgggcccagtcccatacccgcgctgctcatcactgagatcttcctgcagtcctctcggccatctgccttcatggtggggggcagtgtgcactggctctccaacttcaccgtgggcttgatcttcccgttcatccaggagggcctcggcccgtacagcttcattgtcttcgccgtgatctgcctcctcaccaccatctacatcttcttgattgtcccggagaccaaggccaagacgttcatagagatcaaccagattttcaccaagatgaataaggtgtctgaagtgtacccggaaaaggaggaactgaaagagcttccacctgtcacttcggaacagtgactctggagaggaagccagtggagctggtctgccaggggcttcccactttggcttatttttctgacttctagctgtctgtgaatatccagaaataaaacaactctgatgtggaatgcagtcctcatctccagcctccccaccccagtgggaactgtgcaaagggctgccttgctgttcttgaagctgggctgtctctctccatgttggcctgtcaccagacccgagtcaattaaacagctggtcctccactttgctggttcagccttcgtgtggctcctggtaacgtggctccaccttgatgggtcaacctttgtgtggctcctggtaacataacaacaacagttactatagtggtgagatggaaggaatcaaattttgccagagaaactaactcggtggccccaacaggtcttccggggccatgggcatttgtttagagccaaattcatcctcttaccagatccttttccagaaatacctgtctaggaaggtgtgatgtcagaaacaatgacatccagaaagctgaggaacaggttcctgtggagacactgagtcagaattcttcatcctaaattattttgttagtggaaaatggaattgcttctgtgtagtcaataaaatgaacctgatcacttttcaaaaaaaaa

SEQ ID NO: 237370 - DNA, 2302 bp, Homo sapiens
agtgggtaacgggtgaagaatgtgggggagagtggcagttggccagatgccgaaccaccaccaggggtggttggcaaactgcagccacccaaggggctggagtagttttcaaacagtttgactcttttcatcaacaccagcaccacattatcccaggaggaaaagcagacgcgtgacagagtcagagagcaggcatagagtgctgtggcagtcagccagtgcccacatcaacaccaaggagagtcctgcgggtgctgtgcaaggccgggtgcacgcgttactttggctaaaaggaggtgagcggcactctgcccttccagagcaagcatggagcaacaggatcagagcatgaaggaagggaggctgacgcttgtgcttgccctggcaaccctgatagctgcctttgggtcatccttccagtatgggtacaacgtggctgctgtcaactccccagcactgctcatgcaacaattttacaatgagacttactatggtaggaccggtgaattcatggaagacttccccttgacgttgctgtggtctgtaaccgtgtccatgtttccatttggagggtttatcggatccctcctggtcggccccttggtgaataaatttggcagaaaaggggccttgctgttcaacaacatattttctatcgtgcctgcgatcttaatgggatgcagcagagtcgccacatcatttgagcttatcattatttccagacttttggtgggaatatgtgcaggtgtatcttccaacgtggtccccatgtacttaggggagctggcccctaaaaacctgcggggggctctcggggtggtgccccagctcttcatcactgttggcatccttgtggcccagatctttggtcttcggaatctccttgcaaacgtagatggctggccgatcctgctggggctgaccggggtccccgcggcgctgcagctccttctgctgcccttcttccccgagagccccaggtacctgctgattcagaagaaagacgaagcggccgccaagaaagccctacagacgctgcgcggctgggactctgtggacagggaggtggccgagatccggcaggaggatgaggcagagaaggccgcgggcttcatctccgtgctgaagctgttccggatgcgctcgtgttcgtggtggagctcctgggtcggaggctgctgctgctgctgggcttctccatctgcctcatagcctgctgcgtgctcactgcagctctggcactgcaggacacagtgtcctggatgccatacatcagcatcgtctgtgtcatctcctacgtcataggacatgccctcgggcccagtcccatacccgcgctgctcatcactgagatcttcctgcagtcctctcggccatctgccttcatggtggggggcagtgtgcactggctctccaacttcaccgtgggcttgatcttcccgttcatccaggagggcctcggcccgtacagcttcattgtcttcgccgtgatctgcctcctcaccaccatctacatcttcttgattgtcccggagaccaaggccaagacgttcatagagatcaaccagattttcaccaagatgaataaggtgtctgaagtgtacccggaaaaggaggaactgaaagagcttccacctgtcacttcggaacagtgactctggagaggaagccagtggagctggtctgccaggggcttcccactttggcttatttttctgacttctagctgtctgtgaatatccagaaataaaacaactctgatgtggaatgcagtcctcatctccagcctccccaccccagtgggaactgtgcaaagggctgccttgctgttcttgaagctgggctgtctctctccatgttggcctgtcaccagacccgagtcaattaaacagctggtcctccactttgctggttcagccttcgtgtggctcctggtaacgtggctccaccttgatgggtcaacctttgtgtggctcctggtaacataacaacaacagttactatagtggtgagatggaaggaatcaaattttgccagagaaactaactcggtggccccaacaggtcttccggggccatgggcatttgtttagagccaaattcatcctcttaccagatccttttccagaaatacctgtctaggaaggtgtgatgtcagaaacaatgacatccagaaagctgaggaacaggttcctgtggagacactgagtcagaattcttcatcctaaattattttgttagtggaaaatggaattgcttctgtgtagtcaataaaatgaacctgatcacttttcaaaaaaaaa

SEQ ID NO: 237371 - DNA, 2201 bp, Homo sapiens
accatgagcctgactggtagagactttagcaatggggaaataccgtagactgttccatcaggacaatgctgggcctgcagtccccagggggcacccacttacttagccaaaccccagacgtttcatttaaaagcagaagtgaaaggaagactgcacgcgttactttggctaaaaggaggtgagcggcactctgcccttccagagcaagcatggagcaacaggatcagagcatgaaggaagggaggctgacgcttgtgcttgccctggcaaccctgatagctgcctttgggtcatccttccagtatgggtacaacgtggctgctgtcaactccccagcactgaaaaggggccttgctgttcaacaacatattttctatcgtgcctgcgatcttaatgggatgcagcagagtcgccacatcatttgagcttatcattatttccagacttttggtgggaatatgtgcaggtgtatcttccaacgtggtccccatgtacttaggggagctggcccctaaaaacctgcggggggctctcggggtggtgccccagctcttcatcactgttggcatccttgtggcccagatctttggtcttcggaatctccttgcaaacgtagatggctggccgatcctgctggggctgaccggggtccccgcggcgctgcagctccttctgctgcccttcttccccgagagccccaggtacctgctgattcagaagaaagacgaagcggccgccaagaaagccctacagacgctgcgcggctgggactctgtggacagggaggtggccgagatccggcaggaggatgaggcagagaaggccgcgggcttcatctccgtgctgaagctgttccggatgcgctcgctgcgctggcagctgctgtccatcatcgtcctcatgggcggccagcagctgtcgggcgtcaacgctatctactactacgcggaccagatctacctgagcgccggcgtgccggaggagcacgtgcagtacgtgacggccggcaccggggccgtgaacgtggtcatgaccttctgcgccgtgttcgtggtggagctcctgggtcggaggctgctgctgctgctgggcttctccatctgcctcatagcctgctgcgtgctcactgcagctctggcactgcaggacacagtgtcctggatgccatacatcagcatcgtctgtgtcatctcctacgtcataggacatgccctcgggcccagtcccatacccgcgctgctcatcactgagatcttcctgcagtcctctcggccatctgccttcatggtggggggcagtgtgcactggctctccaacttcaccgtgggcttgatcttcccgttcatccaggagggcctcggcccgtacagcttcattgtcttcgccgtgatctgcctcctcaccaccatctacatcttcttgattgtcccggagaccaaggccaagacgttcatagagatcaaccagattttcaccaagatgaataaggtgtctgaagtgtacccggaaaaggaggaactgaaagagcttccacctgtcacttcggaacagtgactctggagaggaagccagtggagctggtctgccaggggcttcccactttggcttatttttctgacttctagctgtctgtgaatatccagaaataaaacaactctgatgtggaatgcagtcctcatctccagcctccccaccccagtgggaactgtgcaaagggctgccttgctgttcttgaagctgggctgtctctctccatgttggcctgtcaccagacccgagtcaattaaacagctggtcctccactttgctggttcagccttcgtgtggctcctggtaacgtggctccaccttgatgggtcaacctttgtgtggctcctggtaacataacaacaacagttactatagtggtgagatggaaggaatcaaattttgccagagaaactaactcggtggccccaacaggtcttccggggccatgggcatttgtttagagccaaattcatcctcttaccagatccttttccagaaatacctgtctaggaaggtgtgatgtcagaaacaatgacatccagaaagctgaggaacaggttcctgtggagacactgagtcagaattcttcatcctaaattattttgttagtggaaaatggaattgcttctgtgtagtcaataaaatgaacctgatcacttttcaaaaaaaaa

SEQ ID NO: 237372 - DNA, 2161 bp, Homo sapiens
gtattaacttgtcttaattttgcaggttcctgaaagggttattctgacttaatctggctataaaaatgctattggctgttattagcggatggccaaagtgcacccagaatgtcttctctctccattcagtgcacgcgttactttggctaaaaggaggtgagcggcactctgcccttccagagcaagcatggagcaacaggatcagagcatgaaggaagggaggctgacgcttgtgcttgccctggcaaccctgatagctgcctttgggtcatccttccagtatgggtacaacgtggctgctaaaaggggccttgctgttcaacaacatattttctatcgtgcctgcgatcttaatgggatgcagcagagtcgccacatcatttgagcttatcattatttccagacttttggtgggaatatgtgcaggtgtatcttccaacgtggtccccatgtacttaggggagctggcccctaaaaacctgcggggggctctcggggtggtgccccagctcttcatcactgttggcatccttgtggcccagatctttggtcttcggaatctccttgcaaacgtagatggctggccgatcctgctggggctgaccggggtccccgcggcgctgcagctccttctgctgcccttcttccccgagagccccaggtacctgctgattcagaagaaagacgaagcggccgccaagaaagccctacagacgctgcgcggctgggactctgtggacagggaggtggccgagatccggcaggaggatgaggcagagaaggccgcgggcttcatctccgtgctgaagctgttccggatgcgctcgctgcgctggcagctgctgtccatcatcgtcctcatgggcggccagcagctgtcgggcgtcaacgctatctactactacgcggaccagatctacctgagcgccggcgtgccggaggagcacgtgcagtacgtgacggccggcaccggggccgtgaacgtggtcatgaccttctgcgccgtgttcgtggtggagctcctgggtcggaggctgctgctgctgctgggcttctccatctgcctcatagcctgctgcgtgctcactgcagctctggcactgcaggacacagtgtcctggatgccatacatcagcatcgtctgtgtcatctcctacgtcataggacatgccctcgggcccagtcccatacccgcgctgctcatcactgagatcttcctgcagtcctctcggccatctgccttcatggtggggggcagtgtgcactggctctccaacttcaccgtgggcttgatcttcccgttcatccaggagggcctcggcccgtacagcttcattgtcttcgccgtgatctgcctcctcaccaccatctacatcttcttgattgtcccggagaccaaggccaagacgttcatagagatcaaccagattttcaccaagatgaataaggtgtctgaagtgtacccggaaaaggaggaactgaaagagcttccacctgtcacttcggaacagtgactctggagaggaagccagtggagctggtctgccaggggcttcccactttggcttatttttctgacttctagctgtctgtgaatatccagaaataaaacaactctgatgtggaatgcagtcctcatctccagcctccccaccccagtgggaactgtgcaaagggctgccttgctgttcttgaagctgggctgtctctctccatgttggcctgtcaccagacccgagtcaattaaacagctggtcctccactttgctggttcagccttcgtgtggctcctggtaacgtggctccaccttgatgggtcaacctttgtgtggctcctggtaacataacaacaacagttactatagtggtgagatggaaggaatcaaattttgccagagaaactaactcggtggccccaacaggtcttccggggccatgggcatttgtttagagccaaattcatcctcttaccagatccttttccagaaatacctgtctaggaaggtgtgatgtcagaaacaatgacatccagaaagctgaggaacaggttcctgtggagacactgagtcagaattcttcatcctaaattattttgttagtggaaaatggaattgcttctgtgtagtcaataaaatgaacctgatcacttttcaaaaaaaaa

SEQ ID NO: 237373 - DNA, 288 bp, Homo sapiens
gagacggagtatcgctctcgcccaggatggagtgcaatggcgcgatcttggctcactgcaacttccgcctttcgggttcaagcgattcccctgcctcagctactcagaaagctgaggtgagaggattgcttgagcctgggaggtcaaggctgcagcaagccatgatcacgtcactgcactccagactgggtgacagaacaagaccctgtctttttaaaaaatgtttaatgttggcataattcagtaagaaaatctcatgtcctactgattaaaataaaatatgtaaaa

SEQ ID NO: 237374 - DNA, 1330 bp, Homo sapiens
actgggtgcaacaatggcaatggctgtcctcatactgtctcgctcaagatcagcttcaaatgctgcttccggccaggatgcaggggggaccagttccgcctctagtgtctggggcttagatttctcaggtcatgctgcctctccctatctgacacccagaatctccccagaaagacaggatagacacttccctgagattagaagctagctattcaatctaggtgaacatgccattttggagattagacgggctgagccctggaggagtcaaacgactccgagtaacccagccagccactggcacaggtgtggtgaggagccaatgccaaaagtgggtgaaagagctgggcaatgttcccaggctggcagccaggaaaccagggcttggggtccctggatcctcaggtgcggtgaagaggcaaggccaaaagtgggtgaaagagctgggcaccattcccaggctagcagtcgggagagaccagggtttggggtcactggatcctggctctgctactgaattgctatgtgactgttctgtgcccctgcttcccttgtctggtggctacaggaaggcagatgtggctcatcaccctgcctgtgccatagtctggctgcattactgagtcatttgacctctccagggctcagtttgtctatctccaaaatggcatactcacctggattaatgagctagcccctgatctcatgggagattctttctcatctttctgctgccttctcctccatttctctgctcagaaggggaactgtgtcagcagatcagggctggctattggaggcttttggaagagtaaatccaagtcatagcttcatgtctctctgcgctgggcaggaccaaggctaggcttttttatttcaataggttttggggtacaggtggtttttggttacacggataagttctttagtggtgagttctgagattttggtacacctgtcaactgagcagtgtacactgtacccagtatgtagcctctaatccctcaacctctcccaccctcccctgtgagtccccaaagtccattatattattcttcttcacctttgcatcctcatagcttagctcccacttaaaagagagaacatcacaaagtcaggagttcaagaccagccgggccagcatggtgaaaccccgtctctactaaaaatacaaaaattagccaggcatggtggtgtgcgcacctgtagtcccagctacttgggaggctaaggcaggagaattgcttgaacctggtaggcagaggttgcagtgagccgagttcgcatgccactgcactccagcctgggcgacagagcgagactccgtctc

SEQ ID NO: 237375 - DNA, 374 bp, Homo sapiens
tacttttggcaaattcaagggtgtgtggcttggaaatgggcagtagcttgggtttgagctcccagttgccccttcagctgagtgcttttattcagggcacttcctatttttcttttcttatggccctacacacttttaatacttaatttttaataaagaagggtcaagtaaatttagtagagaaagtggaaagcattattactgaagttaatttttaaaatttattctacatgagacctttaaatcccactagcaacctcctgtttataagaaaaaaaagattatgaagtaatttttaatttttaacaattgaagtataattcacataacattaagtcgactcttttaagaaactcctaaatctcattagaaaa

SEQ ID NO: 237376 - DNA, 573 bp, Homo sapiens
tccagcccgaggacaggacggggtgggaatgcatgacctgcagagtgacacccgaaggcagctgaggcgcgccgtctctaaagtgctgagagaaaaatacgggaattctatatccagtgaaattatccttgaaatatgaaagccagttaaggatgtcttcagccaagcaaaggatgagagagttgattgttggcagaactgctccatttcagcaagtatccaaggcaagcctgcaaagcctgcagcctagggaaggaagggcagggaggctggaatgcatgactctgtggtgaaatgacaccagcaccagctgcttaaaacaccaatactaacgtcctgtgggttttaaaacctgtttggtagtaacatatctgacagcaggagcaccagcgcgtgcgcacacacagacagcaggagcaccaacacacgtgtgcatgtacacacacacaagcaccagcgcgcacacacacacacagccgaggaggggattaaccgagtgaatgtgtttcaggagctccatcaccaggaagcagagaatgtaccaatccctagggcagattaaagatgcaatca

SEQ ID NO: 237377 - DNA, 486 bp, Homo sapiens
tgtgatgcccttccctcctcaataaaatctcacacttaattcttaaagtatcccgttccttaaacattctctttaaaaactcttaaaagatttattgggtcacatattcagaataactacttgccatttgttattgtacctaacagtaatagtgcagtgtttgaaatgaaatggacctgagctccagagttcatcatttattatctgtgtgactttgaacatattatataatcaccctaaacctttttcctcatcagtaaaatggaacttataatacctatgaggattaaatacgatatggtagcttaaatttttgctcattttgctcttttgatatgagccaaattataggagaaataattagagtggcacactagcatgatggtaaacattctgtcatttccatcattatcctaaattgcatctattctgtgtaagaagtaagagataaaaaagaagtacaagacatggttcctgaagacagga

SEQ ID NO: 237378 - DNA, 806 bp, Homo sapiens
catggtgctggggaggcctcagagactcctactgaacaaaaggaatgagggtgcctgtgtcacctccccagggctccttaacttgcggttacacccgggcactccttggggcaggggcttcgtctggtccataggactatcctccataggacagtcggggttcgcccagcttcctccacgggtgcgctctggacctgatgggtctcgtccgtccttgtgcccgtggcttcattcgctgaacacaggagaccccagaagacacgcgctgagtgaaggaaactcagcttccgcggaacccggagcttcccctcttagatcaccccgactactggttctcgcgtcccagagctccttggtgtctaaaggccttgtctgatctgcacaggcttcgggaggcggacactgagcagaaacaacgccacgcccggctccgagtgtcccatgctgccaccactaaaatgccctgatttttggccatatgtgacctccctgggtggcacgggccctaggcacccgtggctgtgcgcctggctaccaccagctcaggcctctgagcaatagcccctgcacggaaaccacgaccagggtaaccccggccgggccggttcgcgcccagcccggttcaggtgaccaggcgggagcttggcacacctggcgccgtcccctgaccccgccccggaccgggccgcaccccggaacgctctctctgggcgccagcggcggcggtgcagggccatggcggcggcgccagcggtgtgcgcctcgcaggggagctcgccgggtgcaccgtccgcgccggcggccgc

SEQ ID NO: 237379 - DNA, 391 bp, Homo sapiens
ataatagtcatcctaatgagtgtgaagtggtatctcattgctttgatttgcatttccttaacgattagtgatgttgagcaccttttcatatgcttattggcttgtgcatctaggtttaagaaacttgggtcaggcatggttgtttacgcttgtaatcccagcactttgggaagctgaggcaggcattcttgaacccatgagttcaagaccagcctgggcaacatggcaaaaccccatctctacaaaaaatacaggtagtgcatgcctgtagtcccagctacttgggaggctgaggtgggaggatcgcatgagcccaggagttggaggttgtagtaagctatgatcatgccactgcactccagcctgggtgataaagtgagaccctgtctca

SEQ ID NO: 237380 - DNA, 297 bp, Homo sapiens
gctgaagtttaagatgggatagtccattacattaatgtctgtgcttaaagctcctatttggcttaaataaattatttagggtttactgcttaaaccttggtcaattcttgaacgtttgggctagttaagtaattttccagtgactttctgtgccttggtgattcatttacttgattgagctcctgtgtgctcgtatgatttctaaatgtatttctcaagttttgcctggcaatgaatgattttgcttactggagtcttgtgtggtacacctataaaaggcttattaactctttttga

SEQ ID NO: 237381 - DNA, 223 bp, Homo sapiens
agcagaagcaactgaggcccagaggagcaaaggcccccaagcaaggtctccagcaggctgggagcacggtggaaatggagcccgctcccctgtcttccactgcctgtttaagagaagagcagccgcgaggccctgggctggtctcgggggtgagctctgctgtggatacccgccatggcttgtcttccccgcccacagataaatgcaacctttctcttctacg

SEQ ID NO: 237382 - DNA, 670 bp, Homo sapiens
aaataatgtggcagattgcagaggtctacgacatcttcatgcactgtgcattcacattctctgtttctgcaagctttgctggccaatttcaccaacgaacgttgaattgaccaaacatgtactaagtgcattctgcagacataacggagactgaattttggagatctttgcttcccaaagaatcccctgaaaaaaaaaattttttttttacttctactaagtagcccagttttccaatcacatgaattttctggaatatttttggagagaagcagatttattgaagagctgttcttttttaccccagatatagacaaagttaaatttattctctgaatataaatcatcagagtaagaaggtaagatttagtcaagaagatacatttgttggactatgggttcatctgtgtgcaacagagacctaaagtttcaatggcttaagcagtattgaggtttatttatcttccatgacagcgtgagagtttgcagccaaagactagtatggcgggtccatggtgtcaaggactgccaggtatctcccatcttattgcttcattatctctaggggatggccctcatctgcatggtccaggcaggaaagaggaggataggaataaccccaccccagaggctgcacccagcacttccccttacatacacacacacacac

SEQ ID NO: 237383 - DNA, 2515 bp, Homo sapiens
ctggagagagtgtagatggaggagaaaagagtggtctcgaaaccaagctctgggagtggttggaggagaatggaccagtgaagaaggctgggtgagaagaaatcaaggagcctgtgctatcgtggaaatcaagaaaggaaagtgtgtcaaggaggagtattcacttttgttaaatacttccgagacattcaataagaaatgctaacactgttttgttataaacaactgaaattaattttagctgtgaaaaaattaggtcctaaagtaaataaaaagatagtaatggggacataaaataggctgtgaaatgaatttaaaatgccaaaagttacaaatcccaaagacataacccttgctctggatgtgctacagatcttggctgtggacattctaaaagccattagaaagccttcagtcacttccagtattcacaatgaccataaagtaaaaggggtccccaagaccaccccaggctagatgatttgctgggaggactcacaggactcaatatgttagtcatactcacaagtaagatttactagagtgagaggaactagagcaaagtcagcaaaaggaaaagacatgtggggtgaagtctgcaggaaaccaggcacaagcttccaagacctctcctgtgtgtgtctgccacaggacagtccattcctgtggcagtgagttatgacagcatgtgtgaaatgtgttctgccagggaagctcgtaagagactccgtgggcaggtttttactggggctggtcatggaggcaccctctgcccggcatgtaccaaaatcccaggctcacagaaggaaagcggattcagcataaactgcactgtgtgcataaacagtttaaacatggtgagctgctctcattagtctgagaatggtgggaaccttccggaaatctgggttcccagacaccagccacggctagccttgcaagcaggccttttaaagccgtctcgggactgctatgtgaactctgttttttgtaaacaggccaaagcccaaggaaaatacaagcatagttggcactatgactacatcagaatttctctggaatgggcatttgtttaataaactgtttctaacatattctaaatcatttggatagctagtaagctaaaatttttgtctgtatgtattgggaggcagtctagcatataataaaataatcatagactgtgaaatttgacaaatatggcttctctagtcatggctcagctgcatactctctctgtacctccatttctggtaataaaacctaccattttgaagattcagtgatatatgcatatagtacctagaatagtgactgacacgtggtggccattcagaaatactggtggcattgatgttaataattgcaacaagagttgttttattattgtctttcttgtgttagacatgccattacttttcctggattaatcgattgtaatatccactctcctgtattttcactaaatggctttcagtttttcaattaaactttcagttgaacagtatcagaggcattttaataaaaaattttactgagcttgattagttgatgagaagtaaattgctcgtttttgattaccacattaactctttctggccattagggtaccatttagtaaattacttctctttttgtacagtactcaaaatgttacccaagtgaccagaaagagttaataatgcaccaacaggctgaacacttgactacctccttactattagatcagtctcattatattaaatgtttcccttcctataattgtcattttctttaaaaaatgaaatattggatacagttatttatttttaatagaccttataagctcaatgaaaagtatgctgagttcactcatataccttctaaggggatttaaagtatcggtactcactatataatatgcaaaatcaatccgatgtggataataaatgcacctttcacagtgcgcaagaagggcattatttcccaagggtacaagtgattccccgattatgatctgagtactaaggagtcatattattatgcctccctaagtgcttgagcactaaagagagttgtgcctcatggcattgtagcaggtaaactttcatgtgggcaggaatcctgccttttaaatgtatacattatcagtactcctgtggatgtgtttttatggctaattctaatacagcttttaattattcaggagtactctttactttcttatgaataggggtctgcaatctattcttaaaattacatcttttgctgggcacggtggctcatgcctgtagtcccaagcactttgagaggctgaggtgggaggattgctttagcccaggagtttaagactagccagagcaatattgagacccctgtctctacagaaaatttaaaaatcagccaggcatggtggtgcatgcctgtagtcccaactaatgtggaaggatcacttgagcccaggaagtcgaggctgcagtgagccgtgatcacaccactgcactcctgcctgggcaatagaggaagaccctatctc

SEQ ID NO: 237384 - DNA, 505 bp, Homo sapiens
tcttgatttcagccttgtgagaccttgcacagagaacccagttataccattgcctggacttccgacctacagaaactttgagatcatcaaaaggtattgtttcaagctgctgagtttgtggcaatttgttacacagcaatagaaaactaatgcaaaccatatggctggaatccacagcctttgaatacattcagaaataaaatccagaacatctagggcatttcccaaactaaacattcatgggagatgctaatatatgtgtcacattaaaagcaaaacaacttttttcgttgaccctgactgttcgcattagaaaggcctttgctctactggtggggcagagagtcaggtttctgggttgtaagcaacagaaataaactgactcacatttgcagaagagagtttatggaaaggctatagtgaggtcatggaatcaaggagcaggctaaagaaacagtctcagaatggacaggaacctgaaaactccaggggtctcacttccaaa

SEQ ID NO: 237385 - DNA, 1300 bp, Homo sapiens
atgattaccatatgaaagattccatgcagttgactattatttcacagagctctctggttgggctgctctataagaagctaatcacctaacagtgtctattgctgtggctgatgatttccagagtgttctaagatgttatcaggaaaggcatccaacaaatagtaagagaaggaccatttcatttgtacattatttcttcctgtgattctgttttccaacaccttgcctcttgtttcaccatgaaagatgtacacacttcacaccaaaagggtaaaagctgctgctaggcagatgtggacttcaaatctctccaaggtcagacagtctcttaaaaatgtttaccacaaatgtaagattcagcaccaagattcaactggatatcccactgtgacatctgatgattgtaatcaagatgatgatagttatgacggaaaaatgaatcttccagtagtgctccaagatgttaaaactgctcaagttgaacttttcagccaaatgactgacattgtccatatgataccaaaagtccaggaaaagactgacttgtatcaaaaacagatggaggtcctggaaaccagaatgaatgttaatgaagacaaacaatgcacaacgactaaagatatcctctctatgaaagaagacatcaaggcattaaagaagaaggtgacagaactggaaattcagaattcctgctccacgatacattgtctagagattctggagggagaaaggggtaaagaaatcacagaactgctttacaaactcatacaaccagcaactctgaagaacactttggcctctacagacatggaaatctcttcagcagaaccagagaaagtgcccagttatccaaagtccactgaccatcttgagaaaaaaacaatttctccccaaatgaaaactctgaagaaacgtaaccatcaaaatgcatcaaggagctttgaaaaagcaaagccaaatatttacatttacccagacttcagtacatggatcaagctaacttttgttcatggaggaaaatggacatttttcctcagtgctaccaagttagaagaattcatccagtggcttctttctaggccaaccattcttcctgaggaaccccaggtcataacccagagatactgtccattcactgggcccattttgagcttgaccacaatctgtctctccatcttcaacaatatttacggctttatttgttccttaaaagaagaagtaactcgactatagagttatgttctgctttgcttggcacaaaataaatgtaacctggaggctccaagtattcacacattgg

SEQ ID NO: 237386 - DNA, 465 bp, Homo sapiens
ccaggactcagttctgagacccatctccagtttggcagggacacccgtcctccccaaaccagcaatgccctcagttctaggcatgtcctgaggccccagcatcatctataatcctcaccacaaccctttgaggtcgatttaataatctccagtttgcaaatgggaaaaccaaagcacagaggtgcctgtgttcacgctgctagagtgatgccaagtgagtaaggctctcactctactatcctaactccaaagccaaggctcttcccactacactgtggtcattttgttctctgcacctgtgaaatcccttagaacacagacggcctttgatgttagcgagagtataacctgcccaccttgatgatatcaatgtgatgaaaaacagtgtgatgtccatggaaaggtctaacgtggagtttcccatgagacacccaagagctcgcaaagcaaaaagcaagaatggaa

SEQ ID NO: 237387 - DNA, 413 bp, Homo sapiens
tgaggcccggcgatctgtgtttaacacgtcctccaggtgcatatgatgcacttacggtctgagaaacactacctcatatccagctcctccgtgctttggggtcgtcacatactcacttctctctggactagctttcctcagatcattgtgtgcctggcttcttctgtccttcaggcctcagctcaagtgaccctccttcaggaagaccttccttgagcaccagtctaaagatgcctccttgtccagtctatactgtcatctcactcttattttgcatgtcacaccctctatttctctcaacaccttttttcaaattgacaaataattgaatatatttatagggggcaatggggcattttgatatctgtatgcattgcagaatgattaaatcaagctaattgacatatccagca

SEQ ID NO: 237388 - DNA, 970 bp, Homo sapiens
agtagtgtgactttgagggtagcattgcagttatgttggaagttgtcctagtttgtaggacatacataataaagtattcagggtggttgggcattgggtcagcactctccaacagttcagggggaaaacattctttacgctatacttaaaacatttctgtaagtctgagattatttcaaagtgtaaaacttcccagattcacatgttcttgcttattgccatcactttctactctagttctggctacaaaaaaaaaaaaaaaaaaaaaaaaaaaaaactatgaagcataaagtcagagaaatggagattactttggaatcgaaagcaagtagttaaactggtagggtaatagaatatccaaagtccaggaaataaaggcaagccaggaactaagagcagataatcactgcagtgggttgaggaaagatataaaaagcaattgtctaagggtagagcagatagggtggggtacggtaggggcaggagagagtagcaggaagagagacaatgaaagcatgtacaaatacagagtcaaacaaatttcaatgaatctaatgctatttttggcattcatatggaaataaaagttaaacagtaagtctcaaacacacaaagaaaatgccttaacatagggaagtgggaaataagtttacaaacctaaagataacagtagtaaataaacataaaattaagctccaaatacctagaagacaagtttaggggctcacaatgagttgcacccctaaaatctaacaaaagagaaacttattttcttactaagaaatcaggatacttattgtgaagacattaaacagaatggataatattcttgatttgttttaaagaaaaacattctttgtatcaatgtttgacttttaataaatgttaaggaggaaatattacattgtaacttcttgaaaacctctttaaaaatttactttgttgagcatccactctgggccaggcacag

SEQ ID NO: 237389 - DNA, 477 bp, Homo sapiens
aaggattcgtgtgaaagttgaagcatgaaccaatgataaaagagaagaaactgtcataaattaaccatgtggttcagataaaataaaattgtctgactgcaaatgatgtacataaccctcatggacaatccacctcaaaaaatataatggttagctgaggatgagagactacgttgtgtgtgactatgtgacggggtgtatatggagtcatagttaaggggaaggcttgattcagcactaagggaagaagggagtttttgggtttatgagactttgtggaagttttcagaagttaggctgctgcatcataatacctaggtagctctcttaatctgatgagtcatatattttgggtaatgcttacacaattcaagggaatacaagtccggacagaagcagggggtcagaaagtttcataaaggaggtgtcttggaacaaaaaaggatagaatacccgtgatggagcacttgaagacca

SEQ ID NO: 237390 - DNA, 520 bp, Homo sapiens
tgctcaatatgtaagaaaaatatacgtggttttctgacataatgacattgtgttagaataagatatgtgtttcttggggtcttccttgtaactgcaaccacaatttttttttcttaagcaaaagaattaaatgttgatcaaggttctggggaatgaatttggaaattagttgttaataattaccaaggtttatttttactcttaatgacttagtagccacagaaaaagatgtaattgatgcttaaagctgatgccatactatcaaaaatatagtgatgaagcaatgtgaataattgtattgaagaaaaaaattatagtatttttctgtgttctgtgctttaattataattatttaacagtattatgggaaatggacaaggactgatgagaaatgaaaatatgaaaaattagacatggattggtagatctatgtgtttttaaaaaatcatactatcttatgtgttctgtgtaataaaaacgaaaacagattaaaggtatattatctaacttgaagtacatc

SEQ ID NO: 237391 - DNA, 514 bp, Homo sapiens
ccaaacccttctacgcacccacctctgaggcgacagcttcccgtctccgcacaaagtgcctcaggacggcggtggctgcttctggagagaactttctagaaggcctgctgtcaggtaggcggcaagaacgtgacccctctcggagcctgccctctgcccaggccctgccctgagggcaccccatgcctggagcccacacactgtgcccgtgcccggaagacgcagcccgtgggtccaagatggctccacacccgaaacccagccgcatctgcgcaggggcccacctttccctgggggggggaaggacccgctccagcctgtgtctgcagtgaccggagctcccctggacgctggccaggctggcgacagcccatctgtcacctgcgcccctgccccacgtcggccacggcgggggctggcgagggcccccctgcagggagccgcctccccctgcgcctcagcctccccgctgcccgcccttacctgccccgacaggttccactgctgcggccgc

SEQ ID NO: 237392 - DNA, 443 bp, Homo sapiens
ctggataggaaaactgggcaaaaacatgagtagataactcataagaaaagatttaaaatgacccaaacacatatgctttcagcaactgtccgatgttgaggaaaaataggttgtattacaaggcgttacaagttgaattgtctctgaaatcattctagtttatattcagatcaaagggctacactctcaaattgagacatatgctctgggaataagaattataacctatgggtaaggacaaacagaattaaagaccaataaagcccaccccaccgtattcaatggatcaaaatgatttgccagtaaactatttagcatttaaatgatctagcagactgggcaccgtggctcatgcctgtaatcccagcactttaggaggccgatacaggcggatcatgaggtcagcagatcgagaccatcctggctaacatggtgaaaccccg

SEQ ID NO: 237393 - DNA, 399 bp, Homo sapiens
attattattattattattattattatattgtaatgtataatgaaataattctacaactcaccataacgtagaatcagtaggagcctgtattagcccattctcgcactgctatgaagaactacctaatttatgaaggaaagaggtttaattgagggggatggtgcaaaaccattcatgaaggatctgaccccatgatccagtcaccttccaccaggcccccacctccaacactggggatttcagtttgacatgagatttgggcggggacacagagccaaaccatatcaccaccagcacagcaccaagcatcttgccactcagaaagaatgccaaaatttctctctagacatattttatttttattttatttatttatttatcttttgagacagagtctcg

SEQ ID NO: 237394 - DNA, 841 bp, Homo sapiens
ttgtacttaatacagtgtagttttatttatttacgtttttcatcagaaaagtcatcttggagtttattgatttaataagcctgtgcaagcaaaagtactataaagcagtgcatagctctgaggggttattgaaattagtatcgttgggttaacgtttgtagcagggagcccttttgagttgacatttgcatttgtttatttgtttttcttcagaagaaggagccagaagaccatctggaactcactgagcatagctaccatcttagagggggggtaggtgtaggatattctggactcactgaggggatatagttagaatggcagtaaacctgggaattattgaaggtgactgtggcaggaaatatttccccaagatagccacatcaatgtatttcccatctcacaggtttgttttacaataagaaattgacacatcacctttagggtggcgatggaggattgtttctgttcccttcccttgaaatggggcaagtctctgtagctgccttgaccaatagaatgtggtagaagtgatgccacgtggattcccaggttagactgtagaaggcaatacagcttctgtctggctcttagagcccaggtgtcatgtgtaaggaagaccaggcacatgtgcgggggtttgacttgatggtccgtgctaggcccccagccaagagcaagcatcaacagccagacatatgaatgaatgagcctgtaagtgagtgcagccttcagcctttgaattttcttactgagatgcctgaacattgtggatcatggaaacaacttatctggaccctaccctgtctgaatgctgatccccagaaacaatgagaggtaa

SEQ ID NO: 237395 - DNA, 895 bp, Homo sapiens
ttgtacttaatacagtgtagttttatttatttacgtttttcatcagaaaagtcatcttggagtttattgatttaataagcctgtgcaagcaaaagtactataaagcagtgcatagctctgaggggttattgaaattagtatcgttgggttaacgtttgtagcagggagcccttttgagttgacatttgcatttgtttatttgtttttcttcagaagaaggagccagaagaccatctggaactcactgagcatagctaccatcttagagggggggtaggtgtaggatattctggactcactgaggggatatagttagaatggcaggtgcagcatgagttgccatatgatccaaggaggaatgagtccaaggaagtcttttaaacctgggaattattgaaggtgactgtggcaggaaatatttccccaagatagccacatcaatgtatttcccatctcacaggtttgttttacaataagaaattgacacatcacctttagggtggcgatggaggattgtttctgttcccttcccttgaaatggggcaagtctctgtagctgccttgaccaatagaatgtggtagaagtgatgccacgtggattcccaggttagactgtagaaggcaatacagcttctgtctggctcttagagcccaggtgtcatgtgtaaggaagaccaggcacatgtgcgggggtttgacttgatggtccgtgctaggcccccagccaagagcaagcatcaacagccagacatatgaatgaatgagcctgtaagtgagtgcagccttcagcctttgaattttcttactgagatgcctgaacattgtggatcatggaaacaacttatctggaccctaccctgtctgaatgctgatccccagaaacaatgagaggtaa

SEQ ID NO: 237396 - DNA, 461 bp, Homo sapiens
cagcagaaatgtgctcagcaaagccctgggtggaatggatttaaggggttcagatgggaggcacagaagcttcagtgtggtctaagaagaaggccctgaccaaccctgaaaagaaagttaaaagcctggtgctgttattaagatgaaacttcttgaaaataagattattggaaaacagaatgctttttaccaaggacagggtttattaatataagctgtaactggtattcagaaatgtgtttatacctgggctttacacacagttgaaatttttaaatgagtgttactatatgtgaggtgaatgttattttgcaaaggagaaacgttttcaaaaaatgaagtgggccgggcacggtggttcatgcctgtcatcccagcactttgggaggctgaggtggcaggatcacgaggtcaggagatcgagaccatcctgggcaacatggtgaaaccccgtctctact

SEQ ID NO: 237397 - DNA, 202 bp, Homo sapiens
gttccagtagattcacttggtctcaagtgaaaattaaaaaccaaaatgttaaaccctcatggttttttttgtttgttttgtttgtttgtttgttttttgtttttgagatgaggtctcactccattgcccaggctggagtgtggtggcgcactcagctcactgcaaccttcccctcccaggctcaagcaatctcccacctcag

SEQ ID NO: 237398 - DNA, 435 bp, Homo sapiens
  misc_feature (23)..(23): n is a, c, g, or t
agacggagtcttactctgtcgcncaggctggagtgcagtggtgcaatttcggctcactgcaacctccgcctcccgggtctcacttattaataggcagctacagtccttttcaagagacattgtgacacagactgctacgtgttggtcaaaacctgtttcctctttctgggcccacagctgaagtatattttccagtcttagttgcagttaggcaaggcatgtgactatgttataaacaatgaatgaaatgatctgtgctgcttccaggccaagctcctcccacaagtgattctcatattccttctacattcttggaaggcttgggttgaaggtggcaaagcacaagatggagggtgcctggatcccggaactgctgctcaagaggaaaggcatccaaatagaaaaaccgttcttgaaaaaaaattttttttttga

SEQ ID NO: 237399 - DNA, 296 bp, Homo sapiens
cagagccagagaaggagggcttagtcaaattccatggcaaaggatatagattcagagaaggataaggaattgaagccataaatgcaatttaccatatcagctctgcaatcttgtctcctgacatttcctacctggaagattatacgacataggctcctactatattcatttgcttttagccccacaaattacactcttatcatacttttctcatctgcatgcttttgtccagtgtttttgctccaatttgacagctctttacacttctgtgtacaccccacctcagacaattaata

SEQ ID NO: 237400 - DNA, 705 bp, Homo sapiens
gacagggtttccccatgttggccaggctggtctcgaactcctgacctcaagtgatctgcccgcctcggcctcccaaagtgctgagattacaggcatgagccactgtgcctggcccagagcagatattttaaacatcaagaatcagatctgcatgattcagaatattgctaacctatcggttctaacataagaaacaaggagtaaaaagtaaaacaaccaccaaagattttcaataactttaagacataactttaagataccagtaaaagaaatgcctcaaggtagttcataattgctaaaagaagtgccatgacaattaagttgtaaaaacagatttaaaacttctacttccaacctaacagaataattggtataggatttaccctagcaactagaaaatggggcagaatttatgaaactactcttttcagatattagacagcaggcaatgcaggactgtgatccctaaaatatagctttcagctaaatatactttagctttcggctaaatatactttcccctataatgtaaggggaaaacctcagtaaacacaacgaactcaattagttgaagggacaaatttgagttaaggaagggctgagaaagctggaattctcaggtcagaataacagaaaaaaggtaagctaagcagagacacagtaccagaaaattctatatagggactcttgaatcttcaaagaaat

SEQ ID NO: 237401 - DNA, 652 bp, Homo sapiens
gacagggtttccccatgttggccaggctggtctcgaactcctgacctcaagtgatctgcccgcctcggcctcccaaaaacatcaagaatcagatctgcatgattcagaatattgctaacctatcggttctaacataagaaacaaggagtaaaaagtaaaacaaccaccaaagattttcaataactttaagacataactttaagataccagtaaaagaaatgcctcaaggtagttcataattgctaaaagaagtgccatgacaattaagttgtaaaaacagatttaaaacttctacttccaacctaacagaataattggtataggatttaccctagcaactagaaaatggggcagaatttatgaaactactcttttcagatattagacagcaggcaatgcaggactgtgatccctaaaatatagctttcagctaaatatactttagctttcggctaaatatactttcccctataatgtaaggggaaaacctcagtaaacacaacgaactcaattagttgaagggacaaatttgagttaaggaagggctgagaaagctggaattctcaggtcagaataacagaaaaaaggtaagctaagcagagacacagtaccagaaaattctatatagggactcttgaatcttcaaagaaat

SEQ ID NO: 237402 - DNA, 502 bp, Homo sapiens
gcctcccaaagtgctaggaataaagacatgaaccaccgcgcccggcccttaattttagaagtactgtatctatttcacttctactaatggtttctcttaaaatgcttttaacaaaattggcgacaatcaaaaaattttaagtaataacataataaacatatgtggacctgcaacagagctttggaaataaacattgtcagtgtagttgaaaccccctcgatacttctaccttatcattagccttcctgtctctgctaggtaatcattactctaaatttgattaccctttaattattacaaacacttttggatcaaattaaacagggcttaacctttgtgtccgcttccagcaaaaggaagttttaatagaattcttttttttttgagatggagtttccctcttgttgcccaagcggaggttgcagtgagcccagatcgcgccactgcactccagctggggcaacatgagtaaaactgtctcaaaaaaaaaaaaaaaaaaaaa

SEQ ID NO: 237403 - DNA, 678 bp, Homo sapiens
ccaagataaaactcaaacctctctctacaaccaaacaaacaaaaacgtctaagaatttaggtttcagtcacaaattcctagatgatattgcccatctctttattgtaaaactgtaccggttgtttttttcccttcagcttgtcagagctattcccgacagtcaaaggcaccaccatcagacagttctaagaagggaatttggcttaattctccacattgttctttcagctagatacggtgtacaatcaaattttgctaagcttacatggttgccactcagaatgatgaattctctcagctaccagtgtataatgtaagactcttattttccctttctttgttttaggttagaaaaattaggccaggcgcggtagctcacgcttgtaatcccagcactttgggaggccaaggcaggcagattgcctgagctcaggagtttatgaccagcctgggcaacacggtaaaaccccgtgtatactaaaatacaaaaaaagttagccaagcctggcggtgtgcacctgtagtcccagctacttgggaggctgaggcaagagaattccttgaactcgggaggcggagattgcagtgagctgagattgtgccactgcactccagcctgggcgacagagtgagactctgtctcaaaaacaacaacaacaaaaaaaaacgaaaaaaacc

SEQ ID NO: 237404 - DNA, 390 bp, Homo sapiens
taagtggaacattgatggtagaacaaaacaaaacacaaggaaaaaacattgaaataatcctggtactagggataaggtaatctttgctaagggctagattccccagcaccttggacaccctagcccaggtgtgagaaggcggggcagcttgttgggtgtgttccattgctaaactgacctggagcagggaggaggcttcagggtgggaagccgagggaccggaaatgaacctctagaactgacttgccctgagaaggcaagaagtgacagaaacaaaacctaatcaacagatattttctgtctcgatcttactcagcagatacttagattgaagtagttcagagcatgcacacgggcaggctgagttatgtagcagggaggggaaaccat

SEQ ID NO: 237405 - DNA, 519 bp, Homo sapiens
ttgtgttgttcagtagcattccattgtgtggagagacaacatttagtttcaccattttagctgttgagagacatttgggttgttttcaacttttggctattattcataaacctgcatgaacctgttatacacaattgtgtaggagtcttttatgtggaccaatgccttcatatctcttgaggttatatcctggagcagaatggatgagttgtgtagtagaagtgtgtataaggagtgggcaggccaggtgcggtggctcatgcttgtaatcctagcactttgggaggctgaggcgggtggatcacttgaggtcagcagttcaagaccagcctggccaacgtggtgaaaccccgtctctactcaaaatacaaaaattagccgggtgtggtggtgggcacctataatccaagctatggtgggagaattgcttgaatccagcaggtggaggttgcagtgagctgagatcgcaccactgcactccagcctgggtaacaaagcaagactctgtctttaaaaaaa

SEQ ID NO: 237406 - DNA, 376 bp, Homo sapiens
agtgatttatttactcaacaactctcgtttcatctatatcttaatctccttaccctcttctaatactattttgaagtatattccacatattatttatctgttaatattttaaagtatatttctaaatatgattaccgcagtaaagtctttttaccctccatgttgaagtaactgggtcaatttttccttataacgtttcacattctgcattttcttattccttttgatgtcatttaacttattactttcctggaatccatgtaactggaaattggatgtgaagcagtgtttctaacctttttttttttaattgttgcctcattacggagtttttagagcttttttttttttttttgagacggagtctcactctgtc

SEQ ID NO: 237407 - DNA, 492 bp, Homo sapiens
tctctgttacgagagattgggagatggcatttcatctgtaactgcaaatcacaaatatttcacgatggttttaaatgtcataagtgtgagttatgtccctgctcacctccccttctgatttgagcagatgtctaacttttacatgagatcagaataatctgattgtttgaactgaatatatatttagtttgccaaataagctgcatattctgttgatcataagccttttgtgatgggagggagtcaaaaatctgacgaccagaaaaagaaagcatattaattttatttttagaataaaaatttctttgatgtacatttatttttggtctacaaagatttcctaaagttgaggtgggacattccttgaaccctttatagcccccatgtaagtagctgtactcaattgggagcgcaggcctccgtgtgagagaggaaaaggtgacttgtccttagccttttgtttttaagcagtgtatatgaggatgcccctgc

SEQ ID NO: 237408 - DNA, 1201 bp, Homo sapiens
  misc_feature (1170)..(1170): n is a, c, g, or t
gtttaatatgaaggatgataagcatcaggtaaggaaaaaaggagaaataaaaccaagatatggtaatgtgaatacaaatgaaagttagcactggtggaaaggcaacagatctggcctgagtattttagaaagtttaaaaaatagtgaaaggaaacagtgaatagaaattttttattggaaaattatgtgaggcaaaaaaagcactacccaaaaggtctgagggaaaagatagggaattatcatgtagccatctgattaattttttgtttccctagaccccactcctctccctattccccaccaccatttggtgctccacattgcagacagggcaatatttctaaaatacaaaaataggtcatcatattccttgtagccctcagaatcaagtctgatacatgcagccaacaggcatatgaaaaactcagcatcactaatcattagggaaatgcaaatcaaaagcacaatgagataccatgtcacaccagtcagaatgctattattaaaaagtcaaaaaataaatgctggcgaggctgcagagaaaaggaatgcttatactctgttggtagaagtataaattagttcaaccgttgcagaaagcagcgtggctattcctcaaagagctaaaaacagaactaccatttgacccagcatttccattactgggtatatacctgaaggaatataaatcattctaccataaaaacacatgtaggtgaatgttcattgcagcactattcacaatagcaaagacatggaatcaacctaaatgctgatcagtgacagtttggataagaaaatgttgtacatatacaccatggaatactatgcagccataaaaaagaataagattgtgccttttacaggaacgtggatggagctggaggccattgtcgttagcaaactcacacaggaacagaaaaccaaataccacaagttctcacttataagtgggagctaaacattgagtacacttgtacacaagggaacaaagacactggggcctactggagggtgcacagggtgggaggagggagaggatcagaaaaaataatattggatactaggcttagtacctgggtgaagaaataatctgtataacaaacccctgtgacacaagtttacctttataacaaacctgcacatgtaccctgaacctaaaataaaagntgaaaaaataaatctcattgctgttcaaaac

SEQ ID NO: 237409 - DNA, 425 bp, Homo sapiens
cttgaaatctgagagggaccaagcaagttgtcttagctagtctaggtttcctttcacccagctagtcctcctatacccacagcctacatgttcttcttcaaaactttcctcttcagagaaggcaaaaggtttgtttttttttggtttagttatgcatttttggtaaagtatattattttgttcttggaaaacccttgaaaatttattagatagaaaagcattcagctaaattattagttataaagataatattcaaatatacttagcatctgcataaaaatacctgtatcactgttgaatggagagaagacatttaagaaaagaacatggccgataagcccttgaaaagatacttaatatcattaatcatcagggaatacaaattaaaactacaatgagataccattatgcatatcatattggtt

SEQ ID NO: 237410 - DNA, 552 bp, Homo sapiens
tccgaggctcctgtgccacgcaccctcccccctgcggggcgaccccgcgtatgcgtgtgtgtgtcacgcgtttaatcgcacagagtaattcccagacgtgcaagacaaagcatttcaagcaaagatggtccagagttcaaattggaaagcacatctcgaggcgctgaatctgttctcgccgtctgcctcggtctctggggcgtcgcatccaggagaagggttttaactccctgccagatccgctcggaattagctcttctggcggtgcagcaacaagtggccccgccgcctcccttgtgcactcggagggactacatcctcctcctctcccagcccctagtccaaacgggagtaggtaatggcggggaaagggggaggtgacgagagcggggagaaggaagtacatattttttaattgtgaaattgtctgtctgcgtgctgtgctctgggattctcttgtctcaatcaacttcaattttaacgtggccgtaacgttaagattaagacctagaaatgaaaacgtacccacctttcttattacaaaggtcaaaa

SEQ ID NO: 237411 - DNA, 446 bp, Homo sapiens
gctctgctgaagccctaagcagtcattgtttctgtggttggatgggctagccatttcctaagggtagtccttgaagttaaggactaaggggccaaagggaatttgggggcacagaactgtgtttgctgggaactttgttgccatttcttaagaccactcctgaggcagaattttttttcatagcctctttctttaattcaattgatatctgggtggttagctggggggaggggagaggaaggaagggtgggatgagaggagagcttctgtctgagttcatggaatggtttttaggttcctcaggcaaaagtaggaaaacaaagttagcttttctcaatctgattctatagagcagtctgtctctgttgtttcccttctgtccaaattttatttctttcccctaccttaaggatgtttagttacccaaatgatcaccttgagacttg

SEQ ID NO: 237412 - DNA, 503 bp, Homo sapiens
ttaggccgtgtcctgacttggccagcaagcaccatgatgacactgcccccagcctagccatgatgacactgccacgagcctaatgcctgggattcccaaagtccagcggtgtctcaagaatctgggttatgggtgcattgctggctttgtccattttactcagcacaagtcagaggtgccctggagcacagtcaccctgaggatgccagccctggctgttccctggctttgggtaggtgggttcctctgcggatcgtcacgcttctgcctggggtcacaattcacaggaacctgggcacccaggacccaaggacacctgcgtggagtgatgttggacacatcacatgggtgcctcctgtgtgatggttcctggatatccgaattttccttccgattccaagaaatcagaaagaaggacaagagagagggagggaaggctgggaatgagggttctacacatttttgagatgcatgaagcttaatctgtcatgaaattagagtta

SEQ ID NO: 237413 - DNA, 534 bp, Homo sapiens
aagctccccctcccttggtggaagtcggctcaagcaggtcctgaggacaggagccctgggggtttgggcctgggacaggacgagacacccgcggtcccctctcccatgccaccccaaacaggacccaggacacagccgccttcgcggcggcagcaggagcatcgcggccgccgcgcggcggtcgcgatatttaaaggggacgcagcctatctgtcaggagtggagcgtgagtcggctcagccaatgcgcatgcgcgaggccccagcggttgctccagtcacagtggttcccacggttgtcttagaaaccagtccccgaggctttgcagagcaggagccctccgtggcagtgcttgggtatcgaggctctgaggctccggtctcacctctccacgggctcgaagggaaactctcctgatgccagcagtcgcaaagggccgactatgaagatgaaaccccaggtggagaccggggaagcagcacgggatcccagcctcaggcctgcacggacggtgtttgttggggtgagtctcgc

SEQ ID NO: 237414 - DNA, 445 bp, Homo sapiens
tcccggtgtccctgtgtctgggaaagaagccctggctcaactttctgctttgaagaggccctaattaatccagcgggagtggcgattaagctgcgactttgcgcgctgacacccagtaggccgctgcgcgctgaagaggcactggcgggaaccacgcccgggcgaatcccaagctccccgccagcggcgctaggtaacgtgtccctcacctggactcacccttgagagattctgggcctactttgagcccttcctgaggcagctcgcgtctcccaggctggctcgtttcacctttgttcccacgcccgttcccagacctcacctgagttttcccttcctattcttggaccctgccccgacccatccctttgcagcatgaacaaggaaactgtggttgacttggattttctgccactcattgtacacttcctttggggaaaaaaaa

SEQ ID NO: 237415 - DNA, 496 bp, Homo sapiens
agctttcccataacaccattttgggggtctgtgccataaaattcctactaaaggcaagatcctgctagcttgaggcccttctggcatatctagtatctcccatccccggattccatctgtaactcctatgtgggtcctactcgccttgcaccatctacataataattgccaacattgatgtcctggttactagcacgtgcctagcactgtgctagtgctatacctgcattctcttatttcattctcacaatatcctttgaagtagataaggacagttatcccccatttactgataaggaatctgagggtaacttgaccaaggtcacagctggcaaatggcagagctggcatttgaacccagtttgcactccaaagcccagactcttaatataatacttccatacggaacttcctcaagtcatttagaaagtgtccacttttattttatttttaaatcttcttatttaacaactcaaccactgaaatttcagtaagg

SEQ ID NO: 237416 - DNA, 361 bp, Homo sapiens
caccccagcctgcaagtacctaggattacaggcacacatcaccatgcctggctaatttttttgtagagacggggtttctccatgttgccctggctggtctcaaacttctgagcccgagccatcctcctgcctcagcttcccaaattgctgggattataggcatgagtcactgtgcccggcctatggctaccttttaacaaagtgatcaaatttaacatcatcagtgacagacaaacctacagtatgtacccttgatgggatgtacagagaaggccagcgctttaagaggccaaggcaggaggattgcttgagcccaggagttcaagaccagcctgggcaacacagtgagaccctatctcta

SEQ ID NO: 237417 - DNA, 473 bp, Homo sapiens
ccaaagctgagtctctggaaaatttctaaaaagtctaaacaaaattcttatcatgccaaccaggcacgcttctttcctcgcaccgcgcggcgcagaaagacacacccctgactctgcgctcgtccctcgggctcgggtcctccacgctcagccccggccctcccggtccccgcggaccctcccctcgggcccaatgcgccagctggctccgcagggccggaaaagcgcgttcctcggcagcctggcgccgccgggaaggtgcgcgcagcccgcccggcagccccgggatggcgtgagggccgcctccccggctagccccagcggacccctgccgccagcaggccgccctccctccgcgggcttccgggagcgggtcctggcgccagcgcgacctcccgggccccggcgaaccgagggagcgtcccctttccccgcctgacgggcgccgacccgcccctgcggtgccgcggccg

SEQ ID NO: 237418 - DNA, 1712 bp, Homo sapiens
agctttgatgaagagtgaatactgatggagaaatatgataggacaaaaagggtgtgatctagtgtagataaactggggaatttagcaaggcctgtttgttcaggttcctctctgtgacccttcatcttcagagatgagcatgttcctttcttccagggatcgggaggccctcacatgagtgtcttctgacctgcttcttgggaatgttggaaaagctttcctaagctgtatgccctgcatcggggagaagcatatgtgtgggtgaggaggggaggtcagagagactttcctgcttctgtttttttaatatgccaaggtgccgtattttgagtagtgtgtcctgaatcccatcatccttttcaatgtaacttttcattaaatgcagtgttctaggataagggttagcaaatgacttctaaaaaaacaccagatagtaaccatctttgtctttgcagcccataaagtatctgttgcaactactcaactctgttgctgcagcacaaaagcaatagtagaaaatacatagaccaagaagagtggctatgttccaataaaacattttttgtagatagtaaaatttcaatttcctgtaatttttacattataatattttacttattttttttccaaccattgaaaatgaaagaaccattcttagcttactggttctacaaaaacagatggcaacctggatttggcctgctgctgtagtttgtcaacccctcttctatgacattacattcacacagacaaaactaaacccaaacaaaacaataaaaatgcattcttctgacaatacaaagacatatcttaaaatatttaaagtcaaacaaaaatggacagtttctgacatagcttatagaacattgtttgtcaaactgcagggatttgaaataatgaatagtaaacaatagtgaaaaaaaaacttcaaataaatcacagctaatttttgaaaatccagtgttaaaatgtgatgatcagagtcaagaaaaattgtgaaagatttgaaaattggcaaaagtaaagattatttttctctgtattgcacttctccaagttctgtccagtgttcagtgctttgaactattttcccactctgcaaatggtagaaaattgataatgaaaataactcttgtccatgaaaatgcaaatacattttgtctagtggaatgcacttgatgcttcatccaggaatacaacattttgcatatatttgtaaatccatttcagcaccagcattccttattgaccctattcatccatccatccatccgtccatccatccatccatccatccatccatcttaatctgtctatcatttatctgtctattgtctatttatctatgggatttttcctttgaatcaaatgtaacatatgactatttcttgagttaaataaaatctttggtacatttccatctgatatttgcatgagtcttgtcttcactttataaaatatttctccactttgggagtccaaggcaggtggatcacgaggtcaagagttcaagaccagcctggccaacatggtgaaaccccgtctctactaaaaatacaaaaattagccgggtgtggtggtgcacgcctgtaatcccagctactcaggaggctgaggtaggagaatcacttgaacccaggaggtggaggttacagtgagctgagatcgctccactgcactccagcctgggcaacagattgagactctgtctc

SEQ ID NO: 237419 - DNA, 381 bp, Homo sapiens
gctgcaccctctcactcctgctgtctctccacgctgagatcttgcttcctctccttctgcccttggacatcagactccaggctcttcagcctttgggctctggaacttggaccagaagcctcccaggggctctctggcctttagccgcagatggaaggctgcactgtaggcttccctagttttgaggctttaggacttggactgggctactaccgccttctgcctttcctcagcttgcagatggcctagtatgggacttcactttgtaattgtgtcagcttttaatctgataaactcatacacacacacacacacacacacacacacacacacacacacacacacactattcgttctgtccctctgaagaactgactaata

SEQ ID NO: 237420 - DNA, 466 bp, Homo sapiens
accaatatctaatacccaaatcagggataaaaaaggctgacctagccagtcatctacaaagactcaagaaaacccttatttgtatgttaataccgatgacaaaatataatcttttaaacttaaagataatattgtatgtcttaaatgacaccaatatggagaagaaaaagcctttcatctaagagccacttttactggcactcagattagatcagaagcagctctttcaggtcttcaggaaaagctcaatctccacccaaaacagaaaaagcaaatcctatgcatcctctctcctcatacttcttataacccacacacaaattatgaaatatcataattcagtatgttgttcagggaaaaattttcaaaaaagtgaaaacctaggaaggtaagtcattgcgtgaacacttttacaacagctaagcatttcctacgtgactaatctattttaaattcggctcctctg

SEQ ID NO: 237421 - DNA, 400 bp, Homo sapiens
ccgaagcatgatgagggttggggtaggagagaatgatacaagatgaaactggagggaagcaagagcaactgttttgagaagcatgcctggaaatgggaaggactgcggtctacattttgttgtctgtggattgcattttgaaatagtgttgtattaggctgcttccccttcccatccccttcaggacagtacttgaagggagccagcttgttctcagttggcacagaggctgtggaaaggagtttggattttagtctaagcacagtggaagggacagtgatttttgcccagcacagtgactcacacctgtaatcccagcactctgggagaccaaagctgggagatcgcttgagctcaggagtttgagaccagcttggacaacatggcaaacccctctaca

SEQ ID NO: 237422 - DNA, 392 bp, Homo sapiens
aaaatttaatttttctgagaatgaattctaaacttcaaaaaccctcagattatctttcaaaatgaaaatagaaagcataaggttgtaaatttccttcaaatatacaaaagtgtacttaacatccactattaaatgttatataatccttaaacaccttcccttctcagtaaaagtgtacttatatataatgtacacagaaattcctagactacaagatgtcatccttctagaagaagacctaaagcatacactgggaggaaagttttacaggggaatctagactacttaattttttcttcacagtaacaaatgacaaagcaccaatatctaaaggttcccaacacacaggataaacaataaggaagttctcccagtgtttcccattttaggca

SEQ ID NO: 237423 - DNA, 635 bp, Homo sapiens
tgttagtgtttatttcatggaaaaatattgctgttgccatgtatattcaaatgcagatcagatgatctgttaaggataatggaaccgtcacttaagaaaaacttaattttttttccctgtgtcctattggcacaggtcttttcttttaaatttttattttaatcgttttgaggtacaggtgggttttggttacatggataagttctttggtggtgaagaaaaacttcagatagaacatttggttaaataaaagactatagagcaggtttatttgttttttaagtcaaaatgttaacccattacataagcatgctgacctaggcttgcttgaaactcgtgatcttgtccttagtgacccagtctttcctgttacattgtcctaaatgactggtttcatagttttactctgtcattgcacgtctcatatctcctccctctcactttgctccctattgccctgagaaaatagacgcagtcagaaaagaatctttaaaagttgtcaccgttgcatctgtaaacctagcatctgtgcccatctgtccccatctgccctttattatatactgcggatatattgtttgtcgtagcttgagccaattgcaatgtctcatttcttttataacaaagctccttga

SEQ ID NO: 237424 - DNA, 472 bp, Homo sapiens
agtgttgggctaagaacagacctcggtattcctgcctgcccttcctcagggatgtgggagaggggacactcggggtttggtgaggtccgtctgtgcttctttgaggccagaaggacatacagacagaaaggcccaatgctctaagaccctgtaactctgggtagcggcttagtcttgaaaaccaaggtggggccaggtgtggtggctcacgcctgtaatcccggcattttgggaggtggaggcgggtggatcacctgaggtcaggagtttgagaccagcctgacccacatggtgaaaccccgtctctactaaaaatacaaaattagcaggtcatggtggcacacgcctataatcccagcctcaggaggctgaggcaggagaatctcttgaacctgggaggcggaggttgcagtgcgctgagagcacaccactgcactccagactgggcgacagagcgagactccatctcaaa

SEQ ID NO: 237425 - DNA, 634 bp, Homo sapiens
gtggcatgggcaaggccagctgattacacaggtaaccacaaggtggcatttactagatgaatttaccatgactcagagcctgactttcaggctggatgcctgggaacttggcttaccatattgagagtggctgcatctcacgaaggtagaaccttattaactgagggcatagaggcttctgtataaaatcagcatgcatgtgtactgattatcttgagcaggatgattgctggcattgacctgaccagggtgttctcctcccatttacatgacactcagaaaaccaattctctcattatagatttttcagccaattcgttttattccacaacagctaatcacatgaattgtgtgtggattttactgagctcacctgttagagaacaaacaatcttatttctaaattctcggagagaggtagaagccctctcctgtagcgtttatgtgctgattaatcagcatttactaagcctttaacaaacacctgtgacatgaccaggtagttcctgaatgaataaatgaatgcagatcgtgacgctagatagacggtagtgatgggaagtccagttgtggcaaagtagcatgtagacatgctccacatgacctgattattggaaaatgatttttcccctta

SEQ ID NO: 237426 - DNA, 2547 bp, Homo sapiens
  misc_feature (705)..(705): n is a, c, g, or t
  misc_feature (713)..(713): n is a, c, g, or t
  misc_feature (719)..(719): n is a, c, g, or t
  misc_feature (797)..(797): n is a, c, g, or t
  misc_feature (806)..(806): n is a, c, g, or t
  misc_feature (1011)..(1011): n is a, c, g, or t
  misc_feature (1834)..(1834): n is a, c, g, or t
  misc_feature (2010)..(2010): n is a, c, g, or t
cttcctgatggctcctggatgtcaggaagcaccacgccatttccagcttctcaggctcatggcttaaaaggaccccagccaactgttcttcccaagcaagcagacgggatttatggtggcggtttcttcaaagtgcttcttctctacccaaatccagaagcgaaacaaaacagaacactcctttaccttttcgaagccaggaaaaggaactcctcttattttttaaaaggcccaagagctgcaagcaaatgtcaacttcatcctgtggtttgatttacatgtttctttgggagaaagagacaaaatacagcattgaacttaaaaaaaaaaacttacaatgaactgttataactcagaacatgatgcacaaacccagatttaacaaacggagcaaaaaaaaaaaaagttcttctgagaggctcctcgtgtgaggctgtgcctgtctggcgaatcatcttggaaatggatgaggttaaaccaagggtcattgagtcccagcactgggattgtctgctccctgctctgaaaaaatggaaaagctacgtccataagaggcatggatgtctctagagctggccaaatatacaacgcttttttcgagtgcgattttccctaattgtaatattgtgcatgatcatgaatgaaaatttgggaaatggagaaaagtagaaagaaaacaatcccctgttcagagagaacctctgntaatctgncgtaantttcttgtcagccttttttccgtatattttaaaaccaaggtgctgtcatattgtagattatgctttgtattttttaanaaatttacnatggccacgatttttctttctacctccttcctcaacccgaaggtacctggattgattgacaacaccaccggtccagcttcatgaagccaggtaaccgggaagcatctgaccctgccttctccctctccccaaagcctgtgtcctcccaagccagtgtctttgcctcagtatctgtctaccagcttctctccatcccagtggccancaccccagtctgagctgctgaaatctctcacccaggctgggaaacagcctccacctggtctccttgcctccacgctggacctgtctacccattttccatgctgccatcagaaggagccttggagatgcaaatctcatcccagcacccttgatgaacacttccatgactgtggccgttgctcctaagataaagaccagattcctcctccaggaagcctccctgtctttacacacaaaatcccctgcttcaaagccacatgccactgactaccgctgctatttgtgagactcttgtttactccttccctgactctgggaaccactctgtctccagtactcaatcctgagcattcacttgagaacctcatttgttgatagaatgaatgagaaagctctcattgcacatccgaaaacatgatgttagggcggcattgtgactcccatgatgcatctctgaacacccacacaattctggcatctgccatcctaagtgctgaggacggtaccatcacccgcattttgttatcggagaaatagagctggttcttagtctaaagagagatactggggaaacagctgagcagaaagtaggactagagacagcagtccccgaaaatcccttcaggccttgcttcctgagctgggaggggaactgcggttgccaaaggcagccccggcccccagtgttcttctgctgcgtgactcccggcctgcagtgacgcccacaccctcccactcttatgattgtcgaattgtctattgtcaccactgactggtgagcgagccacccggggcagttttgaaagacagctggcgaggtaagntgaggccacagagccagcccggagacactggcagcatctaaactccctttccttgactacgctttggggctaggtccccaagtccctggaggcagtgcagaaattccacacgaaggggtaactggggtgtcaaacgggagcgcctgctgccactccaagctgggacccatctctgncgacacctcggggtgtccctgctgtattcggtgtccttttgtttcaaaaaaataattttcctcttagtacatggcaggtggtggggtttgttgctcttgaattggcaaagcaactagaggaaaaaccaacccacgccgtctggaagggaaggaactgtcgaaggctgagacttggattatccctccttagcatctgggaggcaggcggggagtgaagtgtctcatccgtgaagtggtcatcactctgatccacatcagtcccgttgtgatgaagtttgctgagcacagagccggtgatctggggactgcattgaattgaattgaattgattatcattttcttgagacaggatcttgctctgtcacccagtctctattaaaaatacaaaaaattagccggcgtgtcggtgggctcctgtaattcaacttgggaggctgaggcaggagaatcgcttgaacccgggaggcggagattgcagtgagttgagatcactgccatcacactccagactgaactataagagtaaaactccatctc

SEQ ID NO: 237427 - DNA, 802 bp, Homo sapiens
aaaggacaaagttcacagacacttaacatttatgaataattcaaatttaatatgtttggatattttactttaatagaaaagattgatgaataccagaaaccagtcagccttaatgcattctacattttggcttcccactgggtccccagtgttttaaattttttttctcgttaaaatttttatttcttattatttatttatttttccagcagtactgacattttggatatagttgaaatttttaaaatcagcatttccaccaatgaattgattataattaaagcttaagactgacaggcaagaggtttttttgttttgttttttcttttttgtgatggagtcttgctctgtcatccaggctggagtgcaatggcacaatctcagctcattgcaacctgcacttcccaggttcaagtgattctcctgccttagcctcctgagtatctgggattacaggcatgcaccaccacgcctggctagtttttgtatttttagtagagaaggtgtttcaccatgttggccaggctggtcttgagctcctgacctcaggtgttccacccacaagaggtgttcatttgcactcatactttcaaacgtgtctcagtgacaatcccttgttttctaagaaaccataacaaacactgaatttaattattaaagcagaaaaatggcattattaaataccgttattcaagcatggccaatattttttaaaatttatagattaacacctcagattagagggaactatttcagagccactaaaatatgtttgtattccttccctcatataaaacatttt

SEQ ID NO: 237428 - DNA, 191 bp, Homo sapiens
caccccacaacagtccccagagtgtgatgttccccttcctgtgtccatgtgttctaattgttcaattcccatctcaatcactcttaataaaagctgtcagcaaactagaaaatagaggagaattttgttaaattgataaaagtggatctaaaaaaaccctacagttaacatcatacatagtggtgacaaac

SEQ ID NO: 237429 - DNA, 431 bp, Homo sapiens
catacacagtgacacaagcttctccagcacatagtccacaaaatcttttttctttttctttttttttacttatttatttattttttgagacagggtctcgcgctgttgcccatgctagagtgcagcgttgcaatcatagctcactgcagacttgaactcatggattcaagcaattttcctgcctcagcctcccaaacagctgggactacaggtgtgtgccaccatgcctggccaatttttaaatgtttggtagagacacgaatcttgctatgttgcccaggctcaggatatctttttaaagttttttccttttatctttttttgcagggggaaggcagagtctcattctgtcacccaggttagagtgcagtgggaggatcacagaagcccaggaagtcagcagggcaatgagccataattgtgccacagca

SEQ ID NO: 237430 - DNA, 275 bp, Homo sapiens
cagctcccagatgtttatattgttatgtatctaactagcatggatatcctctgggctctgttttttctgatttaatggccacctttgggctatcagatgaataaggatattgtcagtatcaggaaagtaaagaagacatttgtcccaacccatatgccccaagttgttcaaaactattgaggaaagagatactgtctgggttttcataactcagttgcatttttatgtcttgcatatcaaaatttgtatgcagggttacgttccccaacattaat

SEQ ID NO: 237431 - DNA, 353 bp, Homo sapiens
attttggcttcttgggtttctgaattatctctaagcactccactatagtggagtgtataggaatgtggaagctcttattaaaagttgcagaaaggtttaatagattcagtttaaaaaaatttagtatgtagaggcattaattattttgattatttataataacaaaactaatttgtaaggttcctttgtatgtaggtatatatatgttgtatatatactgagaggcacatagacacatgtaaccatgcttttccgagcttaaaagcagtttatgacaaaatatagagtacaaccactagatggcgatgtttccttgtgaaaggatcaaactgcaatgtaatggaatatttggc

SEQ ID NO: 237432 - DNA, 435 bp, Homo sapiens
cctcacagactcctccccacagctcccatgcgatacccccaaagtcaagcagactgatggagacatgccaccacccccagggtcggctggccccggggataacgacatggaggaattctacatctgaatgccctctgctcttgttctcgaaacacacaaactcagagacacagactcaggccccactgcccctctggccactgagcacaccacattcttcatgatccatttcccaggagcccgtagcacatttgcctaccacccactcttagctggggggtggtatatctctagagacacagcagaaaaatactggcatttttatgcaaataaattctcaacaaacttgtcataaaatatattttttgaatattcagcatttgaggtatggtttagtgggtttatacaatttaaatggcttatataattatttga

SEQ ID NO: 237433 - DNA, 665 bp, Homo sapiens
ccttttccaggctctcttctgatgttttctcttagctggagtgttgcttgcagggtcactgactggtctgtcttacgtgtcagtcagccatagagaatagactatttatttatgatgaggcttctgccttcacacatagaggaaagaaaaatccagaggtgcactagatgtgagttttcttctccatttttcagttatgtcagttttcttctagctgtgatttgattgtgttatccaaattaatatttattgtttcccttgggaaactttggggaaggtggaaaggattaagaagctgatggaaagggaagtaaatttgggataaaaaatgaaaatcgttccaatgattctttcctcttcagtggtaaaatgattaaatcaaaatcttagcattcctgaggtcagattttcagtcttgcttttcttctcaaatgttccttggctaataccctgagtttattcaaagcagactgaatattatttgactatttttacctgagttgttttttaattcccgtattgtattatacagcttttcttttcctgagaagagaggagaaattttagttacacatttatttactttttggcacttaatgaaagattccagttaaaacataaccaagaaatctactgctataatcctgacccatcaccaaggaatg

SEQ ID NO: 237434 - DNA, 248 bp, Homo sapiens
aacactgtctcctcttcctatagctacctcccttcccaccttaatgctacctggacactctggatagataagccaaaagtctgattcttttaggaccgcacacagccttttctaggctatgcctggagaagcaggtcacaaggccaccccacattaccatgtctaaattttaatttttaagttacaaataaaactagcaaattcttatgttctatatttttaggttggcaaatatatcttcataatga

SEQ ID NO: 237435 - DNA, 417 bp, Homo sapiens
caaaaaaatgtttaaactttcatcttcacgttgggtgattgcagtcataaatttcacacaatgatcctgcttgtatcatagaataacccattttctgatgaacaggttgaatccaaataaattccaaacacgtgtataatgtagagttaaaacattttagactcaaagctcaaagctaattaagaaccggcatgggccacagtttgaaccagcaccaacttgtctttgctctgttattggtttgctgtctttgcctgttattccatatcacttgctggaaggaagcagccatactgaaatacaaattttgtttgtttcttttttaaaaaaggaaacaaatagatggtttattctaagaatgtacaggaacttatattctaaacgtccataaatgcatattctagggactcttatcat

SEQ ID NO: 237436 - DNA, 219 bp, Homo sapiens
cttgccccagaagatacacaatgaaattcatgttattgagtagagtagtaatacagtgtgttcccttgtgaagttcataaccaagaattattttagtagtggataggtaggctgaataattgacttcctatcattttcaggttctgtgtttgattttttttacatattaatttctttgatccacattaagctcagttatgtatttccattttataaatg

SEQ ID NO: 237437 - DNA, 494 bp, Homo sapiens
tattattggtttatcaatgaatttgatagagctaggatggaatataaaactcaaaaatacatatgtgaaggtagtttatgataaatgtggaatttcagatcatggtgaaaagaatttttcaatagtggtaggaccacagttttacagccatttagaaaaataaataaaatgcaattttaaaacgctagatccatgttttatgaaaataagagattcccctcccccccttttattttgagcatttactttagaaaacttgtaattatacatacttgatactatttctgaaaaaaaaaatacatccttttgaaacctaggaaagacttttttcagcttaatcatccaggaatatctttctcaaggacctggaagctgtctctttgaaatgtaaacatcaaaggagttagtaccctgcctgccagtttccgtgagcggataggagtctaacttgggtaggcacttccctccaagtggcaaaactacctcttgtcatt

SEQ ID NO: 237438 - DNA, 435 bp, Homo sapiens
cagtcccgtgagttcagggcaaagatcagtagagcttcctgttaataagtgggggaactcctggttcgtaataaagttgcaagaggtcgtacataacacaagtgcgaactgttaaccccagttgtaactaactttttaaaagtataggtatttggggctgggcaaggtggctgatgcctgtaatcccagcactttgggaggccgaggcaggtcatcacctgaggttaggagttcaagaccactctggccaacatggtgaaaccccatctctactaaaaatacaaaaattagggtgttggtggcacatgcctgtaatcccagccacttgagaggctgaggcaggagaattgcttgaacccgggaggcaaaggttgcagtgagccgagatcacaccagtgcattccagcctgggggacagagaaagtctccgtctca

SEQ ID NO: 237439 - DNA, 407 bp, Homo sapiens
aggaagaggatttgcaaggggtatttacaagtcacttcctttctaaatgttggatctcagaattcagagaaagagacaggaagtccagctcatagctgaggtattctcacaaatatgggaagtgcagaggaactgacgcttcttccaaattaacagacttgaaaaggcatggacgaaaaagtaataacaagagtagagcaggtgatttgcaggcgcccacagatgagggtgagcctgctcactgcttcctcttcccctccacagctgcaccgttaccgggaccatttgcacactttggtaaggcatagaccagttccctggtagcagcctggatcctccattcaaacaggaaaatgcaacataaagggggaaatcattcaggcaagacatgtactttgattttcttt

SEQ ID NO: 237440 - DNA, 482 bp, Homo sapiens
agttgtattgcaaggaacagaaaccaactctagctgacttagccaaagggaagtgaatggaaggatggaggaagtttgcagaatcaaaggaaaagccaaaatgtcagaaatcagaagaatgtcacaaatctggataggaaaaaccaagggatagcaaggctccattgtcacgatggttgatgtgggctgtaaacgtaggccatccctgaacactctcaccactcagatcccgggaaggagtcggctctgctgggcacgtgactctgctcggccagcccctggtcgggaagatggggcctctgaattgagactcacaaaagaaaacatggaaccagaggaaatggtttctcagagaaagccagcaccaaaagaagggaaagtgagatgttgccaggcaaaaaaaaaagatgtcatggataaggaaactacatttttccaactgaaaattggggtagaagcacgtgtaataccattgcttgttc

SEQ ID NO: 237441 - DNA, 538 bp, Homo sapiens
ccagataagggtggaggtgtcagttcttaccagccaacacctacagcagctagggtatgggtgcaccagtcctgtgaaaggggtctgggtaagtcaccaacagcatctactgcaaatgaggatattaaaagtacatagccgtaggattattgagaggattaaattaatgaatttttaaaaggcgcttagtgtgcctgggccaataaatgttagcagagaccaggccttgtaggccatggtgaagagttttgattgagagatcattctggtgattgtatagaggaaacaggagaaaggcaaaaaagcaggaatactagttgggaagcttttacaaatgtcgagtcatgagcaggtggcagcttggacctggtcgatggagtctgaagtggtgatttatagcttgggggaactagagcagggttcatggagggggaaacatttaagctgggcattgaatgaagattccagagggaaccatggaaaaaggaaagcacaggtgacctgccttgaacagtgagttgtcaattaatgtgataat

SEQ ID NO: 237442 - DNA, 669 bp, Homo sapiens
accccccccccacacgcccactccctctctcatgtttaatctcttctctatttccattatcagagcccagtcagatcttagtactttatatctaggtcctgactcatctctagggctccaggcagcctctggtccatttcattctgcatgttgtgctagactagcaatgctctttttgtgccaccctgaacatccctctcctgcttaaaaacattattttccttttccttgctttttcatttttatctttcttcttttcatcactttcttctaaatgctctatctcttatctcctcattatttctcaaactttctccactcacgcccagttagctttcttcttgcgcaagtacgctacacttattcacttctgctcattctcacttctgggcccgagcttctatttcctttgccaggaattccccatccctaaccctctgtgcttatccagagttcatctctttttctgtgtgttgtgctcaagctatgataaacttcaattccacagacagtgtcctgttttccactccctacctcactttgtttgccaagatgtccctataatccctgattggcctgttctttatctaagaaggaataaggagtgctctgtattcccacagcaacttgcacttacctcagttatatgttacattttcttaattattt

SEQ ID NO: 237443 - DNA, 247 bp, Homo sapiens
tgttcattaaaacattataaaagaaaaaaattttaatagcataaatatctcaaaactggcaattgataaaataattgtgattacatgcagtgtaatatgttgtcatgaaacatgcaataaaataatgatgtggaaagacgattatgatgtaatgttaaatgaaaaagacattacggaatagaatggattgtgtatttattaaaagcagaataatgtatatatgtaaggggatgagaaggatatagat

SEQ ID NO: 237444 - DNA, 551 bp, Homo sapiens
gtgctctggaaatgtgaagctccattcctgtctcttgggacctggaatggactgagacattctctcaaaaactctctaatgttgccttaggctttttcacaaccacttcaggtccacttctcgattttccttcttacccctatcggtgagtaaggtacccaagtcacagaaagctgatatttgccaaaaggatgtcagcagaggtggcctttgacccagttctcctgccctgttgaagactcttccagctcacaggagctgggtgtccaaaagtatagactgcctggattcaaatccgagctttgtttcctttttactgtgtgatgctaaacaaattacttcacttctttgtctcaatgatgtcatctgtaaaatggggacagtaagtccacccgataaggtagttatgaggatttttttaataatgttgttagtttttattaagatgattatttgctggggaacagagatgtgactctcagaaactcctgagaatgtttgccctcctcagatattactctctgcagccctggcttgtggctccctgcttc

SEQ ID NO: 237445 - DNA, 2217 bp, Homo sapiens
  misc_feature (841)..(841): n is a, c, g, or t
  misc_feature (859)..(859): n is a, c, g, or t
aatcttatgtcgtgccttatatatttttacaaaaagtggtatgtagatacaaatgaataaatgtaaccacttaattattttgaaaatatccataagatttagctgtttttgtatggttgatatgtaagaaatttggtttgttttaaccatttataggtaggaaattatcctaaaaaataagatgcaagattatgtttcggtttcttcctcccaatacatttttatgtccccatttgatgaatttttctaaattccatttgcacacttaaaagttctaaatcattgcatatgttgtattgaatagaatgtgaatttctcagcaagatattaggtcccctctaaatgtaatccaaattgatatcatttctatcgatttctgcaaattaaggtattctctggaaaaattagattatttggatgcttcatgaacaaaataatctgtatcttcatcatatctaagattcttctatgacttccaactggaatattcagaaaatgatcacattacaaatgatcactctagcttccatgccactttcctgaaatgttcttgccagtgagaaatcatcacttcttccttggaatttctaaatattttattgttcaaaggcgtaattctttactaagttgtaaactcattgagataaagaactatagtctgtatatctgtttgtctcagaaagtgttttacacatagttaggttccaatatacatgtaatcaaataaataaagaaaatatgatttacaaaaatactaaagaatggtatgttgcctaccaggtcaaaaagaaaaagaaatactaaaatactaaatattaatattaaaatactaaagaatagnatgttgcctaccagttcnaaaagaaagaatcagataattttatttgccatagataagcaatattgcttgctttattttgggtaacaagctataactggcttgagtcatgtaaaaacataatatatgcaagttttactacaaattaattgttaattctaaatttgggggcacattttaggtagggtaaaatgacgattttgttgttaacacattttcttccctaaactcttttttaaaaacctccattatgtttgatccagtctgttggttgaagcacaatctgtactgcttcaattacttaggatgaaattagccacatcattattaacaccagctagaaattttggaatgattattaatggtagcacatgaagcagaaagaggaccagctgaccctggtggagtaataaagttaattaatcaagcaggaggcagatttcatatttatgagtctacccagaggaggacaaattccagtatataagactttaatttaaagtaatctccagtcaatagcacactttcaacattggcagccatagccatctaaatgcaaacatcagtgggaaagaggaattttctagcagttaggttgtctgaatataaagtggcctgtcctataaggtagcgaaggcccctcataataagaatttgtgctgaagctaattgggaacctgtttagcatgtggtaaaagaaatccctgctttatttaggaggttgtgatacaagtttaacgtaagttcaaacattgagatttcataacaacatatttgtgagttctaattatgttccaatcacttttttaaaatcttttctggttaccaaaacatgtatagcctttgcagaagatactattatgccaattttacagatcaagaaagtaaagcataatgaagtatagtaacttaacagtacccacaggtagtaagcattggaatggggttattatggcattaggcccttttcatactaatgcttagaaccaaaattgagttccctttctacccattcagtactttcacttttctttttcaccttagtcattatttataattttctacatgactattttttattattacctccaattcgtcaccctcccttaattacttacattttgccttagcataatgtctttgaatataagcggattttcagaagactatttataaatctcagtgcatcaagttcacagagctgtgcagtgttttaatgcatatttctggattaatgtacacatggtagaccaagtataacactccaaagaggcaaaataatgcagttagtgtgatttacttaaatatgcagggtcctgatgaagagtaactatttgcacagaaagtagaagtcgcccttcaagagagactgaattgac

SEQ ID NO: 237446 - DNA, 1514 bp, Homo sapiens
  misc_feature (680)..(680): n is a, c, g, or t
  misc_feature (682)..(682): n is a, c, g, or t
  misc_feature (1079)..(1079): n is a, c, g, or t
  misc_feature (1120)..(1121): n is a, c, g, or t
  misc_feature (1128)..(1129): n is a, c, g, or t
  misc_feature (1152)..(1152): n is a, c, g, or t
  misc_feature (1174)..(1175): n is a, c, g, or t
  misc_feature (1179)..(1179): n is a, c, g, or t
  misc_feature (1181)..(1182): n is a, c, g, or t
  misc_feature (1184)..(1184): n is a, c, g, or t
  misc_feature (1202)..(1202): n is a, c, g, or t
  misc_feature (1208)..(1208): n is a, c, g, or t
  misc_feature (1218)..(1218): n is a, c, g, or t
  misc_feature (1221)..(1221): n is a, c, g, or t
  misc_feature (1226)..(1228): n is a, c, g, or t
  misc_feature (1230)..(1232): n is a, c, g, or t
  misc_feature (1234)..(1234): n is a, c, g, or t
  misc_feature (1237)..(1237): n is a, c, g, or t
  misc_feature (1259)..(1259): n is a, c, g, or t
  misc_feature (1266)..(1266): n is a, c, g, or t
  misc_feature (1271)..(1271): n is a, c, g, or t
  misc_feature (1279)..(1279): n is a, c, g, or t
  misc_feature (1282)..(1283): n is a, c, g, or t
  misc_feature (1286)..(1286): n is a, c, g, or t
  misc_feature (1290)..(1290): n is a, c, g, or t
  misc_feature (1311)..(1311): n is a, c, g, or t
  misc_feature (1343)..(1343): n is a, c, g, or t
  misc_feature (1372)..(1372): n is a, c, g, or t
  misc_feature (1378)..(1378): n is a, c, g, or t
  misc_feature (1383)..(1383): n is a, c, g, or t
  misc_feature (1392)..(1392): n is a, c, g, or t
  misc_feature (1404)..(1404): n is a, c, g, or t
  misc_feature (1407)..(1407): n is a, c, g, or t
  misc_feature (1411)..(1411): n is a, c, g, or t
  misc_feature (1422)..(1422): n is a, c, g, or t
  misc_feature (1430)..(1430): n is a, c, g, or t
  misc_feature (1432)..(1432): n is a, c, g, or t
  misc_feature (1440)..(1440): n is a, c, g, or t
  misc_feature (1451)..(1451): n is a, c, g, or t
  misc_feature (1462)..(1462): n is a, c, g, or t
  misc_feature (1469)..(1470): n is a, c, g, or t
  misc_feature (1487)..(1487): n is a, c, g, or t
  misc_feature (1493)..(1493): n is a, c, g, or t
  misc_feature (1501)..(1501): n is a, c, g, or t
catgctctctgctgatgtttaccttcacatcttctatctccccaggggtttctcacaggctttatgtcagtttcttggatgcatcaccttctccctctcaatttcgcagtatgtgggttgggagaaggttccagttgtccttgtccgttctccattttctcatagctgaaagtttttaatttatcttttatgtaattatatatattcatatcaccatccatcaagctggtttttaaaactgaaaattatttcatatttttaggaagctactcgattgcatgtatgtaaggccagctcattttaatctcatattaagttaatcaagtaaagacctttataaaaaagaagattttgggctgggcacggtggcttatgcctgtaatcccagtactttgggaggccgaggtgggtggatcacgaggtcaggagatcaagaccatcctggctaacatggtgaaaccctgtctctactaaaaatacaaaaaattagccaggtgtggtggcgggcacctgtagtcccagctacttgggaggctgaggcaggagaatggcgtgaacccaggaggcaaagcttgcagtgagccgagatcgcgccactgcactccagcctggggaacagagtgagactccgtctcaaaaaataaaaataaaaaaacaataataaagaagattttgggtcngncgcggtggctcacacctataatcctagcagtttgggaggccgaggtggtggatcacaaggtcaggagattgagaccatcctggctaacatggtgaaaccccgtctccactaaaaatacaaaaaattagccaggcgttgtggcgggtgcctatagtcccagctgctcgggtggctgaggcaagagaatgtcatgaacccgggaggcggagcttgcagtgagtcgagatcacgccactgcactccagactgggtgacagagcgagactccgtctcaaaaaaaaaaaaagaagattttgaattgtaaggcaacccacattgttaaacttcattttattttatttttatttgaagtttttatttgtaaaaatatagaaacagggtttcaatatgtcacccnggctgatcttgacctctgaggcaggagaatggcgtgaaccnnggaggcnnagcttgcagtgagccgagatcgngccactgcactccagcctgggnnacananngngactccgtctcaaaaaanaaaaanaaaaaaacantantaaannngnnntnggntgggcgcggtggctcacacctntaatccnagcantttgggangcnnagntggnggatcacaaggtcaggagatngagaccatcctggctaacatggtgaaaccccntctccactaaaaatacaaaaaattagccnggcgtngtggngggcgcctntagtcccagctnctngggnggctgaggcangagaatgncntgaacccnggaggcggagnttgcagtgagncgagatnncgccactgcactccagnctgggngacagagngagactccgtctc

SEQ ID NO: 237447 - DNA, 468 bp, Homo sapiens
ctttttgtcttttgtaacttgtaagagaacaagattgaaaaaggcaaagaacatcttagtataattttgaaaatagtttttaccttgcagactccctgaaaggttctcagtatcccctagggttcccagatcacaatttgagaatcattggtaatatggtttggttctgtgtccccacccaaatcttattttgaattgtaatccccacatgttggaggaggggcctggtgggagacgattggattacaggggcaggtttcccccttgcttttcttgtggtagggagtgagttctcacaagagccgacagttttaaagtgtggcacttcccccctcattcactgtctctctcctgccaccatgtgaagaaggtctttgtttccccttcaccttccgccatgattgtaagtcttttgaagcctccccagtcatgtggaactgtgagtcaaataaacctttttttttcata

SEQ ID NO: 237448 - DNA, 465 bp, Homo sapiens
aggagtgctactctgtgataggctgcactcatgtgatgattactgtattgtgcatttgctgattcttatgatgtacagactttccaaagctcagctgctttataatgtccaaattaataccaacagcatttctgggaagaggaagggaactactgtgacatatggaccaaatctgatgattcacataaaactcatcatcattattttacctcctttgtccccttctagtcctttaagaaataagaatcaatcattgtcacattgtctagttatttatgctgtacttacccaaaaaggtaagtttacatctcatgaattttgacttattgagaagaaatccaatctcagtcctggattgagactgttcttgttgttaattaatgaaaactgaattatagattgttttgtacaaaaagtgttattgaaagaaatgtcacactaaaaggtatatcaaaagccttgaaa

SEQ ID NO: 237449 - DNA, 524 bp, Homo sapiens
gggacacttctgcccttggggtctctcatctccttgtcttagcaacctctagcagaggtcctgaattttaaagacgttctctccccttcacctctcccctcctctgcaccctcttctaacatacactctaagcagatcctgggtctctgaattacctctccagtctcctccagccattcccaggcagtggttggggacctagagctggtcagccttaagtcaagagagcctcctacccagacccatgtggcatctgtcccttctccctaacaaatgtgaagtgcctggccaagggccagatgtgtaataggtgctcaatgacattataatcttataaaaatcttcctaagccagatctcaagtttagacagcagggttggggggtggagtggaagaggctgggagcctccctgtggctcctctgcatccatggaggattgaggagctatgtgtgcttggcaaagggcagggggaactgtaatgcttttgttcagagctggtcattaaaggtaactctggaaacc

SEQ ID NO: 237450 - DNA, 598 bp, Homo sapiens
gggacacttctgcccttggggtctctcatctccttgtcttagcaacctctagcagaggtcctgaattttaaagacgttctctccccttcacctctcccctcctctgcaccctcttctaacatacactctaagcagatcctgggtctctgaattacctctccagtctcctccagccattcccaggcagtggttggggacctagagctggtcagccttaagtcaagagagcctcctacccagacccatgtggcatctgtcccttctccctaacaaatgtgaagtgcctggccaagggccagatgtgtaataggtgctcaatgacattataatcttataaaaatcttcctaagccagatctcaaccctgtgctctctgaaacatgtgctgtgtccactcagggttaaatggattaagggcggtgcaagatgtgctttgttaaacagatgcttgaaggcagcatgctcgttaagagtcatcaccaatccctaatctcaagtaatcagggacacaacactgcggaagccagcagggtcctctgcctaggaaaaccagagacctttgttcactgtttatctgctgaccttccctccactagtgt

SEQ ID NO: 237451 - DNA, 652 bp, Homo sapiens
gtgtgttcattactacaactccacactgtgtgccatgtgctcatctctgtcactgcatcataagctcctggaggccgggagttgtatcttatgtatcctaggcttggcacaaagtggggactcagttgtagatatattttaattcactattaagtagcactcttgaggagtgttctctttgacttctaagaagaaattaagtactattgccattgcctggttgtattttcctaatgtgtacttattttatagtcattatttgtaagcaatgccagaccctatataagacaggcagcaagatctaattctttgctggtgtttcttttgcaatagtaaatctgcaagcctctgtagagtcacattgaagatctctgtcacaggctttcatgatcaatgccctgtgaacgtctctagacatctttctaaagtgtataagcatagtcatttttagaaaggatttgggatgattatatcttatattaccattgtctgcactcaagaagtattggactcaattatttattattaataacaatattacttctaaagccataatcattaagatctgtatgtgtctagcacctttattcacatgctcctccaaagaatggagaggtgcttttgccaggagttacttcatatagtatatact

SEQ ID NO: 237452 - DNA, 156 bp, Homo sapiens
cgcatgcaggtggtttatggagaagaatgtgaccaatgagtcgagtattcttgatggccagttggatggatcctctgaaagctgcaatccccattgtgtgtagcagctgcagctgagccaagaacagccaaggttgaggatggggcagggaatcca

SEQ ID NO: 237453 - DNA, 399 bp, Homo sapiens
gtgaggaagcgtgtgcggcggcctgagtccccaggcctcccctagagtgctcacgcgtgtgggagcgagtagacgtgaggaagcgtgtgtggtgacctgagtccctgggcctcccccgcagtgcgccaggatacattcagtatcaaaatgcccacagagaaaactacattcttcaacatttagataaacaaatcttttcttagtaaattttatttatttaaaattacaacagggtgggtgcagtggcttatgcctataatcttagcagtttgggggctgaagcaggacctcttgagcccaggaattccagaccagcctgggcaacatagcaagaccctatcaccacaaaaaaaatttttttaattaaaattgtacaatcacaacagtattattttttcc

SEQ ID NO: 237454 - DNA, 1795 bp, Homo sapiens
  misc_feature (1189)..(1189): n is a, c, g, or t
  misc_feature (1287)..(1287): n is a, c, g, or t
gaatgtgagtatagaagacgagtccaggcaccaggagcataatagcggtcagagaaccaagtccaggaccccaggcagattagctagagttcaggcagggtgtcagcgccagtggggaagaaagaaaccaaggagctggaataccgtctgtaagttgagacagaaggatagccatatggcctggaaaaagatgacaagtttgaggaaatagtttgcatgtcagagggaacactcgagggaccctggccagagggagggatatatccagacaccccatgtctgagtcaggataggctcaaaggttgcccagcactggacatcttcaaagatttttattactgtttattgcgtcaggtgaaatcaacaacagctaagaaaaaggagaaacacattacaatgtaactagtataaacagtggaaaatcactgtggtttgaagaaacaagtttaactaaagaaatctgaggtctgtgtctcctaaagagaggtgactgtggaacagtaacacagaatatcagatttcaatcttcatgtttctccttttgatgggcacacaatccaaattcgagattttaaggtcctgcacaatttcgtttcacccacgtgtccttccttattccccggcccctttcatgagacgtgctcccttcctcctccagtgccttaatgcagcttctccagcttccgcagctctttactccaatcccagccatctgggctcacttcagatcacaccttccctatggagatgacaaaatctgctctactgtaatgatgctggcaaagcttaattgttcttcacttatttcatggctgtttgttttatcttcccagctaaataaattgcagttcttttgaaagaaaggatcggctgggtatggtggctcatgcctgtaatcccagcactttgggaggccagagcaggcaagtaacttgagcccaggagtttgagaccagcctgggttgcatggtgaaaccccatctctacaaaaaatacaaaaattagccagacatggtggcgtgtacaagtagtttcagctacttggaggctgaggtgggaggatcacttgagcctgggaggcagaggctgcagtgagccgagatgtgcaactgcactccagcctgggtgacagagtgagatcctgtctcaaaaaaaaaaaaaaaaaaaaaaaagatcatgtcaaaagttnccttgtttcctttatatctttcacagtgctcagaaaagagctggtcaccaggtggctgctaggtaaacagaaatcgattgattgactcagcctgagtntatgtattcaaattcacatttcctgaattagcagacatggtcttgtttttaaaattgactttataagatctcgtgttttcttatatctgatggtgatgaaaatgaatagggctgggggagagagatgttcagccaagaaagtctaaaatagaaagggaatgttcagttataacaaaacaaatttttgtaattagagtgctgggttgtgctcagcatcattggagttaaatgtggagcagtggcttacacttgtaatcccagcactttgagaaactgaggtgggcggatcccttgaggtcaggagttcgaggccaccctgggcaacatggtgaaactccatctctacaaaaaatagaaaaattagccggctgtggtggcaggtgcctgtggtcccagctaaggaggctaaggtgggagaatctcttgaaccctggaggcagaggttgcagtgagctgagatcacgccactgcactccagcctgggcaacagagcgagagaccctttctc

SEQ ID NO: 237455 - DNA, 424 bp, Homo sapiens
ctggaccctccctgccatctggatgcctccactagagaatgtgctactagcaccaggaaagagctagaggctgaagaagctgagtagaagctctgctgacccaagaacatggccctccttttttgcctcttcagggtctaagtctatggatgctgactacccccccgcccatcccacccctaatatctgcaactgggaacttttcccatttgctgggaatgatggtggggctctttctgcctctgcctgccatagaaccagcaagtcttagacatcccttctttttatgcccttggtccatggggtctttgttaccagaaaggggtcccaatccagaccccaagagagagttcttgcatctcacacaagaaagaattcggggcaaatccgcagaataaagtaaaagcaagtttattagagaagt

SEQ ID NO: 237456 - DNA, 1532 bp, Homo sapiens
tattcttcaaaaatggagcaataaagactctcctagatattcagaagctgtgggagttcatcaccactacacctgccatccaagaaaggctaaagggagtccttcaagttgaaatgaaaagacactaaacagtaacacgaacagggaagtataaagcttgctgataaaggtaaatatatagacaaatacagaatactgtaacactgtaatagtagtatataaatcacttttaattctatagaatttaaataaaagtagagtatctataactataaaaatatgcaaatggatacacagtataacaagatctactttgtgacataaataatataaagtgggtgggggtagtgatagaatagtttttgtatgcacttgaagttaagttgttatcagcttaaaatattttgttataattgtaaaatgttttgtgttagccccatggtaaccacaaagaaaatacctttagaagatacaaaagaaaatgataaaggaatcaaagcatgtcactaaaaaaaaaaaaaataaatgaaaacagaaaggaaaactgcaagagaggataagacagaaaacaacaaaatggcaatggtaacttcctctctattcaaaattactttaaatgtaaatggattaaactgcctaagcaaaagacacagagtggctgaatgagttttaaaaataacatccaactatatgctgtctacaagagattcacttagatataaggggacacatcagctgaaagaagagggatggaaaaagatacttcatgcaaatggaaaccaaaatagagtaggagtagccatacttttatcacacaaaatatactttttgtcaaaaactgacacaagagacaaagaaggacattacgtaatgataagagggataattcaccaggaagatatagcaattgtaaattgttatataaatgtacccagcatcagagcacccaaatagatgaagcaaacagtgacagaactgaagggagaaatatgcagcaagacaataatagtaggagatttcataccccactttaaataatagaagagacagaagcttggtaaggaaacagaggacttgaacaacactacagaccaaatgtatctaacagacatacaaaacaccatacccaacagctgcagaatatacattgttctcatgcacacataggacattcttcaaaacagatcacaagttaggtcacaaaataagtcttaacaaatttaagaagattaaaatgggcatggtggcccacacctgtaatctcagcaatttgggaggctgaggcgggtggatcacttgaggccaggagttcaagaccagcctggccaacatggtgaaaccccatctctactaaaaatacaaaagcctagccaggagtggtggcgtacacctgtactcccagctactccagaggctgaggcaggagaattgctgaaacctggaaggtggaggttgcagtgagccaagatcacgccactgcactcctgcctgggtgacagagtgagactccatcacaaaaaaaaaaaaaaaaa

SEQ ID NO: 237457 - DNA, 248 bp, Homo sapiens
gaaatccacccaaatatatcacagttgaattcccttaagctaaaggcaactggtctctaacttaagaataagtgactatagaatcaggtgtctctctgcctagacctgtgcttttcctccttgaacactgcaagtgatgagtaaggattccctttaaatggacagcagtgctatgttcctagtatcttgagctggaacttctgaaccttctgaacccaatctattggttatttatttttttacagtca

SEQ ID NO: 237458 - DNA, 242 bp, Homo sapiens
gggtagcccaagaaaaatccaatattaactagtcatgttataggtcctaggtgcagatttgattttgaaatttctcacggccatatttatttgtgactttatattattactgttaagcattgagcccttaggtgaagcctaatttcttcaatggttaagaggccagggtcaacagggaactggtaaagaggcatcagggtaaggcagaggcagcttgtcttccattggtacatatccaattt

SEQ ID NO: 237459 - DNA, 2532 bp, Homo sapiens
  misc_feature (211)..(211): n is a, c, g, or t
  misc_feature (226)..(226): n is a, c, g, or t
  misc_feature (636)..(636): n is a, c, g, or t
  misc_feature (2280)..(2280): n is a, c, g, or t
tgttttataggctctgttcatttttttaattgtgttaaaatatacatgacataaaatttacaatcttaactatttttaaatgcacagtttagtagtgtcaactacattcacattgtgcaaacaatctccagtactcctgtaattctgcaaaagtgaaaccttatacccattaaacaactgcccattgccacctccccctccgcccagtccntggcaatcaccattntactttctgtctctatgaatttgactactctaggtacctcatataagaagaataattcagtgtttgtattttttgtgattggctttttttcccttggcatcatgtcctcaggatcacccatggtgtaccatgtgtcagaattttcttccttttgaaggttgaataatagtccattatactaaataccataggttgtttatctactcatccattgatagacatgtgtgttgcttcctccttttggctattgtgaataatgctggctattgtgaataatgctgctactaacatgggtgtccagatatttcttcaagatcctgctttcaattcttttgggtatatacccagaagtggaattgctggatcatatggtaattttatttttagttttttgaggaaccactgttttncatagcagttgcaccattttacttttctatcaataatgcacaagagttccagtttctccacatttttgccaacgcttgttattttccagttgtttgctttggttttttgctagtagccatcctaatgcatgtgaggtggtatcttgtggttttgattttcatttccctaattaatggtgtttagcattttttcaggtgtttgttagaccatttgtatatcttccttggagaaatatctactcaagacctttgcccatattttaattggttgtttgttgttgttgcattgcagttctttatgtattctggatattaaaccctgtctgaaatgatttgcaaatattttctcaagttctataggttgccttctcactctgttgattgtatcctttgatgcacaggagttttaaagtttgatgtagtccagtttatctattttggctttgttgcctgtgcttttggtttcatattgaataaatcattgccaaatccaatgtcttgaatattttcccctgttttattctgagagttttatagctttagctattgcatttaggtctttaattcattttaagttaatttttgtatgatgtgtaagggtccaactttattcttttgcatatggatatccaatcttcccagcactatttgttgaaaagactgtttccccactggatggtctcagcatccttgttaaaaagcatttgactatgtgtggggtagtttgtttctgagctctctattctattcctttggtctgtaggtctgtctttacaccagtaccatactgttctgattaccgtatttttggaataagttttgaatttaggaagtatgagacctccaaatttgttctgtttcaagattgttctcattatttgggagtgcttcagattccctcaattatatttcaaaactttttgcttagaagtcatgcctatatgtcaacctacagaatgggagaaaatttttgcaatctactcatctgacaaaggctaatatccagaatctacaaagaactcaaacaaatttacaagaaaaaaacaaaaaaccccatcaacaagtgggcgaaggatatgaacagacacttctcaaaagaagacatttatgcagccaacagacacatgaaaaaatgctcatcatcactggccatcagagaaatgcaaatcaaaaccacaatgagataccatctcacaccagttagaatggcgatcattcaaaagtcaggaaacaacaggtgctggagaggatgtggagaaataggaacacttttacactgttggtgggattgtaaactagttcaaccattgtggaagacagtgtggcaattcctcaaggatctagaaatagaaataccatttgacccagccatcccattactgggtatatacccaaaggattataaatcatgctgctataaagacacatgcacacatatgtttattgcagcactattcacaatagcaaagacttggaaccaacccaaatgtccatcaatgatagactggattaagaaaatgtggcacatatggaccatggaatactatgcaaccataaaaaaggatgagttcatgtcctttgtagggacatggatgaagctggaaaccatcattctgagcaaactatcgcaaggacaaaaaaccnaacaccgcatgttgtcactcataggtgggaattgaacaatgagaacacatggacacaggaaggggaacatcacacaccagggcctgtcatggggtggagggatgggggagggatagcattaggagatatacgtaatgtaaatgacgagttaattggtgcaacacaacaacatggcacatgtatacataacaaacctgcacattgtgcacatgtaccctagaacttaaagtataataaaataaataaataaag

SEQ ID NO: 237460 - DNA, 292 bp, Homo sapiens
acagccattttcacccaaaggacttccattctgcctctgaaatcctccctcccttcaatcctccttgaagccctcggagatgacctacaccaccctggctctgggtgccggctgggcgcacacatctgaaggctctatggcatctctcatattctaggcggagacatccaagccagtgtattgaaggcagagagaggcacgctggcacgtggctgaatccataccctggaatattttggcttcaagtgccctagattttctaaatgtaaaatattaatctgattatttaaaa

SEQ ID NO: 237461 - DNA, 2259 bp, Homo sapiens
  misc_feature (363)..(363): n is a, c, g, or t
  misc_feature (1437)..(1437): n is a, c, g, or t
  misc_feature (1613)..(1613): n is a, c, g, or t
  misc_feature (1739)..(1739): n is a, c, g, or t
  misc_feature (1768)..(1768): n is a, c, g, or t
  misc_feature (2089)..(2089): n is a, c, g, or t
  misc_feature (2207)..(2207): n is a, c, g, or t
tgtatatctatgtatcaggcaatgtactaggcactgcgtttgttaccaagataaataaaaatttatattaagatgttcaaaatttcctaggaaacacagacataggatagctataataagagaagtataaacacagccacaggagaatgggggtggggggaccgaagtcatttgcctaaggtacaaaactagcaattggaagatctgggacttgagatctgggtcttctgaatctagagtaagtcctctgtcttggcacagcaatataaccctcttagcttttccagagaaataaaaacaaaactgaaaaatattcactcaaaaacacatgcataaattgccaagtgggccaagtataaaaanactgtggaagcggtgatcaagaccaggatatgaaaagagaagataagacctggcagacaggaagacaaagaggcctcttccaacccaccctcgggctgttcttgggtttggatagttatgttaagatccacgcccccatagcaatctgactttgagttggaggcacaggaaacatgaatctcttgcggttaggctaagtcccttcaaatgcagcccaggtttcacctcccgttgaggccgggtgtgaggaattctccatttaggaagacgggtcttaggcgagtgggaggaactgcctaacaacagttgaagtaaatatgagggaagacacagcaaatggccagcttctctagcattcaaattcctccggtcagcaatttcttgcctcccttcctcccccaaatctgggtggaaatatgaagccacagttcactcccccgtcactcattctgatgacaaaaaagaagttgattccagcctatcatttcacagctgtttgcttccacttcccagcagacatgctctttgccgagggacttggttaaatggctctgagagaggcaccttcaggcagctcgggctcctggtggaggagggaagcctggggactgcagcccagggacgaggccactccctttgtcctttcgggcagggagggagtaatgggacccgtgccagtgatataaagtactcattttccactaaggccagggctttgtcctgggaagaaggagcaagaggtaaacacgaaacctgatttgcctgtgccatgtggaactacagaaccttgatgttgtccgggccactcctcccttcctttccactccttagcaggagaggctgagctaaaaaaaacccctgcttattcccatcctgtcccggtgcccctgtctacagccacagttgattggaccagcgtggacacctgacccaggctgggccaatcacatcctctctcctgcaaacgtggaaatggcgcctccaagaccctgagccgtgccaaactggagattcttcaccttcgctctatgttgaaattgcccaggaattctgaaaacactgtctatgaaaagngtcaaactctaaaatatttagagatttattatgagccaaatatgagtgaccatggcccgtgacacagccctcaggaggtcctgagaacctgtgcccaaggtggtcctggcacagcttggttttatacattttagagaaccatgagacatcaatcaaatacatttaaatacattggntcggtccagaaaggcgggacaactcaaaggtggggagagggatggaggggaaggggggacttccaggctacaggtgaatttaaacattttccggttgacaattggttgagtttgtctaaagaaagncctgggattcatagaaagggaatgttcangttaagatacagattgtggagaccaaaattctttcaaagtcttatagtggctgcccttagagacgatagatgacaaacgtttcctattcagatcttagttaatctctttaggtcaggaagaaaaagacctagctatgttaataaagtttctttacagatgcaaattttcccccacaaagaacagctttgcagggccatttcaaaatatggcaaagaaacacgttttggggtaaaatattttgattttctactttgtctcttaatgttatgccagaatcaggttggaaagtaagccagagtcaggttggaaagtaagtcacnatatatagggttaaataaaactcatcgatgagaatttataatttgtagggcatgactccccagactccttagataggaatttgggcaagataaaaaaaaaaattagaatttagtcctnaacacaccacacacacacacacacgtgcgcacgtgcagtggccaggcatggt

SEQ ID NO: 237462 - DNA, 638 bp, Homo sapiens
  misc_feature (582)..(582): n is a, c, g, or t
cagtggaaatgtactctctcacagttctggaggccagaagccccaaaccaagctgtcagcaggcccttgctccatctgagactcgggatggaatccttccttgtctctttctagcttccagtggtgggcggcaagccttggcattccttggtttgcagacacatcactgtaatcgctgcctctgtcatcacatggtgttctccctgtgtgtctctgtctgtgtctcttcctctcttcttataaggacaccaatcatattggattcagggtccaccctccttcagtatggtctcatcttaactaattatgtctgcaacggccctatttccaaataaggtcacattctgaggtacatgtcttttggggggatataattcaacccataagatggttttgttgccctgttttacagatgaaaaaactaaagttcagggaacaattgcctgaggcccaacaactagtaaagtgactgtacatggtgcttctcattctcattaccactactcaggaggctgaggcaggagaattgcttgaacccaggagacggaggttgcagtgagcccacacggtgccactgtactncagcctgcgtgacagagtcagacttccgtttaaaaaaacctatctttaattaaaaa

SEQ ID NO: 237463 - DNA, 353 bp, Homo sapiens
gaaatgtatcaagtacttccatcttaattcacgtattgttggtagctttaagatatacagagaggcattttagcataataattatacttacggattctggaggcagtgtgctgaaatttaaatcatgatcaacttatttaaactctctgtcctatttttctctaatagaggagtgtcaataaatgagaaaaactaagaataatagataaaaaagacaaagtatagtgcctgggtcatattaataatgcaatatatattaactatttttattataatggtttcccaaagtctttgtttttgtaggcacccctttctcctgtattacaaatcttttgtagaatctcttatctcag

SEQ ID NO: 237464 - DNA, 344 bp, Homo sapiens
ccgaagtctgtcctcccaccagctctgtgatttcgggtcatggtgtctgtgcatcagaagctccaatgtcctgactagtatcttgtgtgtgtgtgtagagagaggggtggcagacaacctgcagctgggtttgcatcctcaggaggtaaaagccctgtcctagcccctctccttgctactgagacagtgggggcttcccgccctagccaggctacccactaatctccctcctcaatttctattaaatgcttccctggctctccctgggtttcagtttctatccatgccctgtgagcaaaaagtcatgtggattccactcctgaggtgcctctcaggcccattta

SEQ ID NO: 237465 - DNA, 401 bp, Homo sapiens
gtgcgatcctgttggctctggactcctctctaaagctatgcttccttccaatctcagctctaccctccctgcgaggtttgtgagtagatagcccaaatcctttgcccccacctccaccccttcctcccctcattctcttccatcctcctggttctgcttcttgtttcctgattaaccttgggcctgtgacttactgatgtctggtttatttattcattcattcactggggaaatatgtttaagatcttggtcacaaccagtctcactgattcttctcctctctttattcatactgttttccccaaacctttttttcttgaatatacttcttagcttacatctcagcactcacccatcttgttcaagccacctccgtcttctacaagatagtttcctttatg

SEQ ID NO: 237466 - DNA, 891 bp, Homo sapiens
agcggttgccgggcaacgcggcccgggccatggaggcgtcgtacgagtccgagtccgagtccgagtctgaggccgggcctgggactcagcggcccgggaccgggaccgtgagcgcggccgtgcgcgagcacttgcggaagctgtgtctgcgcgagttcccgtgcggtgccggcagctggaataagtcgcgctttcttcctcaaacttggcgaacttggagggagcttgtccccagagaggaggatgtggtgagccccggagaggagacggtggaggccctgctgggcctggtccgcagccgccactccccctgggctctgctgaacaactcgaatgcagaagacagtttcctgagagaattggccatccggaacccgctgacgatcacagacaccttcttctactcctacttccggtccctgcgggtaatagacaagaaggtcaccctggtggataaagacctcctgaaatttctaaagctggaggagttggtactgagcgccaatcgaatcaaggaggtggatgccaccaatctgccccccacactcaaggtgctggagctctacggcaatgagatcagcagcatggagtgtctgtgtgcccacccacccgccggcctgcagcacttggggttaggccacaacaaacttctaggccccttggaaagtctctacgtcaccgctaatcactggcccaacctcgtctccctggacctgggcttcaacgacctgacagacctgcagagcatggtcaccagcctgaggaccctccggcacctgcgactcctggtgctgcagggaaacccactggccttggtgccctactaccgcggcctcaccatcgacagcctggcccagctctgcgtgctggacgacatcaccgtgtctccca

SEQ ID NO: 237467 - DNA, 729 bp, Homo sapiens
agcggttgccgggcaacgcggcccgggccatggaggcgtcgtacgagtccgagtccgagtccgagtctgaggccgggcctgggactcagcggcccgggaccgggaccgtgagcgcggccgtgcgcgagcacttgcggaagctgtgtctgcgcgagttcccgtgcggtgccggcagctggaataagtcgcgctttcttcctcaaacttggcgaacttggagggagcttgtccccagagaggaggatgtggtgagccccggagaggagacggtggaggccctgctgggcctggtccgcagccgccactccccctgggctctgctgaacaactcgaatgcagaagacagtttcctgagagaattggccatccggaacccgctgacgatcacagacaccttcttctactcctacttccggtccctgcgggtaatagacaagaaggtcaccctggtggataaagacctcctgaaatttctaaagctggaggagttggtactgagcgccaatcgaatcaaggaggtggatgccaccaatctgccccccacactcaaggtgctggagctctacggcaatgagatcagcagcatggagtgtctgtgtgcccacccacccgccggcctgcagcacttggggttaggccacaacaaacttctaggccccttggaaagtctctacgtcaccgctaatcactggctgcttgccccctgctcacctggcttcttgaccccca

SEQ ID NO: 237468 - DNA, 305 bp, Homo sapiens
ccttcctggacctgtcagagccttggaggaggtggggccccagagacaccccttctctagtacctcccctctccagtaagcatctcgttttgtggttctttctctcaggattcaaagaagattaagaaagttgccaaaaaagaaaagccgaaagccgtgattccgatctacgaaggcgattaccaccctgagcccctgaccgtagaggtgcagatccagctgaaccagtgccgctcggcggaggaggctctgcgcatgttcgccgtgtagggcgtgggcagtaaaggctgttcccagcaaaaacg

SEQ ID NO: 237469 - DNA, 1811 bp, Homo sapiens
agcggttgccgggcaacgcggcccgggccatggaggcgtcgtacgagtccgagtccgagtccgagtctgaggccgggcctgggactcagcggcccgggaccgggaccgtgagcgcggccgtgcgcgagcacttgcggaagctgtgtctgcgcgagttcccgtgcggtgccggcagctggaataagtcgcgctttcttcctcaaacttggcgaacttggagggagcttgtccccagagaggaggatgtggtgagccccggagaggagacggtggaggccctgctgggcctggtccgcagccgccactccccctgggctctgctgaacaactcgaatgcagaagacagtttcctgagagaattggccatccggaacccgctgacgatcacagacaccttcttctactcctacttccggtccctgcgggtaatagacaagaagattctctcctggcctgtggtgctacctgctgttgacagtcccctgtctgccaagaaaggaaagggggagaaagacaagaaagggaaggagaaagacaggacggggaaaggagagaaagagccggccaaggagtggaaggtgctgaagaagaagaaagagccgcccaaggagctccggcaggacccccccatcctccaggtgctgggccggggcctggtgatcctggagcccctgctcgccggggagcccctggtgtccaccgtgtgcaacttcggcgtggtccgcacattgacatctgacaggctgacgttggccagggattcaaagaagattaagaaagttgccaaaaaagccaggtgcggtggtgggtgcctgtaatcccagctactcaggagactgaggcaggagagtcgcttgaacctggaaggcagaggtggcagtgagctgagatcgcgccatttcacgccagcctgaagaagtaaacgttggagggcatatgctgctggacttcaaaacccatgcctatatgaacatgtgatttgtgatacttatctgtgggttaagatggccttaaaaaggtttttttttttttaatctctttaatgtttggcttaattgaagacagctggattcttacagctacttctgcagtcaactgcttgcaatatgttgctgtaattgacgtgcacaaagaaaatccaacctcaggcccataattggaaaagagggagtattttaatagaccttaaaataatataatttctttaatattacaccaaatttgacaagtggtaatttcttaaaggttgttacaatgtgaaaacaatctatattgaatttttcataatcagattaaaattcattaatctagtttgcattttgaacggatattttaccatgcagtttgtaacatgcatgagttacttgtaaactacaggttaacagacttatgcagatattccaacagttgacacctgtcactatacattttccaaagatcacgttctttactatcaccacccacatcattagaaaggtctttgcgtattggaaaattggtaaattcatggtggcagatacaatgttgtctcatttttagggcaaatgttatacatttattgaaatgctttcagttgtttcccctgaagtgctataattacttcatttttaagaaaatatctgcagctgggctcggtagtgtacgcctgtgatcctagcacgttgggaggcctaggcaggcggatcacttgaggtcaggagttcgagaccaggctggccaacatggtgaaaccccgtctctactaaaactacaaaaaatagccggtcgtggtgacaggcgcctgtaatcccagctacttggaggctgacgca

SEQ ID NO: 237470 - DNA, 955 bp, Homo sapiens
agcggttgccgggcaacgcggcccgggccatggaggcgtcgtacgagtccgagtccgagtccgagtctgaggccgggcctgggactcagcggcccgggaccgggaccgtgagcgcggccgtgcgcgagcacttgcggaagctgtgtctgcgcgagttcccgtgcggtgccggcagctggaataagtcgcgctttcttcctcaaacttggcgaacttggagggagcttgtccccagagaggaggatgtggtgagccccggagaggagacggtggaggccctgctgggcctggtccgcagccgccactccccctgggctctgctgaacaactcgaatgcagaagacagtttcctgagagaattggccatccggaacccgctgacgatcacagacaccttcttctactcctacttccggtccctgcgggtaatagacaagaagattctctcctggcctgtggtgctacctgctgttgacagtcccctgtctgccaagaaaggaaagggggagaaagacaagaaagggaaggagaaagacaggacggggaaaggagagaaagagccggccaaggagtggaaggtgctgaagaagaagaaagagccgcccaaggagctccggcaggacccccccatcctccaggtgctgggccggggcctggtgatcctggagcccctgctcgccggggagcccctggtgtccaccgtgtgcaacttcggcgtggtccgcacattgacatctgacaggctgacgttggccagggattcaaagaagattaagaaagttgccaaaaaagaaaagccgaaagccgtgattccgatctacgaaggcgattaccaccctgagcccctgaccgtagaggtgcagatccagctgaaccagtgccgctcggcggaggaggctctgcgcatgttcgccgtgtagggcgtgggcagtaaaggctgttcccagcaaaaacg

SEQ ID NO: 237471 - DNA, 1279 bp, Homo sapiens
agcggttgccgggcaacgcggcccgggccatggaggcgtcgtacgagtccgagtccgagtccgagtctgaggccgggcctgggactcagcggcccgggaccgggaccgtgagcgcggccgtgcgcgagcacttgcggaagctgtgtctgcgcgagttcccgtgcggtgccggcagctggaataagtcgcgctttcttcctcaaacttggcgaacttggagggagcttgtccccagagaggaggatgtggtgagccccggagaggagacggtggaggccctgctgggcctggtccgcagccgccactccccctgggctctgctgaacaactcgaatgcagaagacagtttcctgagagaattggccatttcacgccagcctgaagaagtaaacgttggagggcatatgctgctggacttcaaaacccatgcctatatgaacatgtgatttgtgatacttatctgtgggttaagatggccttaaaaaggtttttttttttttaatctctttaatgtttggcttaattgaagacagctggattcttacagctacttctgcagtcaactgcttgcaatatgttgctgtaattgacgtgcacaaagaaaatccaacctcaggcccataattggaaaagagggagtattttaatagaccttaaaataatataatttctttaatattacaccaaatttgacaagtggtaatttcttaaaggttgttacaatgtgaaaacaatctatattgaatttttcataatcagattaaaattcattaatctagtttgcattttgaacggatattttaccatgcagtttgtaacatgcatgagttacttgtaaactacaggttaacagacttatgcagatattccaacagttgacacctgtcactatacattttccaaagatcacgttctttactatcaccacccacatcattagaaaggtctttgcgtattggaaaattggtaaattcatggtggcagatacaatgttgtctcatttttagggcaaatgttatacatttattgaaatgctttcagttgtttcccctgaagtgctataattacttcatttttaagaaaatatctgcagctgggctcggtagtgtacgcctgtgatcctagcacgttgggaggcctaggcaggcggatcacttgaggtcaggagttcgagaccaggctggccaacatggtgaaaccccgtctctactaaaactacaaaaaatagccggtcgtggtgacaggcgcctgtaatcccagctacttggaggctgacgca

SEQ ID NO: 237472 - DNA, 757 bp, Homo sapiens
ccatgaggtcgccactagccactgcagctgtcgagcacgcaagataataagtcgcgctttcttcctcaaacttggcgaacttggagggagcttgtccccagagaggaggatgtggtgagccccggagaggagacggtggaggccctgctgggcctggtccgcagccgccactccccctgggctctgctgaacaactcgaatgcagaagacagtttcctgagagaattggccatccggaacccgctgacgatcacagacaccttcttctactcctacttccggtccctgcgggtaatagacaagaaggtcaccctggtggataaagacctcctgaaatttctaaagctggaggagttggtactgagcgccaatcgaatcaaggaggtggatgccaccaatctgccccccacactcaaggtgctggagctctacggcaatgagatcagcagcatggagtgtctgtgtgcccacccacccgccggcctgcagcacttggggttaggccacaacaaacttctaggccccttggaaagtctctacgtcaccgctaatcactggcccaacctcgtctccctggacctgggcttcaacgacctgacagacctgcagagcatggtcaccagcctgaggaccctccggcacctgcgactcctggtgctgcagggaaacccactggccttggtgccctactaccgcggcctcaccatcgacagcctggcccagctctgcgtgctggacgacatcaccgtgtctccca

SEQ ID NO: 237473 - DNA, 237 bp, Homo sapiens
gttcctccaatcttgggggcagtggttttccctgtatcctcacctctcttacagatctgagaagagttgttgaattttcagtctgttaaactttttactcattgttaaaatggattggccatttccaaactctttacatatgaaaccagaaaacagaagtctccctttgaggttttatatctatatatcatttaatcctcataggctcccaagtagaaatatttagattaattttca

SEQ ID NO: 237474 - DNA, 411 bp, Homo sapiens
tcacagactgcacacctctgtgtggtctggctcctacagcctctgtgagctcatgtcctatcactgaacttctgctggtctgcaatccagccatattgacttccttatggtttgtaaaatgtgccagcaggctcatggctcagagcactggcacttgctgttccctctgcctagaacgctcttatttccatgtggctcactaactgctttaagcattgagtatctgtttacagggtcgtgctaacagaaaatgttcattagttcattaggcatgatcatggtgtagtattttacctatgtaaagtaacacctctgtttcctctttccccgctttttcttcttagcactgtaaccatctgatatgttttgacatcttttttttgacccctttagaatgtgaacacaaattta

SEQ ID NO: 237475 - DNA, 247 bp, Homo sapiens
cagtatgggctgtagttggcatattggttttcagtcagatgaatgatgcggaacatgacaaatctacatctgtaagaggagaaatgcatcaaagatagacgtttagggcagaggatggctggcccagtggggccatgtcgagattatgcctgtaatcccaacactttgggagactgaggtgggaggatcgcttgaggccaggagttcaaaaccagcctgggcaacatggtaaaaccccatctctaca

SEQ ID NO: 237476 - DNA, 516 bp, Homo sapiens
cgggtggaggaagggaggattgctgcaccaacctttcctcggcgcctgtttactggcaccgtcgcatccattccacgccgatcctccgcagtccccctatcctgccagccgctcctccttggggcaggggcggcgcgagccacaggggcgtgcccgcgagcgggtcggggctgcggagagaacgggccggggtaaaaacccgacggctgcccgcgggtgggcggggcgcgcagagccggtgggaggccgcggtggcagcagtcgcccccgcgcatcgagggacccagggactcgcgcagatggcacgcggccacctcggtcctgccggggagccccatttccaaccgaggcaactgaggttcccaaagcgccagctacccgccggggtctggagagcgccggggcccggccgccccgcccagccagagtgccccgccccaagcctggcgcacctggccccgccccgccgggaccccgcccccgccctaatcagagctggttccgcgccgcggccgc

SEQ ID NO: 237477 - DNA, 2291 bp, Homo sapiens
  misc_feature (1551)..(1551): n is a, c, g, or t
gaaagtgtccttgcaaactttgttccgagtgtaatttcctagggatcctatggcctcttgagaacagcattttagggacatggatcactgctctctatagaggtagctcaactcaagagcattttacatgtaggctccagacagcaaacatgtcaacacactgacctctctgctccaggtgactgtttgctacactggggattgcacaagtcagagacttcaatgcaactggctttgtgatgggtggcaggtgtgatgtgggtcagaggtgagaggacagacagaatggctgcatggaaaagcgagcatttgctattctacagaattccataatgcactggttaatgacactaaaaggagaaataatttcacaaaatgtatccctggtcctgacaccacgtggggcgtgttttaacaaagtgagttaattggggttgcaaatagatcaagagcataaaacatctctgactcaaatgtatttttagttaataagaaagaagaggggcccagcacgggggttcatgcctgtaatcccagcactttgggaggcccaggctggtggatcatctgatttcaggagttcaagaccagcctggccaacatggtgaaaccccgtctctactaaaaatacaaaaaaaaaaattagccgggcatggtggcgggtgcctgtaatcccagctacttgggaggctgaggcaggagaatcgcttgaacctgggaggccaaggttgcagtgagctgagatcgctccattgtactccagcctgggcgacaagagcgaaactccatctgggaaaaaaaaaaaaaaaaaaaccaagaaagaagaaaacttccttttgattatgcaattttagttcccattacatgttcttggctgctgattagaaatttaaattctagaattaaaaaattctagaagtaggagtttccagagctgattaatttaacagctcaagagtatctggggaagcttctctgtaagtctcttagcctttccctcatgactgcaagatggctgccacagctctgcctatcacatccgcacatgcaacatccaaaggcaggaaggaagcacactcacatatcttcctctcatcagagaaaacaatctttcccagcagccctctgtcaggcttccccttgtgtttcattggcttagaaatgggtctcatactcctcccaaaaatcaacactcagaggagactggtgttagcatgatcgcttgagaatagggtcagcaaagttcttctgaagaggaccagccagtaaatatttcaggctttgcagggcatggggtccatgtcacatctagtcagctctgctcttgtagagccaaagcagctagagacactggaaacaaatacatatgcctgtgttccaatgtcactgtggacactgaaatttgaatttcatatattttttacctcttacaaagcattttttttggttctttttccagcgaattaaaagtgtaaaaagcattttgtatggtatgaggccatacaaacacaggtggtaggccagatttggttagcaggctgtagtttgtcnatccctggtttagagcaatgaggactcatccccttggggctgtgggaagggaccaccttccctgaaacatcaccactcacacctgaaaaaaagaagggtgagggaagtgttgttaggcaactgagaatgtctcctacagcatattaaggttatggaaaaacgctgagggttatgataatttttaaaaagcaaattacatgtcaatatgggcaggatgatcccaaccaattctgcttgttgaaatccctgccattcactgaaatctatgttagacgcagccacccgagagcacctgtttctgattcctggttctcagaagccaaattggagcatcccttcctatccatgacaaacttccctttagcacctatcctgtgctggatgctgtcaacccaaactaactgctggaaatgcagaagtgaaagagccaatggctagcctcaaagaaatcactgtcgccgggcgcggtggctcacgcctctaatccccagcactttgggaggccaaggcaggtggatcacaaggtcaggagatcgagaccatcctggctaacacagtgaaaccccgtctctactaaaagtgcaaaaaaaattagccaggtgtggtggcgggtgcctgtagtcccagctacttgggaggctgaggcaggagaatggcgtgcacccaggaggcagagcttacagtgagctgagatcgcgccactgcactccagcctgggtgacagagtgagactcaatctc

SEQ ID NO: 237478 - DNA, 443 bp, Homo sapiens
tttcagcattggacagatctttcagacagaaagtcaacaaagaaacattggatttaatctgcactgtagaccaaatgggtctaatagatatttacggaacatttcgtccagtggctgcaggatacacattctttttcccagcacatggatccttctcaaggatagaccatatgttaggtcacaagacaagtcttaaaacattcaaaaaattgaaataatatccagcatcttctctgaccacaatggaataaagctagaagttaataacgagggatttttgaatacatggaaattaaacaatatgttcctgaatgacaaatgggttaatgaagaaattaagatggaaattaaaaaattttttgaaacaaatgataatggaaaaccaaaacttatggtatacagcaaaaacagtactgagaggataagtttacaactgtaaatgc

SEQ ID NO: 237479 - DNA, 482 bp, Homo sapiens
gacgcatgggtccaaaccctggtcccagttctcagtgactgtgtggccttgagcaaatgactccaccactcaaaacttcttctcatcatatataaaattgggaataagagtcgcctctaagggttgcaggaaggattccagataacatgggtaactagtgcatagcaactacagtgaattgtggttacatggaggtactttaaacaagtactcatggcactggtgcgtgcatgcacacaaacgcacacacgcacacactgccctaataaagcctcccaggaacagatgatgggcagacacattaagaagatgagatcccaccagatcaaatgattttatgaggcatgaatcccgaggggaacaatcttgggggacctactaatatgggaattggcaaatcctccctggggagcaaactttattttttttaatgtccacgcattatgacatgcacagtcatttcccccctgaagtgagtcaca

SEQ ID NO: 237480 - DNA, 424 bp, Homo sapiens
tggctgcagccttgcagggtgttggcgctccctgtgtcctctgtctgtctctgcggctctgctcccggcctttgctggccttttgccctcccgccgctgcctcactgtgaagacacatccccgaaagcccagagcttgtcctcactgtgaagacgcgtccctggatgcccagagcttggatgggcttctaccactccacggccgcctcagcccatggttattttccactcgccttttcgtttgaaagcacttatgtgcaaattgccacgtgcacaacagtcccttcgtggggagctctcagtgagctccagctgagccctctggcgtccctgggaaccccatctgtcatcctctgcactgtggggagggatgcctcctcccgctgttgcctggagaggctgctcctcttagtgcccaaccccac

SEQ ID NO: 237481 - DNA, 485 bp, Homo sapiens
tgacctttgaaagaaccagactagtaaatggtcccaaattctggatttgtttgttatctcaaggtgttaacttgtttttctagacttgatgtcctgttcaaataaaggacaggtttgattcagatagaatcaatcattgtcctgaccggaagcagatggcatactcaaagggtctaactgaaggatgtgaaatgaagggactatttacagatgtgtgggcaggcatagggaacaagcgatggtgaggcactgtgggactgctggccctaggtctacaacagcctgagctgagtgcagttactgaagcattgcaggagctggagctttgggagaggggtccccaccaggagccatggatgtagcagcaacacaggcaccaccaaaactgcacctgggcagggagtggggtggtggggaacaaataccacaacatctctctcctctaccttcaaaacggctgttggaacccctgcgttggccaaatc

SEQ ID NO: 237482 - DNA, 528 bp, Homo sapiens
gcaaagaagacaaacagtactaattttgatgtctatgttcagatatagtcacacaatttatagttacatatcagggaatagatataggaaaggtgttcatcattattaaaccgctgaaattccttgttttatataggctctgccagtgaattatatagaaaaaacactagtgaatcccctggttccatagaaggaggaaaatgccagtcactttgctcctgttatcagaatatgcagggtaggagaacgccggcaagcaatgtggactggggaatagaaaattaaaccaaagtcataaagctatatgttacaggatcttcacagtatgcttggattgtttatccttacacataaagaatagagtgtgctatggatgtcttttaaaaataagtatgttcagataatcagaatctgatttaaaggaatacacacacatatataagtatatattatacatataaagcattgtactagttattgccttctagcggtaataaacaaagatgctcaaaataatacgcaagctac

SEQ ID NO: 237483 - DNA, 415 bp, Homo sapiens
agtgcaggtagagcgactttaaacatttgtgaactggcccttgtgcacctttccatcctcatctctaagggtctgtccatctttggctctgtaatttcataaattttcatttcccgaataagcccagtttcctgcagcttaggacttctactagtgagcttccctctgtctataatgccctaccacgcccctcatacatccctatggcctggctgattctagacttttttcaactctccgctctgactttcctgacaatgccaccactactccaactaaatcaatgactccatatctttttattgtaccattatttgtattcatagtgcttaatgtatttgtatatgtacaaatacatttgtattgttatatatgtgttatccataatatatttataataaatttaattaatata

SEQ ID NO: 237484 - DNA, 493 bp, Homo sapiens
cggctggaatccagctcaagagtccgcgcggagaaagacaaagactgggaggcaggcctcgccatttaagcgattgccttctgggaacaagcgagctgggtgcccagcggcatattcccggcactgggctcgccttgagcttggccacagcagctcccgctatgacatgccctgtgccgcgcacttcctctccaggggtataaagcaggcgatggcgctgcttgtacctagtaaagcctccactttgctcgccgcgagcttggcgcgaccagcttgtcgctgcgcccagctacccggccggtggcagagttatgtgtctcgcgcggagagggaactgggcgcggtgaggcagttctgcggctcaggagagatccgaggcccgggaccaggcaaagaaggtgagggaggcaaaggcgcttccctacactcttttgttgttaatagtttgcattggttcagcgtgtggctggatcaccggctagcacgcggccgc

SEQ ID NO: 237485 - DNA, 768 bp, Homo sapiens
aataatcaaaccagccataaactatggagcaaagaactttgtttccaagagatttaaaaaaaaaaaagaaaaagacaaagctacctgtaagccctgagctgattgtattggcttttaaagactttttaaagcctctccttaaagcaaatcacactgtattagtctgttttcacactcatgataaagacatacccaagactgggcaatttacaaaagcaagaggtttatggacttacagttccacgtgaccggggaggcctaacaatcatggcagaaggaaaggaggagcaaggcagatcttacatggatggcagcagacaaagagagcttgtgcagagcaactcctgtttttaaaaccatgagctctcatgacacccactcactatcatgagaacagcatgggaagacccatccccattattcaatcatctcccacctggtccctcccataacacatgggaattatgggaactacaagatgagatttgggtggggacacagagccaaactgtgtcattctgtccctggcccctctcaaatctcatatcttcacatttcaacaccaactatgccttcccaacagccctccaaagtctccactcatttcagtattaattcaaaagtccacattccaaagtctcatccaagacaagcaattcccttctacctatgagcctgtaaaatcaaaagcaagttagttacttcctagataccaagagggtacagacattgggtaaatacaccaattccaaatgggagaaattggcc

SEQ ID NO: 237486 - DNA, 337 bp, Homo sapiens
ctagagtctcttagtggtacaagtttaaactagaggcctgcagaggcttcctcactgtcccctcaccctataccccccacccccaacttttacagtagggacatgagagggacaatttcatattcccatttaagatgtgaatggagggttggagaaaggagcctcagtgggtatatgcttgtgtcatcaatttcagaactagaccacagttctttgttcgctatctaccctccctaaccaagaccagcaagggatgccagcccaaacaaggaggcagaactcttaggcccaccttggctgtaacatccacaatagtttttgttttttccaaacacag

SEQ ID NO: 237487 - DNA, 330 bp, Homo sapiens
ggtatttatttgtttgaacccatttttgaccaagaccatttagataacttgcttcacaaatttctccaaataaactgaaacaagagagctctgactcttaaaatctacaaaattaaatgtaaatttaaagataacagggtgctacaggtagaaaattagagtgatttttttttaatcactttgaaggtgaagggaagatgttttggtagttgatagtacttgatatccattgataatactgagtatgtagtattacattattattgcaatcaaaatgtggtttcaaacgtgttaaatgaaataaattgaatattttgatggaaaataaat

SEQ ID NO: 237488 - DNA, 329 bp, Homo sapiens
gggtctcgctttgtcacctaggctggagtgcagttttatgatcacagcttactgccacctcaaatttctgggctcaacagatcctcccacctcagcctcctgggtagctgggaatacaggcacaccaccatgtccggttaatttttaaatgtttttgtacagacagggtctcaccatcttgcccaggctggtctcaaactcctggactcaagcaatcctctcacctcagcctcccaaagtgctaggattacagactggagatatttttcaaggccacattatttctcgattctctataactgtcctgccctttaaccttttaataccca

SEQ ID NO: 237489 - DNA, 326 bp, Homo sapiens
catccccgagactgccctcgagagctggcgcctggggaatgcagttgccgctcgcaactcacctcttgggtctgcagcctgagcagaccttcccagcttcaccgagggccacctcgcacgtggcagaggggaggggctggcacccaccccacgggggccgatgccatagcaagcaaagctgccgtccaccatgtgcagcgacatgacagcgagggacggcagcccctgggggagccccttccagtcatgtgactgaagtcttgaacctctcagggccctggtctcctcattaataaagcacatccctccccctgtaacactgggga

SEQ ID NO: 237490 - DNA, 286 bp, Homo sapiens
aggaagctgaggctgcagtgagccgtgatcatgcccctgcactctagcctgggtgaaagagtgagaccctgtctcaataaaaaaaaaatgtagaattacaaagggaataaattattttgttggcaaaatattataaacaataaatatgtgatagaatgatacatgtacttccttaatagtgcattaaatagatccaacagcaggtctaataactatcaatatttcaacattgtgctaagcatgaatagtattttgtgatgtctacaataattgtgctgtgatggca

SEQ ID NO: 237491 - DNA, 454 bp, Homo sapiens
tctagaagtgaacatgttccaggtgatgtccctatgtaaaccaagggttggttttcagtgttctggaggctgggatgtccaaggtcaagatgctgacagattgattgtccctggaaagcctgcttcatagatgaccatcttctccgtgtgttctccctgtgttctcaggagtggggttacctttctggtgcctctttttcataaggacactattcccgttcctgagggctccattctcataacacaacatccagaaggtcctacattctaatatcatcatactgcagcttgggtcctcatatgagagatgtatggagaaaatacctaaatctatcttataacctggagcagagccaccacagcttcagatatgtaacaattatggtgtttactctcttgaataattttattttgcttattcagaaacctcagcaaataaaaatctttttggaaa

SEQ ID NO: 237492 - DNA, 2012 bp, Homo sapiens
tcaaattagtgtaattcttggatatttaatatataggtaatattttaaacaagtttctgtaaaatttagtgttcccattaactccgtacagaatcccttgtatttccaatatgtcaggttccatgaatgtacatgctatctggttgtttaaacattacttagttgattataatgactgtgagtataactacttttactgcttatggtagatatcatgtgagttacaatattatattacatactcttaaacaactgttgtagaaaagttgcttgaaattaaaatacacacttgtacaagttattcacatagaacaagtttgcagttactccccttttattcttgataaatatttcagtttagttcaaatcattccaaggaatgtaaaaattgaatcaacttattatattcctaaaatcagtgccctgcaggtagcaagatatacctagagtggaggtttccaaaatctacagtctcaatttaattttgaataaaatgacgaagcccagaaaagtgaatcagaagttgaagtgtcccataataagctgtcatggcttcatgatcatttgtgtatgtaattattataaaaatgcatttgcatttttattgcttgtgtcatgactagcctggcctttcctttccttttctgcacacactgaactaagggagaataccttgtttttcttccatttcagtgaacctttccttcataactgtaatgagtaaaggtcctaatcactcctttgtatatatgaagatgaaaattccttgaaataattatccagaatttctttaaaagcattcctcaatggttttatgagtgctgtatttgaagaagattaaaatagaaactttatttttaaagctgtgactccatctcttagaatgcagcgtctctgagaaaggaacttctaaactgacttctgctttgggctaaaatatttacccatataagccaatgatagtacagagatttaacagtatttaaatttgggccatagatgaaaatgaattctacttttgactagtaactattcttgatccatcctttgcttttgtttgagagaatattatctctatttgagaacaacatggaaggcattgaaactagttttccacaaaggccagaggacaaaaatatttatttccttacttgattccttcttatcagttgacctggtcgcatctttaatttaattgatattattattacgtttgccttgcaagttctcagatatctccaaccttttgtgttgtcattcatcgactacgggaatattctcaatgaaatgtccttgatggtctctctggttcttattctagtcatgaaaaggaaaagacaaaaagatagcaaatcttaaaactagtaaataaaaggaacttgtagtgaactttgtccattaaattataagtagcttacctgatgagctacagtgtactgtatactttctcccctgcaagcactcaaagaaatattatttgatcaaaatctatagtgcataaattaaacaaaaaatactgaaaatattctcattttattttaattatgcaagtttatttttaatgatatgatatttaagctattatatttctcacttttttattttcaatgatttaaatgtaaaaattataaaacaattttaatctcattcattaattcatctttcatgtataagtctgttttctctgttgaccaccctgtccacattatgaataaaaatatgtatatacttggccgggcgcggtggctcatgcctgtattcccagtactttgggaggccaaggcgggaggatcacaaggtcaggagatcgagaccatcctggctaacacagtgaaaccccgtctctactaaaaatacaaaaaattagctgggcgtggtggcgggcgcctgtagtcccagctactcgggaggctgaggcaggagaatggcatgaacccgggaggcggagcttgcagtgagccaagatggcgccactgcactccagcctgggcgacagagctagactccatctc

SEQ ID NO: 237493 - DNA, 436 bp, Homo sapiens
ccatttatttacatattgttcatggttgctgttttgctacaactgtgaagttgagttgtgtcaacagaaatgtatgccccatagagctgaaagtgtttcctgtctggctctttacaggaaaacacaatttctgatccttcttctgtgctaccacttggtgtgtttgcaacttcactgtgctgtctgtgggtatttgtgtgtttgtgtctttttttttttttttttttttttgagatggagtcttgctttgttggccaggctggagtgcagtggcgtgatctcagctcgctgcaacctctgactcccgggttcaagtgattctcctgcctcagcctcctgagtagctggcattacagtcctcctgagaacctgccaccacgcctggttcatttttgttttttttggtagagatgcggtttcaccatgttggccaggc

SEQ ID NO: 237494 - DNA, 450 bp, Homo sapiens
ctggagacagagtctcactcttgttgcccaggctggagtgcgatgtcgcgatcttggctcactgcaacctctgtctcccgggttcaagggattctcttgccctcagcctcttgagtagctgggattacaggtgcctgccatcatgcccagctaatttttgtatttaagtagagatggggtttcaccatgttggccaggctggtctcaaactcctgacctctggtgatccacttgcctcggcctcctaaagtgctgggatcacaggcaggagccatcatccctggccaggaagtttcttttttcaaacttgtatttttcctctccagaatctcttaggattttttactttttttgttttcctcatttttctttaatacagttgccatcttacataatgtactattaagtgccttcttaatagcttctaatctacccttctgtcgtcttctc

SEQ ID NO: 237495 - DNA, 839 bp, Homo sapiens
ctggttgcacgcatccccaggccccctcggggtgccgctccgagagagccaggcgtgccgggcagcagcctccccaggctgtccccaagggccgcagtgtgggttgggggagacaccactcctggttttggccttttcgtattctctagaatggacgtttttcttcgggctttcttctcaacaaggtttattttttgttgtagctgaaagggaacaaggggcatttgtggagggtgctggggtggggcagcctgggagggcctgggtgggggctaggatcctgcagggcatgggcatgggcctgggccccaggccatggtcttagttctccccgcagtgtctgggtgcaggtgtgggctctcgggctctcggctgtcacctgcctgtgggtcatcgctgctggcactggcagaggggatacctgtctcctcctggaagcccgttgcaggccaaggggtcccatggccctcagtccatccacctcctcacctcaggccggcctctgctgggtgggacttggccaggggttggggtggtagaggtgctcggtgaggcttaaagccattttctagcacattctgtatcatgagcaaaatattgcctaggggctatgaaatttgtatcagaatgaactcccataagcctcttccctgtcactgggtgtggagctcaggcagccgctcgcctgcctgagggtgacggtggaaggccacatggggatcccagacctctgtgtgcttgccggaggcagcctgcgggcagaatgcaatctgggcctgtctgtgtggcctccgcctctctgcatgactacaccgtttcgccaggaggccgtaacctag

SEQ ID NO: 237496 - DNA, 176 bp, Homo sapiens
gggagttaacactgataatgaggatgatgcaactagcaaatcagttgcatccaagtgttaaagaccataaatccacttgttttagctgtttttgcttgagctaatgctcaaatatattttctgtcaggaagcaagtggcaatagccgcagcaaagatattggttcttggataaccc

SEQ ID NO: 237497 - DNA, 460 bp, Homo sapiens
ctgccttccagtgaccaggatgaaagatgcacccatgaattatatatttcaagtcatctctaaattgcctggcaattacagaacagcaaggtcagctgccgggagcaagaatctcccttttggcagagaaaaacagatggatggaaacacaacgatatacagaaagatgttacctcttggagggggggtgtttttcagatgctggtcaccatagatgctggtcaccaccatgccctttcataagtgtccttacaaaaggaggaaatcaggacagatacatccagagggaagacgctatgaagacacagagaagagggccatctatgccaaggagaggggtaggaagcaaattcttcccacacacacctcggaggaaccaaccctgctgacaccttaattttggacttccagcttccagaactgtgagataataaattttagttgtttaagctactcagca

SEQ ID NO: 237498 - DNA, 388 bp, Homo sapiens
cgtgcagctcgttggccagtcactgctccacacagctttgccttctgggccagaggtctcaatagggccttccagcaccgccatttttgtcgccctgccttgcccgccaccgaaagattccacgtcctaggtggcctggcgagtgtttgctgccgtccagccgatatgagtcgaagagtccagactcggggaggctactggggccatcagggcgtggagcctgcggggtctgttgcttctaggcctggactgggccagtgggtgcagccatccctgggcctcagctgatacaggttcctggggcacaggccttgcccactctggagctctatgcagcaattttgtcattttttcttgcccctaataaacgacagcaaaaataacacaa

SEQ ID NO: 237499 - DNA, 367 bp, Homo sapiens
gacattcgcattgtatttcatgcctctgcacctaggctacgcagactgctttgcagtggcacattgtgtgaagcagatctctgaacggcatgtccagagccaggcctctggaaacactggtgcactgggagcctgtgaagcaaaacttctaggtttgcaccttctctgcgaggaatacacactaactgaaaatgtgcactgtggccacttctctcttgtgacttaaaataattttctctcagaccaaatttgaccttccctgtcagttgcctgccttgagactgagcacatgtcttcagctttttttttgtgcctttctcagaaaagcgtgtgtaaatgcataaaataaaatccactggaatataaa

SEQ ID NO: 237500 - DNA, 1005 bp, Homo sapiens
  misc_feature (136)..(136): n is a, c, g, or t
  misc_feature (811)..(811): n is a, c, g, or t
  misc_feature (823)..(823): n is a, c, g, or t
  misc_feature (961)..(962): n is a, c, g, or t
agggggaaagagaagaaggaaggaagagagataattagagaaacatgcctttgtaatctcaatgtgtttggggaagaggaggactactggccgtgggttaggagcaatgattctctctgcctccaccagtgacatnagtcactataaaaaacaaaactgcctataaacatttataaatacccccaagtggatgatacctcccagctggagaactactgcaagactttgtatctcatgaaggacttgttaaattaaaaataacaccacgaatgcatgggacactacaccagtggctctcagttttggctgcacgttaggataattcagggggctcttaatattcccaacgcccaacacagcacccagctcaattatatcagaatctgtggaggtgagacccacacatcgatatttttcaaagctccccttctccatgcctgtgattttaatgttgtaatcaaaactcttttcctgcttaacacctttaaaatagatgtgttgacttaataaccaaatcaaaaccatagcacctctcttatccaaggatctgggactaggattttaacagatgtaacaaaagatgttaaccacttactggaagcctagtgtttatcaggatcacgttcatttacatatatataatctcaatccttaatgcaactgtacaagcacaaattagtcttctttttttattttaataaagaaacaggccgggcgcggtggctcacgcctgtaatcccagcactttgggaagccgaggcgggcggatcacgaggtcaggagatcgacaccatcctggctaacactgtgnaacccctaaaanaatacaaaaatacaaaaaaatacaaaacaaaaattagcctggcgtagtggcgggctcctgtagtcccagctatttcggaggctgaggcaggagaatgacgtgaacccgggaggcggagcttgcagtgagccgagatcnngccactacactccagcctgggtgacagagcaagactccgtctc

SEQ ID NO: 237501 - DNA, 394 bp, Homo sapiens
tcccaggtatatatacccaagagaaatgaaaatatatgtccacacaaaaactggacagtggactgttaaccgacaataaaaaagagtgaaatactgatgcagactgtgacacggatgagcctcgaaaacatgatgccaaatggaagaagcctcacacaaaagaccacatactatacgatgtcacttacatgaaatgccaggatagccagatgtaccgagacacgatgtagatttgtggctgctgagggccggaagtgggtaatggggggcttgggggcttaggagtgaagctaagaattgggaagttttctttttaggttaatgggaatgttctaaaactgtatgatggcggtacaactctataaataaaaacgctgaatttacactttttttc

SEQ ID NO: 237502 - DNA, 535 bp, Homo sapiens
agatgggagaactaactcgagttagataaacgcagactaatgttgcatagaagtatcaataaactatttgagttttctgaccataaaacttatacaggctatcagtaattaaattgtggtatatttatataaaggaacttcgcagcaataagaataaaccaactactgctgtatacagcaaggccgaatctcacaaccataaccttgggtttaaaaacagccagaaacaaaagagtacagtatatgactcaattgatattaaactcaaaaacaggcaaaactaacctgtggtggaaagagtctttccaaaccagtacttttaggtctactgtagttactgtaacgacttcttagtgttctatcttgtaaatatgccatgatttattaaacacagcccccaattcatagatattcaagttacttctaaagttttgctcttataaagaacactgcagaacagtcttgcacctgtgcaagtagttctatgggataaattcctagaggtagaaacaatggataggtctccacgtttgaa

SEQ ID NO: 237503 - DNA, 481 bp, Homo sapiens
agatgggagaactaactcgagttagataaacgcagactaatgttgcatagaagtatcaataaactatttgagttttctgaccataaaacttatacaggctatcagtaattaaattgtggtatatttatataaaggaacttcgcagcaataagaataaaccaactactgctgtatacagcaaggccgaatctcacaaccataaccttgggtttaaaaacagccagaaacaaaagagtacagtatatgactcaattgatattaaactcaaagtctactgtagttactgtaacgacttcttagtgttctatcttgtaaatatgccatgatttattaaacacagcccccaattcatagatattcaagttacttctaaagttttgctcttataaagaacactgcagaacagtcttgcacctgtgcaagtagttctatgggataaattcctagaggtagaaacaatggataggtctccacgtttgaa

SEQ ID NO: 237504 - DNA, 743 bp, Homo sapiens
gttaattgtacattatatggaaccaccaaaaggctaataccaaagaaaatgaatgataccaactgggagactaagaaaggggtttcagaggcagcatattttgctctgggagtgaaaagaatcaccacattttgtaacatgccaaaacttacccctgtacttggaaatgaatgaatgaaactattaaggaataaatgaatgaaatatggaactgtgtcccgtgtacctttcaaggctcaagatatatttgatattattagtctaaacgctaccaaaagtatctctaatcttgaaattctccatattcttccataatttaagacagcacttgccttagcttcattattttaaaatgatagcttagagtgaaacctacttgatatatagatgaagggagcatatgtaaaggattatatttcttaagtctttcatccgttatacatttagaaaacttgataggcatagatgtgtgttctttgccactgtggcttccttctcagggtaactgccattcattcaccaaactcctgttgtgtgcatctttcttagatgaaaattatggctggcattatgtgatccctgttcttaagatgtttgtggtctaaatggagcaaataaggcattcacatgtgaaaagttaaataatataacaaaaaagagagactcttataaactggtgtcgttacagaaggcatttggaagaggtagaatttgatctgaatcttgaaatgtgaatagggaac

SEQ ID NO: 237505 - DNA, 590 bp, Homo sapiens
gaattttctaatgtatgccagaatggaaacatcagatgtaggaattttatcggtcaatttcttaccctgttgtttcagtattttttgcatctcacttctcctggcactattactagaagagaatagtagaattcaggagggacctgacatctgtgttaccctctttcaaaacccttttatcgacattatttcatttggcctgtgcagcttccctataaggcagatgttaatgttatttccgttttaaagatgacagaaacaaggcccaggcaggttcagtgacttgcccaaagtcacacacctgcttttccattagggctaggatcagggtgagggcctcctgtcttgtagtccaaggcctggttattgccttatgtagaaatcagagccaactgttcatctgatggttatttatggagcatctattatattctcaaggccctgtgttgggtgctcagttagagcaggaaagacagtcactgctgtgatggtgtctacattcaaaaccagcgctatccaaaaaatgtataatgtgggccatatgtgaaattcaaaattttttagcagctgcagtaatttaaaaaaagtaa

SEQ ID NO: 237506 - DNA, 740 bp, Homo sapiens
ggaagctgtgcgattggcttacgttttatttttatttagaccaataggactcgattatgcaggatacctattttgattgggcaaaactggcatctgtcgtcatccacggataattaccaatcagcagagaccttcccactacctcggccgcataaactattatataaaaagaggagaccgacttcttgttttggttttgccactattgtttcattatgcccgagctggccaagtctgctcccgccccgaagaagggctccaagaaggcggtgaccaaggcccagaagaaggatggcaagaagcgcaagcgcagccgcaaggagagctactccgtgtacgtgtacaaggtgctgaagcaggtccaccccgacaccggcatctcttctaaggccatgggaatcatgaactccttcgtcaacgacatcttcgagcgcatcgcaagcgaggcttcccgcctggcgcactacaacaagcgctcgaccatcacctccagggagatccagaccgccgtgcgcctgctgcttccgggggagctggccaagcacgcggtgtcggagggcaccaaggccgtcaccaagtacaccagctccaagtaaattctcaagctcttgtccaacccaaaggctcttttcagagccactcactattatctaaagaagagctggttcgctcttcctatcactggggggcgaggggtcataaatcattttgatctatccactaaattaatctagctcttt

SEQ ID NO: 237507 - DNA, 470 bp, Homo sapiens
tattttcagatatggatggaagggactttcgtagctatagaaacgaggactgattggcacaaagttcctgggctctccagccacagtcgtcatttggaagggaattctaagtcaccagagagctaacacttattcttgggagaatgtaagagcaaatcctccttacgctgccaaactggcacaggatactgcagccactctgcaaatgaacagtgcacaataaacaggccgagagagaaagcttaaagttctaaaagccctcttgagggaagtgagaaggcagttcctgggaacagtgaacaaatgccgtcagaaggtggaatcattgatttcaatcatgaatgactaatgatcgtgatggtgtggtttagaacagaaatgcagcttctacagcctgaagaactaccagccttctctcctgtgatgttccatttatacttgcttaataaaagcatcccaataaattagac

SEQ ID NO: 237508 - DNA, 309 bp, Homo sapiens
actcttaatgagttccctcccatttccagtgccacctgacaccccccaccccctgacacacacacacacactcttgttttctgacttcctgcctctgcaagacaagaagcctgttctttttctggaagatcacaccaactcctgtttagccctcagacatagttgccagggagctaagcaactgagcaggaattatggtcagggacacagcacaaatactccagcccatttttctgacaaccagactaatatcccttacattaccgaaagttctgggttcctcactacagagattagctgtccaaaatt

SEQ ID NO: 237509 - DNA, 517 bp, Homo sapiens
gggtgcgtgtgtgcttgcagacatgggcacacatgatgctgtgatcgtgtgcacaggtgttgtgcaagtccgcgtgcccgggagtgttctgtgctgtcattcattggacgagcactcacttattgagcacctactatgtgctagatgctgaggatgtggtggtgacaagagcccctcctccctaacagtcatactcagtgagagggatgttaatcggaacaaaacacacatcggcagggcatggtggctcacgcctgtaatcccagcactttgggaggccaagacgggtggatcagctgaagtcaggagttcgagaccaacctgaccaacatggtgaaaccctgtctctactaaaaatacaaaaccaggcgtggtggcgcatgcctgtaatcctagctactcgggaggctgaggcaggagaattgcttgaactagggaggcagaggttgcagtgagctgagaccatgccattgcactccagcctgggcaacaagagcgaaactctatgtccaaaaaa

SEQ ID NO: 237510 - DNA, 460 bp, Homo sapiens
ccccctgcggcctggcacagaagttatccacctaactggaaatgcagacttggagaggggcaccaggcccagggcaaggtgggcaggaagccctgggaccagcagagcctgtggaagagaagatcctcactccatcctgccctgggccaagctgactgtgtggaccaaatcctcgggcttccgcctctggcttttggagaagggtctcggcgagggagttctgcccagctgcaggtgaaggggtggcattgcttcccaacagccgcagctcctgccaggcagccctgtccctactgctccctcctccaggctcccatgcctgcccccctcacctatccaggctgaggagggtaagggctcccggctattgctggccccggggtgctctccagcccttgtgggtttcccttaacctcacccgcacctttgtaaatagtccttccgtaaacatccttcattc

SEQ ID NO: 237511 - DNA, 435 bp, Homo sapiens
tggtgattttagtttgtgtaaatattacttgtaatgttttcatggttgtaacataagaattaggctaattttataactttgcatgaagaaaatagcttttttctgtattaataaagtagaattcatttagaaggatttagtcattcattttgtttaacataaatatatcagattatgtggtttatgtttcatcagtaaggttttggtattcattttcaggagcttcagaaaagtttgatgagctattatataagccaagaacacacagcatgttatacggagatttaaagaagccaatgtagaggtagaatgtatgttattttattattattttttgagatggagtttcgttcttgtcgcccaggctggagtgcaatggtgcaatcttggctcactgcaacctctgcctcccaggttcaagggattctcctgcct

SEQ ID NO: 237512 - DNA, 1719 bp, Homo sapiens
aaattcttcaaactgaattgcaataatgacacaacctatcaaaacctctgggatacaccaaagggagtgccaagagaaaagtccacagccctcaacgcctacatcaaaaagattgaaagagcacaaattgacattctaaggtcacacctcaaggaactagagaaataagaacaaaccaaacccaaacccagcagaaaaaaaggaaataaccaagatcagggcagaactaaatgaaattgaaaaaaaaaaagatacaaagataaaaagctggttctttgaaaagataaacaaaattgatagaccattagcaagattaaccaagaaaagagagaaaatccaaataacctcattaagaaaagaaacgggatattacaactggcaccactgaaatacaaaagatcattcaaggctactgtgaatataaactgtaaactaggaaacctagtttatgcgcataaactaggaaacctagaagagatggataaattcctggaaagatgcaacactcctagcttaaatcaggaagaatgagataccatgaacagaccaataacaaacaatgagattaaaatggtaaaaaattactaacaaaaaaagtcccagaccagacggatttacagcagaattctaccggacattcaaagaagaattgataccaatcctttgatgctattccacaacatagagaaaaaaaggaaccctcccttaattcattctatgaagccagcatcaccctaataccaaaaccaggaaaggacttaaccaaaaaagaaaactacagactgatatccttgatgaacatagatgctagaacccttaacaaaatactagctaatcaaattcaacaacatatcaaaaagataatccaccatgatcaagtgggtttcataccagggattcaggcatggtttaacatatgcaagtcaataaatgtgatacaccatataaacagaattaaaaacaaaaatcacatgttcatctcaatagatgcagaaaaagcagttgacaaaatccagcatcactttatgattaaaactttcagcaaaattggcatacaagggacatacttcaatgtaataaaagtcatctatgacaaacccacagccaacataataagcattccctctggaacaagacaaggatgcccactctcacaaatcctcttcaacatagcactggaagtcctagccagagcaatcagacaagagaaagaaataaaacgcatccaaatcagtaaagaggaagtcaaacggtcactgtttgctgacaatacgattgtttactttgaaaaccctaaagactcttccagaaagctcctggaaccgataaaagaattcagcaaagtttctggatacaagactagtgtacacaaatcagtatctctctttacaacgacagcaaccaagcagagaatcaaatcaagaactcaacccctaggtcaggtatagtggctcatgcctgtaatcccagcactttgggaggccaaggcaggcggatcacaaggtcaggagttcgagaccagcctcaccaacatggtgaaaccccgtctctactaaaaatacaaaaactagccgggcatggtggtgcacgcctgtaatcccagctactcaggaggctgaggcaggagaatcacttgaacccgggaggcagaagttgcagtgatctgagatcatggcactgcactccagcctgggtgacagagtaagactctgtctcaag

SEQ ID NO: 237513 - DNA, 476 bp, Homo sapiens
gggggatgtgagtactgggcaccaaatgatgcctcctaatctcccagctcagcaaatgctgcccagggctgaaaacaaaacatcctcagagagttttccttgccctcctcctgttggtatcttgtccttgtcagcaaatgattcaccaccattcagccaaagcatgattattttcacttgtatctacagctatgaaatgcccacagactggtgccaggttctgggaaagagatataaccaaacatgctgaattcccagactcctttgaatttataatgccatgaagcacttgttcccaggtcaggaggctaggggactgagcagcatgattacttatccctgtcctgggaagaaacaagagggaaaaaagatttgtttcccagaagacagccatctctccagcaaataatccagtcccaggttcccttatgataaatcaatcacactttttaataaaagaatgcaaacatagagat

SEQ ID NO: 237514 - DNA, 240 bp, Homo sapiens
catcaaaaagaatgatgatgcaatttaaaccatacaaaaattaaaaaaaaaaatccaagggacggtggtgaaagtcttctttctagaagaatagcagctaatatacacagaacgaatcttagaattagaaaatcactatattttgatccccttccccaaagggtgacaaaaccattggtagacagtggttgagaaacagaatagtctcaggatatcactccgtagatttattcattaatt

SEQ ID NO: 237515 - DNA, 209 bp, Homo sapiens
cttagaaggttttgaggtgttctctttatcctgtgattagcgaatctctgttgtctcagttctctcctggaagtgctgtgaaatgcaggtggggcttcctggactgatactctctttcttcatcttttgattcctgtttttgtgtttttgtgctacattaaggggacatctctccacttcatttctcagctcttttatagaagtgtcca

SEQ ID NO: 237516 - DNA, 498 bp, Homo sapiens
tgaaaagaacctgttctgagaaatacaaatgacatcaatcaggcccttatttgaggtgaaaggcaatgatggagagactgacagtataaccagaaattctaaagaatctacaagaaagttctagaactagtaagatagtttcataatattacaggatccaaagtttgttataaaaaacaattatatggttatatattagcaacaagcaaatggaaaactcaaagatccaataccaaaatgaattgggatgtgattagctctcccgccataaacaatttcccaccatggtagcagtttgcaaaaacaaaagtaggatcctgatattgctagccaagttacagatcggttccatcaccacaaggatccctcatatagccctttcatagccacactcacctctatctgtcccgcagcacctgatccctagtgaccactaatcttcatttctacaattgtgtcatttaaagaatgtactataaatggaatcatatggtatgt

SEQ ID NO: 237517 - DNA, 421 bp, Homo sapiens
ctcacctgtaatcctcctgactcctacagatttcccagaactccagtgcatcaccttacccttttctattttcagcacaaccagcgtgatgtacaaagtgtgctgatatttcttccaatgtctgagtcagatgaggcagattctagtattttcatcagactctaaacatgccagagagtggggacaggggtgtgtaatatcgaagatggaatttaacagggagaccccaaggggagctgagatgtgggaggaaagaggcagaaatatatggagattagggacaatgaaagattgggcagaaagaggaataagaggtgaaacaagttgtaaaaatggatcagaacaggtgggagagaaggaatagagggaagaatgggacaaagagaagaggagggactcaaaatgaacagaatcctagggg

SEQ ID NO: 237518 - DNA, 411 bp, Homo sapiens
tttattgctggaagccattctcttacagcatctagtgctgtgtaacgagctaccttaaaatgtaaaggcttaaaacagccatctttgatgtctttgcaggtctagaagtcaggaagggtaattattcagctccaagtggcattggctctagttactacctgatattccagggtggtagctggagtggtctcaagggtccaagctgacctcacttacaagctgggtgccttggcagggacagttaggaggctgtgtgtagcagagcctcactcggtctttgtattctccaggcctcttcagtggtttctttggcacttcttaaatgatgtcagggttccaggagttaatgttccaagagacaggaagtggatgctgcccatctctttttttttgtttgtttgtttgtttgtt

SEQ ID NO: 237519 - DNA, 489 bp, Homo sapiens
ccaaatactctgaagataaaataattaaaacagtatgatgctgatatagctacagatagatgaatgagtggaacagaataggaaatggagaatcaaaatggaaaattagagggtatatgtgtagaagtttaatatgtgaaaaaggcagcagcattggctgggtgtggtggctcacacctgtaatcctagcactttgggaggccgaggagggtggatcacttgaggtcaggagtttgagaccagcctggccaacacggtgaggccccgtctctactaaaaataaaataactagccaggtgtggtggtgggcacctgtaatcccagctattttgggaggctaaggcaggagaattgcttgaatccaggaggcagaggttgcagtgagcagagattgtgccattgcactccagcctgcgtaacagagtgagagtccgtctcaaaaaaaacccccaaagcaaaacaaaacaaaaaaaggcagcatttccaatt

SEQ ID NO: 237520 - DNA, 913 bp, Homo sapiens
ccaggctcttgatgcacactccttctgccaggtgtgcgcctctcccgttccctgcacatgcctaactctagcctctccttgaagtctcagtgtgggcatcccctcctcctgggctaggccccctcctgagcccccatgacccctgtgcattcctgtggcactgcaccaatttgtctgcagcaccacggtctgtccacgacagtaacagcaccagtactgcctcagcttcctcatttttccatttcatccttcaaaacaccacaagctttgttagcaaggagtcttgtggctttcttgagtcttcccccaagccatgaagagtttaagaacccagatgctgatcgggccagggacaggcttgcccatgtcccgggccccattgcttccatgcctggtgctgtctgagtatccccagagcaagagagacctggagacaccagggtggagggtcctgggagatagtcccagggtccgggacagagtggagtcaagagctggaacctccctcagctcactccgagcctggagaactgcaggggccaaggtggaggcaggcttaagttcagtcctcctgccctggagctggtttgggctgtcaaaaccaggtaacctcctacatgggtcatgactctgggtcctgggtctgtgaccttggggtaagtcgcgcctgacccaagctgctaagaggggcaagggagaaggaagtaccctgggggaggggaagggacagaggaaggtattccctggcttttccactccaaaccagggcaccccttggtctctgccccagagttgagaaaaaaacttcctccccgggttttagggagaaggtttccctggggtaaggcaaaggggaagcgccccagtaaagggaagccatgaattttacgggccgggggggggccgagagaaa

SEQ ID NO: 237521 - DNA, 480 bp, Homo sapiens
ccaggctcttgatgcacactccttctgccaggtgtgcgcctctcccgttccctgcacatgcctaactctagcctctccttgaagtctcagtgtgggcatcccctcctcctgggctaggccccctcctgagcccccatgacccctgtgcattcctgtggcactgcaccaatttgtctgcagcaccacggtctgtccacgacagtaacagcaccagtactgcctcagcttcctcatttttccatttcatccttcaaaacaccacaagctttgttagcaaggagtcttgtggctttcttgagtcttcccccaagccatgaagagtttaagaacccagggtcttattccaaatttgtgccaggctgagtgcagtggctcatgcctataatcccaccactttgggaggccaaggtgagaagatcacttgagcctaggagttcaagactggcctgagccacacaatgagaccccatctctatttta

SEQ ID NO: 237522 - DNA, 1347 bp, Homo sapiens
gagacctaatactgcctgcatgcagaagtggtcctgctgggtttgtttctgtagtgatgacactttgaatgttttttcctgttgggtttacagtcactcagcacttttcactgtaagatggtgtggaaccagacgcagagcacatcggaattcacatcctattctgcctccaattacacaggtgaaacaagactaaggtccattttcccctgggagttgggagtgggctttgtcctttgagaatcacagtcactttttgatgtgtttgtctttgctgtttagaggtggaccagtcgtgctttactgagtctacctgataatctcatgtacacttttttaaaatggcaaaaatggttaggttgggtctgcccaaagggaactgaccatccaggattccagcctttgatgttaatagctaggtgttgacagaaaaaagaaaatgtcaaactttctatgcttatgagtagatactagtctttgcttcatttttaccattctagaaatgaaattagcatgtgtgataattggtgggacacagaagtattttatattctgtgtctctagatagtggaggcactcttcggattgggggttggaggaagggttggtggcagagttggaatgtgaaacattgagttgtgaggggaacacaggtccacacactaaaaaacctgtgctgccaaaaatgtcaacagcaccccctccctatagagaaatactgataacctgtatcacctcccatcctgaagtgataccttgaaattctacatggcagtggaggacagaagtaggaagtttgcaggtctctaggtactcacttagtgccggaattgctatatttggtggctgcttacttcatctttcatatttagagtttgatggtgggatgctgttaaattgtagtagaccatttagtttttaaagaaggctttgttccacaagtgacaggacaagtcaagtcacttcatgctgttttgctgaatggatacggcagacctgtgttaacatttttaccattctgtgaaaacaaaatcctagatagtaggagaaaattacttacagaataaacctgaccagctagcaccctgacatcagatcattaacctactgcattttattggggataattcttgggacaatcttgagagccaagtgttttcattatgctttaaaaagtgttataaaaatggcctttttgaaaatgttgcattatttgttaaagataacatcaaattttctttggtctttctgagcatacctttgtaaaaactttgactcaatctgagtgtatagagggcatttgtcctgactggatcaaaatgtgctttagtaccctcatttttctaa

SEQ ID NO: 237523 - DNA, 698 bp, Homo sapiens
acctagacgtaacacagagaaacgctgtttccacaaataatcaaaaatcaaggtcgggcgcggtgttcacgcctgtaatcccagcactttgggaggccgaggcaggtggatcacctgaggtcaggagtttgagaccagcctgggcaacactgaaactcgtctctactaaaaatacaaaaattagccggacgtggtggctgcttacttcatctttcatatttagagtttgatggtgggatgctgttaaattgtagtagaccatttagtttttaaagaaggctttgttccacaagtgacaggacaagtcaagtcacttcatgctgttttgctgaatggatacggcagacctgtgttaacatttttaccattctgtgaaaacaaaatcctagatagtaggagaaaattacttacagaataaacctgaccagctagcaccctgacatcagatcattaacctactgcattttattggggataattcttgggacaatcttgagagccaagtgttttcattatgctttaaaaagtgttataaaaatggcctttttgaaaatgttgcattatttgttaaagataacatcaaattttctttggtctttctgagcatacctttgtaaaaactttgactcaatctgagtgtatagagggcatttgtcctgactggatcaaaatgtgctttagtaccctcatttttctaa

SEQ ID NO: 237524 - DNA, 542 bp, Homo sapiens
agtttcattcctgtcttgtctttgtttgggtttccctagaagcagattttgaaaaaacatgcaatctggtctgacttcactacttaggagctgtgagacctctctgtgcctcaatttcctcatcagtaagattctactttataggattgtaaggaagattaaattatgcatagaaagttttaaagccctatctgacctataatggtggtcaataaagcttgctgtgataacagtgattactattattattaaaaatatcactaccttcgggttgccatcctcaaccaatctagctagaacagattagagccccctcttatgtgtactaatagcattgtatgcctcctttacattgtaattgccagtttgctacaggaaggatgatgaaatattgttcatcatctagcacctagcccagtgcctggcagagttatacaagatgtactcaagtattttttgaacaaaattaatgaataaaatgacttgtagaaagagccttccaattacacttgctttcttacctttaaatagccacctcttta

SEQ ID NO: 237525 - DNA, 457 bp, Homo sapiens
atcaatagactgtggtatcctagatgttttcgtagtggttgataattcatctataagaacagagaaaccatttatggttgatcagaattttatttgttaaaataagtaattaaatagtctaagatgtattgattaatcatagaattttcatgaagggcattttaaaattgccgtttatgccatgaaaaagaatagaaagatgaagcactgcgattccataaaatagcttcctagaaaagcaattaactgattttttctaaagttcacagaagataaatgatgtaggcttcctatttcctgtcactcttggttacctttgtatgaaaatggatttcttccaaatgaaagtcggcaccagcctgtcgggcaaaaaaggcatctgtaaagcaatgtgtacattacatattcatgccagtcgaatttcttaattacatttgagatgtataatgttttcaaa

SEQ ID NO: 237526 - DNA, 456 bp, Homo sapiens
agggggactaaaaaggcttgggggctcagagaacgttcattccagttccccagggacaggaatccgccccagcccaggttcctgccccagcgaggccttctcatcggcgtgatcggggtctggtttgcagccaggccacacaaagccacacagagcagcctcggaagtttggtgacagaaaacgacgtgaccttggcggggtttggaggctgcagcttttggcggggcaggtcagggccccggggtgttgtggccacagagccacgcaggggaggcgctaggttgtgggttaggggacggggaggccccttcatccctggccaggttgggcagcagtgacgccttctttcctcccccactgcccccctacaaccccgacactcttcacggaacccctgtgtctgctaggcactgggtaggcactatttgtataaataaaactccttttgggcctgt

SEQ ID NO: 237527 - DNA, 322 bp, Homo sapiens
ggagcgtttgttacaagggcagaagaccggcgtgatctccccacgcgcgccagccggtgctgctggtggagggaactgacatctaacgcatgtggcccaggagaacaaaaccttccattgcaccccacgccgcgactctccccagcgaaaggtgcttcttttggaagaccgcacgaagtaaggaagagcctcttttcctcttcctggatatccctccaggaatattagaagctccaggactccttgatacgaccaggaaaagatcgcaaccgggtctttaaaatatcgattccagccagcttctgcgtgcttgacacatctt

SEQ ID NO: 237528 - DNA, 426 bp, Homo sapiens
tgtccccacagctccaaccagaatagctctgcttttatgttcacgatattgggtgtcccgctaagattttatttgaataactttttagatggaacaattttaaaagttaaaaactaccatttttaaacaaattacattttggatcgttttttgagatagcaagggtttcgtctctcatcttgggttggatgaaaagtgtaagacaacacagaactcagaacctagcagcgagggaagtgcctgtttttcaaagggaaaggaatgtgttattttgcagttgtcagtagttccaaatatatcaactattccacaaaataatgagtatgtagtttccgtgagagacttagaactgtctagagcctagtccttattgtctgtgatcatagaaaccatggagaaaaaaagcctacctatacgaaagtagtt

SEQ ID NO: 237529 - DNA, 457 bp, Homo sapiens
caggcatgagccactgcacccagccagaagatattaataacatttccaggaaatttaacagataatgtttcatatgttaatgagcaggagttattgtgggaggctgaggtgggaggattgtttgaggccagaagttgagactagcccaggcaacatagcaagacctcaacgctaccaaaagtaaaaacttagctgggtgtgaggcttgcctgagcccaggaggccaacgctgcagtgagccgtgatcatgccactgtcctccagcctggaaacagagcaagaccccatcttggaaaaacaaaacaacacagggagagcataggtgctcagtgtcatatgaattaatacattttgttactgaaacccagttttactttgcaactttaaatttttttcagaaacattaaagaatatattttgtatgagttaaatatagaaatgctactggctgttcctg

SEQ ID NO: 237530 - DNA, 469 bp, Homo sapiens
tcagcctcccaaagtgctgggattataggtgtgagccatgagtctcatatgacaagttcccttttaaaatgcataaaatcacagatacctttgtctggaaaaataggttttttttgttttttgggaggattgtttgaggccagaagttgagactagcccaggcaacatagcaagacctcaacgctaccaaaagtaaaaacttagctgggtgtgaggcttgcctgagcccaggaggccaacgctgcagtgagccgtgatcatgccactgtcctccagcctggaaacagagcaagaccccatcttggaaaaacaaaacaacacagggagagcataggtgctcagtgtcatatgaattaatacattttgttactgaaacccagttttactttgcaactttaaatttttttcagaaacattaaagaatatattttgtatgagttaaatatagaaatgctactggctgttcctg

SEQ ID NO: 237531 - DNA, 872 bp, Homo sapiens
cccagccatgagctgagctggtgcgcaaccaagacttagcctgagtgggctgagtgtggaggtccccagctggagtcaacaccttgcaaatagtctcattattaaaatcctctcaatttaagtgtgtcaggtgttctctaccaggactcagactgaaattagcctaaaatcagttgtatatgtcttttggaatgcattaaggacatgctcctttatataaagtgacatttgttatggggcagaaagtatccaaattctaccaactacttggaagaagaaaactataaaagagccaaacaattctgttctgttaaccgctttttcaaaattcaagacctacctccaaaaaaaaaaaagtttaatgtatctctccaccataaacaaagacaaagtgaaagaaaatatattaaagggataatccctcatctagaaggaatgatcccattcttcgagaatataggtgatatcttaattgttgtacaattaaaaacagctacaccaaactgctcataaccaattaccaattcaaataaatatatagaaaatctttacaatctatgaaaattctaagtagtacactctgacacattttattcacttatcacgtatagttacctcacttcaaagagtgacattagggggcttacaagaccccaagtacaggcctctgcattaagaaaatggacatcaggcttcaggatataaaaaccttttcctaagcatctctaatggaatcggagacaaatataactattgttaacaggcaggctaaattaactacctccttttgctgctagaccagaggcttctctagtaattaattacccaggtcctggcctccttcaggcagctacacagctcaggaggagcag

SEQ ID NO: 237532 - DNA, 1411 bp, Homo sapiens
gataggacctgttgggattccaaagaaaggagcataaaacaccagggtaatcagttcaaatcattgttcggaggaactttcatacagggttgtgggggctgcagtgtgtccttgtgttggacagcaaacaaaaaaaaaagctctacttgtgtacgtctgcaatgagaagtttgggttatggagagtatatgagggcttaaggaatttggctcagatccagggccagtttctacatgtttagcaacatgtttgatctctcagtgtttcgggcaacaatgtaactgtcagtgcctgggcattccaatccctagcttacgtttaagcctgcaggggaagacatgcacttggtccagggtcacagagctgtcaaggcaccttgcacttctaggccaggacacagaaaggggagttggggaccactacaatgagcaatgttggtcagtagttttatttgtttgttttcactttatctgattttggtgtttgactaatactggcctcccaaaatcaactgggaatttttcctccagtgccaccccctttttatttgcatgacattttgtagaattggtgttgtttctttaagtattcggtagaattttttggtgaaaccatttaagtctggaggtttctcttgtggaagatttgaattatgtagtcattcaacttaataggtactcaaagtatttcatattgggtgggttttaatagattattatttttgaggaattgttccatttcatctaagttttgtaacttaaatttgtggagttatttatttgaagtattcccttattattcccttcatgacagaaggttctatagttgtatcctttgttttattcctaatagtggttatgtgtgtcttctttatctttgttaatcttcttagatgtttataaattttattgactatttcaaagaaccagctttctgtgtcattgattttctatgtgttctgactttgatttctattctgatcattattattttctttttctacttgttttggttgtatattgctgtttgtagattcttgaggtgggagcttagattatcattagagactttattctaacataagcatttagttttataagctaaactcagcactgtttgagctccatcttacattttcctatattgtaattatattttcattcagcttaactatttctcgattccatttaagaaattatctgtgacacatgggttatttagaagtgtgctcttttggccgagcacggtggctcacgcctgtaaccccagcactttgggaggctgaggcgggcagatcatgaggtcaagagatggagaccatcctggccaacatggtgaaaccccatctctactaaaaatacaaaaattagctggcgtggtggcgggctcctgtaatcccaggtactcggaa

SEQ ID NO: 237533 - DNA, 2486 bp, Homo sapiens
  misc_feature (1576)..(1576): n is a, c, g, or t
  misc_feature (2238)..(2238): n is a, c, g, or t
tgacttcctattggtttggtgaaccaagtcacaatctttgttgggtttaggtgataggttgtaatgactgagtcactcagtactgggctgtcttgtgtgtcactgccattctgtgtgctcatggtggttggctggtgaggcccagctgagggcagggttggtcggccaggactggaaacaaagagagaatggtggtgttggggtgtacatggcttgcctcggtagtggtccacttttgaattaggccaggatactttctatttgtttgttcacttggtttgagggaaattaagatttactgtgtttttagatattcttcttagtctagtgccatgaaatcaaacagatctgggttcaaactgtggccctgccatgtactagtttatgtgatcttggacaggttattcacactcgcagattgttttttcgtaatcaaatggccacaggaatggcaaaatatcagagaatatgtcgaaatggaaggaaatcctgggattatctgatctgtagactcttcctattaaattaaacattaaatgcctgaaatgttataagacgttattaaatatctgaaacgaaatctcagtatgaaaagcagatatgttaggtggatgcctcagttgaattcagtcttcttattgggtaagattagtctttgttcacagaactactttaccaccttcactgagtcccatggttcactgcagctcggaatgaaatctcctgatttttcttcatgtataaggaaactgaggtcctgtatgccaagccactttccccaaaggtcaaataggaagatagtggcagtggcagattggagtcagtaccatgttcctcatacaacaccacaaagaagtcaacttggttagcaaccaaaactccgactgcatttttttcttagattccattgtgccaatgcataacctttgtattctttcaatttttaaatggcactctagaagaaaaaaagatatctgggaaagtttgctgttaagaatattttctccttcaagattcctcatttcaagttctaccatagactcagttcatcacctgtcaaaaaaatgacatgaaatctcaacattctccctaaaatacagagacctgtgacatcataatcctgaagcctgagagactaagtaggaagctgaaccatatgacataaactgtaaggaccagagtagaggaggggaagtgaagaggaaaagaggaaaggacatccacatctctttggacctttggaccgatcagtctaaaccttatttttgtcgttgttgttttttggtacatgtcctggttgtttgttccctttgttcagttcattttgccaagtgtttacagaacacccatgctgtgctagtatcggttatcacctctgaacaaatagaataatgtttggagtgtgacttacaccttgaagtccacttccttttagagatactatctcatattctgtaaatttaagctaggaataacctcacaccagttactcggtgtttgaatctggagaaggaatagaaggcattatctgctgggaacgcttcaatattgaaatgttctttcccgaagctacttntttttccctctcaagtcacatattactgacccacagcaaaacccgagattccaacagacaatccaatctgaagcaaagtttcttattcagatgttggacaggtactaattcagcacctacttgtgtgagatactcttccaggttttggcatagagtggtgaccaggaaagatcaagacccaagcactctgtggtgcttccatgctcatggggggaagagaaaataataagtaaatccattagaaagattatgatttcaactagtcataaatatgatgaaggaaatatacatggaaatgtaatattaatcaaggcatgggtattgcatattatgattgatcaggaatcagtttctcctaggaggtgacatttaaactcagacctttaggagatctcaactctcagtatcctcagagtcaagttgagggaccttataagactccaacagaaggaaccacacagtttcatgctgcaagggcaaggctactctatttttaattgatggctagacttcattaagactgaaatgaataacagtgaggaaaggcggggcagctactagagacagaagagtcattgtgatttagttgtttggtgaattgctcatactttcaagggtcatcggtagcataactgcaccttggtgcttggagaaagcagagngcagcagctgggccagcccaggactctctgtgcctggagctcctggtaatggacctgccagcgtgtgaactgacgtgcccagcgctcccacggtgggaagctgtttactctctcccgggaggacacagggttagacatagttgaatctataatcattatcaaccagatcaacacgttctaactgacttgcttgtgtcgtttttttccccaacagtagttcaatggcctgtgaatgttttgcttccagt

SEQ ID NO: 237534 - DNA, 463 bp, Homo sapiens
agcagagttcctaaactttataataggaaaaggggaaattgtgagttataatggttttaccaaaggttactggccaagtttcattatctctgcaagggaaactagactttttttttttttttttaaacaaagtcttgctcttctgcccaggctggaaggaagactttgtttaaaaaaaaaaaaaaattgtctagtttccctcacagacttaatgctgtgacaaaagaacaattcatacagaggggctaacaagccaaaccagcagccttcagtgggagggaacttggaaagttggaatgttcaaggaaaatgacaaaatacaagtttacaaaaattgttttttcaaaaaatgctcaaatggccaggcacagtggctcatgcctgtattcccaacacttgggaggctgaggtgggtggatcacttgagtctaggagttcgagaccagcctgggtgacgtggcaa

SEQ ID NO: 237535 - DNA, 463 bp, Homo sapiens
gtctctaatggacatctcagatttcacaggcccaaagccaggctcccaattactcctgaccccaggcttgctcctgatagtgacatgaggcagccaaatgcctaggcagagaggggagggtcccaaatgaaaccccacgttcaagcaaagatcagcctgaaggctaaaagaccagattgctggtcctggatgaaacccaccacgcagagtgggaacttctgttcctgtttgcccaccctttcccaattgttctttctgaataacgccttaaccaatcgaatgttgccttttccagtaatacctacagcctgcccctccccccattctgagcccataaaaagacccagactcccccatattaaggggactttcctgcctttgggtagggggaccacccccacgtctcctctctgttgaaaactgtttcatcactcaataaaactcccagctttgctcactcttc

SEQ ID NO: 237536 - DNA, 390 bp, Homo sapiens
agagccagatgacctgggagcatgtcgtcgttctgtcactcactagtcatatgaccttgggcaagttacatagccagcctgagcctcacatcctcatctgtaatgcatcagttgtcacgttcctcatgggctgttgtgagactgaaggaagttcactcacatatagagggcttggggcctgacacaaactgggtcaatgtgtctgctctggtcatgatgctgaagcaatagctcagtgggagaaacgggaattgacggagagtcaggtagacatggttgggtgtgtcgcctgaatggagagaggagaactgggaagaaaatgttagcagaataaagccggggcaacagagcttgccagggcatagaacaagggcgcaggtttacttgtca

SEQ ID NO: 237537 - DNA, 495 bp, Homo sapiens
  misc_feature (7)..(7): n is a, c, g, or t
cccccgngctgcaggaaattcggcacgagacctccattttaaaaaagctttttaaaaaagtaaatgttgccacattatctgctatagacaagtagagcaagtagggaatcatgtactgaaactaagaacatcacaagccctagatttttaggcccaataagccactaattaactgtaggatcttaggcatgcaatttcgtctttaacaagtcagttttatcatctgtaaaatgaggaatgtgttcagattagcatttgtgaaagtatgtttggcaaaatactaatttttcagaatattttttaattttttttttttttttttttttttgagacagagtcttacactgtcacccaggctggagtgcagtggcgtgatctcggctcactgcaagctccgcctcccgggttcatgccattctcctgcctcagcctcctgagtagctgggactacaggtgcccgccaccatgcctggctaatcttttgtacttttagta

SEQ ID NO: 237538 - DNA, 278 bp, Homo sapiens
tcagaccgaacattaccaaagccatggcctgaccgagggatggcggcggcggggcagagaggccgtccccatcccatatggtggtccggttcactcttccctccccgccttggtgttactcatggaacccccctctcacggagggcacagaggggctgttttctcccacggccctcggaggtgacaaaatcaacaattgtttgagagcctcaaatctccttccccctgtccccccggaccaggtggcccctggggagaccctgccgccctacaggtgt

SEQ ID NO: 237539 - DNA, 671 bp, Homo sapiens
gacactgattagcatgggttacacatgtgaatgagatatggtcctctgcctagcaagggtttgcaattacattataatactgtttgttggtctttacaacataatacacatgtaatactgtataatgggggttgttacagaaatactagcaaagtaataaagaagtacagcattgaaggtagaaggtagtcttaaagaatgagttaagatttatcagagaagcatgtgttgggttttaggcatgtgcagtgctacagtgttgtgaaaggtatagacccctgaggaaatagaacttattcagagtgtcgggactacaggatgtgttgctgatgggacaggggatgatctagaaatgtagattgtgatcagatgtaaaatgtttgtatgtctagcaagtgagtgtgaactttatcctgtaaccagtgcggagccaatggaggtttttcagcagggagtgatagcatcctctttcttattttagaaagataaatggtgcaaatgttggagaatagagaggatagagagaaattggaggcaaggagaccagagaggaaattattggaataacccaagggatagatccttactgcctaaaccagaacagtactattttgtatagtgaagaaaggatggctctgataataaaaggtttttagtagtgagaggatgag

SEQ ID NO: 237540 - DNA, 396 bp, Homo sapiens
ggcaaaagcttagaggtgacaattgaagagactctttctggcaatatttgttctttctgaggaaaaatgcccaggctctcggattgctcctaccatctcatctcactttaagatgctatccaagtaggccgagcacggaggctcaagcctgtaatcccagcactttgggaggcagaggtgagtggatcacttgaagtcaggagttcgagactagcctgaccaacatgatgaaaccttgtctctactagaggatacaaaaattagctgggtgtgagtgtgtgcacctgtagtcccagctactcaggaggctgagaggtgagaatcgcttgaaccaacgaaggggaggttgcagtgagccaagatcatgacactgcactccagcctgggtggcaggcc

SEQ ID NO: 237541 - DNA, 603 bp, Homo sapiens
gttaaatcaaatattatatgtgaaaagtgttttataaactgtcatatactccccaaatattagttacctgatatttttgaacttattagaggcatttactttaataattttcatttatacatatacttaaattgtataaggataaacattttaaagttattatcaattggcatgaattcttaagcataagcaatgttttaataattttgttaatgtgttaaagatcttaatgaaggataaaatattgctggactttcaagtagttaaggaatgttctgtaattggcaagggtgggaacaaaaaaatgttgacaaggtaacacatcatttttcagtacagtattggttttgacaaccttttcttgataggaagacagaaactgaagtgtcaggaattgctgtattcaccatgaaccttcctatgctctgatgaaaacatgaatatttgttataagcaaatgaaatggagctgcagctatcactatgtactctgtgggcctttaatacagtagggattcctttatagatatacatagatttaaattgaaaaaaatggtctttgctgtttgagctcagttgtttagttagcctttaaaaaaaaaaa

SEQ ID NO: 237542 - DNA, 412 bp, Homo sapiens
acaggaaggctgaaccctcacatctgtggtcaattgatttttgacaagagtgccaagccattcagtggggaaaggacagacttttcaacagatggtgctgggacaactggatctccaggtttgtgagtgaatgtaactaaaagaatgaagctggatccttacctcacaccatacacaacaattaactcaaaatggatcaaagacctaaatataagagctaaaacgataaatccgtctcaggaaaacatagaggaaagtcttcactggatttgcaatggatttaatgcagatctctgatggagttggtactggtgtcttggatatgacaccaaaagcacagacaacacaagaaaaaaagaaattggatttcatcaaatttaaaaacttttacacatcagtggacactatcaag

SEQ ID NO: 237543 - DNA, 422 bp, Homo sapiens
catttgcacttacaggccacgccatgctccatcctccccatcctgcctgggaacctgaccaatgtggctaaaccagcaggctccctggctgccagcttctggctggttgagccaatgggaagcatgagaggagagccgagggtggggagacagtcagatcagggtttctgtcctcagggctccctccctggcaggtggtggcaggagtggctgcattcccctctgaaggctccttcaagcctctcagcaaacagctcccatctccaagtccagccacctgttccatcctctcctctgtaggcccagcagtgggaatgacccaccactattgccagcctcagcatactgaagcaccccttactggattccctaaattctatgcacatgtttattaaatgctcctcaattacccagtttcaatg

SEQ ID NO: 237544 - DNA, 483 bp, Homo sapiens
tagtcagctcaggctgtggaaacaagtcaccacagatgggggctcaagcagcacaaatgtatccctcacagttctggaggctgggtgtccaaggtcgaggtgccagcaggctcggcagcaggctcggtttcttccgggttttcctgggcctgcaggcgctgccttcctgctgcgtgctcgccgttcggtctgtgtcttggtgtccttgtttcctcttcttaggcggacactggtcatagcagatccgggccccacttgcgtggcctcattttaccttacgcatctctaagggccacatctccagatacaggcactcgggggcactggggttaagacttcagtatgtggatttcagggagacagaattcagcccacgacgtacatggaggccgcattttatttatccatctgtcagttggtagacgtttgggttgtttcccactgtaggctgctgtgaataaagcattcgtgtgtgagtttttg

SEQ ID NO: 237545 - DNA, 2086 bp, Homo sapiens
  misc_feature (1191)..(1191): n is a, c, g, or t
  misc_feature (1207)..(1207): n is a, c, g, or t
  misc_feature (1216)..(1216): n is a, c, g, or t
  misc_feature (1240)..(1240): n is a, c, g, or t
  misc_feature (1291)..(1292): n is a, c, g, or t
  misc_feature (1354)..(1354): n is a, c, g, or t
  misc_feature (1370)..(1370): n is a, c, g, or t
  misc_feature (1389)..(1389): n is a, c, g, or t
  misc_feature (1418)..(1418): n is a, c, g, or t
  misc_feature (1422)..(1422): n is a, c, g, or t
  misc_feature (1427)..(1427): n is a, c, g, or t
  misc_feature (1438)..(1438): n is a, c, g, or t
  misc_feature (1444)..(1444): n is a, c, g, or t
  misc_feature (1473)..(1473): n is a, c, g, or t
  misc_feature (1487)..(1487): n is a, c, g, or t
  misc_feature (1556)..(1556): n is a, c, g, or t
  misc_feature (1580)..(1581): n is a, c, g, or t
  misc_feature (1583)..(1583): n is a, c, g, or t
  misc_feature (1604)..(1604): n is a, c, g, or t
aaaaaagatatttatgagaaaactattgaacagtgactgtgttgtacccgagcaagttagaggaacgccacactttgagacgaatttaaaagtcctttatttagctggcagccaagaggtggctcacacttggaattctctcagctccgaggaaggggcttgattttcctttatactttggtttaggaaggggacgggagctcagttgcaacaattctacagaagtaaaaacatgcaaaaaattaaaaagacaaatggttacagagaaacaaacagttccaggtgcaggggctctaaatctatcataagatgtcaggtgtgggggctctgccagacacaaactcaaggctttatggtgtatctcttgagcgaaatcctgggaacttcgtacattgcttgcttcagtaccttatgagttaattggactctttgatatgttgagagtcagcttacacaagttaactccttgaggaaagggggtgggtaaggagtccttgatgtcctgtaaatgaaggaaccaaatggagttcctccggctttctcagctaagggagagcttattcacatggaaacaaggctaggtgattaagggagaaagggacagtctgaaaacaaggttagtaaaaacaaggttaggtattagaactgcaaagagtattaagtgaaataagtgaaggaaaatatgagctcttattttttaaaagttgtgttggggcaaatgttaaatatctttctttctctggacattattaagaaagatagagtgatgtgaatgataggaagcccacctgtaaccacttagctgacatgtccaactatgggtgaacaggaaataagcgacattcacctaggctgtttattggaatctgactagcattatttgatttggcatactttacatgtccagaacaaggctgttggtgcttggcaccaagaaatttatgactttttttttttttttaaataaagtcctaaaggtagcattaaaatgacttaactggaggcaggaggatcactgaagcccaggagtttgaagctgcagtaagctaagaaggtgccactgcactgcagcctggatgacagagtgaaactttgtctcttaatagacctatggactgaagttgtgatattgagtgttatatttctcaataaaggttttttcttttaatactgtattaggtcaaattcaantcttaattccttgaantccaatttncttgtgaaatttcatgtgattaanttaaaattccagggatcctatctaacatcacagttgatggaaaaatgtatnntgagaaatcagttttggtgaacagtaacagcattactgataataggcaacaaacactactgnattttatttctgatangcattataggtggtaatcnaaatgattaatgattttattgctctttanattntctanaacaggtgatntgacanaattgtacttttttctgagaagttggtantgtacttactactntattttgtagttatacaataaatcttacttagctgacaactaggagtaaaagctctgacaaaaagcctntgctgtaactaaaatactgagatnntnctatcttaacaaacttaacanatggggaaggggtatattttaaagatggagaaatgatgcagtttgcaaatatagtcaataaatattctcaagtgtacgtagctcaatttcatttgcagcaaagataacactgaaatgtctatggatgagattattggataaacttttttaaaaacactgttctcaagataggcaagtgattaagagcactgactgggccgggcgcggtggctcacgtctataatcctagcactttgggaggccgaggcgggcaaatcacaaggtcaggagatcaaaacaatcctggctaacaaggtgaaaccccgtctctactaaaaatacaaaaaaattagctgggcatggtggtggacgcctgtagtcccagctactcgggaggctgaggcaggagaatggtgtaatcccgggaggtggaggttgcagtgagccgagatcgtgccactgcactccagccggggtgacagagcgagactcccacccatctc

SEQ ID NO: 237546 - DNA, 485 bp, Homo sapiens
ttttcaggatagaaaaagtaatattgcaaatatatgtatttaaaatggtagtgttgcatctgataggttgagaaccactagctaagccttcaaaggtgcatgttcccagcacatgtaatggccttcttcagctgtatgattcccagcttcatacagtcatttgagaagtactaaggcagtgctgaattgcaggaccgagatcagaaagaaaatctccaataaatttggaccatagtggaaataagctaaaattaatttttacaaaggtaactgtaaaatacccatatgcttggaagttttaaaactatttgcaaatttcaaaaacccctcacaattaatattttaaaatagttgaaactaattgaatgtaaacattgataatatcaaaacttctgggatatagctaaactatacttagaatatgcatgtaataaaagaaatgcatgtaagactgaaatgcatgtaataaaagacagttgaaatca

SEQ ID NO: 237547 - DNA, 486 bp, Homo sapiens
agcaaacactaagagaattcatcaccactggactaatactatagtagaggctcaaaggagtcccagacatggaaacaaaaggttgatatttgccatcataaaaacacatgaaagtataaaattaataagtctcataaaacaattacacgaagaagagaaaggaatcaaatggcaccatgatagaactccatgaaaccacaaagacagaagaaaaaataaaacaaagaatttacaaaacagctagataacaatatatttcagtaacaagatgtcatatatcaatgttaaccttgaacctaaatggatcaaatgctccgcttaaaagatacagcctgactgaatagatttttttaaatgacacaactgtgtgatacctagacacacagatcgactgaaagtgaaggggtagagaaaaacatgctacacaaacagaaagcaaaagcagtaagaatagctattcttatgccagataaaacagacgttatg

SEQ ID NO: 237548 - DNA, 999 bp, Homo sapiens
  misc_feature (798)..(798): n is a, c, g, or t
agatggtgccgctatactccagcctggttgacagagcaagactctgtcgagtctcagaaaaaaaaaaaaatcacataagtcgtggtccctgccttcaaggagctcacaacatagggaaccagaaacaaacagttgagtgttaaatgctaataaaggaagagtagggggtgcatggtggctcaagcctgtaatcccagcactttgggaggccaaggcaggcggatcccttgagtcccggagtttgagaccagcctgagcaacataataagacctcgtttctacaaaaattagagttagtgtggtggtgtgggcctgtactcccagctacttgggaggctgaggcaggaggatggacctgggaggtcaaggctgcagtgagtggtgattgcaccactgaacctcagcctggacgacagagcaataccctgtctaaaaacgaaactaacaaaaaagttaacacttttaagaagcattcttacgtaaaataaaataaaaaaactggcaataaaaaaaaaaaaaaaaactgaactaaaaaaaaaaaaagaaaaaaaagcacaaaaaaaaaaagaagggagggaatgatgacaatgtctaggatgactggtataatgaacaacgaactgaactagataaacatggttataacatggagactctctagtatccagaacaagagttgatgtgacctaaactagatttgctaaatacgttatatggcaaagaatccagtatgggacgctaatacaatgagtggataagcttaactggtaaaaggcaaatgtcgagctgtaagacagnagtgaaatgagcggatattaaagggaaatgaagctaatttatgtgggaatgggtggaaagttgcaacttccgtgattagtattatcaccggatataggttaaagcttgctcaatgttaaacaagagcgaatttaaagaatggggacttaagggatatggggtataagggggaatgggccatgtaaatcttgcggccttggg

SEQ ID NO: 237549 - DNA, 994 bp, Homo sapiens
agatggtgccgctatactccagcctggttgacagagcaagactctgtcgagtctcagaaaaaaaaaaaaatcacataagtcgtggtccctgccttcaaggagctcacaacatagggaaccagaaacaaacagttgagtgttaaatgctaataaaggaagagtagggggtgcatggtggctcaagcctgtaatcccagcactttgggaggccaaggcaggcggatcccttgagtcccggagtttgagaccagcctgagcaacataataagacctcgtttctacaaaaattagagttagtgtggtggtgtgggcctgtactcccagctacttgggaggctgaggcaggaggatggacctgggaggtcaaggctgcagtgagtggtgattgcaccactgaacctcagcctggacgacagagcaataccctgtctaaaaacgaaactaacaaaaaagttaacacttttaagaagcattcttacgtaaaataaaataaaaaaactggcaataaaacataaagactaagatgataaacagtctatataatatataaaatatgcactaacatctctgtgataatatgcacatattttagaggtaatcatgtcttctagattacttgtgtgcatttgattgggcttgttgtttagggtcccttttaaaattaattcattagattgatgtattctatatttctgatagactggacagaaggatctgtgtccccaagtgagacaggctctgaataacctttgttttctgcactttttattgatgatttgtgactcaactggatacaggtgctcaatagttaggctttgtagtgatgtcaggacgcattacaagctgttagccgatactgactgggcattggcaccatccttgacttaacttcctttttttctctagtgtgcctatggtgtggaatagcattactggcgattttgcagtgctcaggaagtgggacgttactttgaagtgcttgtttgtttcttgc

SEQ ID NO: 237550 - DNA, 3314 bp, Homo sapiens
  misc_feature (1070)..(1070): n is a, c, g, or t
  misc_feature (1555)..(1555): n is a, c, g, or t
  misc_feature (1965)..(1965): n is a, c, g, or t
  misc_feature (2043)..(2043): n is a, c, g, or t
  misc_feature (2053)..(2053): n is a, c, g, or t
  misc_feature (2213)..(2213): n is a, c, g, or t
  misc_feature (2225)..(2225): n is a, c, g, or t
aaaaaaaaatgtatttgaggcctgcatgatctcaactggctgtaaatacctttcagatttcctgggttattgcttagtcttctactgttcctttccgtctttatctgaccaattcagagtcctgcttcacaaatgccaaaccattttagtttctgtataatggaggcatttttttcctctttaggtcacatgtctttcacagagatttttgtcatagatgtcttgaaataggaactgtaaaagacattatttttgaacgtttgaacattgctttttattttctcaaaggagtttgcacatgatcaacagatatattcatcaaacccacctacgagatgagaaacccagactcaaaagttgaggggaggagaagtgctctactttgagaagaaacaacagaaattaagctcaaatgtcttataaaatgaatcctgaataatccttttacattcaaacattttgacagtttttgggcatgagaggaggagtgaggagtttatttggagcctaaattatctccaaattgtttgtttgctattaaagggctgaaagagaagtaagcaaaacaaaaataaaattccactggctctccactatggatgagaagttgcacaaaggcctagctgtttcgttggtggagagctacatggctgcccaagttttgcaatagaacttagagaatggccttatatgggaattaaggatgggaagcaaaatgtgtttttgaggacttaaacagacactccaggtggtgcagacaggtgcagacagcattgacataatgtcacctgcatatgtacatggcttaggccttttaaagcccatttacctgtgctattgtgttgaattttagctctaaaataggttgtgatttgatcttgttaccaattcaaaaaatcagttaggcatacctagtaggtcatcttgtctctgcttgaaagtttccagtgatggagagctttctgttggccaggtaatgtattttgtggctggacagcttttattgtttggaaattattctgtgtatagagttcaaatatattttattgaaacttctatctactggtttnattgtaactgctacataataatttttcttcctcatccacacaataacttcaaccatttgaaagcagttatcagaactcccttaaatcttcacatctccaagctaaacacctctcattttctcaaccaagcctttattaatatggtcttcatctcctcctagctctgttcaccttctcctagaatagatttctggcatctccatgaccctaagcaatcaaatcttctggtagctccatgactttaataacagtatattaaatgtttcctgaccaatatagggtgattgttagcagcctctattgagattttttatttcaattactgccatctaggattatgatgactattttagcaaccattgttagctcaaaaaaagcttgtggtcaaatgacattaacagtcccttttccataacaactgtgactcatttctcctcatttaattccttctcatcttcttaagaacgagcaacctacatgaaaantttcaagggttagaacagatcctgtcacctcaatttaaagtagtactagataacatttactggccactgactaaaggccagtcattagaactgttctgagtaattttcctacaataactcactaaatgctcataataacccttgggggtaggttctatgaatgctccatttgaaagatgtgcaaatggaagcgtggagatgtttggtaacttgcttaaattcacacaatttgtaactgagagaggtgagatgcaaacacaggctcttcagcccatacccttcaccctgctttctagctggtgcacatagttagtagtcaacaggaattgaacctcggtctcctggctgatagatcaatgttctctcctcaccccggtgtggccttcctgaagtggtaacaagtctttcanttttgaactttatataagctgttttgttttgcttttatacaaactgagattcatgacccattatgaattcaatttagngggtcaatanaagcaagagaaaggaaaaaagaaaagagggagggagagagagaaatatcaaaagacatcatacagagtaagtgcaaattttgtttctttaaactcttattttaacatgtgtaaaatgcacacaaaaatacctatttgtgtgtgtgtgtacagaatatgangaaaagtgtatntcttatctctctcatacggtcaaaacagtttgagagttgctgcctatctattgtatataccaaactttgtccatttctttatgctaaggttaaacagggattggaggggacactttagttttaaaactccactcttgatctgcagccagtaagagcacaacttgcaactaagcagaaagttcaagcaaagaaccttagagtgaaaagagatgactgagggctgaaataaaaaacaaaaagctattccaatttcatttgagtttccattcagcagcctcatagattcctaactcatcacctcaagcaggtcacttcccctctctccaagttgttcgccagaaccagccaaagaatgcaggaaatggtactctctttttctgagtgaatcttggcaaaatgacttcaatttagccagcagtgcaggaagcgattgtaaatataaatttgttttatatgctcctcccaaaggagacttgcagtttgcctccctagtaaacagggatgtgtattcctgatcatcttacttggatcattttttttttcacccttctatgtagcaatgtccttaattgaggtagtaatattgggcttgttggattgtcatgaagtttaatttgaatgttaaaggacccccttggtgctcagataaaaatcattatataaggaggaaaagaaaattatgttgactaattataggtatatagaattcccattcattatgtccacaatgatatgtatctgaatatgatatgttgtagactgaaaatagtaactctccctggttatttccacagtcactttaggcacttgggaaaatgcattctcccattttattcaattaaagtatgtgtaggaatgaggcaagtacagtacaaaaatctccaggaatcaacaaaggaccaccaagagaatttaaatggatttcagccattgtaaacagaagacaatttaagtccaattcactgttgaaaacttaattgaggctgggcaccgtggctgctttgggaggctgactcaggaggattgctcaaggccaggagttcaaaagcagcctgagcaacatagcgagaccctatctctgcaaaactt

SEQ ID NO: 237551 - DNA, 404 bp, Homo sapiens
catttcaaagttgaagtaactgagatggtcaccccgggagtaaatggcccacccagctgttgggatgagtacatagctaatgtgtgggcccagaagaaaggccatggcagcagggtggctgggaggtagcaggctttgcacgtccagaaaattctgttctctcaaaatcaggaaatgtctccacactttaagatgcagttatcctctcctggttggaattgattgcaacatacttcaatttgtgggttattggaatagctggggaaagtctgaaggtaattagacctggatagaccaaacatgtgtggcccaaagaactgaacagtctgtgattagcaccttgatctgaggcccacaggtaggtactgggaaatttccgtgcactttggcttttgaggcagcct

SEQ ID NO: 237552 - DNA, 442 bp, Homo sapiens
cactgaagtcacttgacataattattctatgtggtatgccatcagtctaatatacatttaagtttgtttcagtttgttttcaatttgaggaattgcgttttatttatgaagtattattatttaattgtgcaaataattttcattatttctaagtcaaaccctataccaaagtacattcactggagtctcctttccatccttaatcatcgcacactattctctcctccctctaacaggcagccatttaaaaatttttagttttcattatttgaactaagtgtatatatacacctattaatttttatgtctgtatgtatacgtgtgtgtgactgtgtggataagtgtgttatatctactaatagtaccactttttgagatttctgagatgctttaagatattcaagatacaatgcagaataggcagttttgttttgtttttttt

SEQ ID NO: 237553 - DNA, 369 bp, Homo sapiens
atatcatccatctctggaagatacagggcagctcttcaactaatgtgttcccctaaagtctggtgtgctctgttggctccaacttgagagaagcccccaggaaagaatctgggaggggctttgaccatggacaatactgtggagaagagggagatgtacgtgcgaaagggtaagcttgagctggatgcttggtggtgtttacctgcttttcctcctgctgatgctggtatatgtcagtattagatgataaatcaggtggttggatatccaagtctagagtggtctacactaggattctggtaggcagaaagctgcaggaagcaagaagctggaagccagaagcaggatgcagaaagatgcagtactgat

SEQ ID NO: 237554 - DNA, 456 bp, Homo sapiens
aaatgatttatgagctgaaagataaaatagccattttaagaaagaagcaaactaaacttctggaactaaaaattcactgtaagaatttcataatacagttggaaccattaacagcagatagactgagcagaggaaagagacacagagctcgaaggccagttcttcaaattaactctgtcagatgaaaataaagaaaaaataatttttaaaatcaataaaacctccaagaaagtggaattatgtaaaaaaacaaatttgtgactcactgtcatttctgagagaggagagagaataagcaacttaaaaaacattttcgagtagatagtccatgaaaatttttccaatattgcagagactgatatgcatattcaagaaatacagacaaaccctgtgacatattatataaggcaactatcaccaagtcacatactcatcagattctccaaggtcaaagtg

SEQ ID NO: 237555 - DNA, 600 bp, Homo sapiens
cgaggttatagtgagctgtgatcgcgccattgcactccagcctggggacagagcaagaccttgtcttttatgaaaaagaaaaaaggaatcaaagcattcttggatttgaaccagtaaattccaggcatgtttcccatgtgccagaaactcacaggtacaaagaatgtgagattgtagaaaactggcctccttttcaaggagctcctcagctgttagggagagagattttagtgtggattccccacaaactgcaagtttcacagccaagggctaggaagggagtcctcctaaaacacatagactgctaaccttaagcccatcctttaagcttcagagaaacatctaggaaaaatgaaccattaataaattaactgaattttctagcaagttttctgtgctgaccataaatattaaagccctgtcctgtattgtgtaagtatgttttaaaatcacatttgtatcagagtcttttagcatcttggtctgttttgttgtgatttggtgatgctgccatgaagcgtctacttccccacaactcagtggcgcatctcctgagaaacttgactcctgtgttcagatttttggaagaacatccaggtt

SEQ ID NO: 237556 - DNA, 132 bp, Homo sapiens
aagtatcaaacaccataaaattcccatcactgttctggagacacagacgtaaatggaaaatggattcctgttgtaagtaaagatcaccaggctcctggggagatggatcccagatctacccccatccaccac

SEQ ID NO: 237557 - DNA, 419 bp, Homo sapiens
gaaaaagagccctggcaacacatgtttcagatcacagtgaacagctgaggcaatttttttggtaatttaatattaaatattagagacaatgtatatggtgccgtcatttcagttactgattaaaaataagctctgggcaagtaactttctttagctttctattctgtaaaatgggaacaataaggcctaacgctacagtcagcgtccattataataagcatatttgcaatggctttctttttcaaaaaagatttccaagccattggtcatcttttgtatgtgaacttcgatacaacaaaatttcaactggccaaagaaattgggcagtcttctgccattcattgtaaagaggtttgatttctagcaccattatttattatcttggaaaaaataaagacaaaaacttgaaaaaatatata

SEQ ID NO: 237558 - DNA, 438 bp, Homo sapiens
tcaccgtgtcaagtatcagtggctccactgcggacttcttccacacctgtgtcactgagacaattgaccagtgagttccacaagcacccattgccagctttagcctgcagcagctcattagacctctaccgtccagttggtcatgtccacaactcctccaacatgttttggatctcagccctggaggggaggggactattccaaatttatttcttccttgggtactttgcctcagccctagaggtagtggctgctccctatatatgctattcctgtaatatgtaacactttctaccccttctatagtcggtcacttgctcctagttgataattctctttattaaaattttcaaattactgtctggttttctgtctcctgactggacttgacctactgtatcattgggagcaagatgaaataaactagaatattgtgca

SEQ ID NO: 237559 - DNA, 993 bp, Homo sapiens
ctacagattactgtggaatacatttgatttctggttccagagatactacatgtatgatatggcaaataacacaacagggaggtgttcctgtgggcttagcatctaaaccttttcagattctttatggacacaccaacgaggtactgagtgtcggcatcagcactgagctagacatggcagtgtcaggatcaagggatggaacggtgattatacataccattcagaaaggtcagtacatgaggactttacgaccaccttgtgagagttctctgttcctgaccattcctaatttggctatatcttgggaaggacatattgttgtctactccagcactgaagaaaagaccaccctcaaggataagaatgcattacatctgttttctataaatggcaagtatctagggtctcaaatcctgaaggaacaagtatcagatatatgtataatcggagaacacattgtcacaggcagcatacaaggattcctgtctataagagatctccacagcttgaatctcagcatcaacccattagccatgcgactgcctatccattgtgtttgtgtcaccaaagaatacagccatattcttgtaggtttagaagatggcaaattgattgtagtgggtgttggcaagcctgctgaggtaaaacctagcatcagtaatttcatttctcatgctgttggggattactttggttctccttcattccaactgattgagaagtcaccattagggataaacaaattaaaagccaaatttgatttttcaaaaggcagtaaataaaaacaggataagctgttattcaagaatcatgtttatgttattattgaaagcccacctttggcaattctatctaccactctataggaataagacagttcatttcttccaaatctagattcaagaccacaacttagattttcaatacataagagcctttgcaaaagaataaaatataggctcaaacaataaaactactttagttttaacaaat

SEQ ID NO: 237560 - DNA, 394 bp, Homo sapiens
tacctgaggatctctcttctcgaaaggcacatacaaggatcctgtctataagagatctcacagcttgaatctcagcatcaacccattagccatgcgactgcctatccattgtgtttgtgtcaccaaagaatacagccatattcttgtaggtttagaagatggcaaattgattgtagtgggtgttggcaagcctgctgagatgcgttcaggtcagctttctcgaaaattttggggatcgagcaagcggctcagccagatttcagctggagaaactgaatataatactcaagattccaagtgattgttatttccattttctgttatgattactgaaacctgatttattgctttgtcactttaaccacatctctcaactctctgcaatgttgcaagg

SEQ ID NO: 237561 - DNA, 996 bp, Homo sapiens
ctacagattactgtggaatacatttgatttctggttccagagatactacatgtatgatatggcaaataacacaacagggaggtgttcctgtgggcttagcatctaaaccttttcagattctttatggacacaccaacgaggtactgagtgtcggcatcagcactgagctagacatggcagtgtcaggatcaagggatggaacggtgattatacataccattcagaaaggtcagtacatgaggactttacgaccaccttgtgagagttctctgttcctgaccattcctaatttggctatatcttgggaaggacatattgttgtctactccagcactgaagaaaagaccaccctcaaggataagaatgcattacatctgttttctataaatggcaagtatctagggtctcaaatcctgaaggaacaagtatcagatatatgtataatcggagaacacattgtcacaggcagcatacaaggattcctgtctataagagatctccacagcttgaatctcagcatcaacccattagccatgcgactgcctatccattgtgtttgtgtcaccaaagaatacagccatattcttgtaggtttagaagatggcaaattgattgtagtgggtgttggcaagcctgctgagatgcgttcaggtcagctttctcgaaaattttggggatcgagcaagcggctcagccagatttcagctggagaaactgaatataatactcaagattccaaatccagaataacaaaacaacagagatgaacatgaacctttagctactagcaccatccattcactatactacactttattgaagacacttcattagaattggaaacttcctgcgttaattcatctggtaagattctcagtcactggacaatcaaagccatgttagttacgtgcttcattaagactgccttgcttttgtaaaacaagttcataacaccattccaagcatcaaataaatctgtttgtttcacacaatgaa

SEQ ID NO: 237562 - DNA, 793 bp, Homo sapiens
ctacagattactgtggaatacatttgatttctggttccagagatactacatgtatgatatggcaaataacacaacagggaggtgttcctgtgggcttagcatctaaaccttttcagattctttatggacacaccaacgaggtactgagtgtcggcatcagcactgagctagacatggcagtgtcaggatcaagggatggaacggtgattatacataccattcagaaaggtcagtacatgaggactttacgaccaccttgtgagagttctctgttcctgaccattcctaatttggctatatcttgggaaggacatattgttgtctactccagcactgaagaaaagaccaccctcaaggataagaatgcattacatctgttttctataaatggcaagtatctagggtctcaaatcctgaaggaacaagtatcagatatatgtataatcggagaacacattgtcacaggcagcatacaaggattcctgtctataagagatctccacagcttgaatctcagcatcaacccattagccatgcgactgcctatccattgtgtttgtgtcaccaaagaatacagccatattcttgtaggtttagaagatggcaaattgattgtagtgggtgttggcaagcctgctgaggtaaaacctagcatcagtaatttcatttctcatgctgttggggattactttggttctccttcattccaactgattgagaagtcaccattagggataaacaaattaaaagccaaatttgatttttcaaaaggcagtaaataaaaacaggataa

SEQ ID NO: 237563 - DNA, 477 bp, Homo sapiens
cagtaaggagtgtgagacacatcagtgtcctcagatacacatctgtctactcatctctgggagggtcaacaaggagctgctggccagggtcacctcctgggagggggctggggaactggggatgggaatgggggatatatcccaggcaagtaagaagacttggtcaaaaggactgcaagatatccagacttcacatgaatttaagaaataaaacagacgcgggtggatcacttgagctcaggagttcgagaccagccttgccaacacagtgaaacctcatctctactaaagatacaaaaattagccgggtgtggtggcacacacctgtaatcccagctacttgggaggctgaggcaggagaatcacttgaacctgggaggcggaggttgcagtgagccaagatcacgccactgtacttcagcctggacaacaaagcaagtttctatatcaaaacaataaaaaaaaagctgggcgtag

SEQ ID NO: 237564 - DNA, 426 bp, Homo sapiens
gcagctgcgagtcttgcaggagtttagctttgggcaggggcttgatgattttaagcccccttcgcaagttcagatccttagacagcaactctgggacctgcttttcctggactggctggctctgggttggtgagctctgtttgctcgccatcgttctgtggacctttaactccccatctttggaatccactgtcccttcagcgacagtgttcctcatggggcaggggcaacacgtgctggctggagaaatgaaaaatcaaaaaactggctttggcagtttccactggtgcctctgtgctctctggtcacctttccgaggcgtctggtaactagtgcgagaaagtagatgatgcagtatttgttagctccggagcaattacctcatgtctgagtcttgctgcaacatgaggtcagcccaagaaacaa

SEQ ID NO: 237565 - DNA, 535 bp, Homo sapiens
aagcgagttcacaaacttggaagaagccactttcacaggatgcacagatctcaacggaaggacacagaaaacatgaaaaagcaaggaaatggggcgcctccaacggaacccagtaattctccagcagcagatccccatccaaaagaaacagaagacattttggagagagaattgaatatacatattatacagttgtgggcataatacaagcatcatttggaaaagaacagagaaaaaagatggaaggagttaccgtactgcaggaaaaaattatcaactccagtgatattattaaatacaacctaacgacacttctgaagctgaagaaatcactggatgaaatacaaagtaaactcaaaagcttcagtgatagactagaacaagaagaagaaagactctcaaaacttgaaatctgaagcatgtttcttaaagatttaaagggttattatactctggccattaatgtgaacgaaatctgctgggttaattcttatactggggtcttggataatcattaaagtgaaatgagaataat

SEQ ID NO: 237566 - DNA, 502 bp, Homo sapiens
  misc_feature (243)..(243): n is a, c, g, or t
caattcattgagtataaatctaacaaaagacaaacaaatatgcattcaggaaactgaatcatggttgagaggaataaaaaatatataaataaatgcagatagtcctcgtttagaaacaataacttactattgttatctttaccacaaagctaaagtaatgaagagtgatattggtgacggaataagcaaaaagataaatggaacacaatagagaacccaaaagacccgaataaatacagttanctgattttgtcatggggcaaacgcaattcaatggggaaagaaaagtctgttccacaagtggtgacagcacaacagaaaccatagtgggggaatgaacaaagacacaaacttcatggctcaaccaaaaaatcactcaagataatctatagacttaaatttccaaatataaaattgtagaagttatagaagaaaacctacatggatttgggttggtgataaatttttagatacaatagcaaaagcaagtccatcaaagaaa

SEQ ID NO: 237567 - DNA, 556 bp, Homo sapiens
agcctcggctggctggcaggctctcgccgagccgggaaggctgcagtagtcaacgtggctgcgcgcccagcaggcgtgcggacggcttttgccgggtcggggccgcgttccgcacctctctgcggtggttcgcagtcagagggctctaaggccctggcaggctgtatgtaagcgtggaggctcgaacccactgccccctcctacccgtcggacccgcgctgttcccacggcctctggcccttggactcgtgcggcctcaccttcatgggtgccgatcaggacttcaccgagctctcaccggaacagagtcctgttttaaaaacaaaacgaactccttttttttttttttgaaagacctagcttttttaaaagacctagctcttctgtgtgaacagatgtcttgaagaatgcgtgatcttgctctagaacaaacccaaatccttgcaaatgttttgttttttaaaacaagcttttgccttttgtttttgcaggagatcaagggcactgggatataaataaacaaaagcctgacttagtagatgacttccctcccatc

SEQ ID NO: 237568 - DNA, 337 bp, Homo sapiens
gggctttgttgcaactattcaactccaccttctatggcaaaagcagcctccaacaacatgcacgggtgtggcggtgttccaataaaactttatttacaagaacaggtaatgggctaggcttggccgctgagctgtttgcagatcctgctccgaggcagaggaaggaagtgcaggagggctgcaatgagagcagaggccttgactgggagctggtgcgtcaagtgcaaagagccctggggcagaattcaaggcacctggcccaggtgtcccagccaacacccttgtgactttgtccccatcctttaaccctacagctgtcaggggtgcagtgggaact

SEQ ID NO: 237569 - DNA, 409 bp, Homo sapiens
caaagaagagttataaaacagagactataaatggacctcaaagcctaaaatatatactatttgaccctttatgagaaatgtttgctgacccctacccaaaatgattgaaggactcatcaacttgcttcatctttcccttgtcagcctctcatggaatcacctcctgtctccaagggcaccctcagagccaagcctggggatatattatgattctgagcctaaagatcatttggggatggacttgttgagaactaagaggggcctctgggactaagcacaaggtcctgagtaattttttttttttttttgccgggggggtgttgttgagggaagtgttggaaggaacacagcacatgttctagactcaagagtagcagcacaaatagagctcaaggagaccttctcaagt

SEQ ID NO: 237570 - DNA, 343 bp, Homo sapiens
ttcatttcaaagcgtgattgcctctagcattttccagctttaattccttcaggctgttttgatgttgtgtctgtacatctaagaatattgtaattcttatctttagaagccttgtcaatgtgaaacaaacagcaactgatgcaagttaatgttgacaactttatattgagtacactgtgtgttattttatttgtaagctagtgaaatatgcaagagtaacatagcatgactgttgttccccagggacccatatcaaaacaaagtggggaatcacatgaggctattccatggagaacaattcaattatttttaagatgaataaaatttaagattcttggttgta

SEQ ID NO: 237571 - DNA, 113 bp, Homo sapiens
cgagacctgccttcttaaggtctattctccatgtggccgctggagcaatcctgatacaagtcagatcatatcagccctctgctcagagctctgggttttctacccaactcaga

SEQ ID NO: 237572 - DNA, 598 bp, Homo sapiens
tctgggaaggcgcgccattgtgtgggtaccgggaaatgcgcccttaatgccgggataggtttcctgggtgcaaagaggaaaataagatggtgaatatgtatcattatctctgtcacacttaacgatgatttcagttgcagttggacaattcttggacctgctgtgcggtgtattacgtctgtccaaattgcatggatgaacacaaagtaattgtggaatgaaagctgggagatcacccatattcactgcaataattcaggtttttggagaacaggtggtgtctcgttacatgaatacgttctttagtggtgatttctgagattatggagcacccatcacccgagcagtatacactctacccaatgtcttgatctgttgctcaggctggactgcagtggcaggatcatggctcattgcagccttgaactcctggactgaaggaatcctcttgcctcagcctcctcagtagctgggactacagcccattttctgtctataaagccaaccacatctgctccattcatgggaacacctattctgttttactgaatgaagtggtgcctgaatctagaattgcaataaagccaaccgagatctt

SEQ ID NO: 237573 - DNA, 470 bp, Homo sapiens
ctcttgaagctgacaatggagggagaggactggtctgccaagagagccaaccctaaggtcagagaagagaagagagcccctgggtgctcagcagggtctgagcctcagtgtctgaatctgcctgtgactctggcgtcttggggggctctctgacaccctctcccttaccctctccctttagatcccttgcctttcactgctcttttctctgctactgtctcctggcctgtttgtctccccacccatctgcccaccatccacgtgacctttttgctgctggagctgctttttggggcctggctttccttctttcaccatctccttgtctctggactcttctcaggttactctttctggctgtatcttgctgagggtgtgtctgtgtctgattcttgcctatttttttttaggaggctaaaacggggaaaagagctcatgaccccaggataaaatccattcttttgtaacgt

SEQ ID NO: 237574 - DNA, 625 bp, Homo sapiens
tttaagtgcaatgctgtttactttcattacccattttacacatggatttttcttttaaaacttacagcaatagttgtaaatgcgtaaaaggcagcttgttctatttgtgatgctactatttattcagttctagcttgacatggtttatatgatttgagttgtatttttaaagaatgcatagatatcctcattattttaaaaacaagcctgctcttatgtttactttgcctaatgtaatctcaaaactaaacaaaataggcaagttaaaggtggaaaatagggacagaatattgttgtttttgagtgcatttaaaatgaacacgagttaaccatgaaaccttagtgactgaatgtactacacattttaatggcttgaaaacatgagctaagtcagttttggctttgttactaatgaacccttgatagataagcattgtttaaaaaacaaagtaggatactcttgttctcttgtatatatattgagttatctatttggtaaggaatgttgacactttcagtcttaatgagagggtagaatgtgcagtggctcatgcctgtaatcccagcactttgggaggctgaggcagtcggatcacaaggtcaggagatcaagaccatcctggcc

SEQ ID NO: 237575 - DNA, 3143 bp, Homo sapiens
  misc_feature (1813)..(1813): n is a, c, g, or t
ttaatggtcagaaacaatatttaaaaaaaaaatagccaacaacttcccaaatttgatttttttaaaaattgtgtatctaagaacctcaatgaactccaagtaggacaaaatttttaaaaacccacacttagacatatcagtcaaaccgttaaaagacacagaatctttaaaggagcaaagaaaattggtacatcacatgtaaggagtctcaataagattagcaactgacttcttatcagaaaccatgaaggccagagggcaatgggatgacatattcaaagtgatgaaagaaagaactgtaaaccaagatttctatatccagcaaaactgttattcaataatgaaaaaatgagataccacttcatttgtactatgatgagtataattttttaaatcaagacagaaaagtgttggtgaggatgaaaagaaactggaaccttcgtacatggctgatgggaatgtaaaacggagaagtcactatggaaaacagtttggtagttcctcaaaatcacagaagtactatatgatccaaggctgggcacagtggctcacacctgtaatcctaacactttaagggccaaggtgggaagatcacttgagctcaggagttcaagaccagcttggacaacatggcaaaaccccatctccacaaaaaatacaaaaattatccaggtatggtggtatgcacctatagtcccagctactttgtgggagctaatgcaggaggattgcttgagcccaggaggtcaaggctgcagtgagccatgttcacaccacagtgctccagcctaggtgatgacaaagtgagaccctgtctcaaaaaaaaagcctgggcacagtggcttatgcctgtaatcccagcactttgggaggccaaggcagcaaatcacttgaggccaggagttccagaccagcctggccaacatggtaaaaccccatttctactaaaaatacaaaaattagccagtcatgttggcacatgcctgtaatccaagctacacaggaggctaaggcataagaattgcttgaacccagaggcagaggttgcagtgagccgagatcataccactgcactctagcctgggtgatacagtgagactccatctcaaaaaacaaaacaaaagaagtattatgtgatccagcaattccactccatggtatagatccaaaagaattgaaatctggggcttaaacagatacttgtacaccattggtttgtaacattattccaacagccaaaaggaggcaaaaccacaaacgtcaccaacagatgaatagataacgtgttacataggtaccatggaatgttattcagtcataagaaggagtaagatctcatacatgctattgtatgtatgaaggaaagttgaaaacattaagctaagtgaaatgaggcagacacaaaaggacaaatattgttatgattccacttatatgaggtacctagaataggcaaatttatagaggctgaaaatagaatggaggatatcaggggttagtggtggaagtgaggaattattgtttagtgggtacagattttctgtttgggatgataaaagttctagaaactgataatggtgatggttgtacaacattttgaatgtatttaatgcattgaattacacacttttgaatgtttaaaattgttttatgtatattttgcaataattttaaaacaaaaaattcctcagaaggccaggcacagtagctcacgcctgtaatcccagcactttgggaggctgaggcaggcagatcatgaggtcaggagaccgaggccatcttggctaacacggtgaaaccccgtctctactanaaatacaagaagttagccaggcatggtggcaggcacctgtagtcccagctatttgggaggctgatacaggagaatggcatgaacccgggaggcggagcttgcaatgagctgagatcacaccactgcactccagcctgggcaacagagcaagactctgcctcaaattaaaaaaaaaaaaattcttcaggaattcacaataaactattagaaacgaaaaacaagttcagcaatgttttaggatacaagatcaatatacacaaatctattgtatttctatacactaataatgaagaatccaataatgaaattaagcaaacacttcagtttacaataatatcaaaagaacaaaatacttaggaataaactgaacaaaaagtctaagacttgtacaatgaaaaatacaaaacatcatcaaaagaaattaaagacctaaataagatacatctgtcttcatggattagaagacaagatggcatgattgccaaaaatgataaacagattcaatgcaatccctatcaaaatcccagttggctattctaaaatttatatggaaatcctaaaattcacatggaaatataaggtacccagaacagctaaaacaatcttgaaaaataacaaagttggaggacccatacttctctatgtcaaaacttactaagctacactaatcaactcagggtgttcaggcatagagacagacatatagatgaacagaactgagagtctggaaatctaatcaactgattttcttttttttgttttgttttacatttagagacggggtctcactctgtcacccaggctggagttcaccctggagtgtaatcatggctcaaggcaaacttgaactcctgggctcaactcccacctcagcctcccaaagtgctgggatttcagatgtgagccaccacgcccagcctacaatcagttgatttttcaacaaagattccatgataatccaatgaagcaaagaatagtctttttagcatgtggtgctggaataaatagaccaggcaatggtttctaatataacactaaaagtacaagtaacaacaacaacaaaacaactggacttcataaaaattaaaaacttctgtgcttttcaagggacactatcaagaaagtgacatgaaagcccacagaatgggagaaaatacttgcaaatcacctatccagtatatatcaggaattcttacaactaaacaataaaaagacaaccaaatttaattataggcaaagaatctgaacagacattactccaaataagacatgcagatgtccaataagcacatgaaaataccctcaacaaaattagccatcagggaaatgc

SEQ ID NO: 237576 - DNA, 736 bp, Homo sapiens
tacaattcttcttcctcagcttccaaaaagttggataataggcataagccccgtgcctgggtgttatatactatcttctgtaagaaactcatcaattaatttttggcctaacatatgaagtgagcagagatgatacctataaataagaagccaacatgaataagccattttgtttgttaaacagaagcgtgctatcatgaacaaatgccaaactagaagccacaaaaatgtaggttctatcttcactctgttattttattttacaatcctgggaaagtcatttattttcttccttttaaaaatggagttatagtaaggctaaaatgaaatcatgttccatagaaaccacttataatgtgtaaaatatcatgtaaatgtttatgaatgaacaaattaaatgtcacacactggaaaagggaacttgcacagagctagccttcgaggtactggctcatataaatactatgactaggactagatttaagggggatttccaaacgttttggccttctgccatcttattgttgatttttaagtttcatacatatttcttatttcaaagagtttttttggtgtaatgtacagtacaccaaattttacaccaatcagtatatgtataatatatgtataatagttgaaaccctgggtttgatgaatcaggagactagaatgctgaaagtcagataccctggccatttaagtacccaacaatttgtgttcatagtaaaggctcaac

SEQ ID NO: 237577 - DNA, 1025 bp, Homo sapiens
ttgagacagggttttgctttgtcactgaggctggagtgcaatggtgcaatgacataatcataggtcactgcaaccttgacctcctgggcccaagcaagcctcccacctcagcctcccaagtagctgagaccacaggaatgcactaccacacacagctaattttttttacttttgtagacacaggctctccctatgttgcccatgctggtttcaaacacctgggttcaagcaatcctcctccctcagcctcccaaaatgctgggattataggcatgagccaccgtgcctggcccagtttcacctttaaaaaataggttagataagactttaaatccatctaaggaatttgtgtttatatactatcttctgtaagaaactcatcaattaatttttggcctaacatatgaagtgagcagagatgatacctataaataagaagccaacatgaataagccattttgtttgttaaacagaagcgtgctatcatgaacaaatgccaaactagaagccacaaaaatgtaggttctatcttcactctgttattttattttacaatcctgggaaagtcatttattttcttccttttaaaaatggagttatagtaaggctaaaatgaaatcatgttccatagaaaccacttataatgtgtaaaatatcatgtaaatgtttatgaatgaacaaattaaatgtcacacactggaaaagggaacttgcacagagctagccttcgaggtactggctcatataaatactatgactaggactagatttaagggggatttccaaacgttttggccttctgccatcttattgttgatttttaagtttcatacatatttcttatttcaaagagtttttttggtgtaatgtacagtacaccaaattttacaccaatcagtatatgtataatatatgtataatagttgaaaccctgggtttgatgaatcaggagactagaatgctgaaagtcagataccctggccatttaagtacccaacaatttgtgttcatagtaaaggctcaac

SEQ ID NO: 237578 - DNA, 468 bp, Homo sapiens
gcattaaggtgaaggtttttgttgtaggcagaacaatggccccctaaagatgtccaaatccaggtccctggaatttatgagtaggttactatatatggcaaaagggactttgagttgtgattaaggggtgttatgggctgaactgcattgcccccaaattcttatattaaaatttgaatccccagcacctcagaattggactgtatttggagacagagtgtttaaagcggtcattaggttaatgttgtcatgagggtgggccctaatcaaatctgcctggtgtccctgtaagaagatgagattaaggaacagacacatactgagaaaggaccacatggacacacagggagaagacggccatctgcaagccaaacagagagccctcagaagaaaccaaacctgctgacaccttgctctccgacttctggcccacagaactgtgagaaaacaaatttctggtgtttaagc

SEQ ID NO: 237579 - DNA, 2492 bp, Homo sapiens
  misc_feature (881)..(881): n is a, c, g, or t
  misc_feature (993)..(993): n is a, c, g, or t
  misc_feature (1763)..(1763): n is a, c, g, or t
tattagatggggataagtaaagattatgataacttcatgtcatttcaggtcagattttgcttccaaatgatttgcacacacttaggaaaaaaatttctgttttcagaacgttttggatttcagaattgcagataaaggattgtggacccataattttctcctgttttgcactggcggtagtttaacttgtggaccatcaaaaaaatatgtttgagagaggacccttatcacctcttttgtttaaaaagcaaaataaactttgtttccaccaaaatgcctgcctccccgacatttaggggctgctgtggcaccattcctgtgtgtgtccccttggtagcttagttccaagcttgacagttctcaggggtggggagttctctctgctctcccttaccctcacccccaccagtctcttcagctgcatcccgtttctcctcttctaagggatctggagagttgctggcttccatcatcttccgtgtgaggaccgtcacagcttgcactgctcagcaggcagcttttctggacaccacactctccccaagcctttgtttcttgattttgggagcattcgccatggaaaccattttggctcatcttatcccattcccaggtggtctccaaggctttgcccacacagtgccacaatgaaaaatgcagcctggctcaccggtttgcttttcacgttttcatcgcttatttggctcatggcacaatcccacggaatcctctgcagagggtggtgttgcgccattccctctgacccaagtgttggctctcactctgctcagtgtgagacacacctttcacacccacagtgatgcctcactgcatccaaagccattctgagattagcacagtctcaggccagatggtttgancaattccaattcctgctcccacgttggctcctttaggcctcgtatgttccatttagctgttgtttctccggtatatgaagtacatcaagcagtgagtatcttcagcaactgnctataccagtaagtatctggctgtcggtggtggtggctgtagtttggcagtactaccagcttctcccagcacctggcttatcagaatacaggattcatgccatgtggctcttacttgggccaagagtcttcagtcagcccagtgacttaagttgccaaggaaactgtgtctagtgagacctcaagatttacaactcattcctaggctacaaggttttctccagaatttttgctgacacagtttattcccataacctcccagccctgtggggtgtataaatctttgagcttctctggagaattcactttactgcatgcaaggcctagaatagggatcaaaagaagtttggcttcaggggcctcatgaacttggaaattgtatgcactattttgtgtggatgtatgtatgggcattttttttatgggaagaggcttgcactgggtgctcagcagcatattctgaaacagtgtagacttgggaaatctatttagtcttctgagcctctggaaagtgaggataatactagattctgtcccattcatttgtaatgaggataaaatgagaagtgcatataaactgtctagtacagtgtccataaatattcataaatgttagctatcatttgactgtgagcctcaaagggttaagatgatgtgactgcctttcgttccttaggattaggtggcagatatagaatttgaaatcattttctttatgctgcacagaaaatcttcacagtactgcctggtgtgatctccttagcatccttnttggtgggtgggaaagagtgcatgactatcctcttttacaggtgaggaaactgaggctcaccatgatcacctagctaataaggctccaaaaaaataggtcctgctcacaatctggtgggacaaacagatcctaagacaagcaattacagaccacgatgagcaccatcacccttgaagtacaggatgttaaagcatctacgaaggtcagggcaggcttcctggggtgacaatccgatccctgaaatgtgggtaggaataggttaggcaaacgaatggactttgagagagtgttgcatgtagaaggaacagcatgtgctgatgcctcgagggagggagcgctcatggttcgggtgcctcgcagcaagagggagtgggagatgaggccagggggaagtttcttttaacccctaaaaaaaaggagatgaatgtgcaaagaaaaaggaaaggaaggccgggtgcggtggctcatgcctgtaatcccagcactttgggaggctgaggtggatggatcacatgaggtcaggagttcgagaccagcctggtcaacctggtgaaactccgtctctactaaaaatacaaaaattagccaggcttggtggcaggtacctgtagtcccagctgctagggaggctgaggcaggagaatcgcttgagcctgggaggtggaggttgtggtgagccaagatcgtgccactgcactccagcctgggcgacagagcaagactgtctt

SEQ ID NO: 237580 - DNA, 546 bp, Homo sapiens
aggatgtaggggaaaggtggaaatcttagagactgagggtcttaacgtaataaacttgaactttaaggaactgcttaaaatactgaatgaacccaggtttctgggttagaataaaaacacattatttcccctcccgtttgtcagtgactgagatttcatgaagatgatcgaatcagtttagacaaaatgaaaattctacctttttgtacctaaattgcagtgtagttgcaatccccatacactcaacatcacttaatcattagcttgagatgtctgctattacaatcaaaatcctaccaatcatccgagccccaactcgtatgctacattcttttgaaatgattccctctgtcaaaaacctttatgttgtatttctgtggggctttatagttctgttacagacatcatgttatgatttataagttattaatgtacatgaagaatcagaatcaaattttagggacttaaatatatctaattcaataccttatccaatgtcaaagcccttgacaagaagttatttatctcctaataaatattaaatta

SEQ ID NO: 237581 - DNA, 431 bp, Homo sapiens
cttccaggttgtcagcagacttaggagcgggaggtacagggtgagatgctcttagctggattggatgctgggcccaccttggcctcctgcttccagcaaggccccctctgaataccatcccagccaccagcagcctccctctccttaccaggcttgccttccctggttggaacctcagatctactgctctctgtagctcatcctttcctcccctcctcaagtgcttattatgcacctgccatgtgctacacgccttgccctgtactcctcctccctcctgtgggaagggtcagctgatacagacccaccttatggtgaggaaacaaacctgaaaatgatcaaatgggaagttcccgggagcaataagagctttgagcagaatttttttttaaattttattttattttatttatttttgagacagagtctcg

SEQ ID NO: 237582 - DNA, 496 bp, Homo sapiens
tggggaggctaaggcaggagaattgcttgaacctgggaagcggaggttgcagtgagccgagatagcgccactgcactccagcctgggtaacagagcgatactccgtctcaaaaaaaaaaaaaaaatagatttcctcactggcaatgactccctctgatatttctttggggccaatatactcttgaaattatttgatttcccctgactctcgaagtccccctttccttataattagatgaacctaacctgaggcctctattgatgggaaagggctttcaaaggcaacattcagagagtttgcttgaccagaaaggtcagcagcaagcacccagctctggtacaaggccatatgttctttaaggaataggactccattaacagactttgttactggagagttttttattctttccttttcagacctagaaggatatctgaagtgtttattattagtctaaactgagagcaagtgagtgtccttatcattcaaaaacaa

SEQ ID NO: 237583 - DNA, 394 bp, Homo sapiens
aacccacacacacgtatatatcaattagaggcgttagcatagtggccctaggtgtttaagtacaacctgtgactgatcgttggctgaccactaaactgtgttaacacaggggaaagtcccagctcaaaaacgaaaatggaaattacacaaactgagcagaaacatcagcagcggcacagcatggggaagagaggctgcacagagttatgttaggcaagtcctaaataaacaaacacagcaataacagcaacaaccctcaacagggaaaagtcagaagccagagttgctgtaatatgctatataaaatgtcaattttcaagaaaaaaatgagacatgtaataaacaggagtgtgactcatacccaatttaagaagtggttaaaagaaagtgtctg

SEQ ID NO: 237584 - DNA, 167 bp, Homo sapiens
agcaatcctcctgccctggcctcccgaagtgctgggattacaggcatgagcactgcacccggccagcatcaatctcttgaatgaatgagtgaatgatgttttctaggctcctacaatgtgccgaagcctgtgctgtgtgcttgggactcagcattgaccaagacaga

SEQ ID NO: 237585 - DNA, 921 bp, Homo sapiens
  misc_feature (414)..(414): n is a, c, g, or t
ctttctgctctcctcactgtgatcagcctcttcgttgtgtgtatcagtcaggatagggagggttaggctgcagtaacaaacaatctcaaaatgtcaatggctttaaacaacaaagatgtatttcttacttacctcatatgtccactgcaggtcagctggggctctgctctgcatcttcctccctctggaaccctagctgagtgagtggtcactatctggaacattgctggccattgtgacagagggggcactgagctctggagggtttcacacaggtaattaaatggctttggttgggaagtgacacccttctactcataacttattggccacctaatcccatggtaccacccaaacacagaagagccctgatatggtttggctgtgtccccacccaaatctcatttttttttntgaactctgaactttttattggcctcctgctccccaaagggtaccctgcttctgctggcttaatgcctcagaactttggtgtcattggtctcagacaccactttgccatccactatccggcgggtggtggtcttttggatggtttgcatggagttgctgctgtccaaggcatcaccaagattaaagtcctcgccatcttccagcaggcggcggtaggtggcgatctcagcctccagcttgaccttgatgttcagcagggcctcatactcctgggcctggcgctgtccctctgcccgggtctgtgccagctctgactcaaggtgcagcaggatcccgttgagctgctccatctgtagggcgtagcgggcctccacctccctcaggctgttctccaagctggccttcagatttctcatggagtccaggtcgatctccaaggactggactgtacgtctcagctctgtgagcgtcgtctcagcagctccaacctcactcgtgccgaatcct

SEQ ID NO: 237586 - DNA, 371 bp, Homo sapiens
atggcaaggactgagaagtggatgaaaccacactaagaggatacccctcaggtcatcctttcacgagtttaactcaaaaataggcagggagccggaaacatgtctgcaaggcattacagaacccatgcatcattacaggggattactgagacgtaggggtggaggagcagggatagagacctctcctcagcccatctaaaccctctcccaccactacagccatcctcttcagcacagatgagcgctcacacctcctacgcctccttccccagagccttacagaaatttccagacccgttgtctattttggagagtgaaacttgcgataggatgaccaaggagtcttcttttggtgtgacttcctccacttc

SEQ ID NO: 237587 - DNA, 542 bp, Homo sapiens
aataggaccgcacaccttcaaccatttaatctttgacaaacctgacaaaaacaaggaacgtgtaaaagactctctatttaataagtggtgctgggataactggctagccatgtatggaagattgaaactgaaccccttccttccaccatatacaaaaatcaactcaagatggattaaagacttaaatgtaaaacccaaaactataaaagctctggaagataacctaggcaataccatcctggacataggtacaggcagagatttcatgatgaagatgccaaaagcaattgcaacaaaagcaaaaattgacaaatgggatctaattaaagagcttctgcacagcaaaagaaacaccaacagagtaaacagacagcctataggatgggagaaaatttcagcaaactgtgcatctaacaaaggtgtaatatccagcatctataaggaacacaaacaaatttacaagaaaaattatgagctaatattgtatatgtgcttacacgtatgtgaaatagtataatgttgattaaagtttacctctgata

SEQ ID NO: 237588 - DNA, 576 bp, Homo sapiens
aataggaccgcacaccttcaaccatttaatctttgacaaacctgacaaaaacaaggaacgtgtaaaagactctctatttaataagtggtgctgggataactggctagccatgtatggaagattgaaactgaaccccttccttccaccatatacaaaaatcaactcaagatggattaaagacttaaatgtaaaacccaaaactataaaagctctggaagataacctaggcaataccatcctggacataggtacaggcagagatttcatgatgaagatgccaaaagcaattgcaacaaaagcaaaaattgacaaatgggatctaattaaagagcttctgcacagcaaaagaaacaccaacagagtaaacagacagcctataggatgggagaaaatttcagcaaactgtgcatctaacaaaggtgtaatatccagcatctataaggaacacaaacaaatttacaagaaaaattatgagctaatattgtatatgtgcttacacgtatgtgaaatagtataatgttgattaaagtttacctctgataatttatgcatactattataattggaagactatcc

SEQ ID NO: 237589 - DNA, 214 bp, Homo sapiens
gaaatggagtctttctatgttgcccaggctggagtgcagtggcacaatcagctcacacagcctctgcctcccgggttcaagcagttctcctgcctcagcctcctcagtagccgggattgcaggtgtgagccaccgcacccagccctatcttataattattgatagcaagaaaagcatattcaccatttgtttcagttctcattgttttcgcttc

SEQ ID NO: 237590 - DNA, 495 bp, Homo sapiens
atttagatcccagatgaacccagatgaacctcaatcccagatgaacctaagagctaaggtgaatctaacactcaagtccctgaagacagggctggttgctgaaagcatcatcagtaggcaacttgcatttcaaggcttcctaagaagagcgtccaaccctctccacactgcattcatctcttcctggggaagaagctacgtctttgcttcctgagtcaagtggcaggactgtgaccacatgtccctgccctgctggggacttcacccaccctccaaggagagcctgcttcttctcctagcacttccagcctctaccagtcccgacttctccagcctttttgttgtgttttattatgcaaatgatatcttggttgaggtcgagccatttcttgtgtctgacgttaaaaaaaatgataatttcctcagcaagtcatcgtcgttaatgaagttttacaaaaacagatacaaccaaaggaaaataaaatttcacaggtg

SEQ ID NO: 237591 - DNA, 717 bp, Homo sapiens
gtagtggtggtggagatgggtgtcggggttggggtctgtgtgccggtgggtgttggggttggggtcaccgtaatggtggtggtgatgggtgtcgatgttggggtctgtgtgccagtgggggcgcggttgagtatggggtggggcgcagtgctgaacagggcacaggaggaggaagcgaacagggaccctttggctcccagaacatgaccagctggggcttttccctgtagacaggaggatggatgtgtctttggggaatctgagtagcccaagagaaaagacctaaaattaatgacatcaggaggtccccagtcagcagacccagctggatcccttgctaacgaagcccgtcattaataaccccctcccagtgttcaaggcatcaagctttaaaaatccccatcccttaaatatgagcagataaccaagggcatctgaagaaaacctctgctacaggagattgagaccagaatacacactgggaaaccagagagcgtgcaggaaggagccttagaaagcaggctgtcattaatgtccacgcggaggtgagcgaaaatatcgcgaacatgaggcaagaacaggaagctctaaaaaaaagccaccaaaaggagtattcgaatatccaaaaaagagaactctcggatgttaaaaaaaaaattaaaggcgaaattagaaaatcagttagtgggtgaaagataaagttgaggaactccctca

SEQ ID NO: 237592 - DNA, 1022 bp, Homo sapiens
aaagtggctctcatataaacattgcagcatttcccccagaaaactgttcccaagccttccgtcactggccgacccatcttggaggccttctgcctctgggctggcgggtccctgccatggggcccagggagggtctgggtgggccagtggtggcaggtagcccaggcccaaagctacccagaaggagccagaaacagagccctcagaacacatgtggggagtgagacgccagcacgttgtttggagatgcatcctgtctcccagatgtcttgtattatcatcgactcactcggccaaagatggtagggtccccagacagccaggaaggagggatcctgcgtgcctgttctcgattgagccaacgtatgaccgaattctccattgtcggtttgcattcagaggatggatgaagtggacgcagaggagcgggagggagatgatttatcaaagccatggctttcgtccctggattccagaaaagcttgcatctgaataacttatgtgtgtagaaactctagggggatttttttaaggcagaaaaagatagggaactgagaggagcacgaaaatagacttcagctccatacccgagcctcgctgggcaggatggagctggctggctgggtgtatacttccccctccagaaagcagatcattttcaaacaagaaatgcagttacagtcttctacaagctggaagataaagtcaggctggcggatgatatccaggcacccaccatcccatggtctttctgctttgctggcgggagtttggggaactgggatctgagtctggtctgcactggagaacagtcttgtttttacattcctagatgatttcattgttcggggtattcttgtgggcttcctggttgttgttgttgttgttgttttttaaacgatagttcagtttctgctttttcttttgtgtcagcacagtccggtaggactttctgccccggctgctgttgcaggtcaccttctgatttggcgcctcctaggaatccgtgtcccccatactcc

SEQ ID NO: 237593 - DNA, 329 bp, Homo sapiens
ttcgattttgatttgcagtcaaatgagtcaacctcatactaactgctgttagctcaggtcttccctcatctgttagtttcctggagtctgttctcatactatactagacttgtgcaaagcacaaaaactaatgatttttatagtattttttattctaaggtgtgatatatctttcagaataaagtcatctggtaaaatgaaaagtccttaaatatccttaaaatattaattttgacactttattccatagaaggaatgcacatagaagttaaattatttatatattccattccttggaagacctcagcaaataaagagattccaaatga

SEQ ID NO: 237594 - DNA, 369 bp, Homo sapiens
ggactataggtgtgcgccaccacgcccagctaattttttgtattttagtggagatggagtttcaccatgttgcccagggtggtctcaaactcctgagctcaggcgatctacctgcctcggcctcccaaagtgctggaattacaggcgtgagccacatgcccggccgagaaagcattttcttaatacctcccaaggtagtattaattatcctagagatagtgacttttgtcaaccatgaaagtataggtaacataagcgctagaagttcattaaagtaacttttaaacccaccttaaattatggagcttttactagtatattaagttggtgaaatctaaattcttttctacgtcattctggaaactgcta

SEQ ID NO: 237595 - DNA, 1046 bp, Homo sapiens
ggggctcagatactagtagtggagtggtggggcttggttatcctcttgttttgtgactggaccactgcccaggtgcttgatgatgaccaggagtgtgctctgggaatgctggaggtccccctgtgccagatcctcccctatgctgacctcactcttgagcagcgctttcagctggaccactcaggcctggacagcctcatctccatgaggctggtgcttcggttcctgcaagtggaggaacgagagctggggagcccatacacaggacctgaagccctaaagaaaggccctctgctcatcaagaaagtggctaccaaccagggtcccaaagcccaacctcaggaagaaggccctacagatttgccatgtcccccagaccctgcttctgatactaaggacgtatccaggagtaccacaaccaccaccagtgctaccaccgttgccactgagcccacatcccaagagacaggcccagagcctaaaggcaaggacagtgccaaaaggttctgtgagcccatcggggagaagaagagtccagccaccatcttcctgactgtcccaggtccccactctccagggcccatcaagtcacccagacccatgaaatgccctgcctccccattcgcatggccgcccaagaggctggctcccagcatgtcctcgctcaactccttggcctcttcttgctttgacctggcagatatcagcctcaacattgagtatgcacctctctgcttaatcttttctaaaatcgcctgtatgaaaaatacctcgctggatggaaaagtagatatgaacttacatttctgtgcaagttgttttttcacaaaatatcttcctaagaggcagcatggtgtggtagaaagaacacaggacaagggagagagagccaaacaggctgtttatggctctagctgcgtactgactataaaatagatgctggactctggttggtaaggtcccttccagcagaaccattgagttatactgggatgacatggaaagcttaatatgtagaattatgtaataaatggctgtcatttatg

SEQ ID NO: 237596 - DNA, 732 bp, Homo sapiens
tagatcagtactgcacctagagcataatcagctgtgtggctctagctgcgtactgactatacatagatcttctgatactaaggacgtatccaggagtaccacaaccaccaccagtgctaccaccgttgccactgagcccacatcccaagagacaggcccagagcctaaaggcaaggacagtgccaaaaggttctgtgagcccatcggggagaagaagagtccagccaccatcttcctgactgtcccaggtccccactctccagggcccatcaagtcacccagacccatgaaatgccctgcctccccattcgcatggccgcccaagaggctggctcccagcatgtcctcgctcaactccttggcctcttcttgctttgacctggcagatatcagcctcaacattgagtatgcacctctctgcttaatcttttctaaaatcgcctgtatgaaaaatacctcgctggatggaaaagtagatatgaacttacatttctgtgcaagttgttttttcacaaaatatcttcctaagaggcagcatggtgtggtagaaagaacacaggacaagggagagagagccaaacaggctgtttatggctctagctgcgtactgactataaaatagatgctggactctggttggtaaggtcccttccagcagaaccattgagttatactgggatgacatggaaagcttaatatgtagaattatgtaataaatggctgtcatttatg

SEQ ID NO: 237597 - DNA, 599 bp, Homo sapiens
ggggctcagatactagtagtggagtggtggggcttggttatcctcttgttttgtgactggaccactgcccaggtgcttgatgatgaccaggagtgtgctctgggaatgctggaggtccccctgtgccagatcctcccctatgctgacctcactcttgagcagcgctttcagctggaccactcaggcctggacagcctcatctccatgaggctggtgcttcgggtaaatctctccggtcccctgggggaggggaggaatagagctctggcaatggagcaaggtgtactgccccagcactaagcacctgctgtgtgcctggaagaagccaggagatggattcatgtttttcatcaattttgaaatactgaatgggagcaagtcaatattcaaagagatacaggctcttcaaatattgcctctcctccattcttcttaaattcctctctctagaattttctataatgtaccttctcatctatcctccatgtctcttgacctcaactaaatatttcccttctctgtattcatggtggtacattctaattctctcaagagctatcttccaggccactaattctttggctatgcctagtttgctg

SEQ ID NO: 237598 - DNA, 1834 bp, Homo sapiens
  misc_feature (74)..(74): n is a, c, g, or t
  misc_feature (749)..(749): n is a, c, g, or t
  misc_feature (1050)..(1050): n is a, c, g, or t
  misc_feature (1523)..(1523): n is a, c, g, or t
  misc_feature (1570)..(1570): n is a, c, g, or t
  misc_feature (1691)..(1691): n is a, c, g, or t
  misc_feature (1714)..(1714): n is a, c, g, or t
  misc_feature (1779)..(1779): n is a, c, g, or t
  misc_feature (1783)..(1783): n is a, c, g, or t
  misc_feature (1789)..(1789): n is a, c, g, or t
  misc_feature (1791)..(1791): n is a, c, g, or t
agaggagacgctcgccgtcccctgacccccagctcagcgccggctccaagcccagccagtgatccctctagccntctccagtcgcctccgccatgtccgaggagctggcccagggccccaaggagagccccccggcgccgcgtgcgggccccagggaggtgtggaagaagggtggccgcctgctgtcggtgctgctggcggtgaacgtgctgctcctcgcctgcacgctcatcagcggcggagccttcaacaaggtggccgtgtacgacaccgacgtgttcgcgctgctcactgcgatgatgctgctggcaacgctctggatcctcttctacctcctccgaaccgtgcgctgcccctgcgcggtaccctaccgggacgcgcacgctggccccatctggctccgaggtgggctggtgctgtttggaatctgcaccctcatcatggatgtcttcaagaccggctactactccagtttctttgagtgccagtcagccatcaagatcctgcaccccctcatccaggctgtgtttgtcatcatccagacctactttctctgggtctctgctaaagactgcgttcacgtccacctggatctgacctggtgagaactgcagctcgatgcctgtacccagcgtgctggtgttcaccttgcaggagagattcaggctttccaccctggggcagggcctctctttatgtcccctgggtggggttgcagccaagccctccttgctttgtcaggctgactnccactaccttgtggggccctttctcccaggggagggagtggtggtggcccccgggaaaacctcctagccctctctttggtggcataccagccaggctgtgttcctaccaaaatcagcttccctgttcacacagggcctggctgctttatcatttctcaacaccagctctcagtattgctccccaacctgccaaagggtcacaggcctctttgtccccacccctgaccccaaacaggtgtggtctcatgttcacactcaccaccaacctggccatctggatggcggccgtggtggatgaatntgtgcaccaatcccactcctacagcagttctcacagcaacgccagccacgcccgtctcatctctgaccgtgagtttcctcttaatgctggccctgtggctaccaggccttgggccgggtgctttgtgaatttataacgtcagtctcctgtgccctcatgagggcatagaggcaaaggacagagccagggtcctcctcctgttgcaggatctacctctgcagtataggtgtaggtgaccccagaagggaagtatcaggggtacccttttatccttgaggctgcagcccaggcccccctgtccagtctccatcccactgcacctggcctggactgttcttactgagcactgatgtgtcccagtctctggcacacagtaggtgctcaagaaatatttgtgaagtgaaggagtgtgccacgccctgtaaaggcatgagggataccgtggtgaatatagcagtcatgacagacagggngcctgcccttaacaaaggtcacaagctaggctgggcgtggtggctcncgcctgtaatcccagcattttgggaggccgaggcaagcagatcacctgaggtcaggagttcaagaccagcctggccaacatggcgaaaccctgtctctactaaaaatataaaaattagccnggtgtgatgacaggtgcctgtantcccagctacttgggaggctgaggcaggagaatggcttgaatccgggaggtgaagcttgcagtgngccnagatcncnccattgcactccagcctgagcatcaagagtgaaactccgtctc

SEQ ID NO: 237599 - DNA, 204 bp, Homo sapiens
ccttgaccgacttgattcctatgatcaggcaagtttaagaaacactgttttaaaccatataccatctaccattactctagttcctttcatttgacctgtagatagcatctttttagaatttcagagcatcataaactaagagataatcttatctgacctctacaaagtgcaaattttaaaaaatcatgttttgattggccatca

SEQ ID NO: 237600 - DNA, 2174 bp, Homo sapiens
  misc_feature (1049)..(1049): n is a, c, g, or t
  misc_feature (1904)..(1904): n is a, c, g, or t
  misc_feature (2115)..(2115): n is a, c, g, or t
agagcgtggagcgctgcgcggcgcggcggccgggccctcgagacggggacggacacaccagcccctcagataccacttggccactcccgctgaggccactcccactgcgtggctgaagcctcgaggtcaccaggcggaggcgcggagatgcccctgcatcagctgggggacaagccgctcaccttccccagccccaactcagccatggaaaacgggcttgaccacaccccacccagcaggagggcatccccgggcacacccctgagccccggctccctccgctccgctgcccatagccccctggacaccagcaagcagcccctctgccagctctgggccgagaagcatggcgcccgggggacccatgaggtgcggtacatctcggccgggcagagcgtggcgtgcggctggtgggccttcgcaccgccgtgcctgcaggtcctcaacacgcccaagggcatcctgttcttcctgtgtgcggccgcattcctgcaggggatgactgtgaatggcttcatcaacacagtcatcacctccctggagcgccgctatgacctgcacagctaccagagcgggctcatcgccagctcctacgacattgccgcctgcctctgcctcaccttcgtcagctacttcgggggctcagggcacaagccgcgctggctgggctggggcgtgctgcttatgggcacgggttcgctggtgttcgcgctgccccacttcacggctggccgctatgaggtggagttggacgcgggtgtcaggacgtgccctgccaaccccggcgcggtgtgtgcggacagcacctcgggcctgtcccgctaccagctggtcttcatgctgggccagttcctgcatggcgtgggtgccacacccctctacatgctgggcgtcctcttctttgccatagcctgcttcttatacaagcccctgtcggagtcccagttcagcctgagtgcctcagaagctgccaccttgtttgggtacctggtggtgccagcgggtggtggcggcaccttcctgggcggcttctttgtgaacaagctcangctccggggctccgcggtcatcaagttctgcctgttctgcaccgttgtcagcctgctgggcatcctcgtcttctcactgcactgccccagtgtgcccatggcgggcgtcacagccagctacggcgggagcctcctgcccgaaggccacctgaacctaacggctccctgcaacgctgcctgcagctgccagccagaacactacagccctgtgtgcggctcggacggcctcatgtacttctcactgtgccacgcagggtgccctgcagccacggagacgaatgtggacggccagaaggtgtaccgagactgtagctgtatccctcagaatctttcctctggttttggccatgccactgcagggaaatgcacttcaacttgtcagagaaagcccctccttctggttttcatattcgttgtaattttctttacattcctcagcagcattcctgcactaacggcaactctacgatgtgtccgtgaccctcagagatcctttgccctgggaatccagtggattgtagttagaatactagggggcatcccggggcccatcgccttcggctgggtgatcgacaaggcctgtctgctgtggcaggaccagtgtggccagcagggctcctgcttggtgtaccagaattcggccatgagccgctacatactcatcatggggctcctgtacaaggtgctgggcgtcctcttctttgccatagccagctccagagcagcgtctgaccaccgcccgcgcccacccggccacggcgggcactcagcatttcctgatgacagaacagtgccgttgggtgatgcaatcacacgggaacttctatttgacctgcaaccttctacttaacctgnggtttaaagtcggctgtgacctcctgtccccagagctgtacggccctgcagtgggtgggaggaacttgcataaatatatatttatggacacacagtttgcatcagaacgtgtttatagaatgtgttttatacccgatcgtgtgtggtgtgcgtgaggacaaactccgcaggggctgtgaatcccactgggagggcggtgggcctgcagccngaggaaggcttgtgtgtcctcagttaaaactgtgcatatcgaaatatattttgttattt

SEQ ID NO: 237601 - DNA, 2215 bp, Homo sapiens
  misc_feature (2123)..(2123): n is a, c, g, or t
tcaaatgaattcacacttaagctacttaatagaaaaaaatgtgaacctttatcatttagagctactaaacacttcattaaacaatatcacttaatctttgctaaacacgaactagaaaaactaggcacaaatagaaactgtatagaccagatatacattagaatgggtctgctttagcagttaatggtttaatcattaaccaggtcagggtatttttctctaaggcactttatgtgttgctgactcttctacaatctaagtggctcaatgtaaaccattccccttgtgctaaacatgcgtgtttatacttaaagtcgatttcactgaggaaattagggtagggtcagtttgtaaggttttgccctaaaccttaaaaagaacacaaaatccttcaggtcttaagcaagattgatgcccaggccctatgaaggacacattgaatcttctgtatattttttaacaagctccacaggtaatttggatgtggctggcattgcctcgtgcacacctaaagtaaccatgcttagaaaacgctgtgttatccaaaagaaacacagcacagagaattctatgaacaaactattgcagtactctaagattttaaaataagtaactttctcaaacactgatatggggtttagagttaacactgcgggtaagcaaacccaccaggctctctcagttgacacagctcttctggctccttcgaggaagtgaggaccagtatgtggaagagcctttggggctggtgtttctcaagctacagcttcaggcaatctcagggacagaacctggactgtgcatctgacagccgcctttctacctcccacctccaccccattcttatgtccaagtagtttgaaactattgagctagatcagtatatcccgaacaccaaattgttaagagtggatggagccccagtgatctttcccactccccagaccagtgaatcaggaaatctctactggaggttctgcagtaccccaggttctttatctaaacaggaaagttaggaaacaccaatttaggtcaaactcattttaagataaggaaatcaaggcccaagaagtttaagtgatttcaccaaggacttatagctgattaatgatagctgggagctgtgaaacctggtgagctaattcttccctcttagaccaatactgcttgttatattatgtgtaatcatgagagccccagtatctgtgcagtttctgattcaccaggaagaggccccaagtgattaataaagcctgaacccaggggcatgtcagaacgcaccactggtttaaaggatgactgacatggtaaagtgtccaacgtcaacctgccctcggaattctttcactttcagtatcagtaggagaaatatacaattgtacatttcatagaaaagtaaacccagccccacacagttaacaaccaggtgaagcgggaacacaggacaattcaaagttttcggatcacaccatttcttggtcaaatattagtaccttcagcaaaagacctctaattaccacacacttttggttatggcaacagcctgctccttacttttgggagagaggagtactccacacccatggcctgaaaccaggatctccaaacccatcaaagagaaacatggatgggaaaccaaaccccccaagcttggaaagcatccagcaagctttaattcagggagagttcaatcgagatataattgcctctaattggccctcccacacgatctcacaacatacagctataatcagttccacaaagaatatgttatatttcttttctcccttgaaaagccagaatcctctcttgttaggtacttaccatcactgttttgatttttgtaaatataccgagacattaaaaaaggaagaatgaatgggtaaaagcaaagaagtagatggatttcttttttaaaataagcactgatccctatgaccttaatgataacccagtgcgattcaaatctgtaatggagactgatgtcgactcaggaaacctttctagtccagggcacatgtgatccaaaaaacacattcatctggtcggacattttccatactctgatttttatctttcttggcatgctcaactctcctttaataaagtcacaaccctttgtngccatggaacccaatcagacacggagcctgttactatgacttccctgcagatataaaaaaagacccagtgaccaaaagaccagctctttctt

SEQ ID NO: 237602 - DNA, 238 bp, Homo sapiens
cagtgctgcccattatgaaggcgggaagacaaggcaaggtcttactctgcttggtgtggtcatgaggaagcaggttggaaaaagcaaaaactgtttttttgactggtggcttcttggaagtgataatcatttcttaggatgccgggttttgtgagagggtggagggcatttgcaggccaaagcagccattacagcctttctacccatccccttcattaaacacagcgccaggtctctc

SEQ ID NO: 237603 - DNA, 629 bp, Homo sapiens
agtggcgctttcaccttagcaaccagcgcggctcccaccatggctgaagaagaggaaactgctgctctcacggagaaggttatccggacccagagggtgtttataaacctgttggattcctacagcagcggaaacatcgggaagtttctatctaactgtgtagttggggcttcgcttgaagaaattacagaggaagaggaagaggaagatgaaaataagtcagctatgctggaagcttcctcaaccaaagtgaaggaaggcacattccagattgtgggcacgctgtccaagcctgacagcccgcggcctgactttgcggtggagacgtactctgccatctctcaagaagaccttctcatgcgcctgctggagtgtgatgttattatttataacatcactgagagctcacagcaaatggaggaagccatctgggcagtctctggtcagtgaggtgtactcttttatctccagggatgctattgtagtgctgcctacttcacctaatagtcatctaggaacactagacaaagtagggctatagaaaaactggtctgagacttacctaaagtatgaaatttatgataataatatggatagatacttctgaagaatagaatatttttaattat

SEQ ID NO: 237604 - DNA, 1633 bp, Homo sapiens
agtggcgctttcaccttagcaaccagcgcggctcccaccatggctgaagaagaggaaactgctgctctcacggagaaggttatccggacccagagggtgtttataaacctgttggattcctacagcagcggaaacatcgggaagtttctatctaactgtgtagttggggcttcgcttgaagaaattacagaggaagaggaagaggaagatgaaaataagtcagctatgctggaagcttcctcaaccaaagtgaaggaaggcacattccagattgtgggcacgctgtccaagcctgacagcccgcggcctgactttgcggtggagacgtactctgtaagtcccggaggctctggccaggagtagacagagggaagagtcaccttccgctccaacgccttgacaacttgttttactgtttgcctcccctcccctctcttccacagacatggccaggttgagggaatggctttctcctgtaatggagatttacctcacagaccccacttttaattttcggccaaagcaaagagtttaaattagatagtgttggaaaggatggatctaagttggactttcagactcatacagttctcctcttcagcatattctgccttgcattatccaagacgagtctgtgccatgatgggtgccatctgtgaaggagaaataggccaggcgcggtggcttacgcctgtaatcccagcactttgggaggctgaggagggaggatcgcttaaggccaggggttcgagaccagcctgggcaacatagcaagatcctgtctcttatatttatgaaaataattttttaagagaaacatcctttggtaatgcaccactcaggaataatataccactgctgtctccagaaacaatgctgtctccacgtgacaaattcaacacagtcctagtcctgagacatttaaatgtctgagaagaagtggccctcttcttctcctgggccaactcctcccttaccctgcctgctactctctggagcctaccatacagctttccacatgctgtaccctggagtggccttctctctttttttttttattcatccttcaagagttgtgtctcttcctccaggaagccgttcatgattcctacttctccctcactcccagtttggattctgagctcttttctgagctcccatatcatcctttgcctgcctagatcatagtgcttttcacactcgttgttatcacctgtctatcgtgggggtccatggacactgactgtcagctccttgagggtggagaccgtgacttgtttatccctgtgtttatccatgtatctgtggcacctaacacagccactgccacaaagtggcctcaataaacacttgtggaatggacgaatgcatcccctccagacatctttgggaccttcccattcacctccttcccctgtcttccgggtattctttcccattcacctcccttctctctcttcttgccactggcttcttcctctatacctacacatatgctcaaatcattcctgctgtaaaaaacacttaacttggcctccctgctggccaccagcctctttctctgccccggcccctgccaccactgaacttcaggagaccagccgcatttgcaggtctcaccccttcacccccg

SEQ ID NO: 237605 - DNA, 818 bp, Homo sapiens
agtggcgctttcaccttagcaaccagcgcggctcccaccatggctgaagaagaggaaactgctgctctcacggagaaggttatccggacccagagggtgtttataaacctgttggattcctacagcagcggaaacatcgggaagtttctatctaactgtgtagttggggcttcgcttgaagaaattacagaggaagaggaagaggaagatgaaaataagtcagctatgctggaagcttcctcaaccaaagtgaaggaaggcacattccagattgtgggcacgctgtccaagcctgacagcccgcggcctgactttgcggtggagacgtactctgccatctctcaagaagaccttctcatgcgcctgctggagtgtgatgttattatttataacatcactgagagctcacagcaaatggaggaagccatctgggcagtctctgcactcagtgaagaagtcagccactttgaaaagcgaaagctatttattttactgtcgacggtgatgacttgggcgcgctccaaagccctggaccccgaggattctgaggttccattcactgaagaagattatcgaagaagaaagtctcatcctaattttctggaccacataaatgctgaaaaaatggttctcaaatttggaaaaaaggccagaaaatttgcagcatacgtagttgctgctggactccagtatggagcggaaggaggcatgttacacacattttttaagatggcttggttgggcgagattcctgcattaccagtttttggcgatggaacaaatgtaattccaacaatccatgttcttgatctagcagg

SEQ ID NO: 237606 - DNA, 798 bp, Homo sapiens
agtggcgctttcaccttagcaaccagcgcggctcccaccatggctgaagaagaggaaactgctgctctcacggagaaggttatccggacccagagggtgtttataaacctgttggattcctacagcagcggaaacatcgggaagtttctatctaactgtgtagttggggcttcgcttgaagaaattacagaggaagaggaagaggaagatgaaaataagtcagctatgctggaagcttcctcaaccaaagtgaaggaaggcacattccagattgtgggcacgctgtccaagcctgacagcccgcggcctgactttgcggtggagacgtactctgccatctctcaagaagaccttctcatgcgcctgctggagtgtgatgttattatttataacatcactgagagctcacagcaaatggaggaagccatctgggcagtctctgcactcagtgaagaagtcagccactttgaaaagcgaaagctatttattttactgtcgacggtgatgacttgggcgcgctccaaagccctggaccccgaggattctgaggttccattcactgaagaagattatcgaagaagaaagtctcatcctaattttctggaccacataaatgctgaaaaaatggttctcaaatttggaaaaaaggctgttatctacgcacattgatgtcctcagcgcatttcctggcgtggagctgagattcagtctgagagccatcagccaccaaagcctgctgggttcgctttttttctttggaatccaaaaccccatcattcaatagaatttatcttgaca

SEQ ID NO: 237607 - DNA, 598 bp, Homo sapiens
gttgaaatgtaaatagaaggcgaggcaggatggaggaagaagtttattttagagtgcgtgtgatgagcactaggagaaagactcggtgaagagagaaagggtgaggacagtagagaaagatgataatattggagcacttattaactgtgtgatattgagcccattttcttacctaaaaaataggaataaccatgatacctaccccacaaagttgtagatggtacatagaaagtgattaacaaaggtatgctgttgttttaacttttatcttcactgtcggtggctagcagagtgctgaccacatgattgatgttaatataaaatattcaccaattctcccaggcgggtgatacctcagaagcggaaggacatctctgtatctatcacttgtcttacttcccatctctgaagcaccagtctctttttttttctaagcacttggaagcctttccatgactcagtgctgaaggatttgtatgtggtgctaagccagggtagattctgttaggggatttaatcatacaggcagggcactaagccagggatatacagaagactttggaactcattcctccaatcctttcataatgtctacaga

SEQ ID NO: 237608 - DNA, 297 bp, Homo sapiens
tgtagagacagagtctccttatgttgcccaggctgatctcaaactcctgggctcaaatcgattctcctgactcagcccctcaaagtgctgggataacaggcgtgagctactgtgcccagcctatatttttttctttctctttctctcgctctctttctttctttctctctgtctctctctttttttttttttttttgagacagactcttgctctgtcaaccaggctagagtgcagtggcatgatcttggctcactgcaacctctgcctcttaggttcaaggtttctcatgcctcagc

SEQ ID NO: 237609 - DNA, 406 bp, Homo sapiens
gtgagctgtgactccttgtgtgttagcctgtgtttctcatttttaaggtggcagttttccctatgacctcaattctctgatccaccctagaagggttgactttcagtttgttcagcctttttctagctgtgaggacaagtgatgactgcctagctctttccatgttgaaatagaaacccaaaagtttgtttaaagaattacttgttataaaagtcccccattgttaatgtacaactcaatgatgtaagttgatttatcgaattgtgcagccatcagcagagttctacttcagcatattttgtcacttcccaaattcccttgaacctgtttgtagtcatttcctaatccctggtccccatgactgggtctgaatagaataaacatttggaaagcagatttcattata

SEQ ID NO: 237610 - DNA, 1510 bp, Homo sapiens
  misc_feature (708)..(708): n is a, c, g, or t
  misc_feature (723)..(723): n is a, c, g, or t
ggccttcatgtgtttgtggtggcaaagaggctggtagggatcttctgctgacttttttccctgcaatagcaattccctcccgtctccaggcagatctgatctaggtggggaagatgggaccacgagtttgagtgcctctatgctgccttcctagatttccaatcaccacaggtgcatcttcattctatcagtgcaccccactactcttccttcacactccagtcaaatcttagctgtttgtttgttgccttgatcctttttttgtgtgtgggttagacaagcaccaggtatccctactcagccatcttgctgatgttactcctttattgcttttcttttcttttcttttctttttttttttttgagatggagtcgcgccctgttgcccaggctggagtgcaatggtgtgatctcagatcactgcaacctccacctccttggttcaagcgaccaagtagcctcagcctcccaagtagctgggactacaggcacccaccaccacacccaactaatttttgtatttttggtagagacgggagctcaccatgttggccaggctggttttgaactcctgacctcaagtgatccgcctgcctcagcctcccaaagtgctgggattataggctggagccactgtgcccaactcctttattgcttttaatctctgcatagtagtgtgtgtattagtctgttttcatgctgctgatnaaggcatacctgagnctgggaagaaaaagaggtttaattggacttacaggtccacatggcttgggaggcctcagaatcatggtgggaggcaaaaacagaaacccctgagaaaaccgtcagatctcgtgagatttattcactaccacgagaacagcatgagggaaaccaccctcatgattcaaattatctcccaccagtctctcccacaacacgtgggagcacaattaaagatgagatttgggtgggaacacagagccaaaccatatcagtgtgcattcaccacattctcatcttttcccctagaaatagacttctaggatttctcacactttatgttcaacagagctatataaatgtgctcctatgtattcccttaaagcccatcttctttctactatatctttttcctcattttacttccttttttgagggagttatgtgggatagaagaaaaatggacttcttcatttataacatacctgaagttgggagtattttaatccttaaacagattaaaatgagctgggtgtggtggctcacacctgtaaccccagcactttaggaggctgagggaggcgtatggcttgagctcagtagttggaaaccagactgggcaacatgacaaaatcctgtttctactaaaaatacaaaaactagctgggcgtcgtggtgcatgcctgtagtcccagctacttgggaggcagaggtgggaggatcacctgagcccaggaggtcgagggtgcactgagctgtgattgcaccactgcactctagtctaggcaactgggcgagtctctgtctc

SEQ ID NO: 237611 - DNA, 355 bp, Homo sapiens
aggtttgtctaagatcagatggttgtagatgtggtacccataccatgctgtttttgttactgtaggcttgtagtatagttcgaagtcaggtagcgtgatgcctccagctttgttctttttgcttaggattaataccgtttctttaaaaaaaaatttttaaagagcaagaatttgagagcacaaataggaccacgtgacaacagtcctttggactgttgtgtaatgatccttactaagggaaattctaaagccattcttatccacaagcatgtatggacccatttattactctgggttggcatagtgtgaatacagacacccctaaacacatattagcaattcttctgccagtgta

SEQ ID NO: 237612 - DNA, 331 bp, Homo sapiens
agggccaggacagcagggccaacaatgtgaggcggcagtgtgggaaggtgggaatagtagagatggagaatcaacttcggctaactcagaaggttattatgatgaaacctgcatgtaagtcattctgcaaccatcatagtaaactttggttcaagaaagaatcatcaatgaatgtaaaacttaaggaagaaattttgatgaggaccaggatatttgtgtggacttagagtatctccccatgttgtagccagcctccaagatagcccctaatgattcccacctttcagcattctcacccttggatagttccctctgtcattgtctgtgtgac

SEQ ID NO: 237613 - DNA, 799 bp, Homo sapiens
atctccaactcattcaataaagctagtattaccctgacaccaaatccagacataactagtgcagaaaatatatacgccaccccacttgtgcaaatgatacaaaaaaattccaactaaaacatgagcaaatacaagaatgcgatgtactagaagatcacatttttcctaggaatgaaaagatggttcgaggttagggaacctatcagtgtaatttcctgcaataacagttaaaagagaccgacgatatgaccgtctcagtaaacatagcagatagtgtgttgctgctccatcctctacctgaccttctgaggtcttcttgcagggattagaagtctggaagctccatttcccaggctctctggcaatggttccagtttagtttctaccactgagaggtactcattagtttggcaaaaggtgaagaaggctggactggagatgtgattgctgttgcacaggtcacagactgcctgagcctggttccacaccattcacagaagactatcatgggaatcctcttggagctgtgcaacgtgcacgccctgccttggggcagggaggggttctgcaatataatttttgcagaaaagaatgggcatcatcttttcaaagtattcggtactaagggttccccctgaaagatgtaagtttccttctgttggctgaaataatataagaaatggaaaaagtacactttcaagaatttcaatttagatactgtttgtatttgtgtgtgtatgcaaaacagttcttgtatttttatgtacaagatttggcacaataaatgctgattttcttg

SEQ ID NO: 237614 - DNA, 1735 bp, Homo sapiens
tttatatacggtatggctggaaaagttttggattttaaaacagggtccctctccttgaatctgggtggacttgtcaatgccctgaccaatagagatgacgaaagtacgtgtcaccggactgacttctagggccagtcacagaaagccatgcagttcctgtcttgttggaaggaacactgctcttcaagccctgagctccgcttcgtaagtccaactcccctaaggccatcatggcaggagaggccatatctgggcgcttcagtggatgttcttatctggacccagccttccagctatccccactgacatgcaaaccaagcctctagaccagcccgtccaccggccgaatgctgcctgtgaccgacctctgccattgccacatggaacagaagcacctcccagctgctccttgcccaaattcttgacccacaaaatgtgagacaccattaaaacttgtttcagatgacccctaaaaaataaaatcaacctcttcatctggtgctcttataaaaacttactacggaagcttcttgagagacagttcgttggtcttcctgaataatttttttttttcttttttgagacaatgtcttgctctgacacccaggctggagtgcagtggtgcgatcttggctcactgcaacctctgcctcccgggttcaattgattctccttcagcctcccaagtagctggaattacaggcgcctgccaccaagcctggctaatttttgtattttttagtagagatggggtctcaccatgttggccaggctggtctcaaacttccgaactcaaatgatccacctgtcttggcctcccaaagtgctgggattacaggtgtgagccaccgcgcccagcccctgaatttttttaagggtcatgatgcctgggaataagttttgccccactctgcagactttaatgcctctttggcatagtctatcaaactattaacaaatattttaattttaataaatattgcttatgacaactattttttaaaaagtggagttgttctgtttaatctggagagtagggtcagagtcctgccttcatccggcgccctctcctaaattattgctctcatactctaaggcaactctgtggatcctccctgaagttcacagcttgaaagagctttgcagttattctttcaagatgagatcggcttgtcctaaatccagccctggggttggaagcaccttttagggaagcaccctaaaaagtgtgtctcctggaggtgaacagtgttaaagtataggttgaaaaattgcacccatgggtgcacagatggatgtctgtgtgcctacaagcaggtagaacaaactatccattaggctgagctggtgagagtggaaaaataaataattattcaaacttacctctttcttagagaaaacgaatagctttcacataagtgtggagttcctgttccttttaaggaactctaggctgggcatggtggctcatgcctgtaatccctgcactttgggagtccgaggtgggtggatcacctaaggtcaggagtttgagaccagcctggccaacatgatgaaaccccgtctctactaaaaatacaaaaaattatctgggcgtggtgacacgcacctgtaatcccagctactcaggaggctgaggcaggagaatcgcctgaacctgggaggcggaggttgtagtgagcggagattgagccactgcactccagcctgggcaacaagagtaaaactccatctc

SEQ ID NO: 237615 - DNA, 443 bp, Homo sapiens
aatttcagctactagtagctactagaagtataactaactagtgtcttctactagctactagtagtactaccagcactactagtactactagcactaccagcactactagtactactagcaagtactagctagtacttctagctactactagaagctagtagaaagtactaatggatacaatattaatttggggtccctatcatagaaatagaagattgtcatggtaaaggcacccctcctccccaagtagaaagaacgatgatctaacttagcagtgacataaagataccaaacacagaataactggaaagcatgaatttgaaaaccaatatatttgtgtttacaccaatgtatttgtaaggcaattccatctatacccattttacagattggacagctgagacttagaatgcctaggaaaatgtctcttagatctaagaaaa

SEQ ID NO: 237616 - DNA, 474 bp, Homo sapiens
cggtgaattccaagaagtagacaaaatcatgaccagtgatgaggtttcagaaaccagcacattagttaccccagaacctttaacctttgtggaccctgtattaacagaagcaactcctaaagaaaaagaatgtgaagaattaaaaagttgtccttggttgtcattaccaggaaacagtgccatttctaatgtggacaatgggaaggaagagttgtgtaaaccaaacctggtctgtgaagcagatgacaatcaccaacagcttcatggccaccataatgaacaacccagttctacacatgatagtcccacagccacaagccctttgaaagaaaattctgaagtttcatgtttcacatcagacttgtctggtccagaatccagaacaatatccttagaaaactgtggttttgaaggtggtggtttgctaaagagatctgctgaaaagacagacagttcttatttttatagggggga

SEQ ID NO: 237617 - DNA, 381 bp, Homo sapiens
aacctgctatgttggcccaaaggatcatctctcagagctctgctgtcagatctgggaagcaggtattggggcagactgcctagacaggaccctgacatttggtatacatctactctgggaacaccgagtaatgtggttggtgcctttgtgcatagcaaagacattagaagactatgcagcatggcatcattccaaggagcagatcaggtatcacaactgaaagattccacaggcccagaggaacatgcatgcttgtccactgactgcaaaaatggaactacttgaaaatgtgccagcatgtgtgtcctgggccagctgagggtaaaggctggtggcacagtctggttatggaaacaatacgtgccattattctaattgtat

SEQ ID NO: 237618 - DNA, 385 bp, Homo sapiens
tcttttaatctctatcactctgtagtgctaaatgtaatcctatctttgtgttcaatttttgtggctcttaaaatgagctttaatctaaacaaatctatgtctactttaaaagactaaaaaaaaatatatatatatgtatatacttttgccaaagcaaaaacaaagcaatggttctgtggttctcaattaagacgattctgagtaaaaaacaaaacaaaacaaaaaaccacaagattgatctagctgtaaatatgatttacaaatattggccaggtgcagtggctcacgcctgtaatcccagcactttgggaggccagggctggtggatcacaaggtcaggagttcaagaccaacctggccaagatggtgaaaccccgtctctact

SEQ ID NO: 237619 - DNA, 494 bp, Homo sapiens
acaactcaccctgcctcctgcttgtgcgaaatgtgcaaacgtgaacttgcccagtattgaagagctcaggaccttgagttccgagagccagggaggaatactttgttgttctttagacccaacaagccagatctgttaacgccaaaccttcattcccaagacaaccctcccttttgatggccctaaggtgctgccccctaatttcatgacttctgccactgcaaaagcttcccaaattcgtactgaggccacgcctttcagagtggatgcacgaaggagggcggttcatcggaagtgaatctgagattaaacccatgtatcttagctccccagtgctccccttcatcatttctagaacatacgtaatagcatgtcctggtcttcttggtggtctccttagggatataggggaagggcagttttcatatcaactttctttatgttaccatgaattagctgcttgctgaataaacttctcagacaaaaatcccaca

SEQ ID NO: 237620 - DNA, 420 bp, Homo sapiens
gactggaaaaacatggagaaatgggtagaaaagtgagtataaaaagtaaaatcagctaactcccccattcgttctgtgttgtttccattttttattttttgtatgagttttgacatcttaaaaacctttctggctggggagactgtccctcctggggctgaccaattctcagagttagcaagggccaagtcaggagcagccctttgatatggaaacaagccagtccagagccagacttcctctatcaggcctgtccaccccaggatgcattattcctctgccttaatcatcccatggccaggtaccaggcaactatagaacatttgtatagcttagagcctgctgacaccatgcaaactagccagtcctaaagtgctctgtctgccctgctttgcctttctgcagaaaccccaataaaca

SEQ ID NO: 237621 - DNA, 471 bp, Homo sapiens
ccgggctctggctggtggaaaagcattggcttcccctgctttctctgaatgaagcatgccgggcctcatctcggacctgcacactgcccctcattatgttcatgatcggcaggaaatggataaagagtggccagaaggtgaaaaagaagagatggccccctgaaagggacatccacatttatttgagcacctaccaggatacctgctttgggagccttctgctgctgcgtgagatccctggctaccctggagagacatcagacaacaagtgagatgcccaagagccctagctgtctttgtctttgcagcccaagctccagacatgtactgaagaagctttaaggataaattcagtcccaactactccctggctacaactatgagacagaccctcccaagtcagaactgcctagccaagctcaggcaactccaagatttaagagcaaaataaaagatagttattgctttaag

SEQ ID NO: 237622 - DNA, 2210 bp, Homo sapiens
taatctgctttgtagctcctcacatcttcgaaacctgccaaactctttcaaaagtattgcagttatttagctgcatccacttgtattttatgggttatgaacatgccttgtcatcagttcttttgaacatgatgtctatgggtttttctttagcctatttgctccattttttatgaaactatctggggacacttcagaaagcatgtcataattatttttcccaagccccaagtccattgttttatgaaattttgttattagtgcattgtcatcttgccttgcatgctgcaaatatcttctcccactaacctgccatctttccaccatctttggggaatcttaatggacagaatatttaatgtggttaaatttgtcaaaaatttccaccatgtttaatttgtgtgtgtgtgtgtgtgtgtgtttgtgaacacaacatacctgtatggtaggggtaacattggtttagattcactttgtacttcatacctgtgttcaaaagactcagctgagccctttgtgaggatattttgactttgaaaatctggaattgatgactcacttaaaatagttttatcttgggactgaaacagggacataggcatatttttgtatgattcacatcagagctgataatcttaatggtttgtaaagggcctaaatgattctacagttttatataaagcatgttaaactatcaaggctcattattacataactataaatggacagagttttataataagaaaaatgtacatttgtttagccattgtctcctaggaacttctctctattattacactattgcatttgcaaaggcaccaaaggtgcagtttggtttatatactgcagtagtaattcctaaaagatttaattgtatcaggttttttaacttaaaaatggaatcctatttaaagtatatccaaatattcgtacaataagaagttatcacagtctacctattttgtaaatgaggtgcagtgtttagttttcattggggtttttgattttctgttttgagcatttaaaacaaaatcctttgaaaatagtagttggtgatcacaatggtttatgacaattttaacaaattgtattagaagactctaaggagctgtattttcaaccgtgctttttctcttccttccttcctttctcttccctcactttttttcttcctcttccttccttccttccttcctttttgcattggggtaagaacataaataatattacatctttccactatgtctaaaaaagttggaggtggagaacagtatattttccatgaaaatgtcagcctgccacatagctctgcttagtaggcaaaccgttattcatttggattctctcttggctttacatttggaaacagttttagtgttaggtacttatgattgaaaaggagatctcatgttgagcttttattgcgttggatgcgcttaaaggaggttttgtaaaagaccattgcttcattaagaaaggaagaaagaaaaacaaacaattacatccagggaaatgctaggatttttgatagtttaacatgaccatgtcttgagcattttcagttcataatgaggcttgccctaactaaaatggcatttcatttcggttgatgtactcttgacattattggtgacatctgctaaattctaaaccatatttttttttaaattgatttcattcctacatcatcagctatgaccaccagttgagctggagagattggaatctggtgttttatttattaaaaaagacattttcagactgcttagctcacaaagatattttgtattctttttcaaaatatattttatttatcatggatgcttgtgttttaaggctgcatatttatttaaaatttatgaagaaccctggaaaacattcccaacacaatacaaagtccacacatttgcacaataattaagaatatttggccgagcacgatggctcatgcttgtaattccagcactttaggaagccgaggtgggcggatcacttgaggtctggagttagagaccagactggccaacatggtgaaacccgtctctactaaaaatacaaaaattagccgggcatggtggtgggtgcctgtaatcccagctactcggaaggctgaggcaggacaactgcctgaacttgagaggtagaggttgcagtgagccgagatcacaccattgcactccagcctgggtgacgcagcaagactccatctc

SEQ ID NO: 237623 - DNA, 502 bp, Homo sapiens
ctttttgaggtatgaattattgaaatattttgtatgctgacaggaataacccagtagagaaggaaatattgtttaagcaggaaacaaaggaggtcagtggcaggagtgtgtcctggagaaagggatccagtgggcagagagatggatggtttaattaagagtaagggtagggaagtcagactatgtcggtacagatggaaggctgtggacattctaatcgaatagcttctcttttctctgtgagataagaactaaggtcacccccttgataaaatagcacatgataaaagcaagttttgttcagtgctctcttcccagtacttagaacagtaattggaatatttaatggaacatagtaaatgcttaataaatatttgttaaataaattaatggaagcaagagtaatcttggattggaaaggagaaggtgctgtagaagtctgttgggttaagctagagtagtattagtgggtatgataaagaggaacagttggaataatatg

SEQ ID NO: 237624 - DNA, 161 bp, Homo sapiens
aagggacaaggactgaaaaactgcctattgggtactatgcccactacctagttgatgggatccttcataccccaaacctcagcattacacaatataaccatggaacagacacccctgaatgcacatgcaccccctgaatctaagacaagttcaagttatta

SEQ ID NO: 237625 - DNA, 453 bp, Homo sapiens
ggaaaaggaatcctttcatgaagatctgtattttgttattttttgctgactgttagaacttgtttagaacaacttgttctgtgtaaaagtgagctgcctgctatttttgctctacttttggtaatctcactagtgtccattttccttcaaaattgcagttttggttaagtttcttgtcagttagcttttctgacttaggaattttgttaatgcagatggatttctatccctcggggccctttccttacctggcagggactctgtctcacctcttctcaggaaacatttcttatcagtaaatgtctgtaatcttatacacacgagtggtccctttaggatgtacaaaagcagtactcattcagtagaaaccatacttcttcaagtacccatacaaccattctgtttttcactttctgtattcaataaattacatgagatactaaaaaaaaaaaa

SEQ ID NO: 237626 - DNA, 464 bp, Homo sapiens
gatctgccacgtatggttgcacaggtcattcactgcgcaagagtatccaaccgatggagcaagcgggtgctaaaatacagccggcacactgcttgctagcctgtgtgtcacggtacaagccagtgtccaaccagaagatgacttctttcaagtgttcccaagggttactatgagctagcagtggcccttcaaaggccatgctgccagggcataaatcctccctctccctgctccccttccctgaagtataatagggataagagcttgctcatttccaggctgtggtgtggtggacagaagggcacgaagaacttcaactaacagaagtcagagccacgggttttcacttttaggaaatgtgaatatcagtgctcttgtgtgtgtgtgtgtgtgtgtcaaggactaaactgtagaataacagggagatgtgttaatagtatggtttataaataataataagtaat

SEQ ID NO: 237627 - DNA, 409 bp, Homo sapiens
tgaacaatatattttttaaaaagattctgtcttctacttttttcattacttttcattacttttatttttgtttttgcagtctcttagcagatgacgtgatatatgtcacattgtggttcaattttataaaaaaaagcaacagttttctctctgttctaccattgtggagagtttttctggagttgaaaataattttgtttttagttgctttttaaacactgtccagaattaccaaacatgatataaacatatgttacccacaaggtttcactgtaaaggggcctttcttttttggggcgtccagtcacatctcacaattgtacagcaaaatattgcacaatttttagatagaaaggtctctctatttggaatctacagttctttgagaggaattagaccatatttctac

SEQ ID NO: 237628 - DNA, 654 bp, Homo sapiens
cgcccaggctggagtgcagtggcacaatcttggctcactgcaacctccgcctcccaggctcaagcaattctcctgcctcagcctcccaagcagctgggattacaggcgtccaccaccacatctggctaatttttgtatttttagtagagatggggtttcaccatgttggccaggctggtctcaaactcctgacctcaagtgatctgtccactttggcctcccaaagtgctgggattacaggtgtgagccaccatgtgtggccctgaacatgtattttctaaatgatgtttgcctcgaaaggaagcaattgtttggcaaccttgttaatgtgacctattactactagacttctaaaaagtgaaatttgtcaaaaggacattttttagtgcaactgaaggcaatatcaagcagtttaaatagttgttgatgcttatgctatgtactgtaattatttacatatatttactatcacagaatttataaatgatacaaagttttttgaagacaagatttttgattccttaccaatttaaaaaataacaaatacaattttaaaggtggcaggaaggtctccaaacagaaaagaaaacaagaactaattgtaggttccttagagagattttaagattattcttgctgaaatttttacttaaa

SEQ ID NO: 237629 - DNA, 417 bp, Homo sapiens
tgaatatccactgcagtctttggaatttgatactgttttaatcatttttctaggggaggtaactgaggctttaggatgttggggtagcttttctccaacacattagaaagcaagtaggagaacctcacaatctgtgcaccagaagaactggcatcacccgaaagcttgttagaaacaaagaacctcagtcccacccagatttagggatcagaatctgcattttaaaggatcccagatgattcaagtacacatgaagtttgagaaatactgctttattttacagagaccgtgttcataatctctacacagtcctgccttctagggaagcctgagatgataactttattaagagaattattaagagacgtgacattaaagcagattcaagataattcttttttctgattataagttcta

SEQ ID NO: 237630 - DNA, 193 bp, Homo sapiens
cccggcctctacacaaaattcaaaaaaacttaaccagacatggtggtgcccacctgtagtcccggctactggagaggctgacgtgggagaatcacctgagcccaggaagttgatgttgtagtgagccatgattacaccactgcactccagcctgggtgacagtgaatgtgaccctgtctcaaaaaaaaaaaca

SEQ ID NO: 237631 - DNA, 350 bp, Homo sapiens
caaggcaggtggattgcttgaggccaggagtttgggaccagtgtggccaatgtggtgaaacctcatctctactaaaaatacaaaattagctaggcaaggtagtgcacatctgtaatctcagctacttgggaggctgaggcacgagaatcgcttgaacccaggaagtagaggtttcagtgagcccagattgcgacactgcaccccagcctgggcgagagtgagactgtcttaaaaaataacaataataaaagaaaaagaaaagaaaaccatgcaatgaccaatggtgagagtgtatcatgaagcaaggaatgtgattaatccagttctgtaaacccaagttccagtggaaa

SEQ ID NO: 237632 - DNA, 323 bp, Homo sapiens
aaagattatgttttgaacagttttatgtaaatttgaaaatttagatgaagtggataatttctagacaaacagaactttaaaatgtcaatacagtaagaaataggaaactcgaattcacctatgtgattaaagaaattgagtcattgaaaaccttcccacaaagaaagcttcaggccaagaaagctttaccagtgtattctaccaaatatttagggaagccataaaccaataccacacagattctttctgagaatagaagcagtactccccaacttattttataaggctagcataaacatgacataaaacctgaaggacattac

SEQ ID NO: 237633 - DNA, 757 bp, Homo sapiens
ctcgctcagcaggtcccacttccatgggcccagcaagctaagaaccactagcttgaaatccccgctgccagcacagcagtctggagttggcctgggaccactgagttcccggtgggaggagtgaccatcattactgtggctttagttttcccctgacagtgctaaggagactgggagatttggactgagcagaattcaccacagtgcagcaaaggagctgtggcagatcatggctagatggcttctttagatccctcctcactggagagggcctccctgtaggaaatctagcagctatagtcaaagacttacagaaagagctctcacctccctgagacccagcatctgcggggaggggaagccgtcatctcaggttcagcagacttaatctttcctgcctgccggctctgaaaaaatcagctgatccaaatgaggaggattccccccagcacagcacaccagctcccctaaggggcagactgtcttctcaagcggatccctgaccctgtgcctcctgactgggtgagacctcccaacaggggtcaccagaaaccacagacaggaaaatcccagcggacatcaggtcagtgtccctctaggatgaagcttccagaggaaggagcaggcagcaacctttgctgttctgcagcttgtactggtgatatccaggagaaaagggtctggagtggacccccagcaaaccacagcagacctgcagaagaaaggcctgttagaagaaaaacaaacagaaagcaac

SEQ ID NO: 237634 - DNA, 470 bp, Homo sapiens
aggtgacaaccctgtctggctctgctaatcaggatccagtaagaagctcaagacaggtggccactctgctggtaggcagaggagggagctgtgctccctggggtgggtagaagtaaggtttgtgtgggtgctgggtgttggacacgggcaggctgcagacatagcagcaatgaggggagactctctcaacctgcccatgtcctcctctgagcaatctccccgccccagaattatttcagtttcctcatctgtcagttctaggggtggacttcattcattcaatactgtgtccctgacctctgctccctgccaggctctgaactagtcatgtgtcaggctggatacttagatggacaagacaagccatcccctgcccacagctgccccacctgaagtctaggccagtgacctccgaagtttttttgatcatgtgcccttagcaataaaaaagattgttgagtacgcacccg

SEQ ID NO: 237635 - DNA, 509 bp, Homo sapiens
agttgcatgagttccttatgcattttggatattaagcccctatcagatatatggtttgctgtgcaggaattttttagtttgatgtagtgctacttatttgtgtttgactttgttgcctgtgcttttggtgtcatacccccaaaaattattggcaagcccagtgtcaaaaacttttcttctctcttttcttccaggatttttatagtatcaggacttgtatttaagtcttcaatccactttgagttgatttttgtatatggtgtgaaataagagtccattttcatcctatggcaagtaaatatccagttttcacaacaccgtttactgaagagaccatcctttccccaatgtgtgttcttggcacctttgttgaaaatgaatggactaaattcataacttggcctctgggctctctattctgtcccactggtctctgtgtctgtttttatggcagtaccatactgttttgactactatagctttgtaataaaattacagatgccttacca

SEQ ID NO: 237636 - DNA, 436 bp, Homo sapiens
gccgccttctggcgcagcaaggcttccgtaccccccagcgcggttagtgctggaaagaagagtgtacagtggggtgcccaaacctagtggcatccccttctttcctgcctccaaatcagtggcgtgattctctccagttttgggagaggccagacacactggaggccaaagaacttgcagaggggcgggagcaagcactcgtctgtgtctgtagctgaccgaggcactaacctccctgacaagtctctcgggattcaaagctggaaggtataaggctcagagaagttgggaactgcgggtttatcaatctcttaatgagctcagtctggcctgaggccctacccaatattgcactggtggatttcacaatgtttggagttctccagatcttcacacaaatggagcataaacatctctgaaattttcagcctttttt

SEQ ID NO: 237637 - DNA, 422 bp, Homo sapiens
ctcggtttacggatgatataactgaggcacagagagaggttacagaacttgaacaaagttatacaaccagtaagtggtggagataagagtagagcatagatcactgggctccacagtccacacccttgaccgcaataccataatctctcaataattaccctcctatagtttccagattccctgtgcactgttcctttaaagaaaaagaaagagaagttgtcataccattatatctcttcctacatgcacatttgagcagagttctcttttctaaacttgaaggacagttggatgattttgtttttcttttgaaaaatgttgtgtttatgtgggtgatgacagttgtaaaaagttcacttatggatgctcatcattgttcacgcccaggaataaatttaatacatcacttgtgcattctaaaa

SEQ ID NO: 237638 - DNA, 456 bp, Homo sapiens
atagcctttacagataatagtggacattcttctttcttactgcacccagacttgacaagaagtagttacttaaagtgccatctcaatggcctttttgtactttgttacatgaaaatccaccagtctcatcatatactttgaatggagcttttatccatgcattatgctttggtcattttgaaaatattgtttcacggagtcgtgaagatcttctcaacgttgacatatttcattctactattcaaaaagatcacatttgttaataacatgaatcattaagaattagaaacctgtgaagctcatgtagttgatacaagttttcccaaattccaagtttcccatgaaagcttgaattttatcactgggaacaaacactgtaagttgtttctgttttagaagctcacttcattcatttgagaaaaaataaaatctgccaaatatacaagtatgaataac

SEQ ID NO: 237639 - DNA, 508 bp, Homo sapiens
agtaacagctcttggtggtttctaagtagtctacccatttaaaaactaaaaagtaattgtccagaaaacacagaccaaacacagctaacaaagatctcaagtagcttcaccaggtagctgagcccgaatggacagaaagtgaaaagttcaactcggaaatacccccatgggatcgtgctgaagatccaatgggcgctatgagttcccaagaatcttaagaggcatagagttggcctctttatttgaagctcaactttccatctgagtgaagaggcaaggtataacatgcatcccagatgctcactccaacagctccgaggcacggaggcaggcactcctgccagctcccacgtttagcatccactgcactccgctgcagtcatgtggggacttaggcaccgtccctgcctgctcacacactggggcgagttcctcacttgtgtgtgtctggaacagccacggccaataaatagttgttaaatgaagaaataaatgaaccatcctgaac

SEQ ID NO: 237640 - DNA, 774 bp, Homo sapiens
  misc_feature (5)..(5): n is a, c, g, or t
  misc_feature (17)..(17): n is a, c, g, or t
  misc_feature (19)..(19): n is a, c, g, or t
  misc_feature (23)..(23): n is a, c, g, or t
  misc_feature (42)..(42): n is a, c, g, or t
cgacnatatcttagctncncggngggttcggcatagacctgnggacccccgggcggtagaatcggcacttagccttgactccagaggcggaggttgcaatgagctgagattgcaccactgcactccagcctgagtgacagaatgagatttcgtctcaaaaaataaaaaaaattaaaattaaaattatatgtttttggccagtgatcattctcctatttaaaagtttttgttttatgaaattttgatttgaggtttcagttaaaactgtgaacaaatatttgtctgtgaacattataattattttaaggatctagtaatatagcatcaaaaagcttttcagaaatacacacatacatacatacataatacatacatggttgcagtgctttggtcttgcccttattttaactaccatccataataatttataatagtgaaatattcgcagcaccataaatacgtactagtgccttgtaagacatagagggaaaatcttgaggagaaaggtagggagttgggaggtgtagggaagggctttctatcaatggtgaggacccttagaatcatagaatcaaacacaccatttggcattgagtgtctctggaaggctaaaaggaaaaaaaaatcttggatgcctcagagagaactgggtgactgataaatccaggtagaatggttagttaactttttactgcctctcctgttgtagcttttgaattatggaccacatgtttgtacttcccacaattgtttaatttaggggaaagtgtcatt

SEQ ID NO: 237641 - DNA, 828 bp, Homo sapiens
  misc_feature (5)..(5): n is a, c, g, or t
  misc_feature (17)..(17): n is a, c, g, or t
  misc_feature (19)..(19): n is a, c, g, or t
  misc_feature (23)..(23): n is a, c, g, or t
  misc_feature (42)..(42): n is a, c, g, or t
cgacnatatcttagctncncggngggttcggcatagacctgnggacccccgggcggtagaatcggcacttagccttgactccagaggcggaggttgcaatgagctgagattgcaccactgcactccagcctgagtgacagaatgagatttcgtctcaaaaaataaaaaaaattaaaattaaaattatatgtttttggccagtgatcattctcctatttaaaagtttttgttttatgaaattttgatttgaggtttcagttaaaactgtgaacaaatatttgtctgtgaacattataattattttaaggatctagtaatatagcatcaaaactcactttaaagttccactggttattaaagtaattataacatcacatacaatacagcttttcagaaatacacacatacatacatacataatacatacatggttgcagtgctttggtcttgcccttattttaactaccatccataataatttataatagtgaaatattcgcagcaccataaatacgtactagtgccttgtaagacatagagggaaaatcttgaggagaaaggtagggagttgggaggtgtagggaagggctttctatcaatggtgaggacccttagaatcatagaatcaaacacaccatttggcattgagtgtctctggaaggctaaaaggaaaaaaaaatcttggatgcctcagagagaactgggtgactgataaatccaggtagaatggttagttaactttttactgcctctcctgttgtagcttttgaattatggaccacatgtttgtacttcccacaattgtttaatttaggggaaagtgtcatt

SEQ ID NO: 237642 - DNA, 382 bp, Homo sapiens
aaaatctgaataaattccagagcatataattttttctaactaaataataaactgtaccacaagatttcccccaaacaactcatacttaatagcatgtatcagtgatgaacaaatttttgcctaaagcaataaactgaaatgaacagatcatcaaaatatcttctgatccaaagtctaaaatgaagtgacatttctctggctgggcatgcccaaagccagccctggatccagcctctattcccaggagtcacctgcaggcgaggacagactctggcctgaaagatgtgcatggggttggcagcagcactgggtgggacccttgaggacaaacgtatccatttctccctacatgccctaggacatgccataccaaaaaaaaaaa

SEQ ID NO: 237643 - DNA, 727 bp, Homo sapiens
gttccaggtaatcattcagcattaataactgagtaagaaaaacaggaataccataaatttaaaaataatacttgctggtggataaaaacattgactaatatataagaatctgatatatgatacgggcaatctctcagaacagagggctgatgggcatttccataaatcaccacctagtcaacaaattatttgaatgcctactatgtctcaggttctacatgaggttcctttttcaacagtctttgtaatagtatgatagggattaagaccagataatctgtacctcgaatttgagcaagttcctaaatcctactaatttaagctacttgcaaagaagtatgaataatacaaaaccaaaagaaagaaatagcaaatatcctttggtgttacaatgtgaaaaaaaaaaaacaaaatgaaacaggacagtattaactccttccttctgaagctgtactctcccaagtctgacgtctgtgtgctgccatcttccattaacatttaaaacttctttcaccttaaaaattttgttactaaagactaattttacaaatgtgagactgtataaatcaaagagaacatgtaattaatttagtgtggtctgatttctaaatgtatgaaacctagaagagaagcagcttaatatggtagcattctgtatccatgttggatgttcaccatctctgcatgccagacatcagattattactgtggtgactcttgactttac

SEQ ID NO: 237644 - DNA, 673 bp, Homo sapiens
gttccaggtaatcattcagcattaataactgagtaagaaaaacaggaataccataaatttaaaaataatacttgctggtggataaaaacattgactaatatataagaatctgatatatgatacgggcaatctctcagaacagagggctgatgggcatttccataaatcaccacctatttcaacagtctttgtaatagtatgatagggattaagaccagataatctgtacctcgaatttgagcaagttcctaaatcctactaatttaagctacttgcaaagaagtatgaataatacaaaaccaaaagaaagaaatagcaaatatcctttggtgttacaatgtgaaaaaaaaaaaacaaaatgaaacaggacagtattaactccttccttctgaagctgtactctcccaagtctgacgtctgtgtgctgccatcttccattaacatttaaaacttctttcaccttaaaaattttgttactaaagactaattttacaaatgtgagactgtataaatcaaagagaacatgtaattaatttagtgtggtctgatttctaaatgtatgaaacctagaagagaagcagcttaatatggtagcattctgtatccatgttggatgttcaccatctctgcatgccagacatcagattattactgtggtgactcttgactttac

SEQ ID NO: 237645 - DNA, 487 bp, Homo sapiens
cagagttaataagaaaaacaattgttgctcaggccctactcataccaattgcgtcagaatctcatgggtcagccttggaaacactctctagatgttttttaatatgcagccagaattgagaaccactgatctaagtagaaggtgataatgtgttctcttcttgttctcagttactttctaagggattctaaagccagtgacccttgaaaccagaactctcaggattttccccaactctgtgaaggtttgagacacaacagattttgagagaaatactcattctgctctcacctagagctttgcttcagtctaagttgtgtctgggtccacatcaagcacatgggtaagggtacaaagtatttggggaaggcaattctcttcccactatgctttataaggccccagacactcataattttgacttcgatttcattgcttgggcagagtatctagtcctttctcacagattacagaatttcaggtctta

SEQ ID NO: 237646 - DNA, 462 bp, Homo sapiens
tgcatgggagcaaattttaagagaagtaccatgcatggataacaatgttcaagccacagtaaccgcacactggtaaactgtggttaaacttggtgcaaaagtaattgtggtttttgtcattattttcaaatgggtcttaaaaaggagtgttgggggccaggtgcggtagctcatgcctgtaatcccagctctttgggatgctgaggtgggcagatcacttgaggtcaggagttcgagaccagcctggccaacatggtaaaaccccatctctactaaaaaatacaaaagttagctgggtgtagtggtgggtgcctataatcccagctactccggaggctgaggcaggagaattgtttgaacccaggaggtggaggttgcagtgtgctggaggttgcggtgtgctgagatggcaccactgcactccagccggggtgacagagtgagactctgtctcaaaaaaaa

SEQ ID NO: 237647 - DNA, 333 bp, Homo sapiens
tatatttttatttctcttatcttctgatttaaaagacaaccaactgcataaagcaataattataaaactgtgtcaatgggcttataacacaaaaaggtgccatattcatgatagaataatggaaggaagaaatgaagcatagtttttgtatgctatgaaattaagttaatatgaactagattatcttaagtcaagttattaattgagggccaggagtggtggctcatgcctgaatcccagcactttgggaggccgaggtgagaggatggcttgagcccaggagtttgagactagcctggacagcatgtgagaccccacttctttctaaaaaaa

SEQ ID NO: 237648 - DNA, 364 bp, Homo sapiens
aactccatctcaaaaaggaaaaaaaaaaaagaggttaaataagctgtgagaatggagcagaagaggtggaagagaagtaatagagggaagaaggggataaacagcaggagaggagaggggtacaaaatgaggagcacaatcccagggaaaaagaaaagaaaacaagagctagagagagaaggggagaatgagagatatgcacagaattagggagggaagcacagtaatgaagaaagaggggctgggcgcagtggctcatgcctgtaatctcagcactttaggagactgaggcaaagggattgcttgagtctaggagttcaagaccagcctgggcaaaatagtgaggctccccccatctctgtca

SEQ ID NO: 237649 - DNA, 270 bp, Homo sapiens
ctatattcccatgagtgggacgaggttcccttcatgggtttgcaacagcctactcaccatctgtgaggataataggaataacaacaactgcctctatttttataaacaagaacttggtagtaaatattatctccattctggaatatgcttgtgttatatatttcccagtagtgctttgtaattgaaacattcataacaagaatatatcttcattttttatcatattttgacccacaataaattttcatttctgaaaaattcatagtgtta

SEQ ID NO: 237650 - DNA, 415 bp, Homo sapiens
gggttgatgttggaatgagtttagactttgggggactgttgggaaggcatgattgagttttgaaatgtgagaaggacatgaggtttgggagggtccaggggcagaatgagatgattttctctgtgtccttaccccaatcatctcaaactgtaatccccacatgtcgagggaggggccgggctggagatgattgcatcatgggggcggtttcccccatgcgcttctggtgtaagtgagtgagttctcacaagatctggtgggttaaaagtgtttggcagccgggtgtggtgcagcatcatgcctgtaatcccagcactttgggaggccgaggtgggcggatcacctgaggtcaggagttcaagaccagcctggccaacatggtgaagccgcatctgtactaaaaatacaaaattag

SEQ ID NO: 237651 - DNA, 488 bp, Homo sapiens
agggaggaagcagaatacaggcagaaattaggcaataaacaagatcttaaaggtcatcttggggcaacctcctcatttttaaaatgaagaaagtgaggtctagagagattaagagatttgctcaaaatccctgatgttattggctaggccaggactagtgctcatgtcttctgattttcactacagtaatcttttggcaataccatgatgtcaagttagatcatgtcactctccagcttgaaacccttcagtgcctttccaactgcgtttagaataaaatcccaattctttatggtggcctgtaattcaaggccatgtgtgatctggctcttgccagcccccacccgccatcctcatctgttactactctgcttgcttagtgcagatttgaccaccgttcaaagtaagatacgtgttatatgttgcaacccaggacaaacgtgcacactcacataactgaagcaaaatttcattaaagaatacttctg

SEQ ID NO: 237652 - DNA, 1995 bp, Homo sapiens
  misc_feature (1406)..(1406): n is a, c, g, or t
  misc_feature (1451)..(1451): n is a, c, g, or t
aaaaagagtggtaacttgatgaattccagttattctaaggttctttgcctagtaaatgtttatttctctaataaatcagaacttattgcaactaactgctttgtgctttcatataccatccccaccccaagaattttgaaagcttttagcaaatactaatgtatttgcttccccttcataagttaaaaggataaatattgatactttcatattacattatgagggcagctgcagcctgtgtggagcggccactgagaagacgccaactgcagcggggtaggcacagctggggctgcgcgctccacagagccagttggagccaggaacaggcaggagcccagcccttttcagagttggaggggtgggggcctccccctcctgggtgcaactgtgcagccacccagcagtgacctgggtttccctgtgctttcaggggctgggaagtgtccctctccagccctggcccccacaggctcagaagtgcctgcccccactgtctggcctctccctgttcccggtgtccactctgattttagagcaaagttgaggctgagcctaggcactgtcgcgacccagctgcatgcacttacggcagggctgacaggccagccctctgccccctcagcaccccctctggactttgggtgcccgtgagcatgggagggaggctgagggggcactgaggcagctcgatgtgggcctgcaggctctgtggacgacatgatcaatggtggcaggaagcagacaggctcctgggcagaaaggggtaggttcccggtgaagcctcaccttcaagccaagaacggcctgaagcatgggggccaggctgtcaactgtgcatagagtccgtggcttacagtgagaacttatggtgctttttcccgacctactcttggctgcccatggaccaatccgcacacacttcctcccatctgaagcccatgaaaaccccagactcagccagactcacagagaccttggagatgagctgtgggaaagaactacccaattcggttgctgttgtcttgtcaggacaacctgcctgcagaaaggagccacccactgcagatccctcttcattgacagctggatacttctcaggacaacctgcctgcagaaaggagctacccacttcggctcttctgcctcttgatgaagctgttctgtctcctctccgccttggtcaccctcaaattatccatgtacctcattctacctggatgtggacaagaacttaggacctgccaaatggtgggactgaaagagctgcaacacaaacagggctgaaacacccccctcccccgcttaccacattatgggtgatgagaaggagagaagagctgcagcccttcagggatcccagacctaggggctccccaagccagggctgtgacaccctctttggngctctttggttcctggtgtctccaagcttcccagtgccactgtgntccccttatccagatgcaggtgcctatagctgaagccatgtgtggtacatttggtccagccacagccttgcatgaagctggcacttgtgctggtgcctggagctgtctgccttgccacagcagctagcatgcgtggctgtgcacagtggctggaccccatgctcattcgctcatacactctttgccactccgtgcctggctcccccttggcaggtgtgagatcgaggccagtagtgtgagccaagcgcagcctgccaggccaagtgggtggaacgagccctgtgggcgcgagcaatactcaggcagaaggcgctgcctgccacagaggtttctggctggcaaatcgacatcccaagggtcccgtgacaattatagcccctgcttctggatagagtaaagaaaagggaaacaaaaaaaatcgaataacccaacctccagacattgctggtgttaacttattgccaaattctttctgatgtatgtgtatatcatatgagtatttaacagttttatatcttagttctttgctaaatgcactttcagc

SEQ ID NO: 237653 - DNA, 689 bp, Homo sapiens
tgcatttgcgttctgcaattggaattccattttttaaaatgaccttagaacaacatggcatctaagtttcttcaaagatctttgtaaaaggaagaactcttctttagaaaagtgcttttaatttttgttcattgcagtgataatataatggtttagcttttttcagatccaaggtatcaataccatgacataaatgaagccttaaatgatgccttttttaaatgatgcatctcttttaaagcatatttttatttcggagggttctcctgttagaactgtttcttttcccttgactctctatgtaaaagcagatgttttaaatatttcctttaagaattttgataacattggtttaaaaataaaagctgaaatgtgtgtgtccttcctgtcaggtggtaaagtaagaagcatttttgtacaatgtctttttctctgagtctgttttcattcgtaagggatacttacttgttaggtggtacaaggcatcctaaacctgcgaaaccaaacagtttagtgtgatttttttcttacagataatttggatcaatagaaaagagtaagtttcagattttcttttaagaatatccagcaattgcttctggccctgtgttccatcacaaatgtgaatcagtgatacttgcttaagcaagttttgtcaattcctagttgaattcctttaagtgccaaga

SEQ ID NO: 237654 - DNA, 631 bp, Homo sapiens
ctgtgagtttatcattgattttctcagattctctgggtaaactatatcaactgtaaatagttttatttcttcttttccatttcctgtgaatcgatttttttcttttttaattgtgttggttataatctctaggaaaaaaatgttcaatagatggagagagagtaagcatccttacctttttgtaatctcagtggaaatacctctagtattttctgactaaacataacaccggctttaggaccgaggtatagaaaaatatgcattatcatttctcagccttatggctaagatcaagtgtagaaaatatgcctcaatttctattttcttgagtgtttttatcaggaataggaattgagcgccaagtgtggtggctcatgcctgtaatcccagcacttcgggaggctgaggcagcagaattgcttgagacaaggagtttaagaccaacctaggcaaaatagtgaggccccatttctaacaaatcaaaataaaaatattagccaggtagagtggtacatgcctgtagtcctacctgcttggaagactgaggcagaagaattgcttgagcccaggaggttgaggctgcaatgagctatgattgcaccactgcactccagcctgggtgacagtgaga

SEQ ID NO: 237655 - DNA, 439 bp, Homo sapiens
cttccttccacgaccaaatcaccttgagaagaaacttttgagagcagaatctaaatcgaacatggcagtaataatttagccaaagtgaagggagggggcagatccaagtgaagggaggcagagaagacgaagctaagaaaatataggccttattttattccatggaaacaacagaagacggagttctatggcctagacactagaaaatattttctggcccatcccttatccctaaaaatacaagaaaactcattccacttaaaaatgagtaacaaaataggattgtggtcaaatacagtgcacagttattataagaagaaaaatcagagtagcattcttaccacagagacatgcccccaaaacagatgaaaactttaatatttcaaaagagctaaaagaaaatgaggcagtaagaagagataaaggaacactaatccca

SEQ ID NO: 237656 - DNA, 490 bp, Homo sapiens
agggaaatcttttttactttcagtattgtctgtatcttcattgatcatatactgtggtcttagaatttagcacatcattcttttttcagtcttttaattgactgaaaaaacagtgacctgaaaattggtgatctgttttcatagtggaggagagttgtgagataattctttcctagatctaagtatctctctttatccacctgttaccattttgattcagctatatgggttacagtagtgggatctttgtgtgtgtgtgcccaggagtgatgtggtttcatctcttagtctgagtctcaatagaaatgatgacagctggcattcttcaaggtgtttttacttgaggatctaggtatgtatggttttctgttctgttatagatagttcagtataaatttctgtaataatctgttctgcattgaattttttttctaacattttgttatgaaattttcattaaagaaaagaactttgtagtgaatagaacctc

SEQ ID NO: 237657 - DNA, 299 bp, Homo sapiens
aacttaatcatgtttgcaaaatcccttttgccacataaggtaacatattcacaggtttcagagattaacatatggacatctttggaaaacattattttattctactatattattcttgatattttcatagatagaggagacatactctacccaggaatactcaatattaactttctactttttctgcaattatttcctctaaaaataacacacataaagacataaagacacataaagacacctgcccacttaaacggcgtgctttttcagtgtgcaaaagaagtttgcattaaacactt

SEQ ID NO: 237658 - DNA, 1640 bp, Homo sapiens
attgtctctccagagatgctcacatggtggcataggtcccccctacactcaaatgcagataatctgcattctctgctgaaactactgtccatgggaagtgtcttggtaaaaggaataggatagtggaaaaagttggtagccaaagaaggacggaagtagagagcaaagaggcagcagtaaccgggctggggactgcctccccaagagttataacagtgctggagaatgagcacaactgtcaaaggataacacaggttgttctcatacttcctactctcactcactttgtagaggaatcattcatataactacagggcattcagcaagaaggaaacccatatgagatcctaatagtacaaaggccagcaaatgcttgcataggttctgcccactcccagctgaaagacagtcataattaatcaagtggctcttttctactaagcgcaactgtgatctcagagcctttcctgtccagtgctccaggcaacctctaagaatcaactggcattggtatgtgggacggctcctatttaccagtcctggctgacactgtagaaagaattaaaacatatgtaagtagccaaaatgcaaggcaggtagcactaaatagtttcataaaataggtacatataaagtttcctaactttccaaaagaaaagagaagatttccttaattaagatgatcagaggagacttccaagtggagatggtatttgacatgagcagaattttgaaatcaggaaagggctatcatcaaggtgatttttttaaaaaacttgctttaaatatttattgtaaaaagcaaagctgtaaaaactatttaagctgatacttctgcctcttaatttgttttcatgtgaataatttttaagtaattaaatggcattttagtcgggaaaaatagaaaatatgaaacatttataattcttaatattctgaaaactcttcaagttttcagcatggtagaagtagattattttagctatttatttaaactcaattttcttcttgttttaaaaaaccatagcctttcgttgttgtttctcttctttttgacaactattgccaaataagttttatggaatacttgggtttttcttccccatgtaatgctgggcagttagcaatagttctgaattcaggtcacttctctgttgataagtgtaaaatgcatatctataggtcagtgctaacaaggggtctagttagcttcttagctatctgcagaatatattttcttttcatcacaaaacaagtaagactagatttggcatccttcattatcccaaaatgaagcaaaactacttgagtcatttggattatgcccaggaaaacatattgactcagaaagataaacaaggctgggcgcagtggctcacgcctgtaatcccagcactctgggacgccaaggcggacagctcacctgaggtcaggagttcgagacccgcctagccaacagggcgaaacctcgtctccagtaaaaatacaaaaattagccgggcgtggtggtgggcgcctgtaaccccaggccctcaggaggttgaggcaggagaattgcttgaaccaggaagtggaggttgcggtgagccaagattgtgccactgcattccagcctgggtgacagaataagactccatctc

SEQ ID NO: 237659 - DNA, 523 bp, Homo sapiens
ggaaataaaggttttcttttataggaaggactgctttgccagttcatgtgtatgtgtttatggtggtacaaaatataagttaccatcttaattgccaatttatgcttactatcaagttacatgatcatacatgcccattttgtggttaatgcctgttgtccgaatgtaattattaatagcatctccttttactttcaaaagtgccccagtctggatgataaattatgtggttacctcactataaaaatattgagctgggtgtggggtcacgcacctgtagtctcaactactagggaagcggaggcaggaggattgcttgtgcctaggcttgagatcagcctggacaacatagtgagaccccattttagaaaaataaaaacgtaaaaatgaagacgttagctttcactactgttaagaattgaatctagaaatgggcataaccagggttttatatttcctgtaagcacaaaagttgctaaatttctttgcatttattataaaagtaaaaacacttgtggctgca

SEQ ID NO: 237660 - DNA, 705 bp, Homo sapiens
tgcttatccaaattcttctcacctcattattcagtcttttgcttctccgaaccactgtcaccccttatttccctaaattacagattgaattgtatggtgccacatgactgtgagaataggccttgaagttcaaggctattcccagtctaaatctactctgttcctatcctacctcattcactaactcatcgaatgtagagcttccatgaccctggctctgggcttgatatcaaagatatggcagttaataaataacatagatctagccctgccttcgtgtggcttatagtctgttggagtagccaaacagataaacacaaatgatcgattttggtaagtgctaccgtggctgtgtagcttcccatttctcctaagcattaaacacattttaatattttatagtttttttcaatgtctaaatgtagcaggttgcacaaactaaagcacttagtaaatgttcattgttgagttgtttctccatctaggcatggtagatagtaactaggagcattgtagttctgaaagcctcatactcagatcagtccagtgatttaaactggactagaacttggtcttcatatgcctgtgtctgggtctgaaataagtaaatcaccttctcacacctaatgaaattcagtgggttgtccaaatagagattttccaagtagtactttttattctgtattatagcactttattccttgc

SEQ ID NO: 237661 - DNA, 411 bp, Homo sapiens
agtgttgtttctactattgactacatatcattggtcaagccccatttcttctggcaaattttttctaagtgactttgcatcagtttacataccctgcttatcttcaagcacggtacttccaaatgggtttatggtgccctactgttcattgtgactaaagaactaataatcatcatcatacacatgaggaaagctgcaacatgaaaaataatacaagacaaacaagtagataaatggacttagcagaaacagagataaagccaggagcaaaatgcatttttaaaaaactataaagcctattctcaagattagaatattagatattgaatgcaataaagaaaataggaagcaattaaaaagggaaagttcagacaagaccaaagagatcttgggaatttaaaatacattaac

SEQ ID NO: 237662 - DNA, 423 bp, Homo sapiens
cagggccagtgagactgttacctcacttttccattgcttgtcctgtattggaaaggcaggggtgcgtagaaaatcctgagagcctatttttaaacagataaaagatctttcagtttaagactattacttattaaagtcagtgttttatgctagccaagaacaaaattagaataaagtcatacagttatataccttatgctgtcacaaacagataaaaagtaataatttagtcctcacttgaatgcctgaccctatgagttttagattattttaaattgttcccttataagcatacctggaatatttttattaagcatgttttgagtactgttttttaaattttttaattaaagaaatatgttccaaatagcctgtagattttaaaggtgctgttaaaggattcttgtaatactaaagttctac

SEQ ID NO: 237663 - DNA, 533 bp, Homo sapiens
ggtgaaggaagcaggtgtataaacaattaaaataagatgaagaaggcttcgaagatgaggtgattctgtggtgtgttttgaagtgggtgggcttatgaaattcttttgctttctctaatatatctaaacatctatgtaaatacctggatgatatacagtactagtgacaatattggagttttgtcttctagttagccgtgttttgctgctgtggtagggaggtaagtctcagctagggagcactcaggtgacagggaaatgaagacagggaactcctgcctgtaagtgagcaggagctctctgcaagactgagctctgccttgcacagtagccattggcctgggagacatcatgattattgctggaaatgctgccctttctgaacccttcctttttttgaaggagagtgtattgatttcagatttttggctactgtctttgcacttatcccttctgtgtgcctatttgaaatacccaaattgtgttaaatgtgcacttcttcatgtatacaccaaattattttgaccataaag

SEQ ID NO: 237664 - DNA, 441 bp, Homo sapiens
aatagtgacaggatctcactgtgttgcgcaagctggtcttgactcttggattcaagtgatctttctgcctcggcctcccaaagtgctgggattacaggtgtgagccatggtacccagccccaagtctttttttaatgcgtagaaacattttaataaaattagcacatttatacatttgtacatcctggttttttcaagcagttttgtttcatgggtgttttccataccattaactcttttcaaatgttaatttttaagtgaccgatatccatcatgttaaggtatcatagcttacttgggttgtctctaatgttttcctattagaagtaagtgtagcgacctgctacctttatgtctgaccctgtcaatcccagccagcatgaccacacctatgtccagctgtgaagtctccatctgactgtccccttctgtcgtcttctc

SEQ ID NO: 237665 - DNA, 446 bp, Homo sapiens
aaaagaaaaaaaaagaaaagaaaaggaaatttggttatagagctatgcctcctacaacaaattacaaatatggagcccagataacagatgagacctggtgtattctgcactacttacccccacccacctaaagtgctgcatgctgtttgaggctcctgtgactaggagagttatcctattccttagaggctgctgagagcaccaaattttggacccacctctaagagaaataaaggcacccaggaaactccttcacctgtagtacccttgacctcatgtttttctttgcactgcttattgctggttcaacagtaaagcaaagcaaagcctaggtaatgttagccaagcctgagtcgtcattcttgccaattctcaaaggaggcggggtcaactttaagaaaccatgatgtatgtcctatctcatcaggaaatcaaggctaaagaaa

SEQ ID NO: 237666 - DNA, 108 bp, Homo sapiens
agtagaattgtggttttgaaatattactaaggaaaacactctataaattgttttattccttttctggtaggtaaacctgcaaccaccaaggactccaaattgtgtatg

SEQ ID NO: 237667 - DNA, 1658 bp, Homo sapiens
catgcttttactagataagcagggaaacaatttgatgtagtctgtttcattttaactgacagagtgtcacttcttagttatacttatgtcactgtgtgccagattgctgctatcggaaagtgggtcttcatctcagagcccactgtgaataggggaagcaaagttggccccaaaatataactgcataatgccttctgctttcagacaagctttattaaaggggcaggtggaagagagtggaattcaaccaagcttttatttcgttgacatggttttagaagaagattcctgagtagtccaaagaatgttctcccaagaaaccactgctccccagccccacatgtcctttcctcaccacatacacaccccagccagctgggtggcatggtacgcatgcacctgtggtcctgtgggagaaatgaatatgacaggttcagtgtgtccaggccactgggacctccactgaccagtgggtcggggtgaacaagagagttatactgtgagagttcataccctcactagcacaaagactttttgacccccctgtaaggtatgtgtatgttttttgaagaggtgcttaattggtgtgccaggcaatgtgctatgtgcctgatgacaaagataaataagatacctttcctttcaaggagcttaccatatggtgaggatgacagatacttcccaagtaatatgttaaaatctaagctagaagtgaacagagattgcttttagagggttgaagggaaggcttcctgctgaagagataactgattggaggaataagagttactggacttggctgggcgcagtggctcatgcctgtaatcccagcactttgggaggccaaggtgggcggatcacctgaggtcaggagttcgagaccagcctggccagcatggtgaaaccccatctctactaaaaataccaaacaaaaattagccgggcgtggttgcgcacacgtgtaatcccagctactcaggaggttgaggcaggagaatcacttgaacctgggaggcagaggttgcagtgagccgagatcgtgccattgcattccagcttgggcaacaagagcgaaactccatctcagaaaaagaaaaaaaaaaaagttactggactgattaaagataggaagcaagtttaaagaatatttgccatcccttcctatttagttgaatggtgttgcttcaacccaatcaattaagttgggcttagattttcactgtttctctaataaaaatgaactctcgccctagtggcacagagtctgtaccttggaaacaatctcaggccatggtggccctcatatcaccatgagttcttgccatgcggcttagggttttgaatggtgaggcttgactaagagaccaacttcaggatgtatgtcctgctcgctttgacccttatcacttacagtgttgtataggaaaccaggcaaggtgtcttcccagtctgcaggaaagtggtgcatctcagagtgatggcttctggcgatcagccgggaatgagccccttctaagcaacgtgggcctttgtgtcctcctcttccaggattatcaagtataaatgacacccacgacacctacccttctccaacaaatggagatgattcttccacccgattccctctttattttggaaccaaatcaaaagccaaaaaa

SEQ ID NO: 237668 - DNA, 1072 bp, Homo sapiens
gagcgcgaagcgggccgcaagacttaaacgtggcccaagtccagaattcgattggaccaagggggccgccaggatagttaaggagaattattgtttcggggacagagttcatgccctgtcactcaggctacagtccaagtggtgcaatctagtctcattcaaacctgcgtctcccaggttcaagtgattctcctgtctcagcctccccagcaaatgagattgcaggtgtgcaccaccacacccagcactttgggaggccaaggtgggcggatcacctgaggtcaggagttcgagaccagcctggccagcatggtgaaaccccatctctactaaaaataccaaacaaaaattagccgggcgtggttgcgcacacgtgtaatcccagctactcaggaggttgaggcaggagaatcacttgaacctgggaggcagaggttgcagtgagccgagatcgtgccattgcattccagcttgggcaacaagagcgaaactccatctcagaaaaagaaaaaaaaaaaagttactggactgattaaagataggaagcaagtttaaagaatatttgccatcccttcctatttagttgaatggtgttgcttcaacccaatcaattaagttgggcttagattttcactgtttctctaataaaaatgaactctcgccctagtggcacagagtctgtaccttggaaacaatctcaggccatggtggccctcatatcaccatgagttcttgccatgcggcttagggttttgaatggtgaggcttgactaagagaccaacttcaggatgtatgtcctgctcgctttgacccttatcacttacagtgttgtataggaaaccaggcaaggtgtcttcccagtctgcaggaaagtggtgcatctcagagtgatggcttctggcgatcagccgggaatgagccccttctaagcaacgtgggcctttgtgtcctcctcttccaggattatcaagtataaatgacacccacgacacctacccttctccaacaaatggagatgattcttccacccgattccctctttattttggaaccaaatcaaaagccaaaaaa

SEQ ID NO: 237669 - DNA, 432 bp, Homo sapiens
cgtctgagccgtgtcctctcacaggagagtacatcactgaatatgagagccagggggcagtgccaaacacgcggcaccaggagaaggaagacatcatcaggctggcccagaaggaggaggagatgaagctgctgttcattctttttgactgcttgtgacaacaccagaagatagagatcctgagatcttttaagaactgctgctgggaatgtacactgatctgaccactttggaaaacagttcggctccatctcataaggttgaatattcacactcctcccagcccaggaattctactctacatccaagagaaattcttgcctatataaaacagggggcatgtacaaggaatgttcctaatagttctgttcaaaatagcaaaaacctattgcccatcaatagtgggtgactaaattgtgctttttattcctt

SEQ ID NO: 237670 - DNA, 503 bp, Homo sapiens
ttttttaacctactactgctttgtacgttctctgcattactgagtttctcaagtgagttgaaggcagggtgtttagtggcaagtggtattttggaggtaggagtgagaaaaaaacacaaggctagtgatggcagttttctcctcactttctttggttcctcttccaactaaaaagaaaagcaaataagagaaagggtgcacattaaaaagggataccggccgggcgtggtggctcacgcctgtaatcccagcactttgggaggctgagacgggtgggtcacttgaggtcaggagttcgatagcagtctggccaacatggtgaaatgccgtctctactaaaaatacaaaaattagccgggtgtggtggcatacgcctgtagtcccagttactcgggaggctgaggtgggagaatttcttcaacccaggaggcagaagttgcagtgagccaagatcgcgccattgcactccagcctgggcaacacagcgagactctgtcttaaag

SEQ ID NO: 237671 - DNA, 502 bp, Homo sapiens
aaagaagacctgtctgcagtaggaaggaaagaggctaatctccaaagagaagtagagagagggccacacaacagatggacagagaggaagagcgctggctctttttggtccctggttttaggtcctagttttgtgagttactcctgcattctttccagggaccgaagccagtcaatttcaccccccaacacagccacacacatcaatttgtttttggttaagctgatttgagcagtttccctcatttgcagctagaatggtcttgaggaatatgatccagatgttcaaagaatcaaagaggagaaatcaatatgaaaatggcatttcattcaatgagggtttgtgacaacaacctccgtaacagcaggcaaccaggcttgtgatacagcagagacactcagttgtgtggggtgctgcagtcataactgaaaaattgtatctgcctataagaaagactaaaacagaaaaggtgaaaataaaaaagtcatggtgttaagatggt

SEQ ID NO: 237672 - DNA, 417 bp, Homo sapiens
ccacgccacaagtcggcctcttccgcatagacctctgcctaatggtatccacccaccgggggcacctctgctcatcctttccccagaagtatttctgggtcctcaaagatctgtccttttccaagtggtatttgctgttagagcaagcctcggcctgggatttttatggcagtgatgcgttgtggaaagtgcgtctgcctaggaaggcaggccggcatgctttcaaatcttagctctgctgcctacttgacggccaggcttagcaagcgtctctagccgttccaagccttttctagatctgtaaaactggaagaagaatacttgtctcgcaaggaacatgtgagaattcatgaaaattgccaccacatactaggtggccaataaattataactttgtatttgtttttactgacacta

SEQ ID NO: 237673 - DNA, 686 bp, Homo sapiens
cttccccaggggacattggcaatgtctggatgcattttttgttgtcatgactggtgaggaggatgttaccagcatctagtgggtgtcagccaggaatgctgctaaacattgacaatgcataggacagcccctacaccaaagaattatctaccctcaaagtcaatagtgctgaagttgagaaatcatggtttagggagtcttgattaaaacttttcaactggggtaccctgagatggtgaaatatactagtatgctttgcttcacagtgtcaactttactcgcatctgcagcaggtgagttataatcttcacaggagccagctcctggggaaagactgatcatagaagaaattctcattggctttgaccaaatccttctccttgccaattaggaaatattgactttctaatcttttagcaaaagctccctctgtatttgaatatatgtttggttataacaaataacttgtttccacaaatggaaaaaagtatcgtaaatggcaacagatatagtttagtgctgactttagatggtggctggacctcctataggacaggcaaagctaagtactttctactcaaagccatcaaacaaaatgcttacaaattagaatgtaatggccattgctttacttgttttgataaaccagaaaaacaggcttcagcttattgaatctattattgaac

SEQ ID NO: 237674 - DNA, 632 bp, Homo sapiens
cttccccaggggacattggcaatgtctggatgcattttttgttgtcatgactggtgaggaggatgttaccagcatctagtgggtgtcagccaggaatgctgctaaacattgacaatgcataggacagcccctacaccaaagaattatctaccctcaaagtcaatagtgctgaagttgagaaatcatggtttagggagtcttgattaaaacttttcaactggggtaccctgagatggtgaaatatactagtatgctttgcttcacagtgtcaactttactcgcatctgcagcaggtgagttataatcttcacaggagccagctcctggggaaagactgatcatagaagaaattctcattggtagcaaaagctccctctgtatttgaatatatgtttggttataacaaataacttgtttccacaaatggaaaaaagtatcgtaaatggcaacagatatagtttagtgctgactttagatggtggctggacctcctataggacaggcaaagctaagtactttctactcaaagccatcaaacaaaatgcttacaaattagaatgtaatggccattgctttacttgttttgataaaccagaaaaacaggcttcagcttattgaatctattattgaac

SEQ ID NO: 237675 - DNA, 391 bp, Homo sapiens
gtatcatctacctgcctgtttctaacatcaaataccacacagtcacatcgtagagtcactgtgagagctgccattcaccaggcacattctgcgtgccagagacggtgttgagccgcgcatccgcacccccacttcaccctcacagcgaccccagctgcgggggatttctaaaatccatcttgtacagatatggactctgaggctccaagggaacaagaccaaggagggaatccaagaagcaaaggccgcatggaaaggacaggctcccttcaatcagaggagctcaaaaagcgatcaatgttatcttctttgaaactcacacaaaactgagttttgcattaagtttttggcaaaaaagagtactaaaaataaccgtaaaccattctgttaa

SEQ ID NO: 237676 - DNA, 373 bp, Homo sapiens
atttatatttcatatataattttcattgtcatgtatcataaattattactcttttgatttctttcaagcatttaaggatgtgaaaaccattcttagctcataggccatataaaaataggcagcaagctaaatttggcccagaagccatagtttaccaacccctatgctagataattgagagccaaaataaataagctattgtgctctgtcctggaagaacaaacaatcacggtggagacttgggcattcaatgaagtaaatgtcccataaaatggtaagtaccataactgcaacagggagctatggaagactagaaaaattttaaaaaaagaagaaaaatatgctagaatgacaatttaaataaataaataaa

SEQ ID NO: 237677 - DNA, 3415 bp, Homo sapiens
  misc_feature (1269)..(1269): n is a, c, g, or t
  misc_feature (2153)..(2153): n is a, c, g, or t
  misc_feature (2184)..(2184): n is a, c, g, or t
  misc_feature (2209)..(2209): n is a, c, g, or t
ggagttgtacattatgtatgataatgtatgcacattttcttatttttaacttcagggccatatgtggtgctgttgtcggagcaggtgaaaagtctgagtgtgtttaatttgcttgacaaacattaggctggggcttgtcaagtggagtatagtgaatgccaatctttatttactccttattgattaccccaaactctaaacatctgcataccttgtataaatttccacttatgaagctgaaattgatgaatgaaagcccatgccatttcccggggattggtacatttcaggagtgaatcacaatcaattattgtcataggactattgaaatataaagggagagctgggagggagggcccagcgccctgctctcacgattgattcaggcaggagcctgttccgaaccgtgtgtgccagattagcccgtgacttcatgacgagcatgggaagtatgctaattaacggctggctgccggcgccctcccctaaaatgggaaaatacatatttgggggttatgatttgatggcgacgttcaagtgcgttgtcacagattgggaaagcgttttcatcaagctggcttgttatgcctcgtttcgatgtggtttaagcagcagtcttattaggttaaccctgctcagtgaaagcaagcaggcttactttctgattagataaaatgtgcaggcataatgggaaaagtcattaagtgatgaatgtactcttagacatggactaatcatactctatttatgtagctggttcgtagctatgaccctctcgtgtgattcttgtgctatatttatggtcagtggtgattatcattaatttgtaacgcacataaacattcatgcaacacggctcactctctgagccgtcacaggaggcctcattcccggtctggacccatggtgttgctcacctcacaggtgtccggcatccgtggcaccaaaatccccaaataagtggaaatcgccaaacagctcattgcacttggctcctatggttccaatgacaacagttttatatggaaattgagttcatcaaattaattattcactgcttttacgggagtgggttccaaagcaggggcatgtgcacactgtgaagacctacccctctcctgtttccttgggggcaccccagcaccgcctcctggccccaggtagtttcataagggctccaaagaggaacccgactaagagccccgctactcatcagttggagcctgggacccggggagagacccgggatcatcctgctcagtcaagttnacttgactctgtcatttcttgccgctgctgagaaatgcttcccctgccagtgtcccagccctgggtcctcaggcaggccgttggccagagagaggcgggcccatcaatctcccttaacagcctgattggctgcaggtcagctgagaggaaaaggtttgagattgggacgggtttagccaggaatctcggaatttcccggataattgggggagagtgacgccaagctcttcctgtcacttttagatatttctgaactacctctgtaatgaattggaatgcctcttaccagggcctcagagacgccgtgagccactgaagtttatgctctccaattatccagaaggattctcaaaagtgggctgtgggcctctgagctctgttgtgcttgtaatacatggcatcacctccttgggtggcagaccaccgggccacggatccacaaaggatggcgcggcctgctggggaccctgtattggtacagacatcactgcaagtctgactcagagctaattgcagatagttcatttaactctgacttctgcaaaaatggatgtaaatatggagggaaacacacaacagtcgttttcgtgaagaacggccttaggacaaagacaaagaataaaaaatgtcttttgtatttacttgaaacaaatgaatggtatcaggtgaaaaatatctgtctgtgcttgttcagatttaaggcctacaaatttgcaccttattccaatttcctgcatgcacgggaggaagtgcgaatagcttattcagaggcagattaatgcaaaagagctgagagggcacataaatctacaagtagtgacttgtaccatcatgtaggtgtaatgattatcaaactggaatcagggctcagagtatcagcttancacagagaaaatttgcttgatgggagagtantaaagtcatgctataatatatccanatactgtgactaaattttatagttcatgaagcatattagtattacactatatcccggtacattcaaaaggtgatttccatttagatgctcatttttcatgaagataaatatgacatgaatcataatttccctgaagtaaatattacaaataataaaatactcaggcaagcaagttgaggaatgacagtaatgttttccatttgtatggtaagtggcgaaccttgtggcctatcaagtaacaaattgaatgtttaatctttctccatgcagattgaggatggcaaagtagcgcggtctcacaacaaattgagagttctctggtgactcgtggagtatcagctcttttgccttcagaggccaatagagggtgtcagcagagctttgtcaaaatagatcacgagcatgaagttgtaaaattgcaatttacaacaaaaagactttgggataacgggcaaatcttaggcatgctaaatacatagcaaatatttagagaggctttgtaagcaatttaaatattgttaggggaagttgcttagcatctgtggagcatcccagcggtaaagaaagaaatgtatcctatcaaatggtaaatagtctattccaaatgataaaaatattctttagatactagctgatcgagttaaactaattggttgacggtgccttaaagccgtgcccagtattaggctggcggaggccccgctgtgcacgtcacaccttatggtgttaatggcgctctttgtgctacatcatctttgccgatttgccctcacattttggagtccctccgggccttggggatcctggtgcagcaacagcttgtttccctgggatctcgatgctggcctggagccggcctgccgcctggggtctcggcagtccaggccacagttcagggtcacttgtaccacacagcccggggatgttccttctgctgaaggttctgttgtatattaattttaagttgcagtgtctgcactgcaagatgacaccactcgcattttgattaaggattttatacatgaaaaaattttcattatctgagttcccagagacctccctgattggttgcctgtctgacccacagctgtgtctccaagcgtcggggtaaggactcgggcacatgagtgtgccctgcactacctctggtacatgaacaattaatggggcttttgactctcagggaagtcaagactcttcataacc

SEQ ID NO: 237678 - DNA, 291 bp, Homo sapiens
tgtgggctgcaggaaccataggcatatcctaagaggttgaagcaaggggaagcttttaaaagcaaaaggaaaaagtgtatgtaatttgttttcagacaaagagaacactggttatagtggctatcgcaggaattgacgccagctcattagtgaagactgtggcaggcaaatgttcttgtacatctggctagctgtccttgtgactcacgtcacgagccactgtttgaaaagtcctttgcaaaattgttgttacaggcatatgtacataagagcccttcagagagtctttgc

SEQ ID NO: 237679 - DNA, 468 bp, Homo sapiens
gagtctcactctgttgcccaggctggagtgcagtggtgagacaccatttcaaaataataataataattattattataggagactagagagacatgacaactaaattaaaggtgtgattcttgattagatcctgcataaaacaaaactcatgtataagagatacttctgggtcaattgggaaaatttgcatctgagataaatgttgcatgatatcgttgttgttatgttattagaatggtttggattattattgttaataatccaaaacatatgaagtgatgatataaaatgtccttgttcttagtatattcaggctgaagtctttatgggcaagtatcgtaatatatacaacttattttcagatgatgcaggaaataaaagggatctttctatggagaaacagagagaaaaatgttacaacatattaacagttgatacgtctaggtgaaattgaaaaaaaaaggaacc

SEQ ID NO: 237680 - DNA, 759 bp, Homo sapiens
gagtctcactctgttgcccaggctggagtgcagtggtgagacaccatttcaaaataataataataattattattataggagactagagagacatgacaactaaattaaaggtgtgattcttgattagatcctgcataaaacaaaactcatgtataagagatacttctgggtcaattgggaaaatttgcatctgagataaatgttgcatgatatcgttgttgttatgttattagaatggtttggattattattgttaataatccaaaacatatgaagtgatgatataaaatgtccttgttcttagtatattcaggctgaagtctttatgggcaagtatcgtaatatatacaacttattttcagatgatgcaggaaataaaagggatctttctatggagaaacagagagaaaaatgttacaactaggacttgggagaatgaagtcagatgacacatatgtagcaggagaccagtgcctggcccatagttgagtgcccagaaaggtacaagttactactgttattggtagctcctccatgctgaaaatcacttatgttttgaatcgttcactggatatctgtaatatctaccactggagaagttaatagtcacgagaataactcttggccaggagcagtggcttacacctgtaagcccagcactttgagagactgaggcaggcagattacttgaggtcaggcatttcagaccagccggatgatcatggtgaaactccgtctctactaaaaatacaaaaatta

SEQ ID NO: 237681 - DNA, 403 bp, Homo sapiens
ttagattaatagcagccaggcatggtggctcatgcttgtaatcccaacactttggaaagcccaggtgggaggatcgcttgaagcaaagagttcgagaccagcctgggcagcaaagtgagatgccctccatctctaccaaaaaaataaaaataaattagctggtgtggtggcatgcagtcccagctactcaggaggctaaggcaagaggatcacttgagcccaggagttgaaggttgcagtgagccatgatcatgccactgcactccaacctgtgtgacagagagtgagaccctgtcttaaaaaaaaaatgagagagattagattaataacaaactgaaatcatatgtaccagctgtttttgacaaataagatctcatgaccttcaactttttgtcctcccttt

SEQ ID NO: 237682 - DNA, 414 bp, Homo sapiens
taaaattcacacatgcacagacactcaaagagacagagaagaaacacctttccttcctgggcaggttctcagcacctgagcccctgccttgtgtctaggaagctaagacacagctaagcccctgccttgctgtggaagctaagcccgtcttgcattatagaagctgaaaatggcaaattcacttacctcccttgctccaccaacaggacgcaccgacacacactttatatcagaaactggtgacccataggagtggggagagcgcagaactgcagcatttgcagcacccacttttggaagcttggtggtgctgttctggaccaactggaggtctgaccagcagggcagctgtggggccttgtggggcctgatctgggtatgactgttgtcattcctggccatgtggcctctgag

SEQ ID NO: 237683 - DNA, 4306 bp, Homo sapiens
  misc_feature (243)..(243): n is a, c, g, or t
  misc_feature (1056)..(1056): n is a, c, g, or t
  misc_feature (1354)..(1354): n is a, c, g, or t
  misc_feature (1384)..(1384): n is a, c, g, or t
  misc_feature (1577)..(1577): n is a, c, g, or t
tttcaacacgcagagttgaaaaacagtgaggctcataacctcacagtcccatgccagggaacctaagtccagcagtgtgttttctgaaggttctcaaagcacagagtaattcccattttccgggagaaccccacatctcatatggtttcaagccagacaatggggatccgcgcagagagaacatgcacgcacacaaacaggaaggacgcagacgggctttgggggtgatgagggacagcttcnccctgaggtctcaggcgaggggtgaggaaggagactcatgtgaactcctctgtctctgctctcaggcttgttcacaaaaccctccatctcagcgcacccaagctccctggtgcatgcaggagccagggtgagcctgcgctgtcactcagaactggcctttgatgaatttatcttatacaaagaggggcacatacagcattcccagcagcttgaccaggggatggaggctgggatccattacgtcgaggctgtcttttccatgggtcctgtaacgcctgcccatgcaggagcctacagatgctgtggttgtttcagtcactcccgctatgagtggtcggctcccagtgaccccctggacattgtgatcacaggaaaatacaaaaagccttctctctccacccaggtggaccccatgatgaggctgggagagaagttgaccctcttctgcagctctgaaatctcatttgaccagtaccatctgttcagacacggggttgctcatggacagtggctcagtggagggcagagacacagggaagcattccaggccaatttttctgtgggccgtgcaacgccagtccctggcgggacctatagatgctatggttccttcaatgactctccctataagcccccagtgacccgctgcaactttacaccacaggaaacactaagagtactcctctgtcattcacagaatccacccctgaatctggtaagcaaataactcttatcctagtgtctgagtccctggggagacagaaggccccagtgtgagtgaaagctgtgccacctcccagctccatgaccctnggctaggcagcccctcccaggtccccacattccccatccacatctgagactgtggtcagtgcgggaatctgtaaggcctttcagcctcagacgctttgggactgaggcctcatccacaggggaggaagaggtcagagtcacctgacccttgctgaaaagcaatgcttctcattcctccagggaggtctgtgaacatgaaaatgctggaagatgggaaggatttaaaagaccatattcgatattcactgtctgtctttttttgttgtttttttttttgagacagagtctcactctgtcncccaggctggagtgcggtggcacaatctcngctcactgcaacctctgcctcctgggttcaagcgattttcctgcctcagcctcccgagtagctgggattacaggtgcccaccaccacacccggctaatttttgtatttttagtagagtcagggtttcgccatgttgcccaggctggtgtcaaactcctgacctcaagtgatctgtccgccttggcctcccaangtgctgggattacaggcgtgagccagtgtgcccggcctccgttgaggttcttgatggagaaaccctgctccttcccttcactgaccaatcaccccaacccctcccctacctccacctcacctctggggaggccactgacctgcaggagatggtccatgagagaggcagaaggatgggggccatctatcggagcggtcctggggcagtcaagattgccccaaggttgctgatgggtggttctctgaatttagtgggggaggctggatcacgctgcagcctcaggcacgcccttgccttgttttggtcttggtattgccacctctgaagtgaagatctggaagactttctttttcaccccacagacaccaccatggcaaacacagagcccacggaaggccaacggacggatgaagaggtgagttctcccagccgaaaccatcaccacagcttcatcccctcccattcccagtgcccctgccttcagccactaaatatgctcctcttttcaccttcatcctctcaggagcctgcagcagaagagacacaggagatcatatatgcccagttaaaccaccaggccctctcacagacaggattccctcctgcctcccagtgtccccactacctctcggaggatcctagtatctacatcactgtccaccaagcccaggctgaggccagagctgcccccagtctttggcacaaagggcattaatacgcaaggacctggatctattcctaggaggattttttttccacggacattcttcctccttctggtaccatcttgacacctcgaagctggcaacagcagtgtctgaatgcttgtgggattatcttaaaattccagcactgctgaacagacaactagccattctacaattctattttgagcatccaaccatttaaggtgatttgactctacccacacactcatcctggatatctcattaatatcatctgagttatcctgaaactctacagacatgcttctggaaagccgatgtatatgctcagccagtttaatctctaaattactcaataaggtttttttaaaaaaatttttttaaagttctggggtacatgctcaggatgtgcaggtttgttacgtaggtaaacgtgtgccatggtggtttgctgcacctatcaaaccgtcacctaggtattaagcccagcaggcattagctctcttccctaatgctctccataccccctgccctcctctgacaggccccagtgaatgtgttcccctccctgtgtccatgtgttctcattgttcagctcccacttataagtgaaaacatgcggtgtctggttttctgttcctgcattagtttgctgaggataatgtcttctagcttcattcatgtctctgcaaatgatatgatctcattcctttttatgactgcgtagtattccgtggtgtatatgtacaactttatttttatccagtctatcattgatgggcatttgggttgattccacgtctttgctgttactcaacaaaattttgcagagatgaagtgtattctatatctgagtcatctaatatggtagccactagccaaatatggctttttaacttagaattagaatagatcaaattccatgaagtttaaaattcagttcctcagccacatggccacaatttgagttctcagagccacgtgtggctgctggctgtgggagagaatagcatgaacacaaaatgttttccttgtcagaggaagttctagctgttctagattaaaggtgcaaatttgaagatgcagagcctattttctcatgcagtgcaggctcctggaagagacctaatgtaacaaaacgataatatttcacatcaatggtgacatgtctttatcttacgaaatgcggggaacaagcagagttctcttgtggagtgtcttatcacctcttatcctcatgcaaatttctgccatagagattttctcccaaactttgagaaggtcacctctgtcaggcctctgagcccaagctaagccatcctatcccctgtgacctgcacgtacacatccagatggcctgaagcaactgaagattcacaaaagaagtgaaaatagccttaactgatgacattccaccactgtgacttgttcccgccccactaactgataccatatattctgccccgcccaagaaggtactttgtaatattcctcgcccccttaccccccaccgccctgcccccgctcgcccgccttaagaaggtactttgtaatattctcccccacaactttagaaggtactttgtaatattctcccccacaactttagaaggtactttgtaatattctcccccacaactttagaaggtactttgtaatattctcccctccccttaagaaggtactttgtaatattctcccccacaactttagaaggtactttgtaatattctcccctccccttaagaaggtacttcgaggctgggtgcggtggctcatgtctgtaatcccagcactctggggggccgaggtgggtggatcacgaggtcaggagatcgagaccatcctggctaatgtggtgaaaccccgtctctactaaaaaaatacaaaacaattagctgggcatggtggcgggtgcctgtagtcccagccacttgggagtctgaggcaggagaatggcgtgaacccaggaggcagagcttgcagtgagctgagatcgcgccactgcactccagcctgggcgatagagcaagactctgtctc

SEQ ID NO: 237684 - DNA, 3217 bp, Homo sapiens
  misc_feature (243)..(243): n is a, c, g, or t
tttcaacacgcagagttgaaaaacagtgaggctcataacctcacagtcccatgccagggaacctaagtccagcagtgtgttttctgaaggttctcaaagcacagagtaattcccattttccgggagaaccccacatctcatatggtttcaagccagacaatggggatccgcgcagagagaacatgcacgcacacaaacaggaaggacgcagacgggctttgggggtgatgagggacagcttcnccctgaggtctcaggcgaggggtgaggaaggagactcatgtgaactcctctgtctctgctctcaggcttgttcacaaaaccctccatctcagcgcacccaagctccctggtgcatgcaggagccagggtgagcctgcgctgtcactcagaactggcctttgatgaatttatcttatacaaagaggggcacatacagcattcccagcagcttgaccaggggatggaggctgggatccattacgtcgaggctgtcttttccatgggtcctgtaacgcctgcccatgcaggagcctacagatgctgtggttgtttcagtcactcccgctatgagtggtcggctcccagtgaccccctggacattgtgatcacaggaaaatacaaaaagccttctctctccacccaggtggaccccatgatgaggctgggagagaagttgaccctcttctgcagctctgaaatctcatttgaccagtaccatctgttcagacacggggttgctcatggacagtggctcagtggagggcagagacacagggaagcattccaggccaatttttctgtgggccgtgcaacgccagtccctggcgggacctatagatgctatggttccttcaatgactctccctataagcccccagtgacccgctgcaactttacaccacaggaaacactaagagtactcctctgtcattcacagaatccacccctgaatctgacaccaccatggcaaacacagagcccacggaaggccaacggacggatgaagaggagcctgcagcagaagagacacaggagatcatatatgcccagttaaaccaccaggccctctcacagacaggattccctcctgcctcccagtgtccccactacctctcggaggatcctagtatctacatcactgtccaccaagcccaggctgaggccagagctgcccccagtctttggcacaaagggcattaatacgcaaggacctggatctattcctaggaggattttttttccacggacattcttcctccttctggtaccatcttgacacctcgaagctggcaacagcagtgtctgaatgcttgtgggattatcttaaaattccagcactgctgaacagacaactagccattctacaattctattttgagcatccaaccatttaaggtgatttgactctacccacacactcatcctggatatctcattaatatcatctgagttatcctgaaactctacagacatgcttctggaaagccgatgtatatgctcagccagtttaatctctaaattactcaataaggtttttttaaaaaaatttttttaaagttctggggtacatgctcaggatgtgcaggtttgttacgtaggtaaacgtgtgccatggtggtttgctgcacctatcaaaccgtcacctaggtattaagcccagcaggcattagctctcttccctaatgctctccataccccctgccctcctctgacaggccccagtgaatgtgttcccctccctgtgtccatgtgttctcattgttcagctcccacttataagtgaaaacatgcggtgtctggttttctgttcctgcattagtttgctgaggataatgtcttctagcttcattcatgtctctgcaaatgatatgatctcattcctttttatgactgcgtagtattccgtggtgtatatgtacaactttatttttatccagtctatcattgatgggcatttgggttgattccacgtctttgctgttactcaacaaaattttgcagagatgaagtgtattctatatctgagtcatctaatatggtagccactagccaaatatggctttttaacttagaattagaatagatcaaattccatgaagtttaaaattcagttcctcagccacatggccacaatttgagttctcagagccacgtgtggctgctggctgtgggagagaatagcatgaacacaaaatgttttccttgtcagaggaagttctagctgttctagattaaaggtgcaaatttgaagatgcagagcctattttctcatgcagtgcaggctcctggaagagacctaatgtaacaaaacgataatatttcacatcaatggtgacatgtctttatcttacgaaatgcggggaacaagcagagttctcttgtggagtgtcttatcacctcttatcctcatgcaaatttctgccatagagattttctcccaaactttgagaaggtcacctctgtcaggcctctgagcccaagctaagccatcctatcccctgtgacctgcacgtacacatccagatggcctgaagcaactgaagattcacaaaagaagtgaaaatagccttaactgatgacattccaccactgtgacttgttcccgccccactaactgataccatatattctgccccgcccaagaaggtactttgtaatattcctcgcccccttaccccccaccgccctgcccccgctcgcccgccttaagaaggtactttgtaatattctcccccacaactttagaaggtactttgtaatattctcccccacaactttagaaggtactttgtaatattctcccccacaactttagaaggtactttgtaatattctcccctccccttaagaaggtactttgtaatattctcccccacaactttagaaggtactttgtaatattctcccctccccttaagaaggtacttcgaggctgggtgcggtggctcatgtctgtaatcccagcactctggggggccgaggtgggtggatcacgaggtcaggagatcgagaccatcctggctaatgtggtgaaaccccgtctctactaaaaaaatacaaaacaattagctgggcatggtggcgggtgcctgtagtcccagccacttgggagtctgaggcaggagaatggcgtgaacccaggaggcagagcttgcagtgagctgagatcgcgccactgcactccagcctgggcgatagagcaagactctgtctc

SEQ ID NO: 237685 - DNA, 312 bp, Homo sapiens
cactaaatttgaccctagctgacattttctggctcagccacgatattttccaaacctctgtattaaaatccttaatatactgaatacaaatgaaatggctggtggccaccaaatgccacacaaatcaatgctttcttcttcaatttctcatcagtttcacctgtagtaacagtgcaggaccttttatggggtacagttagattctgttcatgagagtaaagcttggcaattcccaatatgtgcccagtgatcaaaagtcatagactgtgtcctcaattcaaaaacttagggaaaggatatatgcactattta

SEQ ID NO: 237686 - DNA, 775 bp, Homo sapiens
  misc_feature (697)..(697): n is a, c, g, or t
  misc_feature (726)..(726): n is a, c, g, or t
  misc_feature (735)..(735): n is a, c, g, or t
  misc_feature (750)..(750): n is a, c, g, or t
  misc_feature (769)..(769): n is a, c, g, or t
  misc_feature (774)..(774): n is a, c, g, or t
attacttttgtagtagttttttttataaaaggaaaaaatgacttgaaaaatcaagtaatttgacatgtagacacagggaaattacattcgaggcagagagcaaacgacaggcatgtgactgtagctgacaagtgtcagcagattgtgggcatagtttagagtctaagacatctgggggagatgagtttcatcattagatgaagtcatattctggaggggaataaatgctaatctgaaatactatgctttcaattgccagtgaggagaaattgacagttttgaaatagtggtttcaggaaggctctcctgagaagatggcactgaggcgagccttgaagaaggtgagaggggagaaagattggcctgtgttcaaggaatcaaaatagttcgctagttcagagacagggtaaagcaaatagactggagtctcattcaatgtctttaaaagtcatggagaagagttagtatagtttctaatccatgaggacttcctgaatgattttgccaggactgtactttaagatactgtttctttccaaccccccatcagataagtcataccacttttctgaagtcgaataagtgaagggaaagagtggacaaattgttatctaacagggctccctccccaggaaaggactccttcgtcagtaagagatgtgcacgtggtataaccccaaccaattgcttactttcntggggtattgtcccaccaccttgcttggnagccttcangaaaaatggcccccnattggaaaaaaaaaccccnaaaanc

SEQ ID NO: 237687 - DNA, 412 bp, Homo sapiens
ctctaattaacaagatagtttgatttttatcaagatgtcgttaatgcaagtaaacaagtgacattcctggcaggtgataaaacgggtatttatgtaaagagtaatatttccggcctggcggggtggctcacgcctgtaatcccagcactttgggaggctgcggcgggcggatcatgaggccagaagatcaagaccatcctggctagcacggtgaaactccgtctctactaaaaaaaataaataaataaaaagccacaaaaaattggccgggcatggtggtgggcgcctgtggtcccggctactcgggaggctgaggcaggagaaaggcatgaaccagggaggcagagcgtgcagtgggcctagatcacaccactgcactccagcctgggggacagagcgagactccggtctc

SEQ ID NO: 237688 - DNA, 763 bp, Homo sapiens
cgtggggattaggggccaccaccttaaaaaagggtggccggagccctgatgaggttaccctgaccagcattgtgcctacaagagatggcaccgcacccccaccccagtccccggggtccccaggcacggggcaggatgaggagtggtcagatgaagagagtccccggaaggctgccaccggggttcgggtgagggcactctatgactacgctggccaggaagctgatgagctgagcttccgagcaggggaggagctgctgaagatgagtgaggaggacgagcagggctggtgccaaggccagttgcagagtggccgcattggcctgtaccctgccaactacgtggagtgtgtgggcgcctgagtgtcctgacagcccttctgcaacgtttacccaccctggttcagagcccagcttctcctggagagccggaccctcagggccctgaaccgtcgctctctggctgctcctctgtcccttgagggaggaagtcctgggacccagggaggggaggggcctttgtctagggaagggactggtagggaagggacgagtctaggctgagggcaagatgggaggtcagaggtgacagaagcgttcaggggtgcctgggcctccccaggagctgtggactcagttcctgacctctgctttggggttcctggggtgggcttggggtgagtgtagttctggcctagcagcaccctcttgtggcttgttctagcgtgtattaaaacttgacacacacccacacacaaaaacaa

SEQ ID NO: 237689 - DNA, 619 bp, Homo sapiens
gtcaattcattaccaccatgtatattggaaactttctacttatctttcaggattctacagcaattctatgttacctttgatgcagtgctatactgtcaccaatattcgttggtttctagactggaaaccaatcggttcttccagattggttttatgaagcccctgccccataaactgaactccgaggcaccctgagatggctccttgatactctcatagccctctctgcctcttgtgtagtgagtccatttcccttacttgacagacattccttgagggcacatcctgaatctttgctactacatagcagcacatctgtacatagtgtagactcaaagaatgtttactaaataaacaagggactgatttagccagataattttagctggatattattttcacccagatttcaagataaaactaaatcttcccttcctagacacaatcagataatcacctcagtttctcatttgtgcttttgttattagattactaccactgatcaatactgggtccaatttaacctactatgtatatactctgtaacttcatattatttcatttagcctgacaaagtgaaatttgggttctaacttcaaatacaatttaaactttttga

SEQ ID NO: 237690 - DNA, 219 bp, Homo sapiens
aaccgattccccacatgaggaggtaaaccctagcgcggaggacgtgagattgtgctgccgtaaaggacactggcccggagaagacactccagaggctggccgtgcagaaacccttagaaaaaaacagacatgctacaaggagttttattttttttaatttcaagaagaaagctattataaaacatttaaatggcctcaggttaaataaatgcctcattt

SEQ ID NO: 237691 - DNA, 479 bp, Homo sapiens
tgtatttgctcacgttgtctcatttgtatacccaaaggggaaataacatgattattgcagacctaaccctccaacccaaaaaatacagctggacaacaaaacgggtgcttatgtagcaaatgaaaagagtacaggtttaatattctcagtatctacataagacagcagaagggggaaaaaagacaggaatgtgtatgaaaaatgccaaacatatttgcattttagatgaaaaggtctggatttaagtggccataggagaacagggacaagctcttattctctgatctgatacactgatttctgaacctggctgatcagaatcctcctttaaacagcttttaagaattatttccggctgggcacggtggctcatgcctgtaatcccagcactttgggaggccaagctgggtggataatgaggtcaggagatcaagaccatcctggctaacacagtgaaactccgtctctactaaaaatac

SEQ ID NO: 237692 - DNA, 440 bp, Homo sapiens
ttcaagatattgcttcctctgtaaaggtctgaattattgcaagatattgagaatttccaattcagtagttagatgtgactggaataatcaaagaagtctcaagtcctaagaacgaggtgtagggagagaatgttatctaaaacgccatgtgatatagaaatgcatatgagtcttgagctgtcatttacacaatgtatatctgggtgtcagggaaaccatggatctgcctcacaggtctgcctcacagcccaacatcagcttctgcctccctcttgctgtgtcagtacatacatacatattcacttgtgtgtgtgctaagtgtgtctcatcctttagcagaacttatttctatatatgaaccaaagagaagcatttatagtggaatttagaataatttgtatcaggagtttgaaaaataaaaagaaatgaaattaaaaact

SEQ ID NO: 237693 - DNA, 313 bp, Homo sapiens
ggcagacgcaggttcgggaccatgagctgaccaagattgatggacaaatgtcagacaatcaccgcaagcacgggaggaaagcctgaagcaatgtcctaataagccccggcaggagcttctgcttttccctccaccatttgctccaggaggccaataaggggctggagccttaaaaagctaccttccctgtcttgttataacctagttagtggtgggcaaagcggcaattcttcagttccctttcccagaggaattacgtcctttcagtgtcattctgggccccccagtcttgcaatatagatatccttttggc

SEQ ID NO: 237694 - DNA, 568 bp, Homo sapiens
tgtgtgaataaattgagccccagagatgtacaagattaatcagcccatggacatagggaacatatttgccactctgtcctcagaggctagtgtgtttgtttatgcaaagcgcatgataaccagttatgaatgaattaagataacagaatgtccttcaggaaggcttttgaagcttaattttggccatcagtggagaacgcaagcagctgatatcagtcagtgtcagggatacttctctaaagtaaaatgcgaaccatctgtcccctcccccacctgtttcttagaccaagattgatggacaaatgtcagacaatcaccgcaagcacgggaggaaagcctgaagcaatgtcctaataagccccggcaggagcttctgcttttccctccaccatttgctccaggaggccaataaggggctggagccttaaaaagctaccttccctgtcttgttataacctagttagtggtgggcaaagcggcaattcttcagttccctttcccagaggaattacgtcctttcagtgtcattctgggccccccagtcttgcaatatagatatccttttggc

SEQ ID NO: 237695 - DNA, 403 bp, Homo sapiens
gggcccctgtgcaaggacggcacgcgaattcctgaagtgttccaaataaataaatgatatccatctgtaaattggcatgataaggcccaagaactatgggcaggcatcgatgtcctttgctacacctctggcatcacttcagtccattcacacaccctccagtatgtgaaccgctccataaatgaacaagtgcagcagctatggttcaagaaggccatggtgaccagaggctcagacccttcagggaggaggctcagggtcaccttatcagcctggactttaaccacgtggaaagcaagattagaggccccctgaatagtactgttcacgaagactaaaaggaactgagtgtgcctgagcttaagcatcacgaagaccagtaataaagaactatttacaaact

SEQ ID NO: 237696 - DNA, 176 bp, Homo sapiens
aagaagatcggagaggaagacataatatagggaagggaggggtacctggactttaaccacgtggaaagcaagattagaggccccctgaatagtactgttcacgaagactaaaaggaactgagtgtgcctgagcttaagcatcacgaagaccagtaataaagaactatttacaaact

SEQ ID NO: 237697 - DNA, 1147 bp, Homo sapiens
tttagagcgtgatccttgtacttgtatgaaaaaagttaactgtgaaacagcctcaggcaggtcctccaggcagtatccagaggaaggcattgctatcacagagatgacagctccatgcctgttattgcccctgaagactttccagtgggacaggatgtggtggtggaagacagtgatattgatgatcctgaccctgtgttggcctatgataatggatctcaatatgttggccaagctggtctcgaaatcctagcctcaagcaatcctctagcctcggcctccaaaagcggtggaattacaggcatgggacaccatgccttgcctttaccttttctacatttagatatgtttggacacaaaaatgcccctgggttacaatggcctactgtattcagtacagtaacatgctgtgcaggtttgtggcataggagcaataggttatactacagctataggctataggcctaggtgtgtagtgtggctttgccatttgggtttgtgtaagtgcattctatgatgtttgcacaataaccacaaaatcactaaatgatgcatttcggagactgtatccccaccattgagtgatgcatgactttgtgtgtgtgtgtgcgtgtgtgtgtatatgtgtatatatctcacttattaggcataaaaatgttacaaatttagatgctatagataacagtatatctgatactgtatattactacagatgctgtggggattagaaagataagaatgtcatgaccaactttttataccactaaatatgaaaataggtgtaatatacaaattcctagagaaatatgttaccaaatccgactaatatatgaatgcaatttaccacattaagaaataaagaaagcaaagttttatgatcatcttataagcttcagaaaaatcactggtcacattcaacaatcattcagtatacaaacttacagcaaattagaaatggaaaagaactttcaaaacctgatgaatgacatctacagaaacctacagcaatatcatactcagtgataagattttaaaatgaggaacaagctgaggatagccaccatcactacttctaatagacattattctgaaacttttatttattgtcataagacaagaaggcagaaataaagccatggagaagaaa

SEQ ID NO: 237698 - DNA, 330 bp, Homo sapiens
ctatagaagttttgttagattgaatatatgaaaatgcctaacgtaatgtttgccactggtttagaagcatatttatcatgaaactgatgaagtttagtgaacctaattgcatggccctttctaaggcccttgcaggagcagccctagcaatcttgaattaatttgtgtttttcttaaggaccctcccacccagctgcccctttattataggctgctggtcaccacaaaatctgaatctgcctttggccacaggttaagtgagaaatgttaatttctctctcctctaatgttgtgacttcagttagtgtccaacctagaagtacttaactt

SEQ ID NO: 237699 - DNA, 398 bp, Homo sapiens
gtgaagtgctggcagtaagtaggggaaaggcttacttccccggctggtgggcatcgtcactgcggagggcaaatggaagggtctgcagaaaacgtgattttgcacgtgccctacggacctaggaactccagtcctcagtatcgcccctcaacaaacacatacatgtgggctcacgaagtagctcacacgaagatgtttgctaaggcacgatttctaataacccagtagttaccagggtaataaattatgctttatccacattataaaatattatgtggtaaaaaatgagataattatataccacagaaagattctaagatgtatcacagagtgaaaaaacaagttgtaaaaaattacatgcaaggtgatgacattaaacaataccatacatttactaa

SEQ ID NO: 237700 - DNA, 289 bp, Homo sapiens
gctaaaatttagccaagtttattgcaaatgcaagtgcaatttaggtgggaaaatagacatgtaaatttgtgcataagagaacataaagactggagtagtggctcacacctataatcccaacacttcaagaggctgtagcaggaagcttctttgagcctaggagtttgagtccagcctggacaacatagtgagatgctatttctgtaaaaataataataaaaaaattagctgggcttggtggcacacacctgtggtcccagctaattgggaggccgaggtggcagaattg

SEQ ID NO: 237701 - DNA, 480 bp, Homo sapiens
atgaagtggctctgtcaggattcaatcagagaagcaccacctcctcacggtcaaagggcaggggctttgttggaagggatcggaccttctgccaagatggagctccaggctgtctgtgagacgctactgcccggctctggggctgggcctgaagccagcaggacaggtggtcaggaaagaagatgggcaagaagtgggaaggggcaagggccacctggacttcacgaggccacacgtgaacccacgtggacagtccagtgccctacatctgtctcttaccactttatgctgcactgaataatgttccctggaaattcatgtccacccaggacctgtgagtgtccccggaaattcatgtccacccaggacctgtgagtgtccccggaaattcatgtccacccaggacctgtgagtggggtcttctgtggacaagggcttttgtgggtgcaaccaaataaagacaaagtcacactgaattga

SEQ ID NO: 237702 - DNA, 777 bp, Homo sapiens
tatcttgtctgcatcttgtgtttcagttgtatttatcggtaaaataagccaggggagtattctgacttgcagtttaaaagctgacaggcctaggggaatgttccacaaaatagtatattttgtatatggcatggtattatagataaatgagctattgtgctgcctggcactgtcttctcccttgtgctgtcttctgctgtttctcaaggagtgattcctctctgtgttttggaaccgtgtttctcactgcctacagatgatgtccatttggcttatttcactgtcatctcatacacagctgtttcaaactgcatggaatcctcagagaactacacgccccttcctgaacaaacagtgcttcttcctgcattttcttcttaaacttttatcacttttccccccttacatatacttttgttttattctttcactaaaaaaaaaatgaggtttaattgacttacaataaactacactaatctgctttcagtcactatagattagtgtgcattttatagaattttatgtatatatgttttatatagatgaaatcatacaatatgcactcctttccttccatcctttcttcctttttaggtctggtttctttcatccagcataattattttaagatgtatgtatcagtagtttattccattttattgttgagtagtattctgttgtatggatatatcacatttgtttatttgcctgtggatagatgtttgagttgtttccagtctttggctattgcaaataaagcttctttgaacattcata

SEQ ID NO: 237703 - DNA, 539 bp, Homo sapiens
ggacttgctcttctctgtagcaatatggcaggaggtgccaggcctcgccttcttaagaggcgtggttcaaagagaaaagagcacgcctgccagtgagctgggcctgagggcagcgctgaggagatgctgctcctgacttccctggaggtttctcagaagctgcatgctaacccctgggctctgggccatcaccaggtctcatgtgttgatccaccctctgtgcttctgtgtaaaatttcatggcgttaaaattcagtcttagccaggtgggtggttcacgcctataatcccagcactttgggaggctgaggtgggaggattgcttgagcccaggagtcaagaccagcctgggcaacagagtgagaccccatctctactaaaaattaaaaaaattagccgtgcatgctggcttatgcctgtggtcccagctactccagaagctgaggcgggaggatcacttgagcctgggaggttgaggctgcagtgagccaagatggtaccactaccgtctagcctgggtgacagccagaccctatatc

SEQ ID NO: 237704 - DNA, 165 bp, Homo sapiens
catttgtttgcacctattggtgtttcttgattgttggcttttccagtatctattctggggtatatgaagcaaaagaaaacccaggaaactcaccattgtgtgagtgtcattcatggggtcccatggtccctagcagatgtgacttctttccacccttcagagtct

SEQ ID NO: 237705 - DNA, 497 bp, Homo sapiens
ccaatttaggcaactggctggtaggcggtttttttaaaaatttttcccaaaatttacccttaggtttcgcttcgccaacgcttgcgactccagttggcacggcctttgggacggcgtccggatgggaatgggggctgtcccgccagggtttaaaggggggtacccgcgaggttgcccaagttgggtaatgccatggtttgcgcaatggcttgggttttcccctccgttacagtggtttgggtacgggctctctattggggtctttgtgccccgaggtcccccttggggttttttcttttttttttgttttttttttttttttttttttttcttttttttattttggcagaggaagattgagttcctggaaatgcttacaaaatgattcctgacactgggaggagatagttagaaaaaagaagaagaaaaattatacacatatatagataaaggaagaaggtggaaagaaagggtatagacaaaagaatataaagatc

SEQ ID NO: 237706 - DNA, 429 bp, Homo sapiens
tgggggatcagtgaaccgccacaccaccaatgggtgcgtgcactcctcggctggtgccagactctggtgggccagcactggcagttgtcggcccttcccctcacttgaaaataatgggagttggcttagacccaggctctaaccagaagtctcagagattctccagggatgcagcggaggccagaggagcagaggagacccccgcatcagacagacttggtgcaatttccagctctgcccattgtagctgtgggccctgcagcacatccctccacccctctgtgcctcaacctcctcatcaacaaagtcacagcatggcccagaagagtgagagagagacagttgctatgtgcggtggctggcacacaatggggctctggaaaaacgtgagttctccccaggggagcctttggcctcaccccctcctgg

SEQ ID NO: 237707 - DNA, 298 bp, Homo sapiens
gttatgttgctgtttacatagttatttaagatttgtggagatcaaaaagaagaattgtatgttttttttctttttggcagaccttattgttcaatgtaagtagacttaagcggacttcatattttcttccagatgtaaaggaaaggtgcccaaattggcaagacgttaaaaattattattaggccaggcgtggtggctcacgcctgtaattccagcactttgggaggccaaggcaggaggatcatgtgagcccaggagttcaagaccagcctgggcaacaaagcgagaccctgtctca

SEQ ID NO: 237708 - DNA, 400 bp, Homo sapiens
tggacactggctaccctcttcaaaagccatttgttagggcacacagtttccactttggagtcaagtacgcttggttttctccccactctccatgccgttgtcaattgttgccatgcctctacaaaggtggggctacagtaacaaaactctgaagtcagacctcattctgaatcctgcctcatgaaaccacatgcaaagatatctttgagcttcagtttcctcatgaagatgataacagtggccaattcaaagggttaaatgacataacgcatgtcaagcacattgtaaggattcaataaatgtcaattattataacaacactaatttttgcctgaaaatcccagaaggatctgtgagaatggagggatggcacagtgggcaacacagggctggggggcct

SEQ ID NO: 237709 - DNA, 696 bp, Homo sapiens
gccagatggacttttttggagcatttagttccaagcaccttccctgcattttctcagttaatcctcccagtgactctttgaagcagggactatgacaatcgtcatttcacagatggagcaactgaggcacagagaggaagtcaatggccacggtcgcccagctgaggaaggatggagccggctgagatcctgttctggggatctaactctgcagcctgcattctgggctgctgtattctcccttgttgctatctgacgagcacagcatgggctcagagtacagacaggaggaaccagctaataaggagaggtctagggtgaaggctggtgccttggggaagaagagagaggtctcattctaaagggatggcattggaagttcatagtgataaagcaaagccaacaggttttggggctgagagttaaacacacagctctggtttctgccttttcacagtggtgatgaaagagcactgagagcctctcgagctaaagttgtcatcattgctcttcatagtctgaaggtgcatgaaatggtcaactttcttccaaagggcttttatgcctaagtctgtggttagtgtataaacagatatttactgaagtcctgctgggtgcagacactgtggccagccctgaggctacagtcaagatgaagccagtctctgtcctcatggagacctgtctattgataag

SEQ ID NO: 237710 - DNA, 393 bp, Homo sapiens
tataagtatgaaatgtataatatctaaaatgtacagtatttctttgataccttcgtccagagtttacatacatctcattggcttccttggcctccagggctgctcttctctttattaataacagctttattgagatataattcacataccataacatttaccctttaaaagggtacaatttggggcttagcacagtggctcatgtctgtaatcccagcactttaggaggttgaggcaggaggatcacttgaggccaagagcttgagactagcctgaactatacagtaagaccctgtctttacaaaaaaaatgtttttaaattctccatgtgtagtggtgcatgcctgtagtactggctgattgcttgagcccaggactttgaagctgcaatga

SEQ ID NO: 237711 - DNA, 650 bp, Homo sapiens
gattagatgcctactcttaagaattcaaactgtacagaagattataaagtagctgcatctttagtcataaattataccctctgtatatgatacgatagattcataggctctttctgttccctcaattctgttcttgctgtggtatcagcttgtgggccctggttggggatagagatgaactagaaaggcaaactgagtggggtgcaggtgtgagtggttgactttcaccacaggtgattagaaacactgattctggagccaatctggctagatggagtcccagctcttacttaccagctgtttggacttggacaactaataggagtgcttactgtgtgtgatatgcatacatggtttccccatttgtctttatgagttagatgtttttattccctttttatacagatgacaaaactaaaattcagggaggttacgtatggaagtagaatgaatcattagacccatttctaggactacagacaagataaatactgaaagctgcttgtccaggagatagcaaaatgctgacaaatgagaaacagacctgcatagccatcacaccctctagaaccaaggggtagtgttttaagatagaggactgggtgagtatcagaaagctgtgctttgaaaacctgactgcttttaagtat

SEQ ID NO: 237712 - DNA, 315 bp, Homo sapiens
aactctactctctctagaagaagacactaactccagattctcagtcctctggtatccataatttctggcagacaatacaaaaaatctacacacaaaatgaagcagataaatataagtaactgaaggaagagttcagtcagcagacaaaaactctgagagatgatccaactgctggaattagcaaggattttaaatcagctaattcaaaagtgttcaaggactttaaaaaatgaccataataaatgagcagatgagcatatgagggaatattagcagagatagagggcctatagaaagaatcaaattgaaattcta

SEQ ID NO: 237713 - DNA, 436 bp, Homo sapiens
ggaggcggaggttgcagtgagctgagatcacgccactgcactccagcctgggtgacagagcgagactctgtctcaaaaaaaacagaagaaaaaacaaacagaaaacaacaagtgttactgaggatgtggattaaattagacccttttgccctattagcaggaatgtaacatggtacagccattgtgggaaacagtatgaagggtccttaaaaaattaaaactaaaaattaaaaaaattatatttactgaatgattcaacaattccacttttgggtgtacttccagaagaacttcaaggagaattgcaaagatatttgcacacccatattcattgcagcattatttactgcagccaagaagtagaagcaacccagatgtctgtcagtagaataaagaaaatgtggtatatacattcaatagaatattatccagcctt

SEQ ID NO: 237714 - DNA, 441 bp, Homo sapiens
cttgcatattttctggagacaaagatgttaagtggaagaaaaaggacacaaaaggtctaggtgccccagggaaagagcagaatagacaccaccaggagcacatagaaaagaggaatgatgtggtcagttcaaaaacaacgtcaatgcctcctcaatttcatctagcattggctctgcacttataaaattatattagagtcaggctcctattcacttaactgtgattgatcatttcctttcccatcaagagaataaacccagaatagggaagcaaacaaggacagaagccaatgattattgagtgcctactgtaaacacacacttttaaataataatattattggaatttcacacagacacccagcagttctatatgattatccccttcccacaaatgagaaaatactgagatacagccatgcttggtcatgcagctagaaa

SEQ ID NO: 237715 - DNA, 807 bp, Homo sapiens
atatggatatttgtctgcatttaagagagttaacagaaaggatgtttcctgtaatttattgcctacttctgccttaattgggttataattatagaatgaaaattggattaaatttctgtaagcatgacaagtactgaatgtacagcaggtattcccctagcaaacaaaatggcttaggcaccaggaatatgtacaacatgtgttcctttgtcctcaagaagtacagtccaactcaggccaggaagagaaaggtaggcagtgtagcacagtggttaagagcacagactctgagccagactacctgaatttgaattctttaacactctttaccacaaaacagttcattttagggaaacagataaaagaattagtttttagaagcatatacatcttgtaataagcaaaataaacttcaatatgggtctgaaatttattttgcttattatatttaagcaaaaactaggccatgtactatttgaggaagcagacttatttgcctttttgcatattttataccatatattaaaaccagagtccatttgtaaactagtctacaaacaacttcagagtttagaatttgtccaaaatatttttgtttgccttgacaataatgaatcattatccattaatttatttaaatctatcttttaatttatcaacttaatgtttgtcttatggaatagtacacaacatgattaaatgagatattccaccaaaagaagttttcagatcactgaagtttaccctaccagacccccaattttttttgttttgttttgttttctgtttttttaatcttgttttcac

SEQ ID NO: 237716 - DNA, 753 bp, Homo sapiens
atatggatatttgtctgcatttaagagagttaacagaaaggatgtttcctgtaatttattgcctacttctgccttaattgggttataattatagaatgaaaattggattaaatttctgtaagcatgacaagtactgaatgtacagcaggtattcccctagcaaacaaaatggcttaggcaccaggaatatgtacaacatgtgttcctttgtcctcaagaagtacagtccaactcaggccaggaagagaaaggtaggcagtgtagcacagtggttaagagcacagactctgagccagactacctgaatttgaattctttaacactctttaccacaaaacagttcattttagggaaacagataaaagaattagtttttagaagcatatacatcttgtaataagcaaaataaacttcaatatgggtctgaaatttattttgcttattatattgcatattttataccatatattaaaaccagagtccatttgtaaactagtctacaaacaacttcagagtttagaatttgtccaaaatatttttgtttgccttgacaataatgaatcattatccattaatttatttaaatctatcttttaatttatcaacttaatgtttgtcttatggaatagtacacaacatgattaaatgagatattccaccaaaagaagttttcagatcactgaagtttaccctaccagacccccaattttttttgttttgttttgttttctgtttttttaatcttgttttcac

SEQ ID NO: 237717 - DNA, 398 bp, Homo sapiens
ccggaataaaggcttatgcccagttccctgtttaaagttgctacttattcagtgggaaccttgatgagattatgttttttaaattcttggtgtctcatatttctcatctggaatgtcagtaatgtttgtactacctcagaagttccctaaatgatataaagagttttgcacagtctctagcatatgcatggagctcgaaaatgttaactgttattcttaattcagtatactccaagatggtcatcatactgtggagaagaccaaataggaggaggaaagtcaaaggtgtgagagctgcagctgggctcttgagggatgaagtatgagccccatgcagacagaggcaccaatcaggtgaaggagggagcacccaggaatttaaataaggccagagggag

SEQ ID NO: 237718 - DNA, 456 bp, Homo sapiens
tgaaaaagatgaagcacgttcaaagctggggtgaccttacttctaggagcatcagcaaatccttacacactgcatgtagccacttcttattagaattcgagtttggcagagttggatactcaaggaacagatcagcgttggagttaacttcccattactgaagaggctggggttgagctggggcttgaacccaggttaggctctgaacaacttaggctctggacaagaacactcccgcttctggtgctacacccccccaaatgctagtgggggtccataaaccagacgctgaggaccgtcaccaccaagcacagagtgaagtaggggggccctaatgccttccttttggctcacccactttctgtgtttgtgtagttattgattcctatcaagtgagaaaatccagggcaatgttctcaagcttttgaccattaaatagtgggaaattttttgttt

SEQ ID NO: 237719 - DNA, 207 bp, Homo sapiens
cagagtttcactcttgttgccccggctggagtgcaatggtgtgatctccgctcaccgcaacctccgcttcctggtttcaagtgattctcctgcctcagcttcctgagtagctgggattacaggcgtgagccactgcgcccggcccccttctttctagcagttattaggtactagttcttatcattctctgcacagaatagcatctta

SEQ ID NO: 237720 - DNA, 878 bp, Homo sapiens
tgggctttccacggaggtaggcgtccttcaccttcctgagctcctcctggacatgctgcttggcccggatctccgcctccaggccgactgcagctccagccgcgcggacatgtccagcttctggctgcggcgcaccttccacagcgggtccagtgttcttgaccccagactagaactcctcaaagcctcgagctcttcggtcatcttggaagcaagagctatgacggtaacccatgctaatttccagtcatcagttgactttttgggctttcatttacaatcatctgggctgctgcaaaaagagtttttcctgtgtaaatttatttacaatataaatgagatgtttttaaatttcctggccaattgccctaggaaagtggatttccaatacagagaattgttactgccacccatctctaaaatgctggaacctccattgctttagtttttcacccaaatttataccaattttgatttgctcacttaaacctcttggtacattagttagtaattccttttaccttattgagttactatagttatgctccagtgatctgtactttgaaaacacattgagtccctttaaccaggaagaactcttctgggcgaccgtccacatgttcctttcccttcctaatgacctgaagtctgaactctacagagcctctgtaccttctctttaaaggcagctctgctcaccaggaattggctataattctttccaactctctcatcattttaatagctatcagcaaatgtagaggtgtaggggattttgtaacatctgatgtatgtaaaaagaaatattcaagttggaaggcagactagaactgccctgagagatgtttgatgtacacattaaaaataagaaattttac

SEQ ID NO: 237721 - DNA, 1021 bp, Homo sapiens
ccggcagctcgcccctgagctcaactggctggcaggtctgatggcttccctcacaccatccgcactcccaagccgtgtgcaaagatccagcacgttatagaaggtttaaacaagggtccttgaagtaaagttttcagaaccagttgtctggcgaacaaacagatgcctgttccaacatttgtgtgaggatggcttgaaattttcattgacagctgaaaatagagccctcatgtcctatagattaatataaaggatgtgagggctctatttatcctctagcacattctagacggaaaccaagtttcccactgttagtggacagaagaagaaaagaggggagatgggcaactcccgaagtccgctctatgccagacacaagttctgatctccaaatatcatctgtacgtgtccggggtgggcgtgggggccttggtcgtggtgtcctatgattcagacacaaccgtcctgtctattctttttttttttttttgagacggagtctcactctgtcccccaggctggagtgcagtggcgccatctcggctcactgcaagctccgcctccagggttcacgccattctcctgcctcagcctccggagtagctgggactacaggcgcccgctaccacgcccggctaatttttttttttttttttttttttggatttttagtagagacggggtttcaccgtgttagccaggatggtctcgatctcctgacctcatgatccacccgcttcggcctctcaaagtgctgggattattcttaaatgattttatacacacccatttttccccttttacctgtaaactttgaaatgaagttgaaaggccaccagtgtccatgacaggtccctctgcacacatggtggcatggttaggagatacatgagcctgttcccaccccagggtttttattctgtcatgcagagccatgtgaaggatgccggtgactattgaagcctaaacagaacaaacccaggagcccggggggaaaaatggctttattctcagtatgaaa

SEQ ID NO: 237722 - DNA, 842 bp, Homo sapiens
ttacagtgctgtccggcagggcagtgtgaggccactctgtcctcctttgacctctttcttcttcagcagccaaatggaggctctctaaaggtgatgattaacttggcataaacatgccaagctttcctgagcgtttgccctgaattgggctgtctcttgctgctctgagacagggagactggctgtctggctgaccagcccttggggctgaggtctggctgtcaagttgcaggttccaggcaaccagcaattcctggttgtcacctggctctagagattagagcagcagtgttgctcactagaactttgtgcagtgatagtgttctttaatctgcactgtctagtactgtagccatgggccacctgtgactttcaagcccttgaaatgtggctaccggccaggcacagtggctcatgcctgttatccaggggtgtccaatcttttggcttccctgggccacaatggaagaagaattgtcttgggccacacataatatacagtaacactaatgatagctgatgagctttaaaaaaaaaatcacaaaaaatatctcataatgttttaggaaagtttacgaatttgtgttgggctgcatttgaagtggtcctgggccttggtctgcgggttggacaagcttgttataatcccagcattttgggaggtggaggcaggaagatcacttgggtccaggagtttgagaccagcctgggcaatatggcggatccccatctccacaaaaattgcaaaagttaccggaatggtgtcatgcgcttatagtccagctgcttgggagactgagcagggagaattgcttcagcctggtaggggcagaggttgcaat

SEQ ID NO: 237723 - DNA, 579 bp, Homo sapiens
gccaggcacagtggctcacgcctgtaatcccagcactttgggaggccgaggtaggcagatcatgaagtcaggagatcgagaccatcttggctaacacagtgaaaccccgtctctactaaaaatacaaaaaattagctgggcatggtggcgggtgcctaagtcccagctactcaggaggctgaggcaggagaatggtgtgaacccgagaggcggagcttgcagtgagccaagatcgcaccactgcactccagcctgggcgaaagagtgagactccgtctcaaaaaaaaaaaaaaaatagccagatgtggtggcatgtgcctgtagtcccagccactcaagaggctgaggtgggaggatcacttgagccctggaggttgaggctgcagcaagccatgactgcatcactgcactccagcctgggcaacagagcaagactctatctcaaataataataagtaccttgaagaagaaaacagagcaatatgacaggtagtgccataacaagtaggatggcccagaaaagattctctgagaaattaccatttgagctgagagctaaatgatgaggctgtaaaagga

SEQ ID NO: 237724 - DNA, 734 bp, Homo sapiens
acctctggcactaaaaccaccgcttcatatactttaagtggaagaccaccagattttcaggatttagaaagacctccttcaacccttcaaaatgaagaaatctgtgcatttggcaagctaaaaagagactgctctttgagtgaaaatgttgttggccaaaatagacgttgatcaggagtgatttcatcgtgacaccatcaccataagaagctgtcttcccaacatgttacccgaaaatagaactaatctttcctctgttcatggcattctgtcatttatccagtcttctactcgtagggcttaccagcatatcgtggatgagatgggtgaaaatcgcagacctgtgcagtatggcaggtctgctgctaccacttctaatccgcatcgtgacaacatcaggtatggcacttcaaacatagatacaagtgaaggaacttcggatgacatgactgttgcagatgcagcttcgttaagacgacagataatcaaactaaatagacgcttgcaacatctagaagaggagaacaaggaacgtgccaagagagaaatggtcatgtattcaattaccataggattgtggctgcttagtaactggctctggtttcgccgctagaggtaacttcagctcttaaacatactgcctcaacagctagaaatatagagaacttgcaaacttaagaacaccacggcagccactcgaaccaccccgactcatagaggcaaccccatcctcg

SEQ ID NO: 237725 - DNA, 633 bp, Homo sapiens
gtgtgtgccccctccacctagccactccaccatgtctacaaagattgaacgactgccccacagtgtgaagggactttccacatgggacttcagtcacagaccttgaagcagacctgatggaatgaatgaagaaaaaaatggcttcctttcaattgatacttattatattgttgacagatttaaaaattaattgaggctgggcatggtggctcatgactataataccagcactctgggaggtcacaatgggaggactgcttgagcccaggagttcaagaccagcctgagcaacagagtaagaccttgtctctactaaaattgtttttaaaaatcagccaggtgtgatggtgcgtgcctatagtcccagctattcaggaggctgaggtgggaggatcgcttgagcccgggagattgaggctgcagtgagccatggtcatgccaccgcactcgagcctaggcgacagagcgagactgtcttaaagaaataaaattaaaatgaactcaaaatacacttgtaattttaaaaaatgctaatcctgatatgccttcttaaaaaaaaaaaaccctgtttctttttaaaaaattaccagttaatctattttcattttcaataaaactcaaaaagaaaaacaa

SEQ ID NO: 237726 - DNA, 337 bp, Homo sapiens
ggtcttttctgtgggaactggtgaccttttgagggaagaaaaatatttcttctaacttataatctcttcaagtatcctgaatacactgaaaaggatatccctcttcttcccaaaatacctgtttactggtaacttaaatacttctaatgtgatggttctcaatctttactggggtcaccgacatctttgagaatttcatgaaagctgtgggccccatcccagaaacatgcacttatttgttctcagataaaaatttttgtgtgtatagactttgcgtatctcctgaaggctatcatcaatttgtctgatggcaaattgagaaaggagagatgccaga

SEQ ID NO: 237727 - DNA, 565 bp, Homo sapiens
tgagttttagagatttttttttaaaaaatagttttgttttacaattctatacactatttcatagttaccatatcaaattcataaaacaggcatggtcagaaaaatcaagatttaatcaactatccaccctcatttgttctcttttcttagatgacaagatactactgaaacaaccaaacaaacaaacaaatgcccagtcaagaaaaagccacattcaaaatcgtaggcaatttcatggtgtttttactcacccttgccccaccacttcactggcacaaagcaaaatggtcagaagaaagaggctcactccctggtcccctccattaaaatggaaaaagcagagtgctaattgtaaagttattgcctgtgtccaagggactggtatgtgtcttacctgtcttggagctcagagagataacagtgcatagtttgaatattagactgaaaggtgaagaagggagtggcaggtgcagcagcatgtgatactgaagaagtactacagagtcacacatgactggtagcaatagattgtgggtagaggaatataatggcatatctaaggctc

SEQ ID NO: 237728 - DNA, 465 bp, Homo sapiens
atgtgaatttatttatatggtaaaagatttgtcttgttttgtgggaatccttccattaatttcctcctgcagccccagtgtggggattaggaatatgggctctgatgctgggtagacctgggttcaagttctgattatgccatcacttgctctttgaacaaaatccttagctactttatgcctcagtttcctcattacttaatataagacaataccaacttcatagggttttaatttttccacgtgtatatgtgtaaaacataactttattcctggtaaagtactatgctgtcacccttaagtcgaatgtttgtgccttgttaaaaaaaaacactggtttaaaacacctacttgtggtcgggcgcaggggcttgtgcctgtaacctcagcactttggaaagccaatgtgggaggattgctttagtccaggagtaacatagggagtcccttgtctctccaaaaaaa

SEQ ID NO: 237729 - DNA, 462 bp, Homo sapiens
attctcttgaggccatcagaacaagatcaaaggttgtagagccttgaccacagtattaaagcaaagcctcaaaatgacttaaggaatcttaggaaataaaatgccacagtcctggacatttatcatttggcagcaagctaaacatttcctaaaacttttacaagtaatttaggtacctaatggaaattttttgtttttaaattctggagttgcctaaattgtttaggagaaatttagctggaatctggcgataggactgtttatatgtgcttggctcagggtggctgtgttgtccacattagcatgaccatgggctccttatcgaagccctggttcccagtaagtgctgtttgcaagagtgaggtggagtttggtggctttcaggccacccagagtgccatgtgtatctgtttgataaactctgtggtttgtctgttctctgtgtttttgccagattgttta

SEQ ID NO: 237730 - DNA, 2163 bp, Homo sapiens
  misc_feature (1493)..(1493): n is a, c, g, or t
  misc_feature (1595)..(1595): n is a, c, g, or t
tctttaattatgtcacagtttgttgatgaatacattgcctttgcttcagttaaatcaagtaggatgcagtgactccaagtctgaggggtgcttcccaggaagagccaccccccacagccatttgcagagcattggagtaagttttaccttcatcccttagatgtgaatttgttatcctcactgtgacaatcccttatcacatggcttttagaaggattctcaaaaagctagactctcacattcaactttgcaattgcctggctgggtgttacgtttctttgcctcctattagagaccctatcagcatctaaaactagcgttgtttgaggatgttggagccaacggttctttgccagatagaactttgtgtgtccaaataaatggttcaaaatcatcaagcaaataaataccctggaataagagaagcctcatgaggatttgactccaaattgacttcctctgttctgcagtaagaagttaggaattaaaccaaaccttgcctgaggttcaggtatactcaaaagcaatgaggtgtggctcaggtgtgcgctggcaaggtcactgtgaagttcagccagaggctttgcaagcctgggcctgagaagccagacctcttagatccagaagggccaatggagctgggctggcctgctgccactcacaggcagagactctgccagcagaagggactctgctgtcagagctggagggcagcggaccacatggctgaggcccaaccacaggtctcctgactcaaaacctcttcccagggcttgtcctcctccctaaatatatgtgccccaaattgtcaccagatctcgggaaagcactggctttgtctgggataaacaccaactccacagcacacccagtcattaccagattggcagttgttgtctaggtcttgtggcttcttggggttttctcgggtgtctctctcccaaatctttcccctttcctttgattatattcacataaacattgagctttgtagccctcaagctctctcaagcataactcactttgtccctctctgtttccctatgcagtcgcctctccctctgctgtcagaggcccatccaactgctccagccctgtggctccagcgtctcctcctctctctttcccctgctctgtttctgggaagatctatctgagggtcctgaaggaggagactcgaggttgttctcttggacaaagaggtctgggtggatgacataattcactttacgtcttagaaaaataaccttgtggctcttggctctcctgggctgtcattttggttgcctaagggctctaggcagaaggccagggagcccagccccagcctagaacttgcagggctcagagagctgcagtgacggggtgtccgctgtgcctgccgccccccttgccatggactctacttgcagaacttcacagctgagaggctggccctgagattcccctttatgcctcccaaagcttgcgattgcttaattatacgctgctgngtaccaatttccactttctctcccggtgtgttttgactgataactttgacttaacctcctgatgccagaaactatgttggctactgctctggcggcaggaanaggccggttccagggaaggctgaatgcctattgttctggatcattttgagaaaaaaaaagagataccttgaagaaagatgaagacaaaatatggaagggtgctgaatttacaaaaagcctaaggggaaaaaactcaaatgtccctcaggagtggaatgagtaaacaaatcatggcgtgttcacacaatggaatgctacctaccaataaaaaggaatgaactgcggatgcacacagaaacatgggtgaatccactaggcatcatgttgtgtaaaagaaagccaacttggccaggcgtggtggctcacgcctgtaatctcagcacgctggggaggctgaggcaggtggatcacttgaggtcaggagttcaagactagcctggccaagatgatgaaaccccatctctactaaaaatacacaaattagctgggcgtggtggtgcgtgcctgtaatcccagctgcttgggaggctgaggaagagaattgcttgaacccaggaggtggaggttgcagtgagccaagattgcaccactgcactccagcctgggtgacagagtgagactctgtctc

SEQ ID NO: 237731 - DNA, 621 bp, Homo sapiens
gaacgattattgggtagtcatattagcacccagcttcaacttagctacgctcgaagtgttgattgggccgatacaactcaccaggaacagcttgcatgttacgaattattcgctcactataggaatttcgcctcgagccaagattcggcacgaggaaccaggtgattaaaaagttgaagaaaattacaattaagaattgataaaaaaattgaatgatactcaggtcatgtgtgtggtattttctgtgaaattaagcccagctgaaaggtatgggcttaggattctggctgacacagcaagcggaaatctggccatggggctagcctgttctctctcgggtgagctgaatgttctggagatgcattcaggttccaatgataactttaaatttcttctcaatctcattggattaaggagagtgtaacaatctgtcacatttaggaactaagtattaaagaccaagtgaaagtgattattttacttttgacacaacaatttctagtgaatattctgagtaattttctgatgaatattctagatgtataagttctgtttaaaggcagaatttattttgaagtttgtaactttaataaattgaatattaatttcaaaaaagctgta

SEQ ID NO: 237732 - DNA, 362 bp, Homo sapiens
ggcaattgagatcggaactccaaggattatgggaaacttggtgttaaatgggacagaaaacatgaaaaagcaatttggaggctctggcaacgaagtctgcttgactgcaacctcatatcaggattcctgactttatgctgcctgtgttttttctagactgaagatttgaaaatacatccacgaacatttcaacatggaacgaagaattatagttccttctctggctatatccataaagaagtagttatgaaatgtttaaaaccaaaggcaaatagtgtctctaaattcagacaaacgtagacctattcccacttttttcacatagtagtgcgctgtttcagagttaaacaaacaaaaaaaaa

SEQ ID NO: 237733 - DNA, 2498 bp, Homo sapiens
ccgggaccatggagcctggtgacgcggcgcgccctggctcgggtcgggctaccggggcgccgccgccgcggctgctgctgctgccgctgctgctgggttgggggctgcgagtcgcggccgcggcctcggcctcctcctctggggcggcggcggaggacagcagcgccatggaggagctcgctactgagaaggaggcggaggagagccaccggcaagacagcgtgagcctgctcaccttcatcctgctgctcacgctcaccatcctcaccatctggctcttcaagcaccgccgggtgcgctttctgcacgagaccgggctggccatgatctatgggctcatcgttggggtgatcctgaggtatggtacccctgctaccagtggccgtgacaaatcactcagctgcactcaggaagacagggccttcagtaccttattagtgaatgtcagcggaaagttcttcgaatacactctgaaaggagaaatcagtcctggcaagatcaacagcgtagagcagaatgatatgctacggaaggtaacattcgatccagaagtatttttcaacattcttctgcctccaattatttttcatgctggatacagcttaaagaagagacactttttcagaaatcttggatctatactggcctatgccttcttggggactgctgtttcatgcttcattattggaaatctcatgtatggtgtggtgaagctcatgaagattatgggacagctctcagataaattttactacacagattgtctcttttttggagcaatcatctctgccactgacccagtgactgtgctggcgatatttaatgaattgcatgcagacgtggatctttacgcacttctttttggagagagcgtcctaaatgatgctgttgccattgtactgtcctcgtctattgttgcctaccagccagcgggactgaacactcacgcctttgatgctgctgccttttttaagtcagttggcatttttctaggtatatttagtggctcttttaccatgggagctgtgactggtgttaatgccaacgtgactaagtttaccaaactgcactgcttccccctgctggagacggcgctgttcttcctcatgtcctggagcacgtttctcttggcagaagcctgcggatttacaggtgttgtagctgtccttttctgtggaatcacacaagctcattacacctacaacaatctgtcggtggaatcaagaagtcgaaccaagcagctctttgaggtgttacatttcctggcagagaacttcatcttctcctacatgggcctggcactgtttaccttccagaagcacgttttcagccccattttcatcatcggagcttttgttgccatcttcctgggcagagccgcgcacatctacccgctctccttcttcctcaacttgggcagaaggcataagattggctggaattttcaacacatgatgatgttttcaggcctcaggggagcaatggcatttgcgttggccatccgtgacacggcatcctatgctcgccagatgatgttcacgaccacccttctcattgtgttcttcactgtctggatcattggaggaggcacgacacccatgttgtcatggcttaacatcagagttggcgtcgaggagccctccgaagaggaccagaatgaacaccactggcagtacttcagagttggtgttgaccccgatcaagacccaccacccaacaacgacagctttcaagtcttacaaggggacggcccagattctgccagaggaaaccggacaaaacaggagagcgcatggatattcaggctgtggtacagctttgatcacaattacctgaagcccatcctcacacacagtggtcccccactaaccaccacgctccccgcctggtgtggcttactagctcgatgtctgaccagtccccaggtgtacgataaccaagagccactgagagaggaagactctgatttcatcctgaccgaaggcgacctgacattgacctacggggacagcacagtgactgcaaatggctcctcaagttcgcacaccgcctccacgagtctggagggcagccggagaacgaagagcagctcggaggaagtgctggagcgagacctgggaatgggagaccagaaggtttcgagccggggcacccgcctagtgtttcccctggaagataatgcttgactttccccccaagccctggcgcgatggggtaggctcccgatggggtgaggacagctgcaagccctagtgttgttggaggtggggcagtgactagattgaactaactcttctattttattggggtctgaagctattgtaacacttaaaatttaactcacaatgcagatggtgaggcaaaagtgtctctaaattcagacaaacgtagacctattcccacttttttcacatagtagtgcgctgtttcagagttaaacaaacaaaaaaaaatagcatgctttaatggtctcctaattcattcacctgcagtatctg

SEQ ID NO: 237734 - DNA, 2420 bp, Homo sapiens
ccgggaccatggagcctggtgacgcggcgcgccctggctcgggtcgggctaccggggcgccgccgccgcggctgctgctgctgccgctgctgctgggttgggggctgcgagtcgcggccgcggcctcggcctcctcctctggggcggcggcggaggacagcagcgccatggaggagctcgctactgagaaggaggcggaggagagccaccggcaagacagcgtgagcctgctcaccttcatcctgctgctcacgctcaccatcctcaccatctggctcttcaagcaccgccgggtgcgctttctgcacgagaccgggctggccatgatctatgggctcatcgttggggtgatcctgaggtatggtacccctgctaccagtggccgtgacaaatcactcagctgcactcaggaagacagggccttcagtaccttattagtgaatgtcagcggaaagttcttcgaatacactctgaaaggagaaatcagtcctggcaagatcaacagcgtagagcagaatgatatgctacggaaggtaacattcgatccagaagtatttttcaacattcttctgcctccaattatttttcatgctggatacagcttaaagaagagacactttttcagaaatcttggatctatactggcctatgccttcttggggactgctgtttcatgcttcattattggaaatctcatgtatggtgtggtgaagctcatgaagattatgggacagctctcagataaattttactacacagattgtctcttttttggagcaatcatctctgccactgacccagtgactgtgctggcgatatttaatgaattgcatgcagacgtggatctttacgcacttctttttggagagagcgtcctaaatgatgctgttgccattgtactgtcctcgtctattgttgcctaccagccagcgggactgaacactcacgcctttgatgctgctgccttttttaagtcagttggcatttttctaggtatatttagtggctcttttaccatgggagctgtgactggtgttaatgccaacgtgactaagtttaccaaactgcactgcttccccctgctggagacggcgctgttcttcctcatgtcctggagcacgtttctcttggcagaagcctgcggatttacaggtgttgtagctgtccttttctgtggaatcacacaagctcattacacctacaacaatctgtcggtggaatcaagaagtcgaaccaagcagctctttgaggtgttacatttcctggcagagaacttcatcttctcctacatgggcctggcactgtttaccttccagaagcacgttttcagccccattttcatcatcggagcttttgttgccatcttcctgggcagagccgcgcacatctacccgctctccttcttcctcaacttgggcagaaggcataagattggctggaattttcaacacatgatgatgttttcaggcctcaggggagcaatggcatttgcgttggccatccgtgacacggcatcctatgctcgccagatgatgttcacgaccacccttctcattgtgttcttcactgtctggatcattggaggaggcacgacacccatgttgtcatggcttaacatcagagttggcgtcgaggagccctccgaagaggaccagaatgaacaccactggcagtacttcagagttggtgttgaccccgatcaagacccaccacccaacaacgacagctttcaagtcttacaaggggacggcccagattctgccagaggaaaccggacaaaacaggagagcgcatggatattcaggctgtggtacagctttgatcacaattacctgaagcccatcctcacacacagtggtcccccactaaccaccacgctccccgcctggtgtggcttactagctcgatgtctgaccagtccccaggtgtacgataaccaagagccactgagagaggaagactctgatttcatcctgaccgaaggcgacctgacattgacctacggggacagcacagtgactgcaaatggctcctcaagttcgcacaccgcctccacgagtctggagggcagccggagaacgaagagcagctcggaggaagtgctggagcgagacctgggaatgggagaccagaaggtttcgagccggggcacccgcctagtgtttcccctggaagataatgcttgactttccccccaagccctggcgcgatgggactgaagatttgaaaatacatccacgaacatttcaacatggaacgaagaattatagttccttctctggctatatccataaagaagtagttatgaaatgtttaaaaccaaaggcaaatagtgtctctaaattcagacaaacgtagacctattcccacttttttcacatagtagtgcgctgtttcagagttaaacaaacaaaaaaaaa

SEQ ID NO: 237735 - DNA, 2392 bp, Homo sapiens
ccgggaccatggagcctggtgacgcggcgcgccctggctcgggtcgggctaccggggcgccgccgccgcggctgctgctgctgccgctgctgctgggttgggggctgcgagtcgcggccgcggcctcggcctcctcctctggggcggcggcggaggacagcagcgccatggaggagctcgctactgagaaggaggcggaggagagccaccggcaagacagcgtgagcctgctcaccttcatcctgctgctcacgctcaccatcctcaccatctggctcttcaagcaccgccgggtgcgctttctgcacgagaccgggctggccatgatctatgggctcatcgttggggtgatcctgaggtatggtacccctgctaccagtggccgtgacaaatcactcagctgcactcaggaagacagggccttcagtaccttattagtgaatgtcagcggaaagttcttcgaatacactctgaaaggagaaatcagtcctggcaagatcaacagcgtagagcagaatgatatgctacggaaggtaacattcgatccagaagtatttttcaacattcttctgcctccaattatttttcatgctggatacagcttaaagaagagacactttttcagaaatcttggatctatactggcctatgccttcttggggactgctgtttcatgcttcattattggaaatctcatgtatggtgtggtgaagctcatgaagattatgggacagctctcagataaattttactacacagattgtctcttttttggagcaatcatctctgccactgacccagtgactgtgctggcgatatttaatgaattgcatgcagacgtggatctttacgcacttctttttggagagagcgtcctaaatgatgctgttgccattgtactgtcctcgtctattgttgcctaccagccagcgggactgaacactcacgcctttgatgctgctgccttttttaagtcagttggcatttttctaggtatatttagtggctcttttaccatgggagctgtgactggtgttaatgccaacgtgactaagtttaccaaactgcactgcttccccctgctggagacggcgctgttcttcctcatgtcctggagcacgtttctcttggcagaagcctgcggatttacaggtgttgtagctgtccttttctgtggaatcacacaagctcattacacctacaacaatctgtcggtggaatcaagaagtcgaaccaagcagctctttgaggtgttacatttcctggcagagaacttcatcttctcctacatgggcctggcactgtttaccttccagaagcacgttttcagccccattttcatcatcggagcttttgttgccatcttcctgggcagagccgcgcacatctacccgctctccttcttcctcaacttgggcagaaggcataagattggctggaattttcaacacatgatgatgttttcaggcctcaggggagcaatggcatttgcgttggccatccgtgacacggcatcctatgctcgccagatgatgttcacgaccacccttctcattgtgttcttcactgtctggatcattggaggaggcacgacacccatgttgtcatggcttaacatcagagttggcgtcgaggagccctccgaagaggaccagaatgaacaccactggcagtacttcagagttggtgttgaccccgatcaagacccaccacccaacaacgacagctttcaagtcttacaaggggacggcccagattctgccagaggaaaccggacaaaacaggagagcgcatggatattcaggctgtggtacagctttgatcacaattacctgaagcccatcctcacacacagtggtcccccactaaccaccacgctccccgcctggtgtggcttactagctcgatgtctgaccagtccccaggtgtacgataaccaagagccactgagagaggaagactctgatttcatcctgaccgaaggcgacctgacattgacctacggggacagcacagtgactgcaaatggctcctcaagttcgcacaccgcctccacgagtctggagggcagccggagaacgaagagcagctcggaggaagtgctggagcgagacctgggaatgggagaccagaaggtttcgagccggggcacccgcctagtgtttcccctggaagataatgcttgactttccccccaagccctggcgcgatgggactgaagatttgaaaatacatccacgaacatttcaacatggaacgaagaattatagttccttctctgggtccatgccatgtaagacggcggcccgtgaagctcgtaatcctgagccataactgtttccctatgtgtataatacgaccgtcctgtgaatccgtgaatcatagtcatagc

SEQ ID NO: 237736 - DNA, 2438 bp, Homo sapiens
ccgggaccatggagcctggtgacgcggcgcgccctggctcgggtcgggctaccggggcgccgccgccgcggctgctgctgctgccgctgctgctgggttgggggctgcgagtcgcggccgcggcctcggcctcctcctctggggcggcggcggaggacagcagcgccatggaggagctcgctactgagaaggaggcggaggagagccaccggcaagacagcgtgagcctgctcaccttcatcctgctgctcacgctcaccatcctcaccatctggctcttcaagcaccgccgggtgcgctttctgcacgagaccgggctggccatgatctatgggctcatcgttggggtgatcctgaggtatggtacccctgctaccagtggccgtgacaaatcactcagctgcactcaggaagacagggccttcagtaccttattagtgaatgtcagcggaaagttcttcgaatacactctgaaaggagaaatcagtcctggcaagatcaacagcgtagagcagaatgatatgctacggaaggtaacattcgatccagaagtatttttcaacattcttctgcctccaattatttttcatgctggatacagcttaaagaagagacactttttcagaaatcttggatctatactggcctatgccttcttggggactgctgtttcatgcttcattattggaaatctcatgtatggtgtggtgaagctcatgaagattatgggacagctctcagataaattttactacacagattgtctcttttttggagcaatcatctctgccactgacccagtgactgtgctggcgatatttaatgaattgcatgcagacgtggatctttacgcacttctttttggagagagcgtcctaaatgatgctgttgccattgtactgtcctcgtctattgttgcctaccagccagcgggactgaacactcacgcctttgatgctgctgccttttttaagtcagttggcatttttctaggtatatttagtggctcttttaccatgggagctgtgactggtgttaatgccaacgtgactaagtttaccaaactgcactgcttccccctgctggagacggcgctgttcttcctcatgtcctggagcacgtttctcttggcagaagcctgcggatttacaggtgttgtagctgtccttttctgtggaatcacacaagctcattacacctacaacaatctgtcggtggaatcaagaagtcgaaccaagcagctctttgaggtgttacatttcctggcagagaacttcatcttctcctacatgggcctggcactgtttaccttccagaagcacgttttcagccccattttcatcatcggagcttttgttgccatcttcctgggcagagccgcgcacatctacccgctctccttcttcctcaacttgggcagaaggcataagattggctggaattttcaacacatgatgatgttttcaggcctcaggggagcaatggcatttgcgttggccatccgtgacacggcatcctatgctcgccagatgatgttcacgaccacccttctcattgtgttcttcactgtctggatcattggaggaggcacgacacccatgttgtcatggcttaacatcagagttggtgttgaccccgatcaagacccaccacccaacaacgacagctttcaagtcttacaaggggacggcccagattctgccagaggaaaccggacaaaacaggagagcgcatggatattcaggctgtggtacagctttgatcacaattacctgaagcccatcctcacacacagtggtcccccactaaccaccacgctccccgcctggtgtggcttactagctcgatgtctgaccagtccccaggtgtacgataaccaagagccactgagagaggaagactctgatttcatcctgaccgaaggcgacctgacattgacctacggggacagcacagtgactgcaaatggctcctcaagttcgcacaccgcctccacgagtctggagggcagccggagaacgaagagcagctcggaggaagtgctggagcgagacctgggaatgggagaccagaaggtttcgagccggggcacccgcctagtgtttcccctggaagataatgcttgactttccccccaagccctggcgcgatggggtaggctcccgatggggtgaggacagctgcaagccctagtgttgttggaggtggggcagtgactagattgaactaactcttctattttattggggtctgaagctattgtaacacttaaaatttaactcacaatgcagatggtgaggcaaaagtgtctctaaattcagacaaacgtagacctattcccacttttttcacatagtagtgcgctgtttcagagttaaacaaacaaaaaaaaatagcatgctttaatggtctcctaattcattcacctgcagtatctg

SEQ ID NO: 237737 - DNA, 1511 bp, Homo sapiens
ccgggaccatggagcctggtgacgcggcgcgccctggctcgggtcgggctaccggggcgccgccgccgcggctgctgctgctgccgctgctgctgggttgggggctgcgagtcgcggccgcggcctcggcctcctcctctggggcggcggcggaggacagcagcgccatggaggagctcgctactgagaaggaggcggaggagagccaccggcaagacagcgtgagcctgctcaccttcatcctgctgctcacgctcaccatcctcaccatctggctcttcaagcaccgccgggtgcgctttctgcacgagaccgggctggccatgatctatgggctcatcgttggggtgatcctgaggtatggtacccctgctaccagtggccgtgacaaatcactcagctgcactcaggaagacagggccttcagtaccttattagtgaatgtcagcggaaagttcttcgaatacactctgaaaggagaaatcagtcctggcaagatcaacagcgtagagcagaatgatatgctacggaaggtaacattcgatccagaagtatttttcaacattcttctgcctccaattatttttcatgctggatacagcttaaagaagagacactttttcagaaatcttggatctatactggcctatgccttcttggggactgctgtttcatgcttcattattggaaatctcatgtatggtgtggtgaagctcatgaagattatgggacagctctcagataaattttactacacagattgtctcttttttggagcaatcatctctgccactgacccagtgactgtgctggcgatatttaatgaattgcatgcagacgtggatctttacgcacttctttttggagagagcgtcctaaatgatgctgttgccattgtactgtcctcgtctattgttgcctaccagccagcgggactgaacactcacgcctttgatgctgctgccttttttaagtcagttggcatttttctaggtatatttagtggctcttttaccatgggagctgtgactggtgttaatgccaacgtgactaagtttaccaaactgcactgcttccccctgctggagacggcgctgttcttcctcatgtcctggagcacgtttctcttggcagaagcctgcggatttacaggtgttgtagctgtccttttctgtggaatcacacaagctcattacacctacaacaatctgtcggtggaatcaagaagtcgaaccaagcagctctttgaggtgttacatttcctggcagagaacttcatcttctcctacatgggcctggcactgtttaccttccagaagcacgttttcagccccattttcatcatcggagcttttgttgccatcttcctgggcagagccgcgcacatctacccgctctccttcttcctcaacttgggcagaaggcataagattggctggaattttcaacacatgatgatgttttcaggtaaaaaggcgtaagtgtaaagaaaatgagttttattcagcagg

SEQ ID NO: 237738 - DNA, 1287 bp, Homo sapiens
ccgggaccatggagcctggtgacgcggcgcgccctggctcgggtcgggctaccggggcgccgccgccgcggctgctgctgctgccgctgctgctgggttgggggctgcgagtcgcggccgcggcctcggcctcctcctctggggcggcggcggaggacagcagcgccatggaggagctcgctactgagaaggaggcggaggagagccaccggcaagacagcgtgagcctgctcaccttcatcctgctgctcacgctcaccatcctcaccatctggctcttcaagcaccgccgggtgcgctttctgcacgagaccgggctggccatgatctatgggctcatcgttggggtgatcctgaggtatggtacccctgctaccagtggccgtgacaaatcactcagctgcactcaggaagacagggccttcagtaccttattagtgaatgtcagcggaaagttcttcgaatacactctgaaaggagaaatcagtcctggcaagatcaacagcgtagagcagaatgatatgctacggaaggtaacattcgatccagaagtatttttcaacattcttctgcctccaattatttttcatgctggatacagcttaaagaagagacactttttcagaaatcttggatctatactggcctatgccttcttggggactgctgtttcatgcttcattattggaaatctcatgtatggtgtggtgaagctcatgaagattatgggacagctctcagataaattttactacacagattgtctcttttttggagcaatcatctctgccactgacccagaaccaagagccactgagagaggaagactctgatttcatcctgaccgaaggcgacctgacattgacctacggggacagcacagtgactgcaaatggctcctcaagttcgcacaccgcctccacgagtctggagggcagccggagaacgaagagcagctcggaggaagtgctggagcgagacctgggaatgggagaccagaaggtttcgagccggggcacccgcctagtgtttcccctggaagataatgcttgactttccccccaagccctggcgcgatgggactgaagatttgaaaatacatccacgaacatttcaacatggaacgaagaattatagttccttctctggctatatccataaagaagtagttatgaaatgtttaaaaccaaaggcaaatagtgtctctaaattcagacaaacgtagacctattcccacttttttcacatagtagtgcgctgtttcagagttaaacaaacaaaaaaaaa

SEQ ID NO: 237739 - DNA, 2036 bp, Homo sapiens
  misc_feature (776)..(776): n is a, c, g, or t
  misc_feature (1041)..(1041): n is a, c, g, or t
  misc_feature (1473)..(1473): n is a, c, g, or t
tacaaccatccattcctctgcccttcctccattcatccacccatccctctgtctattcttccattctttcctccatccacctattcacccatacaaccttccatccccccatccatccaaacatccatccatccactgaacaaatccatggcactgccccactggccttcttttatttcctctgtgaaccccttctctcctacctctgagccttcacgtacttcccctcccattcccatatacacccctagggaatacctactcagcttaagaaaagcctcacctaaatcccagtctgaagtaggtcctcctgctattcctctcctgaagaacctcattccctccttttcgacagttgtcatagacatcaccaaacgtttgcttttgggttgatttacttattcctgtctccctgaccagactggaagctccaagagggcaggcattaggtcttccttcagtgcctaccccagagcctacctggcccacagtaggggctccatagggaagtggtgaatgctggcattgagtgaacttagaaagtactgtgtgcagggcacaggcccagatgtcttgtcaggatttgcttctgaatgtgactgcctctcaaggcttagcatctatagaaagagataaagaatgtgtatgcaggattgcaatgcaggatgcgactcaggaaggaggcagggagggatggcatggggagggccagggtgaacatggactgaacctggccctcagtgttcacagctgcataagccactcgatctccatgngccttcatttcctcaccagcaaaatggagctaataaaactagagaggagaaagaaacactattaccataaaattgctttaaattgttcaaatatatcttctgagttctgtgaaaagttttttaagtagataaaattattttaagaactgaaatcaatgtgattcattgatgtaattttttatagacagagccaagtaatggaaattaataaacaactaaaaacatatatttatttaaattgagattgtcatgttattgtaaggancatgggaaatctacctagaaagaagttcttggcagggtaagtgctcaactgctctgtttttgaattctatttgaatggttttgggtaaacttcattgaggaggtgatgtttaaactaagctgtgaaaaatatgtaggcttccaatattttaacactacaaatattagatacaattttttaacacttttatatactcttctagtttctatggctatgtaacaaactaccccaaaacataatggtatactgcaatcatttatcatgttcacagattctgtggctctagaatctggacagagaatagcaagggcagcttgactctatcctgggatgactgaggcctcagttgaggctcagtctggggctgaaggctggggctgaagtcctctcagggcgcacgtgtttgttcacatgtccagcgttggtgctggntgtcatctgacctcagttcctctccatgtgggctgctcccacatctgcttcggctagattgagcttcctcacaacatggtgactggattccaagggcgagtatagagagtgagagtcaggtggcagctgtatcgtttagatgacctagtctcaaaagtcacatggcatcacttcctgcacattctactggtcaaatagtcacaaggtccctagattcaaggggaattgacctgtgccccatctgtcagtgagaggaatgtccatcatactgtaaaaagagtatgtgaatagtagcaaaatattgatgcagccatccctggagagacacagcctgacatacacatatcatctcatgaaatactcagtacaatctgtgaggaaggagcccttcttaactccattttatagaagaggaaattaaggcttgacaaagtcaaaagttttgtcctagctgggcacagtggcttacacctgtaatcccaatgctttgggagaccgaggtgagagctttaaggccggagttcatgaccagcctgggcaacatagcgagactgtgtctctac

SEQ ID NO: 237740 - DNA, 498 bp, Homo sapiens
atgctgccattgttgatatggttcctggcaagcccatgtgtgttgagagcttctcagactatccacctttgggtcgctttactgttcgtgatataagacagacagttgcggtgggtgtaatcaaagcagtggacaagaaggctgctggagctggcaaggtcaccaagtctgcccagaaagctcagaaggctaaatgaatattatccctaatacctgccaccccgcttttaatcagtggtgaagaacggtctcagaactgtttgtttcaattggccatttaagtttagtagtaaaagactggttaatgataacaatgcatcgtaaaaccttcagaaggaaaggagaatgttttgtggaccactttggttttcttttttgcgtgtggcagttttaagttattagtttttaaaatcagtactttttaatggaaacaacttgaccaaaaatttgtcacagaattttgagacccattaaaaaaagttaaatgagaaaaaaaaa

SEQ ID NO: 237741 - DNA, 530 bp, Homo sapiens
tgttgtgccaactgttcctgacaggatatggttgctaagactctttacttaccattaagaatatcgtagatattcttaaatttgtggatattcttgaattcgtcaatctgaaaatgtgatttccagaactaaatcagtattctaggtagtatattacagcacaagaacagtgaaaccatcacctcccctaatttgaactttaaacctttgttaatacagcctcagactgtctgcttttcaaaaattcttggccagccgctgtggctcacgcctgtaatcccagcactttgggaggccgaggcaggtcgattgcttgaatctaggagttcaagacaagcctgggcaacatatcaaatccccatctctacacaaaatataaaaattagctgggcatggtggcatgtgcctgtattcccagctactggagaggctgaggcaggaggatcacctgagcctgggaggccaaggctgcaatgagccatgttgtgccactgcataccagtctgggccatagagtaagaccctgactc

SEQ ID NO: 237742 - DNA, 455 bp, Homo sapiens
agggttacattacaatctagcgcttcatgtggaccaggaaattggaggaaggtcctctggtcttcagttcatcatgactgcaattgggaagttcaattgtccaagctggttggtctgtttgaaatcaatgtgcaacagggaccaggctcttgctcttggaggtgagtcctcctggcacccactcagcatcctctcatgggtcctgtcacactcagactctgcatggtggagggacagtcacccctttctcccatgtttgaagacacatatcagtctcaggacagattttcaacttccagggctgatatcacaggacattctagcaactctatgtgtggggactttcaacccaggccagagagtcatgggatacaaataaaacacacaaacaagctttaatgctgcctttaagtctcagtaaggaacaaagagaagggtcccaggacaaaaaaaaa

SEQ ID NO: 237743 - DNA, 227 bp, Homo sapiens
agctcctcccatggtggttccggggttggagaggcttacgtgaccttatggtagcagggcagaggcagggctatgctgctcatggggcattctgtaaaagtaagatgtgtcttccttatgataccttccttccagttgttggaaagttgtcgtgctgcttttattagagcaagcatcttgttgccatatgctttaaaatggacataataaatgtgcaaatcttcaat

SEQ ID NO: 237744 - DNA, 761 bp, Homo sapiens
aacaaatgattgatacccacaataacctggacgaatctccacagaattatggtgagtggacgaagggtaatcccaaaggttacatgtagaattccatttaagtaacattcttgaaatgaataaattataagagtggggaatagattagtagttgccaggggttaaggagggaaggaggagcagcactgaatagaaggggtcataactataaaaaggcaacatgatgaatcccggtgttgacggaaatgttctgtaccttgcttgtataaatgtcaatctcctggtactgtggcatttgcaatatttgcaaattttatttatttattcattcattcatttttctgagacggagtcttcctctgtcgcccagactggagtgcagtggcgcgatcttggctcactgcaacctccgtctcctgggttcgcaccattctcctgcctcagcctcctgagtagctgggactagaggtgcccaccaccatacccagctaattttttatatttttagtagagacggggtttcactgtgttagccaggatggtctcgatctcctgacctcatgatccacccacttcagcttcccaaagtgctgggattacaggtgtgagccaccacgcccggccactatttgcaaatattaccattttggaaatattaccaagatgttaccattggaggaaacggagtaaggcgtacaagggacctctctttttctgagttaagattgtatgtgaattattaaaacgtaaaaattaacttt

SEQ ID NO: 237745 - DNA, 402 bp, Homo sapiens
gtttgatctgagagcctaacttttgtaaaccttaatctagttctttccttcttagactatctagcttttaattaactaaagcaattgttaaatcaccctaagcaattgctagtcaatcaaaactaaattaacatttccaaaagggatgactcttaggtgtactggatagcttgttggctgtcatggaactactgtaatttgaaagccctctctttttttgttattttggctgaaatgctctttaaaaaacttgtaagtagctttggaaactagcaaaattaggttattttaatacaagtgaaaaagcagattcagagaagcagagatggggaaaaaaaggagaaaaaaagaagttgagagcctctacataccagcattttgttttaaccctatatttggtac

SEQ ID NO: 237746 - DNA, 393 bp, Homo sapiens
ttttgtatttttagtagagtcagggtttcaccatgttggctaggatggtctggaactcctgaccctgtgatctgtccgcctcggcctcccaaagtgctgggattacatgcgtgagccactgtgccggccaatttgcatatattaaaccggctttgcatgccagggataaataccacttgatcccaatgcataatctttttgatgcattgttaatttcaatttgctgatattttatttaggatttttgcatcagtgttcatcagagatattgacctgtaggtttgtttgtttgtttatttatttattttttgtggtttcttggtctggcttaggtatcaaggtgatgctggactcataaaatgtgttaggaaatattccctcctgttgtttttc

SEQ ID NO: 237747 - DNA, 705 bp, Homo sapiens
gtccagccactcacattgcaggggctcctgggcaaaggtgatatacatccaggaggcaagtgattgttctctacaaccgcagacatacttataccttccaaggagaccatggttggcagagtattctatgaataaaaagatgatgtatgcatgtgtgtgcgtgcacacacatacttacacgtgcccctttgtgtgcatatacaatatcacacaaatacacaaaagagaaataaggcaagtataaattatatctccttccaaaaaggatctgaagaggcttctgtaaaataataccaatacaagagaaaatagaatctctaaaatgagaagagaagaatacactaaaagcagagtattatgtcacatgaactaagatttacctcatctggacgttacttttcctaaaactccaacaatataactaagactataactaagaagcagggaggaataaacaaaggcttatgaaggccgggcgcagtggctcatgcctgtaatcccagcactttgagaggccaaggtggggtgaatcacctgaggtcaggggtttgagactagcctggccaacgtggtgtaaccctgtttctactaaaaatacaaaaattagccgggtgaggtggtgggtgcctgtagtcccagctactcaggaggctgaggcaggagaattgcttgaacctgggaggcggaggttacagtgaaccgata

SEQ ID NO: 237748 - DNA, 418 bp, Homo sapiens
tagcttacatatcagatccacctggagagtgcttcccaacccaccaccactactcaagaatcagctccagttgatttggggtggccctagcattcgtctttttgaaaagctcccccatgattcaaacgtgcagccagggttgagaaccaccagcctacactggagccagataggaacagatgtgatctgggccctccaagaaaggcctccatgccctgatgtgtctgccatgtgggaccgcaactgaggtggaggctggctttattgagctacataaaggcctttaaaattcatatactggccgggcacagtggctcacacctgtgatgctagcactttggaggcccaggtgggcagattgcttgagcccaagagttcgagaccagtgtgggcaacatggtgaaaacccatctctaca

SEQ ID NO: 237749 - DNA, 473 bp, Homo sapiens
accaccacagcagcggcaaagactgggattagagctgagtctctcctcccagatcaagggattctctttaagcacctactatgtgcctggcaggcactgagattcatctgtatctgagaatacagaatagaatcagaaatgatgtttcctagactcagctgtctgcacaggcaatttggtctcttgtgaaaggaggtatgtagggataggatgggggtttctgtgaccacagtctcccctgtagcttgaacttgaagaaaaggccgcaaggtcatcttatccagtcccctgcctgcaaacctttaaaggcaagaattctctgacaaatgtccaggaaagaagatcctgcagcctcccttatggtgaatgcccctgtctccttgttctaatgtccagcctcaattcctattcctgcagtttcaattccttcctcttgcccagggctcagtggaagcagagtccatgggctgcca

SEQ ID NO: 237750 - DNA, 457 bp, Homo sapiens
gggggtgtcggtaagcagcccggctcagaccctgggaggcccagtcacctctgttctctcagaaaaacaagaagccgcagcatggacccatcatcttgcaacacgtgtgataacctcctctgaacctccaggcctggcgtgaaggatgtcacgcctgtttagccacccgtgggggtcgatacctgccacacatgcaattggctgggaaggtggccagcctgagtctgaggtctccccttgaccaggcagcaacattagcatccacagcggtgtcaacacctgcctcccagcaggtaccatgcatgataggtggcttgtcttcatggacaaactctgaagaccggggaccactcacctcctgaccttgcctgtttccaccacagcctcggggccagccatacctggctctttagttacctactgaaagggaggagtggaatcggaccttccggtggca

SEQ ID NO: 237751 - DNA, 453 bp, Homo sapiens
gaggctgaggcaggagaattgcttgaacctgggaggcagaggttgcaatgagctgagaccatgccattgcactccagcctgggggacaagagcgagacttcgtctcaaaaaaaaaaagaaaaaaaaaaaaaaaggcacacaactcgggtgctctgtcaacctactttccacttggaattaaattttaaacagcttaaatgttaggttatattgtgttctctgaaccttggtatgaaggagtctttacttttggttataggtgttcatctaaaagctttttagctttggaagtttacaaaaaatacacttagatatgttcaaccttctttctgcttaaagtttttaagagtaaaagatttgtttgtttgttttgttttgagacagggtctctctgtcgcccaggctggagtgcagtggcatgatcttggctcactgcagctcccacctcccata

SEQ ID NO: 237752 - DNA, 512 bp, Homo sapiens
  misc_feature (174)..(174): n is a, c, g, or t
  misc_feature (209)..(209): n is a, c, g, or t
cacaaaagaaacacggttctgtgaaccagcatcaacagagacaactgaatcagacccagagaaaatttaggtattggaattattgaatatagaacataaaataaatatatttaatgaaatagaaaagtaaataaagaccaagaataagaaatgagagaataaagcaagactggntggtttgtaaaataagcaattaaattattttaganataaaaaaataatgattgaaagaaactcagtggaggggaacttacagttctggtgatagctgcgtaacaggaagctgatttatgctgctgtcttaagtgaataattggacaaagtatatgaaaaaatgttttcagatattggacaaagagtagcatagaacagtgattcctgagagaaaagaaagaagtttgagcactatgattgtccacctttcagcctgaagaaagtttctgggttgaaactagggttgggagggatacacatacagagctggcaatcttgaattgaggagacagaggtag

SEQ ID NO: 237753 - DNA, 863 bp, Homo sapiens
gtttcttggtcttcagaaggacctgcagaaaaggagtagggactgttttggagcatttgtaataagtgttccaatatgaatccacttcatcttgttatcacacaagcacacgctcctgaacacgcaggtccacatttttcctaggttcctcctattccatcagtactatgccaagccttgaagtgacggagactggatttctgggaggtgcatggggacacttggctcacctctaaatccagtgcctgctactacttctagtgcctacataccaggtacacagaaatacttgttgaaccaactagttttttaatgaaataagtagcagactgtccttgtgaaaacagaatcctttgtgaacacagaggggacagaacagttcattctgaccttagggattgcaaggccctttccttcttgccgcagggccttcaaacatctatttgccccttcttgccctctgcctaaatcctattcatctttatattgcttccagagaaccttccctaactccaaacccctcctccttgtccttgcatcattctatttcatgacatcatgtcctttctcttcaaaatacatagcacaacttactattaatatctatttgtgtgtttgtttgttgggaatctactcctacaatagactatgagcaataatgtctttcttatccatggctatctcgccagtacctactatggtgcctgatgcctaggagtgcatagtaaatatttgtaagttgtttattgaataaatgcatattatttacaaaggaagtagaatttgagcaggaccttgaaaaagattttgacagagatatgcaagaagagaattcgaggaggatggaacaacctaatcagaaa

SEQ ID NO: 237754 - DNA, 394 bp, Homo sapiens
ctcaacttcaggagatgaaggttgcatttttaagggaaaaaaatgtacccaaggaacaatttgatgacaaaatctccaattttctgtaacatggattgaagtttgtgtcttcccagttttattcgaagatcctaaaattcatactgctttttccaaatcctaacatttagattgtttttcaaatctaaagttgtggatgaattcttgtgacttctgtacgtactttgactgctacggtcactcgaagcttccttttcaaaaccacaggatggcttagctaaaccatgtcctttccaaactactttactgagtccctcctgttataccccaaagagaagatgtactcctttattagcagttggaacctgaaagaataaataattcaaaatagatt

SEQ ID NO: 237755 - DNA, 247 bp, Homo sapiens
ctctcccagttttgtccgccttccctgcctcctcttctgggggagttagattgagttgtaacaagaacatgccactgtctcactggctgcagcgtgtggtccccttaccagagtgaggatgcgaagagaaggtggctgtctgcaaaccaggaagagagccctcaccaggaacccgtccagctgccaccttgaacttggacttccaagcctccagaactgtgagggataaatgtatgattttaaagtc

SEQ ID NO: 237756 - DNA, 305 bp, Homo sapiens
cttagagacctccctccttaagtcccctgtcctcctgccaatctggatggttgcctgtctaggcctgatgtacagctgtcatcctgtaccttccctccaatacccccttggatcctggtctatgtactataacaaaagcccagtatttcatgggattctgttgcctgaatcctccaggaaaaaagcaatctacattacagaaaaatgaaccacatgctgtcacagaatagatttcttctttcctgtatcatctttcttaatttgtttcctaattttgatagaccacacctcctttcagctcgtgc

SEQ ID NO: 237757 - DNA, 2451 bp, Homo sapiens
aggtttgtgatcttgatgtagcaaagcgattcttttcatcttcggcgagcccaggggatggactcatcctagtgctcatggtctgaacctgccgtgttcttggcttttcgtgggaggctgcattgcggattgagggagagtgtccaaccgtggcaatggaagggactgggtacttgctggattttttggtgccaccctttagaagcaggtattattggctctgctttgcagatgaaaaaaactgaggttgaggtgggctaagtgtatccatcaggccggacagaaaacatgacccatcaatgtggccccaaccttggtgacaccttagaatagcagtgattcatttggtctcagatcttgatgtgtgactagctgcagccacccgcaccttcacagacataaaaaccgccagacccctgacacgcccatgaagacacacccaaagatgtctttggagatccccgggcaacagggacactggcatttctttgcatctccgtgccccaatcctggacctgttctggtgcacaggaagctggttacgaagggatgcagtggagatggtttgcagaaagaacaccaagtttgccggactccgtgttatggagatattttgtacttctggggatggaggctggagcatgcccaggagaccacatagtcatgagcattcacaattacccagcaattaacatgtgctgggaaccctgcccagtgagagctgacagatcttctgtcatttatttttcccaagcctgtgaggtaagcgctaacagtaggcccattctacagatgagggaactgaggctcagtgaagtcaacggctcaagggtgcatggctgggaggacacagaaacagggctcttgcctgtgtgccaggtggggactcgcccctcctctcgtccctgtgcctgtggtcagctaagaggagcccaaggctctggagtgggacaggggatagcgtttggctgtgttgtttgctcactgctctgagaaccagcagaagggctgagctgaaaacttcactcctccttgccaagctgtgtgccttgaagaagatatgcctttggggttcgaagtggccctggagccagccctatctggcagtcctgctttgctacttgctagtaagttattcagtctcttggagtctcagatttctcatcccttaaatgagctaataacaccgaggtggtggtgagggttaaatgggatgaggtcatgtatctgcagtgcctggcacatcactggaaaaacagcaagcaccgattgagccctcagagcctgacacgtacaaactcctgcaattcttcctgcaagcctctggcgggaactgctaccaacctaattttacaggtggggcatctgggccacagagaggtggagtagtttgcccaacctcacgcagctctaagtggtagagctggcaggcagacccaggcagtttggcaccagagtccattttcaaggcaccattctcatctttctcagtggcaggtcctcagcaatagggttagaaggctgctgccattcagatagcacagacaagacagaggtgagagttggcattggattctgtaaaagcgttggccactggtgcatttttttgtacaaccccaggggtaccatccacagcgattctcggagtcatgctctagaatgtcgcactggagttgtgtagcatgtgctcttgagatccagcctatgtgtggcctgggaaatgggagtcatgaatccagtcactggcatggctgtcattcatctggctgggtgactcccagcaggtccccatgttctctgggctttatttcctcacttactcaatgggagttggcttcagtgatggccaaaagccgtttggtcactacatgctgtggatctctgccatttggacttagagacagtaccactgaaacatgcctgaccacacacctcttcaagagtccaaactttgattctaaaagggcacatgctttgctttcttcagaggctgagtcggggcctcatctccggtgcgcagagcatgaagatgttactttcttttggtggaagccattttggtttcccatacccggcgaccggaagaattctggagggagtctctaattgcaggtggaggccagagctacgtggaaatgctgccttttgggatttcctgtaatgcagttacgtgcctccaagaagaacaacggtggctgcaaagaccagaacgacttcacggcaccgtgcgtagttttcagttcctggcttttggcatgttggagagagacctgtgcttattggatggagtgagaaactaatacccatccaggcctgctgttccaaactttttcagttgggtcttttccttagccctgcgattagcacgggatgaattcatctgctttttggactcactgaccatctcagactgtttttaacatgcttggggtttgataaaactggaaagat

SEQ ID NO: 237758 - DNA, 740 bp, Homo sapiens
ctgtagatgaatttggtgaaatagtataactttaagcattataagtttcatttagagaaagtttggaagtatgtaaagtgaaaaagagtttaatgtttgtggttttttaattaggtaagcatataggtctcacttggtcttccagatctgtcaaaggaatgggggcaggctctcctagagccagaggcagccgcggtagaggaactaggaagctggtgcaccactgaacaaagatagagtgtttctcagggctgcataagacactcactgtggccaactcaggtgaaggttttccttcagaggccacagagtctccacgggaacagcctgccccgcttcagcattcctgtagagtgcttctgttgtatatcagaatctataaattgtggagcactcgggtggggatagatgtgattgccttatttgtcatgaatttgaaaaaagaaaacattttggaacacattttttacaagtagccatttgatatttgtttcttgaaaagtttatgagattttttttaaagagctcaaattttgttgaacatagagccataaataatggttgttttattgactttatatgttatgtgtttgtatccacagtgtccttctcatctcttgcctttgtaacctacctaattcctgtgttgccaacacaatcatagaaatacaaaggaattatggtaattggccataagtgacgaagtatgagttacatttaattatatattcaaaaaaaaa

SEQ ID NO: 237759 - DNA, 557 bp, Homo sapiens
tcatgctctgcatggttggttgaatgaatgaactaattatccatctgggtgaaaattgagacaatatgcatggccaagcacttggacaaatttcaggtggaactgagacttaaaaggaaaaaatggaaaatgcctactcaacatgaagacagtgaggatgaagacctttatgatgatccatttccacttaatgaatagcatcaaccatgagcttgttgaagaggcatttgggggtagcgaggagcagagagagaactttccaaccacactacctgcgtttttgaaaggctgacatggctcttggttctcaaatcagcctcaaaatagcctgaaaagcctggagtccactcacagaagagcagacctcctccggtatgcaccatgctgacagcaccaccttacacactcaggtgtgcaaaaaccggcgcgggggacatctcacaccttatgtagatcaaatgctccttccctgatcctctgtagggaacttccttttctctaatcctagatcttttcaaaaattctaaccaaaataaaatttaaaaagaagacaatgt

SEQ ID NO: 237760 - DNA, 637 bp, Homo sapiens
aaaatctatttaaaaatacacatattaaatagatcctattgtataaatacatacatgcttaatttgtacacaaaatcgatcttcctccatagaatgtaaactacaacaaagcagacttttttgttcggttgcttcctctgctgtaatatatttccaacttctagaatagtgcacggcacttactgagttcacaaagaatatttttgatatagactgtgatggttaattttatgtatcaaccaggttgtgtcacagggtgcccaggtactgggttaaaccttattctgggtttgtctgggaggatgttttggatgacattaacatttgaattgccagactgagtagagcagattgctatcactaatgtggtggccttcatccaaccaattgaaaccttgaatagaacaaaaaagctgactctcctgtaaataagaggaaattcctcctgactgactgagctggaacatccacctttttcttaccttttgattcaagctgatacatgggctctttgtgggtcgtgagtgtgtcagattttgaaccacaccattggctctcctgggtctctagcctgctgactgtagatcttgggacttctcaacctccaaaatcatttgagccaattccttataatctc

SEQ ID NO: 237761 - DNA, 515 bp, Homo sapiens
agaagtctaaggatgttttgttggttgtcacccacaaagatattcaaggacaaaggagaagattctatttgagtcttgttcagaatcacagtgcactgcaaaccagaacgtttagaaaagatctagtaggggtggagacagtcctaaggaggacacagacatgatttgggtagttgatgaaacaaacaaggaggttataataggtcacactcaaaagattaggaggctacacaacagcctccttactgtggtctttccttcacgcctgccctcttccctgcacagcagccagtgtgatcttctgtgaaaattagatcctatccttcttcagcttaaaactctcaacgctactgaccgatgacactgggctactcacagtcaggaacaaggaagaagtcctggccagaagtgctaaggtggcatgtcccaaacccataaagcctggaaggggcttgtggtgaactcagctctattttctatgggcatttctggaaggtgatgggggatgagttttc

SEQ ID NO: 237762 - DNA, 415 bp, Homo sapiens
aaaaaaaaaaatatatatatatatatagatgtatacctctatatatatatacataaacttttgttagtaacctttaaatttagaatacacagaaatttttaagaaagaaaatcatctttttaagaaagaaacatcatagtcactgtttttaagaaaaaaatacatattaaatcaaattttggaagtaacttttaaatcaagaatacacagaaatttttaagaaagaaataatctagtgccccagtactgaaagaaattttgtttgcctatttttccactcaaatacattttttacactgatcataatgaatgtgcaggatttatctttcttcttcccaaataatttgtgaactttttttcaccattaaaccatctccaaaaatatcttttctgatgactgaaagatgggaagata

SEQ ID NO: 237763 - DNA, 211 bp, Homo sapiens
acatctttggttcttgggttctagcagaggacaaaatgagataataagcatcagacacaaatttacagttggttatgactattttgaagactttggtggacttctagtcatttttttcacatgcagctaagatgaagttatatttttttcttccttctatttccctttttcctttccctttcctttcttttgacagggtcttgctgtgtca

SEQ ID NO: 237764 - DNA, 462 bp, Homo sapiens
tgatctacctgccttggcttcccaaagtgctaggattacaggtgtgagccaccgaacccatctttactcaccgataatatggtcaagtttcaaaaaatattttagccattctaataaatgaggagtggtatcccattgcagttttaatttgcatttttctgatgaatgaatgcaataatcttttcatagatttgccatcagtgtatctttttgatgaagtatgtgatcaatctgcccatttaaaaaaatggaaggctgggtgcaatgggtcatgcgtgtatcgcagcactttgggaggctgaggacggtgaatcatttggggttaggagttcgagaccagcctgaccaacatggcgaaaccccctctctacttaaaaaaaaaaaagagttagccaggtgtggtgacatgtgcctgtaataccagctactagggaggctgaggcaggataattgcttgaaccc

SEQ ID NO: 237765 - DNA, 718 bp, Homo sapiens
agcactcccgcctgggcgacagaacgagactccgtctcaaaaaaaaaaaacaaaaaacaaaaaaacaaaaaaaaacacttcaaaccttgcatctgaataaaggcagactgtacctcccttacttataacctccctacttaacactagtatagcatttttcttcccattgagtatatttctagtactatatttttacaaagttttctcttgctggggaaaataaaagctaagattagttttttattgtactttatggaattgcattacttataaacatttcctttcatcatatgtactcatactcacaaaatagcattaaaaaagcattaaaggctgggcatagtggctcatgcctgtaataccagtactttggaaggctgaggtgggcagatcacttgagcccaagcattcaagaccagctcgtcgtctgtactaaaaatacaaaaattagccaggtgtggtggtgcacacctatagtcccagctactcgggaggctgaggtgggaggattgcttgagcctgggaagttgaggctatagtgagccaagatcacgccactgcactccagcctgggtgacagtgaaagaccctgtctcaaaaaaaaccattaaagatactatgctggctgggcacagtggctcacacctgtaatcccagcactctgggaggccgaggcaggcagatcacgaggtcaggagattgagaccatcctggctag

SEQ ID NO: 237766 - DNA, 402 bp, Homo sapiens
catatttttctaaccccagtttgagacccataatatgacaagtgcaggatatttatggagacaacaagacacaaccgggactgccactttcaagagccatcattgtagattcaaatcaactaaaacacttcataatgggagaaacttggttgaacaggagcacatgttaacgaaggggttttggttgagaaacttactgaatcagtaagacaggacccttaaaaaggctactgtgactgcagactgaggggaagtaccaaaaataagctaatcctactctattatgctggttagaactcacagaaagcattttattctgttctacagagcagatacatattgaaacagagacaaataggaatgtgttcagagaaggtcaactaaatgaattgcaaactgaag

SEQ ID NO: 237767 - DNA, 396 bp, Homo sapiens
tataaaatgtcagtaatatgaacacgctcttaatataacagaatatttaattacatcagtttcccatgaacacaccaaagtcacttaataattatattggccatttccactgtcttgccagatttagttcatgttcagcctgaagaatcacctcttctaattgaccgccttgaagttggtcttctaattttttaacatctggttccgctttaaccatagccagcttctcatttgtaatctgttctgtatactttctatatgctgcatttttagggatttcctcaagaacatcaagaatctttgtgtacaatattcttagcctctcgtgaggagtattgcacacagccaatcccacaaggccagtggtcttcttcagcacacccgccctgacagcgc

SEQ ID NO: 237768 - DNA, 328 bp, Homo sapiens
tattcctgtgaggacttcttccctggttcttttccttctgaagccgtagccttctcggatttgcctgcaagggctaccctggaacagttgaggagcctcattgtcccccatccctgcgggcacgggggcaggacactccctagcccaggctcctgattagaaatgtaaaagagtttctcctgcgggagcagatgccccgccacttcctgagaggtccctccttttctcttaaagacgcagggcacacagaagacgcagccatgcgtgcagctgggcgggccattcagcgccctgcccttcctgggctctgcagtggccggggcggccg

SEQ ID NO: 237769 - DNA, 446 bp, Homo sapiens
acagtggtgtgatcatagctcactgcaaccctgagctccttggttcgagtgggcctcctggctcagccttgtgagtagctaggactgcaggtgcacaccactgcattggctaatttttaaattttttgttgggaggctgaggcatgagaatcgcttgaacccaggaggtggagattgcagtgagctgagatcacatcactgcatttcagcctgggcaacagaatgagactcagtctcaaaaaaaaaaaaaatactactggaacaattaggtgtgatataatgtagcaatttgaatagcttgttcaattttaatagaaaatgtgatgctttacatcttattgtcatttatttaaaacatgcaacattatcagaaacagattggtccttaaaaaacaaaacataattttcttttgcttaataaatataactatcacaagtacattatc

SEQ ID NO: 237770 - DNA, 454 bp, Homo sapiens
ttgagagaacagaggggatgtgggagaaagtgaaagagagggtgctgagaagttaagaaaagaaggaggctcagttcagagagaagagaaatgaaacagccccaaaagtggaggaggagggaggctctgaggtgtggtaccaggtgtggcccagttcaaagcccagtttgccaggagctcaccttgggcaaatgctttatccacctgtgaagggtggagtttggcctccatgtcagtttccctccaacttcagtcatttgtttttatctgtaaacaacccacgcgattacccatttagtcttgttttcatcagttcaccattttacctgattatgttctctttaaaagaaactttttaatgcaattaagtggtttataatatcgcttgtcatcaacaggagctaagcattaaaataaatacaaagaaataaaaatcatcctatgattaaattcc

SEQ ID NO: 237771 - DNA, 441 bp, Homo sapiens
gaaattaatagtagttttaaaaaacctatggctagttactctttggtctattacaaacatctcccttataaataagcatgcataattgaggaataactgaatggttccatatagcaatttaacatggattaaaagaaataacacttttgaatatagaagacaatgtctgaagccttggtatagatccaaatactctcagtggtatctaagaacaaaatttttattactagaaattctcttcacaaatacctagtggggtagtaaatttgcaaaagtagtcctcttataagataatgtagattataagatgctttagtaaactctggaatgtcattccaatgacccaagaccacacatctctatccactaaacgtatctgttaacctagctcaactactgattatgctgaaataaagttgtttttgttacatcaccatcagt

SEQ ID NO: 237772 - DNA, 451 bp, Homo sapiens
tgggtactgctgggacttgaacctgacagttcagttcagcctcagggcccatgtgtctaaccagcattgccaaacagtctcccaagcagagatttggaagcctattttatttatttatttttatggtttttttttaattgagatgaaattcacataatgtaaaattaaccattttgaagtgaacaattcagtggtgtttaatattaatacattcacaacgttgtacaatgaacacctccgtccagttccaaaatgttttcgtcaacccaaaaggaaaccccatacccataaagcaattgctccctgtttccccctatcccctcccagctcctggcaacaaccaatgtgcattctgtccctatggcatttacctattctggaatttcatttagaaacggaatcgtgtattttattcattttttgtataaacttcacagataagcaagcacgc

SEQ ID NO: 237773 - DNA, 539 bp, Homo sapiens
gtcacattgggtcctcagttttcttatcagtaaaataaaaaattaaataaatatcatttatttgtgaggcctgttagtcaaagaaaatcttacaggaagccctttgtatacaattgataagaatgattcttatttgaataaaatggggaaaacagtggagtcctgaaaattcttatctcctccctttccttgctaatcctctagatacttggataatactggacaggaggacttcccaggcccctttctgttttcagtcaagtatttcaactacagtactctcttctttgaagtaaaattaactttagaagttgtgtaatacatcttttgcctcttctgtggaatgactttatattttgcttttcccctattttaagacttcttaaaatatatccttatgtcttagccaggcatgggggcacacatctgtcgtcccagctactcaagagactaggagttcaaggctgcagtgagctatgatcacatcactgtactttggcctgggtaacagagtgagaccctacctctaaaaaaaaaaa

SEQ ID NO: 237774 - DNA, 2153 bp, Homo sapiens
  misc_feature (1510)..(1510): n is a, c, g, or t
  misc_feature (1757)..(1757): n is a, c, g, or t
  misc_feature (1939)..(1939): n is a, c, g, or t
tttaggagaaattcataggtgaaggaggagaaagcaggagatggaaaggtgttaagagcagagggaaaagcgtgtgtgcagagaggcgcagaggaagcagtggcacatgtttgggcagctgctcagtggctggagagcagggactgtggagagtcatccaattcccatgtaaggaagggaaacaggaagagacttgttaattcagcccagcagtctccccacaacctctggggatggcctcatgggtgtgcagggcctccagagctaaaactgtttgagagaaggcttctgtgctgtccataccaggcccctccccagaattcagccttgctccaggcgggctccactggctgcctacagacaggccaacccttggcttccccatggccctcgccaccaagatcacacagccctgctaattagttattgatctggtattttgttgtggctgcgcttcccactcctgtgtttagtcgattcccaagttaatgaagctggattctgtaccgccccccttcccccccatcacctctctgtgttcccactgctgctactccaacggaatggctccagacaaagaccactgaaaacgagccgcactcctgctaacaggaagacagcggagaagcaggtgggaggaatattccccctggatcagctgcagaggacgcctgttgcctttgttgggtcaggtctcctgcggcccagcattttccatggtggcctgaaagccaactgtggcatgagggcgatgtggatcaaagagcttcttccaccgtcacaaccctgtgtctctgggtgggcctgtagggtagcagatggtagtctgggaaaaaccacttcttcctttctgggtaatttttattcagtcatttaactcctctcagcttccatttccttaaaataggcattctgttgtatctttccagggtattgggaggatccagttggatgctctgtgaaacttctttgaaaacagtaaaatagtataagaaggaatcatgggtttgctattactcttagggagggactgggatccaggacaatctggaatggggtttcagatgtggaaaaaattaccattctgctcccctgcccatgtttgtattaaatgaaactgttcatgagagcatcagaataaggggttgatatccagaatatataaagaactcctacaactcaacaatgcaaaaacaacccaatttacaaatgggcaaggaagttgaatggacatttcaccaaagaagatatacaaatggccaatgtgcacatgaaaacatactcaatatccactgatcattagggaaatgcaaatccaaactgcagtaagatactacctcctacctattagaatggcatgatttaaacacacagagaaaataacaggcgttggccaggatgtggagaaatgagaacctttgtgcattgctggtgggaatataaaatggtacggcccctgtgaaaaactgtggcagttcatcagaatttaaacagggagttcccgtatganccaacagctccactcctgggtttctgtgcaaaagaactgaaagcagagaccctaagagatatgtgtacacccatgttcatagcagcattattcacgatagccagaaggtaaaaacaacacaaataggcattgacagatgactagacaaacaaaatgtggtatctgcatacaacagaatattattcagccttcaaaagaaaggaaattctgacacatgctgcatcattaatgaaccttgaaggatatnatgctaagtgaaataagccagttgcaaaaggacaaatgctgtatgattccacttagatgaggtgcctagagtagtcagattcatagagacagaaagtagaatgtgggttgccagggcctggtgggaggagggaagggggatagggtagtcgaattcacagagttggaaagtagaatgtgggntgccagggcctggagggaagagggaagggggagttgctgtttaatggctgcagagttttggccggggatgatggggtcattctgaagatggatggtggtgatggttgtacacagtgtcagtgtacttaatgctactcaactgtacacttaaaatggctaaaataatatgtatattttgccacagtttaaaaaataaaaatatttttaaatggtt

SEQ ID NO: 237775 - DNA, 648 bp, Homo sapiens
aaaaacattttctcctacctacattctaacaccccttactcatataatattaccagatatgttgttagtaaaaatcagtagtgctggccagcgttttaaaacaaacatcactaactacaaagatactctacttgaaatcaggtcacaaaaaaccaacgctgcttttcaattaaaactcaaaaagggccaggagctgtagctcactcctgcaatcccaacacgttgggaagccaaggcagaaggatcccttggggccaggagtttgaggccagcctgtgcaacatagcgaggccttgtctctactaaaattaaaataaatgtagctgggtgtggtagtatatgcctatagtctcaggtactcggaagcctgaagtgggaggatcacttgagtcgaggactttgaggctgcagtgagccatgactgcaccactgcacttgagcctaagtgacaaagcaagaccctgtctcaattaaaaaaaaaaaaaaaaaaaaagcctaagaaatagatgactattttctttatacttttctgtattttaaaatattttgtaacaattataagtcaagaaaaaattttaagtgtagccctaaactccagctccgttttgcaaaataaggcataaattaaaaattgtgtgcaaaatcgta

SEQ ID NO: 237776 - DNA, 353 bp, Homo sapiens
ggccttcacatgcactctttaaagcaacaccaggttgacgtctacttgggtttcacaaactatgacccaccgcccaggccaaatctgacgcactgcctgttttggggcagtcggtgagctcatggttaagcaaaatcaaaagaaggataataatgttcacgacacacgaaaatgatgtgaagttcaaaattcagtgtccataaataaagttttattggcacaaagccctgcccactcctttacctgtttttcgtgaatcttccgtcatcccacaacagcagagccctcctacctcagcctcccaagtagctgggattacgggcatccgccaccacacctggctaatttttttt

SEQ ID NO: 237777 - DNA, 784 bp, Homo sapiens
gcgggtcatattggattagggcccactctggtgacctcatcttgactacatctgaaaagaccctattttcaagtaaggtcacattcacaggactgagggttaggacttcagtataacttcctttttctttttttgtgggggacacaatttagaactatgcacatcattagaggccgtcttcgaggctgactcccatacaccattagtctggaagacaatgagaggagacgatgttaaagagcctagtgaatgaggtgactgacggaagctggtccatggtaggctgtctggcaggggctagagccgccatggaaaggcttacttgctgccagaaatgctacatgagcagaaagaaaatgggagaaaaacctggtttcctccccaccttgccctacgccaaagtagacagtccaatttctcttgctggaagtcagttgacaagggagcctgtaagagtcagccctcctacaagactgagcagagtgggagaaaagcaagcaatggatttgagggcaagcagtcccccaggactggtgtatattaatatgtattgcataagatctgcagcgaggggtcccagggtgctgcagtgagctcacagagatgccacaggagattttccattttttgaggttaatgcagtgatacttaatatgagttggatacagccgggcacagtggctcacacccataatcccagcactttgggaggctgaggtgggcagatcacgagctcaggagatggagaccatcctggctaacacggtgaaaccccgtctctact

SEQ ID NO: 237778 - DNA, 296 bp, Homo sapiens
atgttgctcttagtttgctcttgttaaatttgggttccttctagagggttgtctttgaggctttgagtttgctttttatgttgccattctgaaagtcacctcctagaaaacataaatttaaaaatcattactgtagaaaatctgtgtatgtgtttgtatgagtgtttctggtagataggaacacatctaattgccctggatgtctcttcttagccatctctttcccttgctctctccagtaaactttcagttggtctgtggtttagcttgttgctgtcatagaactgccaccctct

SEQ ID NO: 237779 - DNA, 499 bp, Homo sapiens
gctgtccctgaagaggtgtaatgttatggctgggcctatgacttaccactgatctgacgcaggggttacagacagtcagcaggtctatgactattaatggattgtatctttccatagagagctgaaaagccaaggataaaatgctcaccttataatttacttttggaaaactcaacatcttaccttttcacctttttggattgcaacataaacatcacagaatttctgatattaaatttattttggaatgtatgtgtattattttttacttggcaaggggtataaattcagaaaatgttcaatttagttttttaaaaactggtttaacagtttgtctgaagcagattagtggcccatgatcttcattaatcttttgagcaataaatgtttaaattgttcaatctgtgtcaaaaccaatctggcccattgctttatttcctttttttaaacaaagtttaagggccaggagcagtggcttcatgccctgtatcccaaagct

SEQ ID NO: 237780 - DNA, 518 bp, Homo sapiens
ggctgatctgcaactcctgctctcaagggatccccctacctcgacctcctaaagtgttggaattacaggtgtgagtcactgcgcccagcctaatgtctatattccttaactgccttctaatagagatgtaattagaaggttagaagcttcctcagatggttttgctgaaaacaaactcttatctctgtgtgagaacggctctgatcctagtgttagtgtttccttcataccatgagaaatggatacatacaactcaaatagcaaaattatgttatcagggccagtatatgatcaaaagacaaatgatggttctgataccacatcatgagttatcatgcttggattacagtaactaacattatggctattatgactcatactgtgattgggaatggaggtggttcatgttaaagtctactcttagctacatatccctcaaggaaaggaaaaataagctgttttaagtccatcttcacaatatccaagatgacacattggatataaattactgggtagag

SEQ ID NO: 237781 - DNA, 518 bp, Homo sapiens
tctgcctctctcctgcctccttccagcacaaccttcctaccctgcagagttctgaggagtcctggggcttctggagaaggaaatcagtgggacagggaagggcaagagctggggcttctttcctggcctcatgctctggtggcctccaagccacctgcccacagcccgctgtcttggaaagcacgcgtgtgggtgccagtgctcctgtttacaagctgtgtgactttgcctgagttacttaggtctctgatcctcaatgttgtcatctgtactttgcgggtattaatagtagctacctcctagtggtttgggcaattaaatgagctagtaagtgtgaagtgcctagcattgccccttgctaatccccttcccactgcactgtctgcagtttctgagaaggtatcatggcatattctagtcccaatatatttgcactcaacaagcacttattgaacaccaactgtatgcagagcgttactgaacactgagggggagcagatgagtgagtggtgtggagg

SEQ ID NO: 237782 - DNA, 412 bp, Homo sapiens
ctcaccgttctggagggtggaagtccaagattaaggtgccggaaagtgcagtttctggtgagggcttcctgcccattcgcagaaggcagcccctcgctgtgtcctcacctggcagggagcgctctctgggtgcctctttttctcctaataaggacatcagcctgttaaattagggccactccctttgacctcacttaatctcgattgtctcctaagagtcccatctcctgaaacagtgaccatgggatctggggcttcaacgcaggaattttgggagggcagaattcatcccagaacaaaagtcagtgctgtttagagggtgacagtagatgcagggctgccgtcatcaacaacgtcctgcccaaaagtcactggacgtccaaagacacagaaaagtatgacctatgttaaa

SEQ ID NO: 237783 - DNA, 101 bp, Homo sapiens
taatatagctacttctactttctttagtcttagaattttatacctttctccacccatttagttttaatctcactatatttttatatttaaagtgggttctt

SEQ ID NO: 237784 - DNA, 1792 bp, Homo sapiens
atttaatgttgcatacagcctgagatatggctgttcaccctttggtaaagtattaaagaaaaataatgcattgttctcagcttaaatttttttctgatttgacaacatgagtgatgttttcccagtattatttcaattatatttgttttattttctgttcctcactcctacctctcattccagtccccaaactggcttttcttttatttcttttttcttcattgctgatgtatttattgagcaatgtcctgtatcaggcactgtccaaggtgctgtatgtgccatgttgaagagaacagacaggacctactgtccttgtatatcttgcctttgataacagaaactgcaggggattggaatagcctctttacaagaaaagaataagagtgaggaaaagcgtttggaatttatagtgatcacagtgaccaggttttgtattgggtatgttttacatttgtaacttcagtgctatttttttttaagctccattgttttctaaatgtaaacaagtatcaatgtaaggacagtttcatcaggtgaatatcagaagtactgacaccataatctcattttgcactgtggcaaagggtagtagatgtgtgttcaggattatttgctctgtcagtagtgcccagggtgccactccatgactaaccgaaacattttattatgtgactcactaagatgttcaattcattagtattttctggttactcaaagtgtactctatgtaccttttttttgacctttgatttttattctgatggagaagatcagattccttttttatcttataaaaaataattttgaaacaaagacttattttgaagtaagtcttttaacattatctcagatgcattttattttgtccttaagtaagacttttcatttttacctttcaaaatgcaattttcaaaatatatgcttttttgaaacacttattatgttactgaataaccagagtattaaattcaatgtacagcaaatttttacaaagtcccagtagttcttgcagagctttctataatatcagatttatttaccatcatgaaatatgtttatacagtattaagtatattgtactatgaagttggacctgcacactgaaaaattccaaaatacctattatgttgtgctttttgtgatatatattcatattattatttgtcataacaaggtgaacttttttaaaatggtaaacatgtattagttacataatcaggaaaaaagtcatcttttataatgagaaaaattaggtcaaggatatttcaggttttatccaattagatttcttgtaaagttatgtgttttcttttatctcagtgcttatttgctttgcaaggatgaaggttagagattcctttcagtagttaatgaaagctacagacttgtcttgccgaaaaatgtacataaacacataaactattttccaagcagtttcacagtgtttgcaaagttcagattgaaaacccagttttacaaatcccatctacaaatttgcattgtcattaagatatattaaaaataatttttcaaagcaacagcacagatgcactttaaaactgtagcttaaaaataaaaattagtaatataacttgtgtaaacctacacaaaagataaaagatatcttattgcaaaaatagggcaacattttgttttaaagaccaaatagtgaattgaatttaatgcatatctttaaatccttaatagtatctcaaatctggtttaaatctgtctctccttaacggaatagaaagtgaaacaaatccagaaatcttgttcgagtacatgg

SEQ ID NO: 237785 - DNA, 247 bp, Homo sapiens
gtaaaaaaacaaaaacaaacaagaaattgtcttacacgtttctaaactttgtataaatgacatatgttgatacatatagcttcaattccattcattttcactctatgaagttgccacaatttacccattctcctgatagtgccattttccattcttataaacaaggctgcagtagtgatagctaacattaatgtgtgccaggcactgctataagggctttccatttattaaaccagtttaatcaata

SEQ ID NO: 237786 - DNA, 433 bp, Homo sapiens
tttttcgtctttttactgttcagcgtggctttccgtgtactgccaaaatcaaatcgctctcaggaggcctactggtgtgaacaaaggcgctaaaatcaaagaacttccaagttttaatctgtcagagattggctgtgaagtatgggggaagagtcatttaatctctctccatcagttcccacttctgtacaatgagggtaaaactatggcggcacctctcatgggtactgtgtggactgcctaattaaagctaattaagcccctggaaagaaccagaaaatactacgtaaatgctgagtatttatgtgccgctaacagacacaaaaactcccaagggacaagattctgtgccgacagcacattctctattggtgattactaatcacccactgcttacaaagaaaggcactgttttcagtaacagggtagttta

SEQ ID NO: 237787 - DNA, 375 bp, Homo sapiens
gtaatgttcagtgtgctgcctctgtcactcagggcggtgcctgccatctcagaggtgcccaataactatctgggtggatggataggttaggcatgagaaacatttcagtttgtagtaaacatctgtgcctgttatttgcaggaaattgtttataaatgttaatgtttgtattctggctcactaagttaactgttgtttctttcattggcaaacatttagtatggacctaatcaccctctaaaatttcagggtggtagtaattggtgcttcaaatattcttcattactttgtagctaacattttttaatgcctggaagccatatgaaaaatcaaaattttcttaactcaagcaaataaagaatatattcaaagttt

SEQ ID NO: 237788 - DNA, 442 bp, Homo sapiens
atgcaagcctggggctaggtatcacagaaaaatatgctggagcggttgagaggatagacattttcaaaccggtatgaaacgttcatcagtgtatttcatttcatccacaattctgaaaaagtttaaatactgaacgtttgtggttttctgccccagaaaggagcttacaatatgcatggatgtaagtgaagtcgaagtggaagccagtaagcctgatgaaagcaactggtcagagtagccactctgaaacctgcttcagtcctttgatacctttgtcctacacattctcaagttggcctatttttgttgccttttctatgtttgcaaagtgagttctgaactttagagggtgaaaaatgggataaggaaaccccagcttatggaaattacacattaccagagggaatatgctttctaatggaaaaataaaactatacatacc

SEQ ID NO: 237789 - DNA, 626 bp, Homo sapiens
gtgtatatgatagttttttcaaaatgttttctataaaatcctccctgaggagagcttggaaaaagattcttaatagctagatcattttgagtccttctctaccatgtactcaacactctaatatattctgcacatttggttctatgtcatttgccatagtcttaaggacgtaggttccataatcatcccttattctgtagaggaggcccaaggttagtgagcagaggaaggttccactgtcgggaaccggtggtcttcaaactcctgtgctcctcttttgatatctttctgctcatatatgttggaaacagcccagcatgagcaaagcaccacctcctagcccccagcctgtgccagccctgcaaagaggaaatatggctccactcagggagcccatcagcgactcagggagccctggagcacctggcactcagcacccatgaacacgagggcaggcatggtgggacaaggcagtctgcttggggcaagtgagcttcgggaagtagctgagctttggggagcagctgtctatacccagcttctcagggctgtgcaagtagcctgagggagaaagaccctatattagctgaaactgcagcccagatgagtcagtattttctgctacg

SEQ ID NO: 237790 - DNA, 288 bp, Homo sapiens
tcatttttgtttcgctttattgtgcttttttagatactgcgtgttttatataaattgaaagttcgttgtaaccttgtgtcgtgctagcggattggtgcctttttccaatagcatgtgctcacttcctgtctctgtgtcacattttggtaattcctgcaatatttcaagctttttaaatattattttatctgttatggtgatctgtgatcagtgatcttggatgttatgattgtaattcttttgggtatcataaactggatccatataagatgataaacctaattgata

SEQ ID NO: 237791 - DNA, 493 bp, Homo sapiens
tgattacttctattttctcagtgaagaaaggaacaaggtgttcagctaataacgtggtttgggaagggagtttgaaaagagaagataaagaaatactcatctaggagagtaggagtgtggatggactagaaaaaagaaaaagaaattcttggtccccaacatggaaatccaagatgcaaggaaatcataggctctgaatcacctggggaagaaaccgctgcagaccaaattgcatcttagatccattaaatcagaaacttggattgctggattcaggtacaagtatttttaaagctccctaagtgattataatgtatagccaaagttgagaactactgctttggagccactggtctaatggaacaaattgcattgatttacttcccttaatattactatgtataactaactaaataagatgtattattttatgtttcttcttaatattggcataaaccaataaattagtgtatgtatgtttcattgttagaaa

SEQ ID NO: 237792 - DNA, 191 bp, Homo sapiens
ctacatggttaagactattctcataataatgctaatgtgttatttgctattttcatcccgttggtgtttgcaccgatggtggaaatgcggtgatgcataaaattgctgacaccttaccatgaattaaggcagtggcgccagactccgctcctaggtagacattgcattcttcactgccaggagctcataaa

SEQ ID NO: 237793 - DNA, 399 bp, Homo sapiens
tgtgttttctgaaatatgtcagacctcttctttaaccagtaagtttgaaactaattaatactttaatacatttagcttttaaaaatgtctttattgaggtataatacacagtaaagtgcactaatcttaagtgcacggctgaatgaatgtttccatgtgaaatggaaacatttcacacgtgtgaaatccccagccacgtcaaaatatagaacatttccagcaacccagaggctccctaaggcccgtttccaatcggtgctacccaaaagaaactggccgggcgccgtggctcacgtctgtaatcccagcactttgggaggctgaggcgggcggatcacaaggtcaggagttcaagaccagcctggacaacgtggtgaaaccccgtctctactaaaatac

SEQ ID NO: 237794 - DNA, 2320 bp, Homo sapiens
  misc_feature (568)..(568): n is a, c, g, or t
  misc_feature (650)..(650): n is a, c, g, or t
  misc_feature (993)..(993): n is a, c, g, or t
  misc_feature (1576)..(1576): n is a, c, g, or t
  misc_feature (1610)..(1610): n is a, c, g, or t
  misc_feature (1766)..(1766): n is a, c, g, or t
  misc_feature (1802)..(1802): n is a, c, g, or t
  misc_feature (2252)..(2252): n is a, c, g, or t
  misc_feature (2297)..(2297): n is a, c, g, or t
  misc_feature (2311)..(2311): n is a, c, g, or t
  misc_feature (2313)..(2314): n is a, c, g, or t
  misc_feature (2317)..(2317): n is a, c, g, or t
  misc_feature (2319)..(2320): n is a, c, g, or t
tagcaacatcaatgactaaggttttggtcaatctctcaaaattgagtaaatgtccaaaaggggggaattgttaaggcaaactaaatatgtcctgagaaagcctccatccttctatatttgcatccttgtggatgaactgtaacctagcttaatagtcagacaaaactgaaaacctaacttaatagtatgtacctgtaacaatgactgagtgttggccaatcccagtagccatacttcaaccactcatagactgctgaatgttcaaactgtgttcagaaatgttgagctgtaaccattcttactgtttctgtacctcacttcagattcctgtatatcactttatcatttttgcctataaaattgttctttccacaagatacccctggagtctctatgaatctgctgtgattctgggggctgcccaattcatgaatcattcattgctcaattaaactcctttaaatttaatttggctgaagtttttcttttatccaggtctcacctctttataggagtggtataaaaaatttgtagtcattttttaaaagcaccatagcacccaattcanaggtttttttttttttagagttttttttttcttttcctaattatcttacaaaaaagaagatatctggcactttataggaggnaaccagaggcaagtcctgtgttttactataaagtcaggtgcaggaatactaaccaattcctttatatttcccaatattacccagttcattcgttggtacacagtaggttccagaaaaatgttaaggggaaaaattgattgctatgagaatttcacatgaattatgtttcttccaaggctccttgcagtcaatcaggatggatgttgcattagtgttttctctgatgtaacagtcattaactacagctctattagctgttcatttgtggcatgaaatagatccaaatacagaggactgtatttgaactgagccattgtttcatgaatattagaacacaaatcantgcatattgactgggcttgtgtagatgaatgtgatagcattgccctcaacaaaatatggttcatttcttcagaacagtgtgtaaagcttagaataaaaataagaagcacttaagtttttcaagatattgaactctaggcactgagttaataagttcatttttatagatgcttgatgctgtatgaacagatactatactttctaaagcagctacttctgtgtggatggtggtgggtaagaggccagagaaggatggtaactataggtaacactcttatggcactttaacgagcatctatcctctctattggcactcaaaagaaacttgtgaggcaggcactatcatcccaaatttataaacaagcaaattgataccacaggttctatgcagtatgccaaaagtcactgtcttgcagtggtggaattggagatttaaattcctcagatatgattgcctctggagagtcacatctgatcctcctcagacaaataagtactctttctctgtgttctcgtgatatcttgaaatatatctatatccaccactttgtgttgtaattatcttcttatgtgtttatttctcnccacttgagttcaagaaaaaagaaaggtccttgnctcatatatgagcatccctaaggatttaacccaaagtgaccagtgaatgcttgcagaatgaaagaataaattattgaagatcctttaactctaaaaatctctaccaatccatgatgcattttaagaaaaaagtgttctgttagaatagggtgaagnaaagctgatatttgtgagtaggatgcaagggaaccntagacatagagacctgcaaatcatctgtggccttgttttatcttattctctggaatatactgggaatagtaaggaggcatgtgtgcctgagcagaatgattaaggggaaaatattaggaattgaggtcaaagagttaatgaggtgggggtaagatcatatatagccttgtaggacagttaagaaatcccgagtgacctgatcagagcagacaaagtgatccttttaaaacctacaaggaaaatagatgggggctgagcaagagtggaagtagagagacctatcttgattgatttactgaagtgatcaagatgagaagcatggttccttggacgaaagtgagaagtggttggattttggatgtattttgaaagtagagccaagaggaccaattagatatggggtgagagcgagagagaggagtgaaagttgaaaccagtatttttggcttntgacttaaaaggaaggattacattagttgagatgggaaaatgtanatagatgaagcaantnnganann

SEQ ID NO: 237795 - DNA, 489 bp, Homo sapiens
tgtgctttacagacaggaactggtagacgtaacctctgaatagtgaagaatattgtgactgtttccaagtgtaattcacatgtttctttataaagatgaaagaccagtattaatgtagcttttttttaagatagggtaaagtgttgccaatactatgatgatctgtgtttaaagtctgatttttattttaaatcctgaaatatgttaatttttaaatgtattttaacatagcactgtattagaaacaaacttttaaaactcataatccctcctgtactccagcctgggcgacaaagtgagactccatctcagaaaaaaaagtgctttcccttctctcttatttatttattcataccagtatgcactcatggattcttattttagtcaatgagttataatctgtcactgtcattatttaatatgttgcttttaaaatagtatatgaaataataaaaatgtacccgtaaatggttattagattgcttacct

SEQ ID NO: 237796 - DNA, 2423 bp, Homo sapiens
  misc_feature (2219)..(2219): n is a, c, g, or t
  misc_feature (2292)..(2293): n is a, c, g, or t
  misc_feature (2318)..(2318): n is a, c, g, or t
  misc_feature (2340)..(2340): n is a, c, g, or t
  misc_feature (2344)..(2344): n is a, c, g, or t
aaaagtgatatgacagacccaagggcagaataagtggctggcagagctaggattagtggctgtatctttgtggctgcacagctgtgttctttcaaggattgctatgcagcagtcaggccagaggggcagatgaccccggacccaggacccaggctctgagtgggaagccagcaccccacaaccctcctgacccccctaccagtctgttctccagggctgcctgttcccttactcttacaggtttggcgttccataagaatgacacccaagccggagatccagggagtagaggcagccagactgccttagagcggggggtccctaagtcatccaggccactgctcaagaaacccacacctctaggtacacctaccccttcctccccaccctcagtaggcttgcagccacgtgactttgggttatggtcacatgtctgccacctgcctgctgagggacctcggtgagtcccttaactctcctgagcctcatctgaaaaataggagtaatagaacctgctctggcctccttgctgtctttgctgggttgaactttcactggataaaccacatgctggactctggctgggtgccaagatgttgatgatggacaagccatggccccttcccgagttaacctgcagcatgcttaggttatgggggtagagaggagggaggaaagaacatgaggctgtgtggacaggggtgacatttgaattcagtcctgataaaagatcaggagtttgccaaagtgacaaggcaggaaaggctttcttggtagagggagccaccatacaaatgctggggatataaaatagactgttttcagggtctgtggttgttcagtttagctcaaaaatagggcccaatgataagaatggctattgtttgtaggccagttacatgtcaggtgtatatatttataggcattatttcatttgcttcttgccgccaccattgaggtatgttactttgatccgcatttcacagatgaggaaactgaagccccagtaaatgaactaaccttctaggggtcacgcaggtggtagaagccagaatttgaacccacaaggtcaggttgcaaaacctacattcctagttattgtgctgggcagttgaagatgatggccttgatttctatgctaaggagctgggacttgattctacaggcagtggaagccacagaggggtttggggcctggtacatagaaggttctcagcaaatgttgactgagtgagttgagtgcagcagttgcacttgattttaggaatgatgagggtttggagtggggaaggctgtggggcagggagctggtgggtaggctgttctgatcatctgcaggaattatgtcaagagtctagaatgctgggtgaagtggagctcagtctacaaaagcatccctaccacagcccagcccctgggccctgaccaacccatcccttctccccaggctgctgagagatgacagtgtgtgtatggatgtgtgcatggaggggcctgtagaacatttggcccctggggagagattaggggcattaaaggggctcagggggcaggatgtcctgggagtggcaatggggagctgttccaggggcagggagattatgtaatgggtagagcacagctgtgcctacccagctgtagccaagcagggctacagctgccccatggacccagctcctggctccaaagtccagatccagacctgttctagagcaggccttcctagctgttgggaacctcctgtctgcctcaccacactctccctgttctaggaggggtggggcaatttctttcagcttccaaacgcccagatagggtaggttacttgcctcacatcacacaggaaacagatgggctgggtttgacacaccccagcatatttaataaccacctgagagtgaagtctgggggctggaaaaggcaagactgaccagaggggggctctgggctctgggctgtttctcagctgacctgtttggagcacctcctggatttgggaccagattttgaatccccactcaccagttgtgtgaccataggcatcatcactaggtcccctcagagcctcagtttccttctctgccacatggggccagggctacctcccagggctgtcatgaggattaaatggtgccacaggggccaggcgcagtggctcacacctgtaatcccagcactttgggaggccgaggcgggcggatcacctgaggtcaggagtntgagaccagcctggccaacgtggtgaaaccccgtgtctactaaaaaaaatacaaaaattagccgggcatgggnngtacgcctgtaatcccagctacttnggaggctgaggcaggagaatcncttnaacctgggaggcggaggttgcagtgagctgcgattgcactactgcactccagcctcagcaacagagcaaaactctgtct

SEQ ID NO: 237797 - DNA, 392 bp, Homo sapiens
ccaccctgggaagtgaaactgtggcagtgccaaggagctaagaacgtggtgatttaccagaagtcttcagaggcaagccatcttcaattcagaaggggaatcccacatgtgtgttgaatatgaggcattgtttaagacacctcctgccctcaccacattggcaaactgacagcgtcaacttgaaacaagtctgcacattgtggccattttcactccacaacaaatgtttaccatggaattccttggaatcaaaaatcatgtcctcttctcccgtgcctagaagaatgcccgagaggtgttcactatgtatttatagggtgaaattttcctatatatgtcttatatcccttaagaaatttttttccagacaataaatgctcccttttcaaagc

SEQ ID NO: 237798 - DNA, 281 bp, Homo sapiens
cttacttgaaaaagaattcactaggttggttattaagctaaggcatcagagaaaggtgaagcccaatgtaaggatataaaaaaaaaagatacaagaagtaaagggagaaatattcaatgaactagatagcataaataaaaaacaatcaaaactttaggaaataatggacatacttatagaaatataaaatgctctggaaagtcttagcaatagaattgaacaagtagaagaaggaaattcagagcctgaagacaaggtcttctaattaaccgaatccaata

SEQ ID NO: 237799 - DNA, 601 bp, Homo sapiens
tttataattataaaaaaccctctatttctttacttatataccattcaaacagcttgcattgcaccaaatgtttctactgagaggaacattaaagacagtgtcataaggtcttccatcagcctttcctaggtcattggtagtatcactaactagacatcactgttcatctgacatggacatacagacttttctacagtccttaagcaggttgctattagaatctgtgagtgatttctgggtctctgtccactgtccattaaatcaaacttctttggaatttagaattatttagaatcttaaattttgttttgtgtttatttgttgtctcttgattatcatgatagttaattatagctgtatttgctttttctttatagtaaccatatctgtacaaaagttaattcaactcctgcctttatagggatagggttgccatccaatttattgttcaattcaagagacttgagagtgaaaggaagcaccattaataattatgttggtacaacaggcataaactgggatatacggttatcctatctattagcctttgttgaaaatttacatggttcttcctgccaaggagcttactactagaataagc

SEQ ID NO: 237800 - DNA, 753 bp, Homo sapiens
aatactgagctgggaagtaagatccttggggtttagctttagatttgccattaactgcatgacctttgatactttgtctgtaactaatagaatttatctgcatgtaactgaaagtacttatttttcatttaggaagcacttttgacctttttgacaatcttattatatatagaaatacaacacatagtcaggatcctgaaagtaagtggaagaggcccctgaggttccagacagacggatctcacaaagtccatgcactaacacttatgcaccctaccaataatcaccacccacaggctttcactgaaactgccttattcctagactgaactattatacatgaacatgattatctgtattgtaaagggcagcaagccatttgagaggacaaggtgaagaaagatctttctgggagctacactggtggcaataaaaattacattacctagtaaaaactaaaggtgcaaaaacccgtctagctacaattcaaaagagtagcagtttgaggacattttgggagggtaccatcagctcctatgcacctcacttgcctttgagggccttattatagaaagttggagtagtttacagtttaaaaattactatcccatagagcattaggacaaatacctaatgcatgcagggcttaaaacctagatgatgggttgataggtgcagcaaaccaccatggcacatgtatacctatgtaacaaacctacatgttctacacatgtatcccagaacttaaaatta

SEQ ID NO: 237801 - DNA, 171 bp, Homo sapiens
tgatggcagcacgagagcagaatatgagctgtggctgctacaggagtcatggcaggaccagcatttggaaagtttcttccactctttggaagaaagtattggttgaaaggcaaatattggttgaaaggagtgcagcagaaactgtaaccaaaggagacattaggcttccag

SEQ ID NO: 237802 - DNA, 139 bp, Homo sapiens
cccaacttttttttttttttggccttattgcattggctatggcatcctgtccttcaccatgaagcataatgttagctttagggttttctatagatgttcattatcaagttgaggatattcccttctattcctgtctctc

SEQ ID NO: 237803 - DNA, 515 bp, Homo sapiens
caggcagagtgagcttccaaatatatgatttatactccagacacaccagtggtttctcatatcacagttaaactctgaattccttgttgtgaggtagaccctctatgatttgtcccgtgtggtcagatctcattgctgcccggttgtccgtcctgtgctcagctctgccctcactggccatgtggcgacaggtccagaatcctcatgcccctgtctggacttcttttccccaagctctttgcaaggggaggccttctgcaacccgtcatcagaaagagcatcaccgttgctcttgtcttcctacctgctttactttcttcatctccatgattattctctgaagctacatgactgattatcttgttgtcatttcttccccactgtaacagaagccccagaaaaccaggcatatcgtcttgtttacttctgtaactctagcccctgaaagtatggctagcagagtagggactctgtaagtatattttgaatgaacaaataaatgaattgataaatat

SEQ ID NO: 237804 - DNA, 483 bp, Homo sapiens
aacctgtatagctaacaggtaaatgttgctgtgtgatgaaaagaggaagaaaaaattgcctagtcttccagaataatcagaatgtctactctagcagaaagcttttgagcaagataaatcttctgaaattaactagtttaatgtagattgactataataaagaactgctgtaaaaaataagtatttttttggggaggggagcacttttaagttccttctgactgtgaaaacctgttaaatcctgaaagagggagttaaatttataaatgatctgttgatattggcacatggatagaggccttaaggcaataatggatgcagctggtaaagaagcagatctcagtcacagaaaaatgagataaagagaccatcaagaagaaaaaataatggttctattatctgtttatgtagtatatctttggatagttaagaatatcacatgaaaatgtaaagacatgcaaaataaagaccataatgaaaaac

SEQ ID NO: 237805 - DNA, 377 bp, Homo sapiens
gttttaattacaacaaaggtcaagggtagcttcacttaagaaaagctgaaggccagagaggaaggtgggagcaggctctcagggaggtaaggcttgtgcctgcacttggccatcttttgacagccttccctgcaaggccagcccacaggcagttgggaaacagttctgctgacttgggcccttagaggtacagcaattggacaatgtgtggcctcagggtctcagctgtcctttccctggcacacatgcacaggcagcaagttcatctcgagtccccacctgttctccagccacctccctaggggatcgggtgctcccctctgctccagggagagaactgactggggtcacttgtcaggaggactgctccgcttttc

SEQ ID NO: 237806 - DNA, 402 bp, Homo sapiens
ggctggcgtgcaatggcgtgatctcggctcaccgcaacctccgccttctgggctcaaccgattctcatgcctcagcctcccgagtagctgggattacaggtgcgggccactatacccagctaatttttgtattttcagtagtgatggggtttcaccatgttggtcaggctggtcttgaactcctgaccttaggtgatccacctgcctcagcctcccaaagtgctgggattacaggcgtgaggcaccacgcctggcctgtcaattgcctcctttctagtcttagtccagtgggtaaccttggctaccaacttcagttgagggctccccagacctgtgcatgccccaagcactgactcagaataaccaggctgtgggtggcatgcagttcagcctgctggggtt

SEQ ID NO: 237807 - DNA, 362 bp, Homo sapiens
atctcagtgtggaagaggagggtggagaggaaagacttaggggagaagcaaggccaagtgtaagctttctaggcccaaaggccctgtgttccctcatctgcaaaatggcgctgaaaccatctgtgcacttggggttgtgggaggaataaatacatgtaaaacacctgatgcattacacagggtaactgtcataaaaaccattcatcttcttatgaattatttccctgaggggaggagggtacacattctccatacgactatccttgcaagagaaactgcaaatgtaaacgacagactgaaccaagcataaagggaataaaataaaataaatagcagtaaggaaggcggtagattcaggttgc

SEQ ID NO: 237808 - DNA, 429 bp, Homo sapiens
gtctccacccttctcatccccttatatctctgtgtaccaaaattaccctttcatctcctactctatagtcacatgctgttagaaaagttgcttttttaaaaaagattaacttctgcctcatacctgttctctatataagaatttatctgttaggccaagcatggtggctcatgcctgtaatcccagcactttgggaggctgaggcgggtggatcacctgaggtcaggagttcgagaccagcctggccaacatggtaaaaccccgtctctactaaaaataaaaaaaaattagccaggcaggtacctgtaatcccagctactcaggaggctgaggcaggagaattgcttgaacctggaaggcggaggttgcagtgagccgagatcatgccattgtactccagcctgggcagcaagagtgtaactccttctc

SEQ ID NO: 237809 - DNA, 439 bp, Homo sapiens
cttttcggatgtcatgagaatttaatgggctctcccagaaaggtgcctggtagcggcaggcatgtcggtacatggtagttattaattatcattactgtacaaattcccagactggaaaaaagacatgtgctcctaaaaggacaggcaaacaggtaacaagataaataagatccgtaaaagtattcttagtatacattttacagtgtgcttcatttgaaatttccagatgtgaaaaacttgtccacatcttcccttcccagctctaggatttctgtgatttgcttgtatccttattgttagtgtctgtcaatcctcccagaatgtaagatcctcaaaggcagggttcttaattttgttgcctgatgtatccaagggtctttagaacactgcacgtagtagcacatagtagatactaaataaatatttcgtgaatcacaaa

SEQ ID NO: 237810 - DNA, 2398 bp, Homo sapiens
  misc_feature (17)..(18): n is a, c, g, or t
  misc_feature (1611)..(1611): n is a, c, g, or t
  misc_feature (2003)..(2003): n is a, c, g, or t
  misc_feature (2017)..(2017): n is a, c, g, or t
  misc_feature (2021)..(2021): n is a, c, g, or t
  misc_feature (2029)..(2029): n is a, c, g, or t
  misc_feature (2212)..(2213): n is a, c, g, or t
  misc_feature (2233)..(2233): n is a, c, g, or t
  misc_feature (2236)..(2237): n is a, c, g, or t
  misc_feature (2239)..(2241): n is a, c, g, or t
  misc_feature (2244)..(2244): n is a, c, g, or t
  misc_feature (2260)..(2260): n is a, c, g, or t
  misc_feature (2284)..(2284): n is a, c, g, or t
  misc_feature (2297)..(2297): n is a, c, g, or t
  misc_feature (2312)..(2312): n is a, c, g, or t
  misc_feature (2324)..(2324): n is a, c, g, or t
  misc_feature (2384)..(2384): n is a, c, g, or t
  misc_feature (2397)..(2397): n is a, c, g, or t
tttggttcttcccaganntgctgcctcagtttatagatggagccaagtacacttccctctgtggtagggacagatgggtggaaactccaccaccaccatttcagaactaggcttcctggcactggatggcatgtggctagttttgcagggctcttcttacaatgggcctagggtatcgttgtgtgagggggagaatatcttatccaccaagaaagtcgaacctccctcttttctggagcacagcagaaggtgtatacaaacacaaatttttgttattgcagactattgttattattgccaaaacagtcaactctttctccaaggctttggctcccctggactctccacagatgctgccctaggccctgttcccccagtacccccactcttaacagcttcagtacacagtgaggacagccctgtcatggacctctggggctggattccgcttggctggtcagctcttgacagaagccctgagatgtgtcattctaggagttgccctggagactccagatgtaactgaagggcattgccaggcctctcagaggctatctttgcccagacttcccaagcaaacacagggtgcttcgctgcagtattctctgcctctgggaccagttccttgcccagttggcagaaggcctgtcttgtcctccaacttgctattctagcttgattagcagcaaatctctggcatcaatctcagctccgaatgacctaatcaatttgtgtaatagggaaatgatgagttccctgcacataggcacaggatttttagggaaccagccccgtgataaatgcggcttttgcccactaaatcaatatttaagctactgacttccagctggctatgctcagagcctttacctcagccctgaattgctgcaatagactcctaaggacaagggcttgcttagtgtctccccgcttaggtccatcctgcctgcacctgccagtcatcgctgtgatcatgcccatctgatatgatcatgtgattgaagtatctaaaccacagtctccaatggctcccctaaagctataaaaatgtagtctttaaacccttgaggctgccattcaaagaccttgatgaggtgattcctaacaaatcattccagcctctccttctactaacttttacttattccccaagtactctatatccagcccaatcaccaggcctttacttgtgctgtggcccctactacagcactatcttctctcttctctccagctctttacaaaaaccagctcaactcaagttagacattttttccagaaagtttttcctttgtaggatgttttgagccaatcactttgatgccatcttttcaactccatgattattgaatctgctatgcatgcaaaaatttcagataagacacgcaaataggtacggcctctctttctcttttctgtctctctctgtgtgtctttctgccatacacacacacacacacacacacacacacacacacacacatgcacgcacataaacacaatataggagtgttaacccagaaaattaggtaaggtcaaatggaaccagttggcaactccactcctaggtatatacccaagaagataaacaaaaatgtaccttcacaaaancttgtacatgaatattcatagcagcaccattcataatagccaaaaagtagaaagtgatcaatctgtaagtccattaattgattaataataaataaaatgtagtatatacaatgacatatttggcaataagaaggaatgaagtactaatatatactacaatgtgcataaatcttgaaaacatactaaatgaaagaagccagtcacaaaggaccacatactgtatgattccgtttgtataaaatatccagaatagacaaatctataaagacaaaacacttagtggttgcttaggggtgggggttcaggagaatggtagtgtctgctaatggggatggggtttcttttggaagtgataaaaatgttctaaagttgattgtggtgatgattgcacngctctgtaaatatnctanaaagcatngaattgtacactttaaatgaatgaagtgtatggtatgtgagttacatctcagtaaagctgttaaaaaacaaatacaatggaccaggcatggtggctcatgcctccaatcccagcactttgggaggctgaggcgggtggatcacgaggtcaggagatcgagaccatcctggctaatacagtgannccctgtctctactaaaaatncannannnttngctggacttggtggcnggcacctgtaatcccagctactcnggagactgaggcngaggaattgcttgancctgggagtcanaggttgcagtgagccgagatcgcaccactgcaccactgtactccagcctgggtgacgganaaagactctgtcnc

SEQ ID NO: 237811 - DNA, 537 bp, Homo sapiens
ctgatacaaggacaactcgctgagttgcgaggtaacgggacggtcaatcatgttatgagaaagatgtcaatcctttctagctgaagggatttaagaatggcttggttggtaatatattctccctgaggcaatagacagaaatctcagtgtctggtacagagtaagatctcaaaaatagatgagtgaagaaagcatgtattaatgtgtgtcagtcgatgtgtttgtttgaaagtgttcagatggaattcaaaggtatttcagatggtcagcataagtcgcagaggcaatagaggtcaaaacagtggttctcaaagtgcggtcctctggactagcagcatcagcatctttgggaaatttgttagaaatacaaagtctgaggtcccacccacgtgtactgaaggagaagatctgggggtagggcccagcaatctgtgttttagcaaacccaccaggtgattctgatgcacattaaagattgagaaccactgactgaaaacacagatgcgaattcagattacttggagtatgggatatatg

SEQ ID NO: 237812 - DNA, 258 bp, Homo sapiens
cccttctttccagaagcttaaccagctttatgtctgtttagaaggaatatcttcaaaagcaatgcattttttaaaattctatttaattttcctattacaaacgccagccacctagagtgacctttgtaaatattatttaatatagccttctaatgtagctaatgtttaatgtgttttttataaaaatggaattgtaaatatcactttgtaacttactttgttcacttaataatagatttaccatgtttatgatttcca

SEQ ID NO: 237813 - DNA, 389 bp, Homo sapiens
caggggaggaaagactggtgggaagtgagcagctggagggaaaagaggagcccttggtgctgtagaactgcggggagaaaggcatgaagagagcaacgcccagaacatctgagtgagaggctgccttctgatgatgctgcaaaggagagctgcttggcttcaaggcacccaggattgattgcaggaatatctggatgtgagttagttgaaaaccgagtgttaccgcaagaggtgtaaaaatccaggttcatgtttgcacacatcaaaagtattgtgatattttcataaaagaatttctggaaaaaatgagtattaaccaatggtagatgcaactttaaatgctatcagtaagtcattttcttctgaataaagcctttcttaagaaagca

SEQ ID NO: 237814 - DNA, 416 bp, Homo sapiens
atggtgtttctaaggtgggggaaggggctgagccctaaaggtagaagcttctggaaagtttccagagggcccagagcctgtttaagatgtcgtgcctgcgttaagtgtccagaactgtctgctcctttcagtttctcttggactgaccttttcctataaaactgtaaggaaataaaaagtaatgatgtgatgtggatcatgaggtcaggagatcgagaccatcctggctaacacggtgaaaccccacctctactaaaaatacaaaaaattatccgggcatggtggcgggcgcctgtagttcagctactcagcaggctgaggctagataatggcgtgaacccgggagacggagcttgcagtgagcagagatcgcaccactgcactccagcctgggtgactgagcaagactctgtctc

SEQ ID NO: 237815 - DNA, 1005 bp, Homo sapiens
cagagtcttcctctgtcacccaggatggagtgcagtggcatgatcttggctcactgcaacctccgcctcccgggttcaagcgattctcctgcctcagcctcccaagtagctgggattacaggcatgtgccaccatgcctagctgattttgtgtttttaatagagatgaggtttcaccatgtttgtcaggcttgtcttgaactcctgacctcaagcgatccacctgcctcggtctcccaaagtagtgggattacaggcgtgagccaccgtgcctggccgcttgtgtcattcttattttagttctttggttacttctttagataaatctggactcctaatgcacactctgtagttctcccaagaactggctgttttgctgcctccttaattttggccgtattgcgggccatacaggaggaacctgacttgcaggcctgagtatcacttttactaccaaaagttttagtcagtcaccatcttactcagatcccagttgaacggatctgtcagaaaagagacacttggctagggtctatattagttgagaggctatttccaattcacttctcagcctgcatggttgtaggagcaagaactgggatcagtgagccacagtgaacctcattacatgccaggcactgaaaaagtcagataaaacagtccatgctagcaatggggcaaaagagggagaatttgcaagggaatctgtggcctagagggcccaaaatagcagtagggaaggagaggaggaagaaaaagaagtgagccagggagaagagcttgactgtagtggtggtggatgtttcagacctgtgatatatgaccaatcatcatttaagtggctttgggctgtggtgagctttcccagggccagagaataagccagacccataccaagtaatagaacagatgggcaaagagtcttccacattctacttggaaaagtaacttggtgggagaacagaagagaatccagcaatagaaggtacagatgttagtcttcagc

SEQ ID NO: 237816 - DNA, 354 bp, Homo sapiens
cacccttgaagacatgcatctcccaagaagcaagatatacatcataatttatatagcatattcaaatccccagtaaacaattcagaatgcaggcacatctccacaaagagttggcacacaaagcagaatcacgcttagcaaagcctctggcaaatgccaggtgagatggtcagaggcctgagatactgccttcatctgcaaggtgctactccctgtccctgtttcccagggtccgagactaattatctgcttgggagggatctactgtgcagcttatttcattttagcaaatgagatggttatctaaaaatccttgtttaagaaaaaaaaaaaagcaaatcaacaatgctgctc

SEQ ID NO: 237817 - DNA, 428 bp, Homo sapiens
gtttgtttgtttttctgtttttctgagacagggttttggtctatcacccaggctggactgcagtggcagcctgaatctccccatctcaagcaatcctcccatctcagcatcccgagtagctgggactataggcatgtgctacatggctggctaagttttaaaatattttgtagagaggaggtaccaccatgttgcccaggctggtctcctgagttcaagtgatcctcctgcctcagtatccggtgtgctaggattacaagcatgagtcactgcacctggtccagtagttcttttcaagcaggaaaagttttgtatagagaaatgtaggcaaagtcatttaggatacagagggaagtaggtgaggctctaggggaataagttgtactacggtaagaaactaaaagtgtagctaaactgttctacataag

SEQ ID NO: 237818 - DNA, 762 bp, Homo sapiens
agaagactggcagatgggaggagggaagaagccaggatttatttccctctgaagctcagccaggggctcccttcaggtggccccctctgtggttctggctcctgcagggtgatcctagcctcttggcatcagagcaccattcacttcctttatctctccagtcttaagagtagtagtgacttccggctgttgctcatctttggattgcctcatcatcccccatttggtcattcaattctttccctgtatcaaatttcccttgtctgaaatacctagggtaatttctgttttgctgactggttgttaactgacgtatactctatagtccactctctacacaggggctgaagtggatcccgctaaaaacaaagcagatgggggcatgacccagctctcatccctccaagagcttcccatcatcagaatagatgagaatagaatctcagctcctctggaactaaaaaaaaggcagattcctccttgcccacagtatttctagccacagcagtctgcttgctgttccttccgcccatcaagccagtttctttgcatttgctgtttccattgcaagaacacccttgctgcagatctgtccatggcttgctccctcacatgattcaggtctctgctctagagggaccttcagcgaccatcttttttttttttgagacggagtcttgctctgtctcccaggctggagtgcagtggcacatctcggctcactgcaagccccaccttccgttcacaccattctcctgcctc

SEQ ID NO: 237819 - DNA, 625 bp, Homo sapiens
aaatattccaaaatacaaaaaaaaaaaaaaaatccagaatccaaaagtgtctcaagcatttcagataatgggtgctcagcctgtatactgctagatttcatttgtttatgtatttttgggggaccttttcatttggtcatgagggatatcagtctgtaattttcttttttgaaatgtttgtatcaggttttggtatctgggttttcctggcctcataaattagggaggtataccttgaatgtttgctagaattcactagtaaaaccatctgggcttggagctttctttttgggaagtgtattgattattactcagattctctgtttctttttgagtcagttttggtgaattgtgtttttaaggaatctgttgtttcatctaatgtgttgaatttattggcataaatgtctatagcatctgtagtgatatcccatgattttggtaagagattattaatttttaaggtagccaacttttgactttgttaattttctctgtgttttgctttcctcttttattggtttctgcttttatatttaatttcctccatctacttactttggatttagtttgctcatcttttttctagattcttaaggtggaagcttaggactttaatatgcat

SEQ ID NO: 237820 - DNA, 631 bp, Homo sapiens
atttttctaggaatctaatacagaaaaagtttgatccaaatatacttgtttcccagaatggaatggtcataataaatttgtacatgggtaattcacccagattctttgaggtttagtttccagttaatttctggtggcgcttattgcctccttgtctgtgtttttaggggacagcttacaaacaccaggaagtacagctacccctaaagtccctctgcaccaaaatgtgaaaaacaacctggctgtttagagtagaatatataattcatttaagaacaattttgttgaattatggcccagcaccatggctcagtcctgtaatcccagtgctgcaggaggctgaggcaggaggattacttgaggacaggagctgggggctgcagtgagctatgatagcgccactgcactgcagcctgggcaacagagtgagactgtctcttaaaaaggccaaggcgagcagatcacgaggtcaggagattgagaccatcctggccaacatggtgaaaccctgtctctactaaaataaaaaaaattagccaggcgtggtggcgggcgcctgtagtcccagctactcaggaggctgaggcaggggaattgcttgaacccgggaggtggaggttgctttgagcca

SEQ ID NO: 237821 - DNA, 665 bp, Homo sapiens
gtgggggttgtgaaaggatagagttgggtaagattatggttttttagagtataatgtttatgagagcttagctgctggaatctgattctcaaatcctgtctccaaaattcctgtaactttgcacaaattatttctctatgcctcaatttcttaatctgtaatgtatttacttcagagagctgttggaagaatttgagtagttaatgcatttaaaatgctcagaatggtcacttagaacttagcactctataaatgatattttttgacattatgaagagttttgaaatctagcaaaagagtttaaattttatgtgataagtaacgtacagccaggataaattccttattatatgttcaaagcagcatttaaggaaaagtaagtagaaaacagaggaccaattcaaatggaggaggctggggtgaggaagaccacctactaagctgtagtattcggaaatatcaggttttaagttaatgagaggctaggataatagctacaacaaatataatgattaataaaaccgaaacctgtattttctttacaaaacacttttgacataacagtacgtcctggatacaacagtatctctaatttggagacaaagaattggaaacttagtgctggcttctatcattgtggtaagagtgaaaataatggatacaaa

SEQ ID NO: 237822 - DNA, 1317 bp, Homo sapiens
  misc_feature (110)..(110): n is a, c, g, or t
  misc_feature (479)..(479): n is a, c, g, or t
  misc_feature (541)..(541): n is a, c, g, or t
  misc_feature (708)..(708): n is a, c, g, or t
  misc_feature (719)..(719): n is a, c, g, or t
  misc_feature (776)..(776): n is a, c, g, or t
agcttgcctgcttctcaaaggtcatgatttccaccctggggctgggaggcagctacatattcctacccgctggcacaggatctggccctgcactcccgagaggtggctgngagccttgcggaggcagagagagaacaaaatggaaaggaatcttcctcccggagagccatcttctgtgcatgccggtgcctgcaaaagacaggcgaggcgagacagctgcacctcgggcctcgtcgctgttgctgagaaagaaaggaacaaataaatttagctccatcctacgcatcctttgcagctgctgattgaccaaacagaaagaggcctctatttcaaccctggcttctcagctttttgcctgatggggtctgctatcgccctttacaagggacttttgaaggaggaaacgggccgtggccttatttagcgcctggccggctggaggctgcacagacaggagttcaagtttagggtgtctcttnttgcccatcccaaagcaaaatggtggcccggaaacgtttccaaatgggcttcggctcctggnatttccaatgtatttatttggaagccagaacatggtgggtggagagatgtgtaactgtgccgaggccagcctatagctcccgaagccattagtttaatagcaccatttgtggaaataaagaactcgctgactgggcttgaaggtaaaagactggaacgaagcactgngggggtttcgnggggctcactagcgtggagaggtccctgcgggatgggggacaagctgtgtggacttngagtcagatagacttgggttccagtcctagctctatcacctaaaggcacgttgtctctggacaaagagagcctttgctctgtgatatgtaagtgaaatgctagctgtgacactgaacctctctgagcctcagttccttatctgtaaaacagcaatgatgacacgaggtcgtcacaaggattaaatgacaaagaatactgaacctacatagcccagctcttgctgtgccatgatggtgtagagtggcccctgtttgacctgcccaggcccattctccaaagaagctgtacaggtgaggtggctcacccctgtaatcccagtactttgggaggccgagaagggaggatcacttgagcccaggagtttgaggccagcctgggcaacatagagagaccccatctctgcaaaaaaataaaaaaaattagctgggtgtggcggtgcacgcctgtggtcccagctacacaggaggctaaggtgggaggatcccttgagcccaagaggtccaggctgcagcctgggtgacagagcaagaccctgtctct

SEQ ID NO: 237823 - DNA, 495 bp, Homo sapiens
atgaaatcatggcatttctcttactgcttttattccactataaatggcacactgacacatttccataatatgatttttatgatttttcattcatcatatgccataccttgtgataagtccttacagtgtgttctcatgcaattctcgtgatagtcctgtgaggtcaatatcttattactctcattttgtaggtgtataaatgtgggccttcatgtcacaaagcatggaaattgtctgtggctgtcatatgactgtttcaggaaagtactcagaatgttggaatgttcatttactgaatattcactgaatgtttattgaacacttcgagatgctggggacacaacattgaatgagataaaaccattggtatcacggagcccgtattgtggtggtgggggtagcattaaacaaataaataagcaagagaaacatcagaaagtactaagtgctaagtgctgtgcagataattaaaacggagtgatgtgataaaaaaaa

SEQ ID NO: 237824 - DNA, 479 bp, Homo sapiens
atgtcaattaagaaaggaaaaaggtaacatggggtgcaggagagggttattgacaatattgcaagaggcaaagccaaagaaaatagagtggcgtgcacacatggggagatgggcgagctacctcctccatgattacgggcaggttttgtagctgtgcaggggttgggtagctcctatttgatagcttctctttgatctgtgaggtggaaggtgagatttccggctgagattacaatgcaggtgactggaggaagtggtctaaattttgagaacagagtagctttctgtgaagggcagataggcaaggagtttaatgtgagtttctttagcagtgctccagtgctgatttgccaggagtagaaggagtaggggagatcaggatatggaaacaaagtgtagttgatgtgaatgggccatgaaatcaaagctgaacaggaaacgaagtgaagaaagaagtgaaggtggtaggaagctagtag

SEQ ID NO: 237825 - DNA, 349 bp, Homo sapiens
tattcacatcaactacatgtaattacttgactgtacttttaatgatgctaaaaatttaaattctgtggcaacgtaaatctctgacaagacagtatatttactaacactgaaggaatgtaagaccattgtgcatttttagaggcttgtatttatgcatatggcacaaacatttgcatttttacattcatttatcttaattattggacacagttaatttaaaacactaacttggacaaaactaattgttctgtattatatcagaataaataacatatctattttataatatataatatatgccaaactatttgccatatctttataataataaataacatttaataaataa

SEQ ID NO: 237826 - DNA, 435 bp, Homo sapiens
gcatataccaccacacccggataatttttttgtattttttgtaaagatgaggttttgccatgttgcccaggctggtttagattgtgctttcttagtgcttttttcaaaaacctctgctattttatttatttatttatttttaaggttggctctcactctgtcacccaagctggagtgcactggcacgatcacggctcactgcaatctcaacctcctgagctcaggagatccttccacctgggcctcccaaggtgctaggattgcaggtgtgagccaccttgcccagcctgaaataattcttttgattggttcagtgaaatcggagaaggtacattgcaatttgtgctgttcagaaattatgattataataaaattttgtgtctaagactaaattaaaaactctatactagccaaaatccctatatcagtgttcta

SEQ ID NO: 237827 - DNA, 354 bp, Homo sapiens
tagtgtttatttcctcaggttttatcattagattcttttataatggcagacattcatattttagagtcatattttagtcaggtttacactatcaatattcatgtctgtttttgcaatccagagataatctttaaaagcagaaatctatctaaaaggctagggtttaaagttcttttcattttcactaactccttaatatggtattcagtgtactccatagcttgcaatttacaaatgctgtatctacatggtctgccaatacagatgcaattgtatattaatcagaatttttaaaatcagaatggaaaagaggcagggaacaatttttaaaagtttaatagataaagaaacaaa

SEQ ID NO: 237828 - DNA, 439 bp, Homo sapiens
ttttttgtagagatgaggttttgccatgttggccaggctggtctcaaactcctggcctcaagtgatccacctgcccagatgccccgcccagcctcccaaagtgctgggattacaggtgtgagtcaccacgcccagccttctgacgtagtttctaaaactccatttgttaattgaattttgacttcttggcattttctaaaaaacacagagagggtcgaatagcagctgttttcatgctctgtacttgcttgctgttgacacacgcggtgtggctctgggtccggttggctttgcctaggggaggagggccagtcatgcaggtgcagctggagaggctcaccaggtcccttgtatggggctgggagccctgccccaggaggcccgtggcacggtgtggcctcgccttccaggccatctccacagacctgcctcggccttg

SEQ ID NO: 237829 - DNA, 406 bp, Homo sapiens
gtgcagatggaacagaggaaacggggctgaggcacgttcctggggtccactgacaagatctcgatgcttcagatgttggggaaaccattattctattcacgcagttgcccattccagaaatatgaggttgtcgtctcctcctcaatccactgaatcatgaagtcccatcaattctacttcctgctgagtccatttactcctctctatctatatggcccatctggtctcctaacgcatgcaactccactccattcgcaacacaaaattcatgttgatctttttaaaaatgctaagctgataatggcattctcttacatgaaaaaaaaacctttaatggctcagaaagaggctgaaaacccttcactttagtctctaatgccctgcttagctgtgttcctgcctccct

SEQ ID NO: 237830 - DNA, 341 bp, Homo sapiens
gaattcttgcacttattaaaggaaatgcattcaacggaaaaggcatctagtcagatatcttagaatggcttcttaagtgaactgacttactcaaatcatcccctaaataactcttctctgttataagaggataagcaaagttattgtcacttgaatgctttatatatattatattatttcattttgagctaaattatgtgcatttgagatataatatgctatctgaatattttatgggtcacaaggtgccctggcataatccagtggagatgattggtctacttgtttacagaacttaaaattacattttattgttttatgttattaaacagttcaatcat

SEQ ID NO: 237831 - DNA, 310 bp, Homo sapiens
agttatttaaaaatatgtttgaaagcaaaaatgataatgtctggcgtttgcagtgtatgtagatgttaatatgtaggacaagtgaaatacaaaaggggacaaggtgtggtgatgaagtttctgcattccacttgaagtagtaaaatactgattctaagtagattgtgaaaagttaatatgtatattgtaatccttagaccaaccactaaactatacaaagagatggcaaaaaacataatagagaaatcaaaatggagttctaaaaaaagttcaaaaagcttgaatcaagacaggaaagaagacatggagg

SEQ ID NO: 237832 - DNA, 278 bp, Homo sapiens
gaccaatgcacactattgaaactcatcttgctctcttctctaggtgagtaaagcattgttcctttcagtgcctgtgtgagtcatgtctttcttagtgactccaatacctgcaaatcacatagtgggttgacatcctgatgctgctgctcctgatggtaggcaacaagtgttgcttgatagcaggatttataagtacagaaaatagaggtcctcaatcatttgtattttcttaaatgattatgaggcaaggtcatcaactgagaaaggaaagttggcaa

SEQ ID NO: 237833 - DNA, 506 bp, Homo sapiens
actcctacaggaactggacctggttatggcatttccaacgcaggggcaagcgatgaatggcagggttgaccccaccattcccctggtaatcactgctgggtgtactactaacattgcctcgcattctctgaacaaaccaataaagcaaaagtaattcccactttatggataaggaagacgtagaatgtgacttgtccaaggccacagagtaaacagatgagctcagattcaaaccttggtgaataccagcttcataaagccagtgctctgtctaccgtaatatgcaacactctaaagttagcaaaatcaagtttattatacccacgctgtaatccacatacttgcaagcaattaataaactcagagtggaaggttaaatcatctgaaaataaacatcaaaaatgtatcactaattcttggcaattcttgtatctaagcaatcaccaaaatatttaataactcaaagatgatttatcatcaaacataagaattaactccctgggagg

SEQ ID NO: 237834 - DNA, 313 bp, Homo sapiens
agattaatcctgcttggccatggggattatccttttaaaattatgttgaatcctgtttgctagcattttcttaatgattttggatctacgtttataagaaatattggtatgaacttatttttcttgtagcgttgtcgtcgggatgaggtactgcaagcttcatgaaatggattcagaagtattccctcctcataatttataaaagcgttttcacaatcaatgaggtagaaaacagaaatactttagaggaacccaaaagctcactatttgaaaagatcagtaaagttggtaatattctagaaaggttaatcaa

SEQ ID NO: 237835 - DNA, 446 bp, Homo sapiens
tctgaatgtttttcaggtctcaatctccttcagttcatctctgacttttggttattttttgtcttctgctaggttgggggttggtttcctcttacttctctagttattttagttatgatgttagcttgttaaactgggatctttctttttgatgtgggcatttagtgctctaagtttccctctaagactaccttagctgtgtcccatagatactggtatgttgtgcctgtgcacatatacactggcaaagtgatgggactggcaaagtgatgggagttgccatgggctcagggtaagctgcagtgtggggagggaggaggcaggctggtatgtggcatgggagcctccccacaggaactctctgccagtcagttatgattcaccagtgcaggagctatgaggagggcctccaggccacctgaagcagtattatttttgtttattaa

SEQ ID NO: 237836 - DNA, 712 bp, Homo sapiens
catctggctagatggcaccaaactgcatcacttcaggccacacaatgttcattaacacttaaaggactttttttttttgtatataaattatatagccaaaaacaaagtaaaacataacccaccaaaaatattttgttttacctcttggttggcaattttggcatcaagcacacatactttaatcatagtaatacttttcttacagagacatggaggttgctcgctaaatagagcaaagcaaaacaaaacaaaacaaaacaaaacaaaaacacacctttcagaatgaacagggcattcatacagaaactgtggaggtgaagttggcacttactcatctcaaaggacattgtcttttggccaaggctgccatcctgtctgctttgacacttggaaatggcaactgagttcgtaacacaaaactgaatgttgcccttcttaatgtgaggagagaatgaaatagaacacaaaaaaaatggcattcaagaatataatcgccatggtggctcatgcctgtaatcctagtactttgggaggctgagatgggtggatcacctgaggtcaggagttcgagaccagcctggccaacatgaggaaaccctgtctctactaaaaatacaaaaattagccgggcgtggtggcatgtgcctataatcccagctactcaggagactcaggcaggagaatcacttgaacccaggaggggcggagcttg

SEQ ID NO: 237837 - DNA, 1014 bp, Homo sapiens
atgcacggtcagaaaatgacatagaggcgggaatctttaagttttcagggctcattagacagtgagcaggtgaggctcaaggctgagtttgcaactgtgctgtgaaaactcaaaaatgaaagtttttttcatttctgagcctgttgaaaagtgggtaagaagggaaagggcagtctcataataaaataatatgtaaaggctaaccaaataacccactttagtctttacttactggcaggcagcaacatgtcctatttacagagggaggctttacctaagtggttatatgtaaatgaaccaccttttcaatgaaacaggatgcacctgtctagaggtgtctgttactagagcaatggatgtttgattggactgacaaattttatttcctttttggaaaaaagaatgtaggtggtatcaaatcaccctttctcctggtaacaataggaattacttcttgaacttgagaaaccagtagttgcttgacctatgttttttgcatttagcatagtcttctaaagtagtaggagcatacgtttttgtctttaattccctgcagaccccttccccaatgatcatcagcaatacatccacccataaatcaatgaaatcataaaaaagaaacataaaattcacttgaaaaagaatacctacaaggcattcctagaattctcaatgtaagtcattttttgccagcaaagctaattgttctcaaatatttgataacaaggatggcatacgtagttcattccaagacctcaactgtgtgacagacgcaagggcagtagagttgagccccatgagctgttgttgtcatgtgagtgactccagccttcatgtgaatttcatgtttttctttacaattctagccacctccaccaatctgccatccatttcccccatgggatacaatggaaagaaaaaggtgcctgacaaggtatacagtctgcccttcatatccgtgagttgcacatccgtgattccatccagccacagatagaaaatattcagaaaaac

SEQ ID NO: 237838 - DNA, 978 bp, Homo sapiens
gcaccattgcactccagcttgggcagcaagagcgaaaacaacaaaaacaaaaacaaaacaaaacaaaagaacgctttttctttgaggaccatgccacctagcttgcagacactttcctcttcctgttcctgccatcttctgacttactggcctctctgtattgctaacatctttgtctcctggcttatactcctgccctccaccttcaccttgtcgttattcacatggattcatcttctgtacagacaacacccttacttctttctcgcttgaccagcttgatacctccccccaactcgatttctccttatttccactgttctaggccaccctggcaaactatagccaaaggccaaattcagctcactgctaattttgtaataaaagttttattggaatacagccatgcctattcatttatatattggctatagttgctttcttcctaaaatagcagagttgcattgaaatagagaccacatggtccataacaccaaagatatttactatctggtccttcactaaaacgttttctaacccctattctggacaaacaaaataaaaatatctttctacgaaagtaaaacttgagcattatagaaagtttaggaaataagacaaagcattaatacaacaaagaaaagcagctccccattattccataattcagatataaccactgttagtattttagtttttcttcctgttacttggtaattttttatgtctgtatgtgtatattaatatgtctacatatataaattaattttagaaattcaggattataccactttataacccacttttttcatttcaaaatatattatcaatgtttttctatatgaattgttactttttaataacatttaattgttacttttttataaacatgattttaaatttctgcaaagtagtcaatggagtgaagataacatcatttcactagccagcctactagtacagaattttttttttttt

SEQ ID NO: 237839 - DNA, 1032 bp, Homo sapiens
gcaccattgcactccagcttgggcagcaagagcgaaaacaacaaaaacaaaaacaaaacaaaacaaaagaacgctttttctttgaggaccatgccacctagcttgcagacactttcctcttcctgttcctgccatcttctgacttactggcctctctgtattgctaacatctttgtctcctggcttatactcctgccctccaccttcaccttgtcgttattcacatggattcatcttctgtacagacaacacccttacttctttctcgcttgaccagcttgataccagagaccagcatctaactccatgtgaaactgatctactctttgactgccatttttccccccaactcgatttctccttatttccactgttctaggccaccctggcaaactatagccaaaggccaaattcagctcactgctaattttgtaataaaagttttattggaatacagccatgcctattcatttatatattggctatagttgctttcttcctaaaatagcagagttgcattgaaatagagaccacatggtccataacaccaaagatatttactatctggtccttcactaaaacgttttctaacccctattctggacaaacaaaataaaaatatctttctacgaaagtaaaacttgagcattatagaaagtttaggaaataagacaaagcattaatacaacaaagaaaagcagctccccattattccataattcagatataaccactgttagtattttagtttttcttcctgttacttggtaattttttatgtctgtatgtgtatattaatatgtctacatatataaattaattttagaaattcaggattataccactttataacccacttttttcatttcaaaatatattatcaatgtttttctatatgaattgttactttttaataacatttaattgttacttttttataaacatgattttaaatttctgcaaagtagtcaatggagtgaagataacatcatttcactagccagcctactagtacagaattttttttttttt

SEQ ID NO: 237840 - DNA, 417 bp, Homo sapiens
caatgcatttgcttcatggccaggggaagccaagcgtccagaaagtggaagagcgggtactactaccaccccctagtggtggcatgtgacaacacggtatagcaataaaacattgaagcaaagataccaattgcacatccaacttagccaaacccaacgcagttgataaaagctgatgtgtacaaatcctgattaatttagaattaaatctgttactgctagaacatggctatgtacctactttcatttatctcaatttattaatatatagccatgggattagccatgtgatttttgtgcttttgttagtagtatattactacattgagacagatttacagtttgcaacggaatgtcagtgtagaattgactatacttgcatgagaaaaagaatatattttcagtacaaacctatta

SEQ ID NO: 237841 - DNA, 401 bp, Homo sapiens
agttgttccatcattttcccagggcctcatacatcacagggttccataaatatttattcaatgaatgaatggattatacaatcttaaccagttgctattgccattagctatttctcctattttcctcagcaataattcactgggaaaaaatgtttggggttcatattcgctcacggaaataatgaaaaggcccgttacttttctatgaaatcaaataactgaagaacaaaatgttatttaaggtattgattaatgttctatataaaatactgaaacgcacagccataaattatgctggcattatgtgtatttctatttcttatgtttccaactaaggctgttgatgctagaatgttaaaaaacgttcttcatttcaaaataaattcgtatctcattgaggt

SEQ ID NO: 237842 - DNA, 531 bp, Homo sapiens
tcctaggtgttaagattgagtcagagcagacccaagtgtccagtggttgccttagctcagccttagaaagttgcaaaatgcagagatgggacaccagaagagtgggcatgttgtgtgggaagtggggttggtgggggagcccatggacttcaggcctccaggtcactgcaagttctagaacaatttcttccaccaatacactatcactgactggttatgccatgtacaaacactactactaatttaaatttaattattattatatgccacactggtggttgtaaacatcagttgaacttttcaatgtctaaatattgtggttagttgtttttatgtaatcgtattctattcatactttcaaaaattagaggaaatattggttactgtaatagcattttgctaaattgaagaagggagtgttttaaatatctggcgatgtagcaagctattgtgtgggttgccttgtcctactcaacttcaaatattcaccacccccctcataataaaagcattataggagatagagaaata

SEQ ID NO: 237843 - DNA, 425 bp, Homo sapiens
agacagtgcctaagtagaggcaggagagttgagcctgtctctgtggtgtcttcatgggaaacacgaacattttcttgctctacttctggtgttggttggggaactcagttatttcttggaaagactgagtgtgtcaaagaatcattctgtttgctgtctgaaaacaaatgacacagtatttgttttcaacaaatgaaacagtatttgttttcaacaaatgaaacagtgtttgttttggtgtgcaaaggcctttgacactttctgtgtcaacgtacttttatcatcacataaacatgtatgaccaaatttaaatttttgtagtgtgtattaatgcctttttttgtttaattattataatcatttttcaaaatatctttgttttaatattttatcactctttattaaattaatggaaatatcaccca

SEQ ID NO: 237844 - DNA, 154 bp, Homo sapiens
taaagttgaaaggaggaaaatgtcatcagcactataatctttgtctcacttaagaaaaaaggccttaatttgcggcagggaagtatttaaatatacagactgtaaatattggagggtacatttttgtggcttagaatgtgaatgggggaaaata

SEQ ID NO: 237845 - DNA, 440 bp, Homo sapiens
aattacatttatgttaagttttctttgcaagaattcctgacagctatacgcagatgataggtaagaaatcagatccaggggtaaactatacagattagccataggtaattagctaattatcttttataattaggtaaataattacaaaagcaaaatgttaaatatcttttcagttaatttatttttttgctgtggggccatctgtgtttactaggggagtgtccatgcattttttaaatatgtttgatatcatgtgagatggaccctatagaaataagagtgtgtagaacatagagaggtctccagagtaataatgttaccccttggagaaggggatagaacacttagaggattcagttcaggatatcctaatattatctcttgatttaattggaatttctgtaaacatgttctttctaaatgtagggaaaggtcaggtg

SEQ ID NO: 237846 - DNA, 931 bp, Homo sapiens
ggatatgtaggagaagataatgatgttacgttataagagacttctagttagtagatttcaaagccagctacttaatgtttccccaaaaagtctgcaaagattaagcctttaagtccctttctcttcccgtgtgtgtgtatgtgtgtgcatgtgcgtgtgcttgtggatgcacatgctaaacaattaaacaaacaaaaagacaaaacatcctttttcccaggtctcctagatattttttccccaggcaattccatgtgcaacctttgcttttgccggttcagggcagcttggcccgggtaagacaatagacatacaagataataacagggcagttgctctgtggcattgtcctttatcaggattaactgttacaccaataagcaaaacagtgtggtggggtttttccatcactggcctttgctgttcctgggtgccagatggcattatatccatgaaaaaaaaaaaagctgcaagttataatgttgaccaggcactgttacttccacttgatcacactgtttggggctctctttgatgtacaaaacactcctaagttaatgaaatgcgttgcagctggctaatggctgggaaagtgcaaaccctgcattgaacccttcccatcagactattcaatggctaggtaatgtcaggcccgagctggagaaggggcaaacaggctcgttgccaggcaggcccgggactcctgggcaaacggctgtggaggggctggtatttttctcctttcaatagaagtggtctgtgcctgcagcaaatgagaaataaatccatcaaggccaagctcaggcttattttgctggctgctagaatttgcataagagccttgtatatacaggtaaacaaagacttcctggaattactaatgtggaggtgatctgagaactgggaacaaagtagggcctcatcttatgca

SEQ ID NO: 237847 - DNA, 507 bp, Homo sapiens
gcagaaaagagaactattgggcactgggcttaatacctgggtgttgaaataacctttacaactaacccccatgacacaagtttatcaatgtgacaaaccttcataccctttttttggtaccccgaacctaaaataaaagtttaaaaaattatattttagaatatattcaaaaagtaggatattatttctcaaagaaaacatctgaattcatactttaaaaatattttttaaaacttgaagtttgatcaaggcatttacatcctaggagacaaaagcaatcatttcagtatgcattctagatttatcaactgcatacatattttaggaagattttaagatatttcaatataatatctaaaaatgaccacttaattttagtaaaaagagactcccaccttctggtaattgacaattactatggtctgagagtgtttagattaaaaaattgtgtgtgtgtgtgtgtgtgtaaaattatcacaggaaaatcaatacatcaatagtagcacc

SEQ ID NO: 237848 - DNA, 358 bp, Homo sapiens
ttctgtaaagggccagacagtaaatatttcaggcttaggggccatatggtctctgtagccaactactcaactgtgctgttgtaacatgaaagcagccatagtcataagtgaatgggcaggactgtgttccaataaagctttattgatggacactgacatttgaatttcctaaaatttttatgtgtcacaaaatactattcttcttttgtttttttctccaatcatgtaaaaaggtaaaaaccatgcttagtgtaaaagttacataaaagctggaagcaggctggatttggcctgcaggtgacagtttgctgactctagttttaccaaaccttcccttcttttggattctacatccagc

SEQ ID NO: 237849 - DNA, 485 bp, Homo sapiens
catctaggagccctggttcctactactggagaatggtattagaagccaagatctaggttctaagtgtgcttattgctactgggtgtgtcattggttcttgccctactgagccaggacaacagggagatatatatgtgtgtatactgtatatatacacatatctatacacatttctgtatataactatattatagaattcatgaaatgtcataaactcctcagagcatactgacgtctccagctctaatccattaccacatagaccacactagcctttatcttctcattccaacagtgagaaacttagctcccactatcagccatccatctacttcgttgttcaatttcggtatgatgtgtggtagttatatttgtcttctagggctgctataataaatgatcacaaacttagtggcttaaaacagaaattattcttttcacagttctagaaactagaattccaaaatcaagaggtaaaaaatatg

SEQ ID NO: 237850 - DNA, 618 bp, Homo sapiens
cgcaggctgtagagcaatgatgcaatctcggctcactgcaacctccacctcccgggtcccagtgattctcctgcctcagcctcctgcgtagctgggattacaggtgcctgccaccatgcctggctaatttttgtatttttagtagagacacggtttcaccatattggccaggctggtcttgaactcctaacctcaagtgatccgcccccatcagcctcccaaagtgctgggattacaggcgtgagccaccgctcctggccaaaatcacattttctttatctgttcactgcaggacatttaggttgtttccatatgttgactatcgtgtaaaatgctgcagtgaacatgggaatgcagagagctctttacaatcctgtaggactgcttgatcatatgttccattctgaattttgggggaaccttcctactttttccataatggttgtataaagttatattcctaacaacagtgaacaagggttctactttctccacatctttgccgacatttgctatcttttatcttttttacaatagtcaccctaaaaggtatgaagtgatatctcattatggttttgacctgcatttacctgataattacagatgtggagcaccttt

SEQ ID NO: 237851 - DNA, 382 bp, Homo sapiens
gatccagttaagaaatcaatgatagaagctataattgtgttgagcattcaatgtgtaccagatgttttgctgtacactttcagatgcatttcctaaattagctaaatattaccaataagtaggtatcagtatccctaatccatagtcaggaaatgatggagtagaaaggtttattaaaattggaatatctcagaagtgaagatctctatgtgaaataggagacaaatcatatgttccaacagcattaggaatcaagtagtgaaaatggcagagctcccatattgaatgagaaagtgattcttggcagataagacaagaaaaaaaatattcagagtgcatggtaattatgaataataacaaaaagttaacctggaatgattgc

SEQ ID NO: 237852 - DNA, 1034 bp, Homo sapiens
acatccctgctggtgccagccccagccttcctcatcatcttccagaagcactggatgctcctccttggctccgggacagaccccttcctggcgctgtgcacggcccagactccagcagtgacttttcccagctctgaggcatcacccagtgtcctgggcgtgcccttggccccttcatactccacgttccttgaagtgaagcctgtggctccagggccagcctctctctgagcctcgtctactgtggaacatctgagcctggaggaggccttttgtgtggcccctgtgtccagtctcaccccatccttctcaggtttagatgctgtttctactctcattgtgtagatgagaaacgggtgcacagagccaggactgcgccagagcccacggcgggagggcaggaaggccacacacacggagggtcccacctcccatctgccaccctgcttgcttgtcacaggggagctgtccctggctgcatccctccgcggcttagacactggcggcctggattttaaaacatgttttgctatgaaggatgttattggagcagctggcaaaattggaataagatctgccacgtgatgttattgtatcagggtcagtttttttaaccatccatatttgtactgtggttaggtatgagagcgaccttgcttttgttaaatacactctaactggttcagaaaagtgagcgtgcctgtgtgtgtgcgtgtgtgtgtacgtgtgtgtgggtgtgtgtgcctgcgcatgtgtgggcacctgtgtgtatgcatgtgcctgccagtaaggggatgataaagcagttatggcagaatgtgagcccttggggaatctgggtgaaggtggacgggaattccttgttctatttttgcagctgttttgaagtttgaaatttaaaatgaagtacccttgaaagttacacagggccaggcgtggtggctcacaccggtaatcccagtgctttgggaggcctaggtgggaggagtttgaggcagcctggacagcaagacccccatctctatttttaaaaa

SEQ ID NO: 237853 - DNA, 338 bp, Homo sapiens
ggtagaaatttgagaagtttatattgaccaagtttatattgtccctcttgtatgtgagctggttatttaattgaaaaagaattcattaaaggcccagagtatactctacagaaaaaggaggtactgtgcttgtacttatagacctaatgtagagaagccctaactagggaggagagaattcacatcaaaaatggaaaataaggccaagggtggtggctcttgcctgtaatcctagcactttgggaggctgagatgggaggatcccttgtggtgaggccaggagttcaagatcatcctgagcaacatagtgagaccctgtatctaataaaaaagcaaaa

SEQ ID NO: 237854 - DNA, 411 bp, Homo sapiens
agctcatattcccaaagcattttgctcacatctctattagagccccattaccttatattgtaattattgcttacttgtctcttttctactaggctggagctccaggcaagtagctctttttgtttgtttttgaatctctctgaatctagtaagttctgacatgtcttggttgaatgaattttattttacttttatagaaagtcattactaatacaaatacgagaccttttgtttattggaaacatttatctactttaaaaatatatatgtttgtggaaaaacttattgaactgtgctgcttggcttagttattttggcacatgttcacttctctggaaacaaattactgttagtccaagaaactgaagaaatggtacccatgagaataaaattaatctcaatatactgaac

SEQ ID NO: 237855 - DNA, 381 bp, Homo sapiens
aaggcactaggaagagattgctgacaaggcagtgtgttttctaaaggcaaacactggacaaaatctctccctgcgatggcgagactcacagagacaggacagctgggtgagtcagctggcttctccccagaatgagcatcaagacacttgccaccctaaatatgtatcagggttgagatccacatgccagcttctgggacaagcagggtctccctcagctgtgccattggattggttcctcttgttaaaatagttagaaaattaagactcttttaataagctttaataagcttcagatatgctgcaagcatcaaaagcaacacatgtctgttatggcggctgttgtaaacctagaactaaggaagacgcaaatataaaaaa

SEQ ID NO: 237856 - DNA, 1257 bp, Homo sapiens
gttgcatagtactgtggctgtgtaacagaagaaacacactaaactaattacaaagttaacaatttcattacagttgtgctaaatgcccgtagtgagaagaacaggaaccttgagcatgtatagtagaggaacctgcacaggtctgatgggtcagaggggtcttctctgggtttcactgaggatgagaagtaagcaaactgtggaaacatgcaaaggaaaaagtgatagaataatattcaagacaaaaagaacagtatgaggcaagagaaataatatgtatttaaaatttttggttactcaatatcttatacttagtatgagtcctaaaattaaaaatgtgaaactgttgtactatacgtataacctaaccttaattattctgtaagaacatgcttccataggaaatagtggataattttcagctatttaaggcaaaagctaaaatagttcactcctcaactgagacccaaagaattatagatatttttcatgatgacccatgaaaaatatcactcatctacataaaggagagactatatctattttatagagaagctaagaaatatacctacacaaacttgtcaggtgctttacaactacatagtactttttaacaacaaaataataattttaagaatgaaaaatttaatcatcgggaagaacgtcccactacagacttcctatcactggcagttatatttttgagcgtaaaagggtcgtcaaacgctaaatctaagtaacgaattgaaagtttaaagagggggaagagttggtttgcaaaggaacaagtttaaatagcttaatatcaatagaatgatcctgaagacagaaaaaactttgtcactcttcctctctcattttctttctctctctctccccttctcatacacatgcctcccccaccaaagaatataatgtaaattaaatccactaaaatgtaatggcatgaaaatctctgtagtctgaatcactaatattcctgagtttttatgagctcctagtacagctaaagtttgcctatgcatgatcatctatgcgtcagagcttcctccttctacaagctaactccctgcatctgggcatcaggactgctccatacatttgctgaaaacttcttgtatttcctgatgtaaaattgtgcaaacacctacaataaagccatctacttttagggaaagggagttgaaaatgcaaccaactcttggcgaactgtacaaacaaatctttgctatactttatttcaaataaattcttttt

SEQ ID NO: 237857 - DNA, 234 bp, Homo sapiens
caatttgtgaaatatggggaagcttatttttgctcttctaatatgctaagtgattagattgcatatttgcaatgattggtgctgatggctttgtatttaattgggggaaaatctggaaacacccccaaaataattccatttgtttcctgcgtattattacatagttctgacttcattttaagtaactaaccatcttaaaaagaaacatttgctcctgaaataaaagaaattcta

SEQ ID NO: 237858 - DNA, 408 bp, Homo sapiens
atttgacatgaaactactgccgtctgtaaaccagttatcctcagaatctgggagaagttggtcttttaaattaggctggctaacatatgaatgtatgtgcaatgacctgctcgcaggaatgatcagttactgggcctgtgggcagaaacagagctggattcaaggtgctacaggtttcaagggttacatctgggttttctaagagtgtggcatggtattaggttaaacttccctccatcatctagaggtatccttttatttctaagactgacttcacctgatgaggggttagaacttctggtagttgacctagggtgacttcagtggctccttccactaaaataccagtggctgggattgcccacgggaaacttggccatcccgaggccactccatccagcttttttg

SEQ ID NO: 237859 - DNA, 476 bp, Homo sapiens
ctaaaaattagacttatggaactcaaaatttcccctagaggtaatgttttccctggaggcaatgttctaaatagtggttctgtttccagctggccaacatttcctgctcaatatataatatagctaaaatttataggagcagaagataactgctggaaactatagaactgtttctggaaaaactgtgctccctcgagaaacactgaaactcaagataggaggaacatttctcccacgttctccttactgtagtttcaggaacagaaaagactttagttcgcatcaagaaccttgtgataaactgttcctttctgagtcatgtgttctgtcctatgatagaggacacctagctggttacaggagcccagctcaggtctgccttccaggatgtaggcagttgagaacactgtagctaaagaattaagctcctggctttgtcagcagcaagaagggagcctctgacttggggtcaaaaa

SEQ ID NO: 237860 - DNA, 390 bp, Homo sapiens
ctacacccccctctgcccacgtccccaggaagccatgtcagggcagaccaggcaccttctcattctgaggagagtgcatctcagcccaaatattgtgttccatttagagaacactgaacagattaacagtgaagcttctccaagaaacggtggacagagagcacctggagagtcccgggctgtggccacagaattgcgccagtgaagctggcggttgacttcaaataccagagcatcttacttggggaaggattggcctcattcatgtgattctaacccaaggtaacattagaaacatgctagggtttatcacatgccaagcatgctgtgggctgtgttgcgtgggagccctcatcacggccctgcagtaaagacgctttatctttgaaa

SEQ ID NO: 237861 - DNA, 1309 bp, Homo sapiens
cctacagaagggtccatacggcgttgttctggattcccgtcgtaacttaaagggaaattttcacaatgtccggagcccttgatgtcctgcaaatgaaggaggaggatgtccttaagttccttgcagcaggaacccacttaggtggcaccaatcttgacttccagatggaacagtacatctataaaaggaaaagtgatggcatctatatcataaatctcaagaggacctgggagaagcttctgctggcagctcgtgcaattgttgccattgaaaaccctgctgatgtcagtgttatatcctccaggaatactggccagagggctgtgctgaagtttgctgctgccactggagccactccaattgctggccgcttcactcctggaaccttcactaaccagatccaggcagccttccgggagccacggcttcttgtggttactgaccccagggctgaccaccagcctctcacggaggcatcttatgttaacctacctaccattgcgctgtgtaacacagattctcccctgcgctatgtggacattgacatcccatgcaacaacaagggagctcactcagtgggtttaatgtggtggatgctggctcgggaaattctgcacatgtgtggcaccatttcccatgaacacccatggaggtcatgcctgatctctacttctacagagatcctgaagagattgaaaaagaagagcaggctgttgctgaaaaggctgtgactgaggaggaatttcagggtgaatgtactgctccagctcctgagttcactgctacttagcctgagattgcagactggtctgaaagcgtgcaggtgacctctgtgcctactgaagattggagtgctcagcctgccacggaagaccgctctgcagctcccactgctcaggccactgaatgggtaggagcaaccactgaaaggtcttaagctgttgttcttgcacaggctcttaagcaacatggaaataaataaggttgatggaaaataaacaacagtttcaaaaaaaaaagaaatgttgagcacctttacaaatacctattggtcatttgcgtgtcttccttggagaatatttgtttagttccttcacccattttttaattgggttatttgttattgagtcatagggattccttatacacgcaaatattaacctcttatcagacacggtttgcaaatattttctgccctttcataggttgtgtttttattgtgttgaatgctttctttgctgacagaagatatttggttgaaatcccacttttgtgactttgcttttggggtgaatctgaaaaatcattg

SEQ ID NO: 237862 - DNA, 404 bp, Homo sapiens
gaaagaaacaaagagaaaggaaaacagctctctctctagtgagacagaggagcttctgaaaggaaacgaccagccggtggcagaatttgccagattttataggcaggcttgaggaggtggtgtctgatttacgtagggcccacagattggtttgatcacgtgtgacgtttatatagcacatggggaaggctggccattccaccctaatcttattatgcaaatgggctttccccttggcctgccccattgtctgctgcttaccgtacacattgctgaaaaagagaagggaagatgaagccaccattttgaacatgattggcaccactgctggcatctatgtctgcagctcgattttacaggctgctctttgttagaaagaaaaatcacttggggctgctttttat

SEQ ID NO: 237863 - DNA, 406 bp, Homo sapiens
aggtggatcacctgaggtcaggagttcgaggccagcctggccaacatggcgaaaccctttttctactgaaaatacaaaaattacccaggcatggtggcaggcatctgtaattccagctacttgggaggctgaggcaggagaatcactagaacccgagaggtggaggttgcagtgagctgagattgtgccactgcactccaacctggtgacagagggagactctgcctaaaataaaataaaaataattaaaaaaaaaaaaagagccacaaactaaagtctggttgggttgggttccattgcctttgctcagaatgtaagctgctactatctaggtacatcagctgtacatatgtcttgtagccctttagggtctcagaatttgtctctgaaaataagaggattggat

SEQ ID NO: 237864 - DNA, 775 bp, Homo sapiens
ccatattctgatagaacttgtaaactcctttcaatattattgaacacatcagataattaaatctgttgccctgttttcttcttggaggcctccttcctggagccttctgtccctgctccagtgtggatcatttagctgttctcatcatcaccttgtgagtcccctctccttctaccctctgttggatcccccatcctggccccctggcttcacaattgttaatttacaccactccccagtagtttcttgagaaagtgaacttgggagataaattgctttgagattttgcatttcagaaaatggttttactctactctcactttgattattatttttgttgagtattctaggtagggaaaattttcccttaaaattttccgggcattatttcattatttccaatgtccactattgctgttgagaaatccaaagtcatcctgattattttaagcccttgaatgtgacctgttgtttctttacctgtttatctccagggttctaaaatttcatggatgtgcctccatgtgtatccttttcatttgttgtgctgggctcttgattggtcctttaaatctggaaatctatgtttttcagctctgaaaaatattctttgggaatctcattttctcctttttctttatttattcttctagaactccttctgggcctcatggattgatcttccagttgtctttttttcccccatgaacccccaaagagtttattttctaatagaataaacacattaaaaggaaacattaaaatgttttctctt

SEQ ID NO: 237865 - DNA, 367 bp, Homo sapiens
taagtcatacagctagtcaatgatggagctctagggtccattaaatgatactaggaagaatgttagtgtagctgtaacacttacaaaacacatgaacttggtgacgggtttttggttttgttttttacttgtctgagccgttattttcttctctgtaaagtgggatctcaatttcacaggagcattaagtgagttgtatagtgtctgtacgcagtaggcattcaagaattattatttccaaattaggtaatcaatgctatattttcattatttatcttcagtatatcattagtagtcaattccaacaatttattctataatttatagttaaatttaaataatctttcaataaaagaaattgattctg

SEQ ID NO: 237866 - DNA, 283 bp, Homo sapiens
ggacgcttaggcgacattaaatctacaaagagaatatttttctttcccttggcttactatatcttttttattactattttataaactttttgactcttatgtattaacacttagcttacaacacaaacacattgtacagctatacaaaaatattttctttcttggcaaggcatggtggctcacacctgtaatcccagcactttgagaggcagaggcaggaagatcatttgaggtcaggagttcaagaccagcctgaccaacatggtgaaatcccatgtccact

SEQ ID NO: 237867 - DNA, 603 bp, Homo sapiens
aaaggaggtgggaggatcacttgagcccaggagctctaggctgcctggagctatgatcacgcctgtgaatagccactacactccagcctgggcaacatagcaaaactccatctcaatcaatcaatcaatgagctgaaaaaggttgcctctgaagaaagggaaatgtgaggcaaggagtaggggactgctgtttttcataataagtcttatagaccaatttaactctttaatttatgtgtatgtgtgatttcatataaagataaagctaaaataaataagatcagaacttaatgaaacaaaaaacaaacaatagaaaggataatggtcatgcctgtaatcccagtactttgggaggctgaggtgggcagatcacctgaggtcaagagttcgagaacagcctggccaacatggtgaaaccccgcctctactaaaaatacaaaaattagctgggcatggtggcacatgcctgtagtcccagctactcaggaggctgaggcaggagaatcgcttgaacccgggggtcagaagttgcaatgaaccgagatagcgccattgcactccagcctgggcaacagagcaagactccatctcaaaaaaaaaaaa

SEQ ID NO: 237868 - DNA, 513 bp, Homo sapiens
cttatataaattattaatagtctgccaagcaattgtctcttatattattattcaaacttttcttggctagtcttagccttaaaatctttcatacaatcatttggaacaacttgtcaggtcacacacacatgcaagcacaagcggcacacacacacatgccacacacacacagacatacatgtacacatgcatgcacacacgcagactcatacatattgttgagattgttattaaaattgcacttattactatagattaattggtgatttcgtacaataatttgggagaaattaacattgcatttttatgtctttcgacgtgataaatctcctgatactcaaatgttctgttgtgtacttcaacaagtttaataattttgttcttatttaaaattcatgtaaatctttttctggacttatttcttcatattgtatagctgatgttactatcataaattgcatctttaagacatttatgttttctaataaattgctactattccttgtgaaaact

SEQ ID NO: 237869 - DNA, 554 bp, Homo sapiens
cgggtggatcacctgaggtcaggagttcgagaccagcctggccaacatggcaaaaccccgtctctactaaaaatacaaaattagccaggcgtggtggcgcatgcctataatcccagctactggggaggctgaggcaggagaatcccttgaacctgagaggcggaggttgcagtgagctgagagtgcgctattgcactccagcctgggcaacaagagtgaaactccatctcaaaaacaaaacaaaacaaaagaaaaaagaaaaaaaatagttctttttctagaaggaaaatacaaaatttctaccaaattataagatagaacaataacatttcaaagaaattttgagcttggcagtgaattaactctctctccttagggaccgtttggcaagaaagttaaaaccccctgattaaagttgaaagggcttgtctgggcgcagtggctcacgcctgtaatcccagcactttgggagcccgaggctggcggatcgcctgagctcaggagtttgagaccagcctgggcaacatggtgaaactcttgtctctgaaaaaaaa

SEQ ID NO: 237870 - DNA, 461 bp, Homo sapiens
gtttctccgggattaagcgagagtcgcggcggaaaaggcccagccggaacgagatttacggcgggggagtcctggagcaggaagtgcgcatgcgtagatggagcaaaaccgcctctccacccgtctcccttcaccatcgacccttgggtccagcaaggaagccctaagtgacgtcaacctttgttcccatggtaacgcagaaccttggggcgggagcaggggaggggctggcgcgcgccggaaaaccggctcagttgacgctgcaggtaaaaagacttcctgtttttttggaaaaaaaaaaaaaaaaaaaaaaaaagtgacccaaaaagctacgaatagagacgacttatcgaaggatttaaaacagtatttgaactgatgcaacaacatattagatgaaaggtaacagaaggttgtcagttcaaaaattacaaatacacacttctattggaatctccacg

SEQ ID NO: 237871 - DNA, 463 bp, Homo sapiens
tggtatctgcctttatgtattcttctcccctcaagcttgagtgagacctgtaacttgcttctaaccagactatcgcaaatgtgggaattttgcagatgtcattaaggcccttaactaattgactttaagttaatcaaaagggagattttcctgggtagcaccaggtgatcccttttaagaagggtctggaggtaagacttaaagctgcagacacttctgttggtggctttgaagaagccagcggccatgagttctacaactgccagaaaatgaaacccgcaacaacctgagtgagcttggaagcagatctttccccagtccagcctttgatgagaatgcagctcagctagtgccttgattgtagccttgtgggaccctgagccaaagacctagctaagcctgccccaactcctcacaaatggaaactgtgagataataaatgtattttgcttaagacactaag

SEQ ID NO: 237872 - DNA, 385 bp, Homo sapiens
tctaagaggtgatcaaacgccagctatggagagagatgcagaggaaagcgaagacatatgcactggcatttgtagaagggcctggatgggggtgaggagcacacggaaaatggtctgaggccatctatgcagttcctgaagaagcacctcgggcagctactgacactcccagcccagctctacaggggtgggtacatgggtgggctgggaacagggtgtctgtccaacaggcgggtgttgagggcccagaagatgtcagggtagcaacaggaggaatctggtgcagtatgagcacacggccgtcagctgatagtgggaagccagtcaagtgccgcgaaagcaggaggcggggccgcggccaacgtcattcccgcggccgcacgtc

SEQ ID NO: 237873 - DNA, 510 bp, Homo sapiens
ccaggctaacaatgcagcaaggatagtaaagcattttacccctcccaaaacaaactgagtattctgacttcaggcttatgtccagctttttagctccgaaacccccccactcactgcacagctgtgttcctttcctggaatgcagttttctatcaggtagcactgagggtccgaacagttcacgtcaaaactatcaggaaagaagaatgaaaaggtaaattaagagaaggcgggcttggctgggcggggtggctcacgcctgtaatcccagcactttgggaggccgaggcgggtggatcacctgaggttaggagtttgagaccagcctggccaacatggtgactccccgtctctacaaaaatacgaaaattagccgggcatggtggcaggcgcctgtaatctcagctactcaggaggctgaggtgggagaatcgcttgaacctgggaggcagaggttgtagatagagccactgcactccagcctgggcgacagagcgagactccgtctca

SEQ ID NO: 237874 - DNA, 519 bp, Homo sapiens
gtggtaagcctctttccatgaagccaaaattccaatgctcttacctcacatttatgaaaaagacatactctgtttttcattctttcttaaaatctttcctgtgttgcctcatagtttaccttcttggttgagaagacttggagactgtgaactatttttgcttggagcaacaatgtatttttattagcagattctaaatatagacttacagtttatcctcttgaccattttttttagtgccttcaagagtagctttcactatgggcccagccataccttatagaagggcacagaaaagccaggcggacaacaggtggaccttcaacaggagccgccttctcattttaattcttactctcatggcatttatgatgacaaattttactgattagttccctcttgaggtgttatttcaactaccgatggtttctttctagttagagaataacaaagcactgcagcaaacagtcttgtttctgttgaaagttgccactcatgcagtccactgagtgcctcagc

SEQ ID NO: 237875 - DNA, 900 bp, Homo sapiens
caatgattgggtcctacagcaaagtatgcaagacattttcatttttgatatgcagatttttaataatacatcaattaaaaataagttggataaaaaaatccaactcttgattggccttagagacttgagaaattctgttataggcctcccaagggcaatagaaagctgtcttatttttgtaccttcaaagtaccttatactaccctttacccaaaggatgtacttactatcagcttttcaatgaggttgtccctgactggccaaagttgtctcttaccatctcttaccatcaccttccatctcaatttgtttcctttgaagaaaatatcactatttgaaaactactttgtttctttatgaatttacttgtttattgagctgtgtatgagaaagtatctgttcttagcattgtatccccacatctagaatgtctatggcacacaatagatactcaaatgaatgcctgaatctgtttaactgatttataattagagcaagtcaaacaacaataattaaggttgccattagaataaactggaaatctattctaatggcaactctgttacttaactgtgcaaccttaggcaaaccttttaaacctctctgagcctcaatgttcttatctattagtagaagaaccactattagcactgctttccttataaaaggttaccatgagagttgaatcataaaatgtatatgtgcataaatatcttcatagcctttttggaagttaattgcgaagggaatgaatgaatgaataaaggaaacatttccaggccacataacaacaacaaaaatacaagaaatacatatagggattgagagtaaatttaatcagcacaaatgaatctcagtgggtaaattatcatatttagattaataaaggctgagtacagt

SEQ ID NO: 237876 - DNA, 284 bp, Homo sapiens
cttatcaaaatttgggaaatgcaataaaaaggagtgcaattttgcaattaaatacatatattagaaaagaagaaataactaaaatcaattacttctgccttaggaggccagaaaaagaagagcaaactaaatccaaagtgaggagaagcaaagaaataataacaattagagcagaaatcaataaaattgaaaacatgaaatcaatagagaaaattcttgaagccaaaagatggttttatgaaaaaaaaaatcagtaaaattgatgagtctttcatgagctaact

SEQ ID NO: 237877 - DNA, 1198 bp, Homo sapiens
tgactcggcagagagctgcaccctgagccagacctcagcagctgggtcctggaggcccccaagcggcagctgcacgcacctggcttcatgccaagctcctcccgcctggcagtggctgcatctgcctcccctccaccctgagtgtcccaagtctgcccgctgtgcattccatggggccagcagctcggtggagcctctgctctcgggggctacagctgctcctagatgcctctgccaccgagggtggaccctgcagtgctggctcctagcctccctgctgattgcttcctgaagacctggggccctgggctgcagtggttggggagaggggggtgggagtgagaagctggcactgtccgtctttctggcctcatcctctccatggtctcagcccctggcggcctggactgcaccgttccggagatgctgcctccccaccaagtccctttagcccaactgtggtggcggccgctgcttctcacacgcgggtcctctcactgcctctccccggtcctcccttcctcccagcaccttcaccagctccccactgagtgccctccaatgttggcgaccctgacccttgtccagccaggggtgaagggcggcaagggatgggctggagggtactaggagcaggtggcggtgcccttctgtcggtccacacccggcaagtggcgggaaaggtgtggaatgagtcagccgtggaggggagccctgggcctggaagacccctgtctttggcttgagaatgactttgaagggctcagggggtagggagctggggggagaccgggaggagagcggcaggtctggctctaccccgaggcttcaggctgcggaccatgcgtggccccagctctgtctgggcagcaggtgtcagcgactttgggttgctgtgggaatttgctccgtttatcagaagaaaacgcaccctggcaacacaggcccctctcaggtcaccaggcacatctggtcacatctgagtctcagataaacaaccaatgatgtcctggtgaaagcttgtcccgtgggacactcgggacacacttatattaaaacacgattaacgatctcaaactcagatgttactgggtatcctgcgtttttgttggcagctctgccactctgcccgtctgcctgagtcctctcctgccatcctcctgaccagaggcgtgggcttgagttgagactacgcagt

SEQ ID NO: 237878 - DNA, 539 bp, Homo sapiens
tccaaataagatcacagtctgaggtacggtggttgggcttcaacatataaatttgaagaatcttaattcagaccacaacggggtctcacatgtctcaggtgaatggactgaatctcagcctgcagttcaatgggatcacatccatgtgaatctgaattgcagctgtgggttgacctcagccagttggctttggctctcctctgcccagttatttccaggagtctggaagaatctcaggagagctcagggaacctggaacaaacacctactgctggcccccactgctgccactcctgctccctcctgatggcagggtccctgtctcccccagtcacagacacgcggatgagcccccatctgcctggctgacccactgcctcctgagcccaagtctctttggctgaggccccagtacacaccaacaccattttcaaaatgactccttcacaatttctctttaaggccagacaccaaagtcccccagacctgtctctggaacaaatactcttatcttttgtacttgaactaacctttaaaaa

SEQ ID NO: 237879 - DNA, 432 bp, Homo sapiens
tcttaagggactagcttactaagaggatcctgaaaagtatcctaaggaagaagagcttgtgagagaataagtaatggtaagcaccatgatagaagtatttagtcaccttcttgaaagtacagaggcaaactggaggcagcagccagattgtaatgaataaaagggatgttgaagattatcttgtgagcatcttgtcagagaaagatagttggtagcaagaactgaatgtggagttggaagaggactaccatttttcatttttaaaaaatcctccagcctgggcaacctggcgagacattgtgtctacaaaaaatacaaaaattaggcaggcatggtggtgtgcacctgtagtcccagctactcaggaggctgagatgggaggatctgagcctgggaggtgggttgcagtgagctgagattacaccactgcac

SEQ ID NO: 237880 - DNA, 327 bp, Homo sapiens
tggctggggcactagctgggcctctgataatttcactagccttagtaacaacttcagtaatgacatgggtgccgcttcttctgtgggaaacaaaagaaagaaatgacctgctaggaatggagtgttgattcctgaatctgtagatcagtaccattccatagaactttctgctctgatgggaatgctccttatttgctctgtccaatatgggagcccctggccacaggtagctaatgagtgcttgaaatgtggttagtgcaatttaggagctaaattttacaactgatttagtttgaattcattaaagttaaaatttaaatagccata

SEQ ID NO: 237881 - DNA, 426 bp, Homo sapiens
gagcagcagtttgtcctctctcatctaaaccatgtctgtcagagttggattaaattggaacatggataagtctatgagcgggatctttgaggatcacaagtgactatacactagaattacctgcaagctctaaagagtttctgctcttggctgggcatggtggctcatgcctgtaatcccagcactttgagaggccgaggcgggcggatcacctgaggtcaggagttcgagaccagcctggccaacatggtgacaccccatctctactaaaaatacaaaaaagctgggtgtggtggtgcgcatctgtaaccccagctactcgggaggctgaggcaggagaatcactggaactggggaggtagaggttgcagtgagctgagattgtgccatactccagcctgggcgacagagcaagactccgtctca

SEQ ID NO: 237882 - DNA, 469 bp, Homo sapiens
agggtgttgattgtgtatagatatgaaaggctgaaatcaacctgtgtctctaaccaaaggggagtgttgaatgaattatactagatctatatacaatggaacaatagtgaaatattactgaactgcaggactgtacatgatatattgttacatgagaaaagcaagttgaagaataatgtatataatgtgatactattctttgttcaataagtataagaagaaaatgattaaaaatgtggatgtatgtatgtatatagcacaatattatatatgttaaaatatatatacataatgagggaagatgcacccaattgttaataatggttatctctggtggtacagtattgaagaggaaagagtccggattgttaaccctgtattcacttctgtattgctagatctttaaaattaatatgttatcattttatggttttaaaattctagtaaaaattttttatataaaaataca

SEQ ID NO: 237883 - DNA, 389 bp, Homo sapiens
aaggaaaattgccaggaatagagtggcattacataatggtagaggggtcagttctctaagaagatagaaaaatcgccaggcccagtggctcacacctataatcccagcactttgggaggccgaggtgggtggatcacctgaggtcaggagttcaagaccagcctgaccaacatggtgaaaccccgtctctactaaaaacacaaaaattagccaaatgtggtggcacaggcctgtaatcccagctatttgggaggctgaggcatgagaatcacttggacccaggaggcagaagttgcagtgagcccagatcacgccaccacactccagcttgggtgacacagtgagactcagtctcggaaaaaaaaaaagatacgaaaatcttcaattag

SEQ ID NO: 237884 - DNA, 2007 bp, Homo sapiens
  misc_feature (95)..(95): n is a, c, g, or t
  misc_feature (255)..(255): n is a, c, g, or t
  misc_feature (533)..(533): n is a, c, g, or t
  misc_feature (877)..(877): n is a, c, g, or t
  misc_feature (897)..(897): n is a, c, g, or t
  misc_feature (907)..(907): n is a, c, g, or t
  misc_feature (933)..(933): n is a, c, g, or t
  misc_feature (982)..(982): n is a, c, g, or t
  misc_feature (988)..(988): n is a, c, g, or t
  misc_feature (1003)..(1003): n is a, c, g, or t
  misc_feature (1091)..(1091): n is a, c, g, or t
  misc_feature (1250)..(1250): n is a, c, g, or t
  misc_feature (1625)..(1625): n is a, c, g, or t
ttttttttctatgtatgtgaagtggtaatagtttttctcgtgtatcaggcaactaccaacttattttagaccagaaattcttggaaatggtaccnatccagttggcataaaatgtgcaagcactattctattgattcctcaaaaagatgcaattgctttactcatagagttatcagttatttttctggctatttcacttgaagtagccatgctttgtctttttttctatggagatacgtggccaaaactaagtcntttcaccagctggatgataggaaatttgataaaatttgagcagtataaaaactttcccattgactttatatgattgaatttccactatgtaaaattaaactaattatttcttatgctacccaatatatagtttattatttgaaaactatgtccccatttttcctcaagaacatgattttgtcttttgcatctcagtgcaggggttggacagcataatttcttctcctagaaacacattttctgctgcttgtagctactatttctattttttcatcaanagctacaggagtaagtggagttcctgacatctctgtgtaatcagtggtatgatcacataccccatattgactttttcttttgaagtttatgctgctgtctcttcagtaccttgagcttgacctctagctttaagcagtaaaggtatcaaagaaaatcagttgccagagtcagtctgtttgcttgtgtcctcctaacccactgatggcacctctgactccttgacattgtattatttgtttctcagagaagtaaagcaattttttttttcctctgtcacccaggctggaatgcagtggcgggatctcggctcactgcaaccacctcccgggtttgagtgattctnatgcctcagtttcccgagtngttgggattntaggtgcctgccaccatgcctgactnatttgtgtatttttagtagagacgaggtttcaccatgtgggtcaggctngtctcnaactcctgacctcangtgatctgcccagtttgccctcccaaagtgctggtatcacaggcgtgaaccaccacacccggccaaagcagttttttttacatatagncatttaatatattgactttggttgattcttacctcacttccaagataattgtttctgttaaattacatgtatttttaggcttgagtcatccactatatttatgagttggtcatttctttcatgagttgagcttgtttttaaaagttctacttttaaagnccccttctgtctctcctgcagccactttcactgtaacatttatcatgttattcctggcagccagtcttcttaactctccatcattacttttggcaggttacagcagtatcacttagggttctcttagttcatttttaatgaacatccaaaagatgctcctattgcaataaaaccataagaaaagattaatagaataagggtttattctattaataggcaatttggggctgctacagtggctccatgataccaatggttctgggctctttcttttccgctatccttagtatatggccttcttcctcctgcttgcaaaatggtggcatacagaagcctttcctacatattccagaatatgaagaaagacaagggggnaaagggacgtgccaactggttaaacaacaatcaccatatcaaagacccacccactagatttcttcttcttactggccagaactttgtagcgtgcccaccctctatacacaacaggctgcaaaggaggctggaatatcacgttttagttgggcagtgactatccagtgcaaaatccagattccgttagtaaaggatgttgatggagtggatggatattaaacagagattcaactttcctgttcagaaacgtgttataactccatatattgctttaattctatctatcctagatagacttacaaggctagaataagacctttagaggcactaaccaaccaccaaaaagaggctaatcacctcccatatgtaaatcaaattgtac

SEQ ID NO: 237885 - DNA, 416 bp, Homo sapiens
gaatcattattcagaaacaaagagagctaactgttatcctgactttattctttatgaagaaaaatacagtgattccaagttaccaagttagtgctgctttatttataaatgaagtaacattttacaagttgtgcataagttaaaattcagaaataaaacttcatcctaaaactctgtgtgttgctttaaataatcagagcatctgcctacttaattttttttgtgtgggtgcacaatagatgtttaatgagatcctgtcatctgtctgcttttttattgtaaaacaggaggggttttaatcctggaggaacaactgatgtacctctgaaaaagagagggattagttattaattgaattgagggttgtcttgtcttagtagcttttattctctaggtactatttgattatgattgtg

SEQ ID NO: 237886 - DNA, 425 bp, Homo sapiens
taacattaggagaaatacctaatgtaggtgacgggttgatgggtgcagcaaaccaccatggcatgtgtaaacctatgtaacctgcacattctgcacatgtaccccagaacttaaagtataataataaaaaaaagacattacattttatactactactaataagcaagttttggatttgggttaacatagttttatgtttggaaagcagacaattggaaccattctcatgctggtttagtgtgtcttgcaaccctgtgacatagcactttcttccggttaacagccactttctgtttaaacacagcttcattccctaatgggttttggtctttagggattaaacccatgaggaccattaacctgaggaatgtaactcaattagctgtaaatgatttggaataaaggaatagattttctatttggag

SEQ ID NO: 237887 - DNA, 346 bp, Homo sapiens
ctgaaatgaacattatgtaaccactaaaaatcatgattttggagcctgtgatatgtggggaaaaactgacaagtaaaaaagtgggttattaactgcacctgcttactctaacgtgaacgcatatgtgaaaaatctgaaaggaaaagcacagaaaatggacgttttcattgaaattgtcggtgatcttaattttcctttggtgaatatattgctctcactaagggcgtttaaaaaatagttcacaggttttaattttttagatgaaatggacccacagttttctgtaagagaaaggagagattgttatatttgctacttagaataaaagatttttagccaacgttgt

SEQ ID NO: 237888 - DNA, 484 bp, Homo sapiens
aagggaacaactgagttgctctgggaaacctccctgtggacctcagaattccagatttttggcgctttgaaataaaattttattcttgcttagcgttctttccccgaacaagccggtgagcttccagcatctgtattttctgaatccggcagataagaaatgcttgagccaggaccgattgattagcagcggtttagagatcttatctgtcaaccgcatccgtagaaggagatcgttattgccataattggaataccggtgacggtgtgacaagaggttttacttctggttaagctgaatgtaaagtgtgggatgggatcgttgggtttgatgtataaggtacggtccaccctttgtgaagatcgcctttgccagtttttcctctaggaaatatacagttagtgttttcaagtaccttctttcgtaatttttctactacagagtacaaaaaaattaaagacatctttttctgacgttaaagtaa

SEQ ID NO: 237889 - DNA, 634 bp, Homo sapiens
aagcagtaatagatgactcaaattataagacatgaggagaaaggggctaagaagtgagccctggggaaaactaacaatcaagggccaggcaaagcaagactgagcttctaaggagacagaagtggccagagaagtagagaagaaacaggagaacatggcatcagaaagccaagagaggaaagcatttcaggaaaggaaagtggttcactgtgtcaaaagctgcaaagagatccaataaagtaagttttaaagcattacagttttcaaaaaaataaagtcactgatgtccttgggaacactggattcagatacaatgagctgaagtgaagctgtgttggctgctgatggctttcatttagttctacttcccagtgaaggctaaatgtgccatggtgggcccaggagcccactggttctttaatataaattctcctttccaccatgaaaaatagttcttgcaataaaaaaaaaatcccagactctaaagcaattctgttagtacttcccttaagacattaattatctcctgttaaagttaggtacttgtttcatcatacagcttcagagaatagagaccatgtggcatactaaaacacccaacatagtacgctactgaaaacattaggcaagagag

SEQ ID NO: 237890 - DNA, 597 bp, Homo sapiens
gccacgcagtgggctttcaaaaagcatataccctgctgatggaagagtgcttaaagagaccatttatcctcatttactgtgctctacttctgtgcaggaaaataaggaacagagccgtccctttgttatgggctacatgaatgaaaggaaagagcctttttacaaggtacttttctctggagaagtctcaggaagaattactttgtggcacatccctgatgttcctgtatccaagtttgatggttctcctagagagataccagtaactgccacctggactcttcaagataattttgataagcatgatactatgtcacaaagtattattgactatttctctgggcttaaagatggggcaggaactgctgtagtcacttcatcagagtatattccaagtcttgataaactaatatgtggctgtgaagatgggacaattatcattacccaggctttgaatgctgccaaagcaagacttctggaagattctccccctcataaagttcttaaaggccaccaccaaagtgtcacttcattactctatccacatggtctctctttgtgggatatctttactgaagaaattttgcataaattctt

SEQ ID NO: 237891 - DNA, 453 bp, Homo sapiens
atttcgtgcttaaagctgttgcccgaggtgtgcgctttagaatacgttccacagaatgttattagatatttcttttaaaaagtttttttggtcatataaatttaggacacactaagttaagtactacccaagggtttctttcttgcaatagttctcagagccttggatataccagtattccagaaggaaggtaacattaggcgttgctcaaaattatttggccaactaaaccatctttgtttttctccagagatctcaacaaactactcttctactacattgtttgcaaagtacagtctcaaggaatatcatttattctactcaacagatatttattgagtacttactgcgtgtcaggcactaggttagatccagagatacaaatgtgtataagacagacaagttctgtgccctcatagatttacattatcttcatgaaagtccaacaacagt

SEQ ID NO: 237892 - DNA, 794 bp, Homo sapiens
tgtcaatcatatttattttccttttgtctatattggaacctcctcataaataataatttaaaacattttttgattccatggttcccctagtgcagagtagtcgaaagttctcttataatcactgcagatccatacaatgattccttccctaaacttttggctccttcacccttcacatttccatgtgattgaaaaagcaaaggccagggatggggcactgtggccacacctgtaaccccagcactttgggaggccaaggcaggaggatgacttgagcccaggagttcaagaccagcctacaaaacatagtaacaacttgtctctacaattttttttttagactgattcttgctctgttgtcaggctagagtgcagtggggtgcaatctcggatcactgcaccctgtgcctctgaggttcaagcgattctcctgcctcagcctcctgagtagctgtgactataggcgcgtgccaccacacccggctacttttttgtattttaggagagacagggtttcatcatgttggccaggaaggtctcgaactcctgacctcgtgatcgcctgcctcagcctcccaaagtgccaggattacaggcatgagccactgtgcccagccaaaataattttttttaatttttaatcagctgggtgtggtggtgtgcacctgtggcccagttacttgggaggctgaggtgggaggatcgcttgagcccaataggtagaagctacaatgagccatgattgcatcaccgcactccagcctgggcaacagagtgagaccctgtcccctcaa

SEQ ID NO: 237893 - DNA, 926 bp, Homo sapiens
  misc_feature (343)..(343): n is a, c, g, or t
caaaaagctcaacgtcttctggtgaggttactaaacagactcaaatttcagcacgaaccagagtggttggactaagaactcattttcaccagaggaaaacccattgtagaaactggtattgttgaattttgcttagggaccttgttgccggtggtgattttagaagtgtaaaacggggaagaatatggtgaatacaagttattggcattattaaaaaaaattccattcaatttcccaccatatttccccaaaattattggcaattgataagatttaaagttccattaaaaaaagagagagagagacaggatctcattatgttacccaggctgagtcctgggcnaaagtaatcctcccaccttagcctctgagtagctggaactacaggcatgcatcaccatgcatggcttctgaagttctttttaacatatcaactgcatcttgaaacaaataccgtttaccaggaaaatcacttcaaagatataatacttgcaggtcaaaaatattgtatgggaactgctttgagatcacaatcaaaaaagaacagaaagtttataccaagacaacccacacaatataaatcagtaaggatgactactgaacaaattactgactgtccaacctcattaaaaataagacaacagggccgggcacggtgcctcacgcctgtaatcccagcactttgggaggtcgaggcgggtggatcacctaaagttaggagttcaagaccagcctgaccaacatggagaaaccctgtctctactaaaaatacaaaaattagctgggtgtggtggcacatgcctgtaacccagctactcgggaggctgaggcaggagaatcgcttgaacccgggaggtggaggttgcggtgagccaagatcacgccattgcactccagcctgggcaacaagagcaaaactctatctc

SEQ ID NO: 237894 - DNA, 236 bp, Homo sapiens
ggcaatggtgctttttctttaagagatagggtcttgttacattgcccaggctggagtgcagtggctactcacaggtgtgatcataccttatttaattcctggactcaagcaatcctccaacctcggccttttaaatagctggaactacaggcatgtgccattgcatctggcttggtaatggtgctttaacatagtgtccttatgtttaggactcagtttccctcctgcgtgccacc

SEQ ID NO: 237895 - DNA, 404 bp, Homo sapiens
ttccatccctttaatcctggagccgtgagtcctggctatgggagaaacagtgccatatatgggatgctgattcagagcatacacagtcttctggagaactttaccccaggtctgcaaagtattgttacctagttggcattgtaattgtgacttcaaaaggccgttccatcattttatcaattcagctgcttcaggatgacagataacatgcagactacctggtcatgtggccacgttctcatggtgatgtcagagggaagagtgccagcagaagtactctgcttagatcacatcttctatcatccccttgtccaaaatgctattcttggttcctgatctggtgttgccatcaacatgctaattgttcctgtacacttgcaaactcattaaacctgagaaagcca

SEQ ID NO: 237896 - DNA, 526 bp, Homo sapiens
ttgagattggttctattggttttgcttgtagaattaaaatgaagtctatgttatggctaaaatattccattaagttagaaaaaaaaatgatgatctcactgtctggagataaaacaaatagatatttacctatttaacatatatttaccaactgcctccttataagctctaggaagtttggatatcaggctggtaggggaaggtaaacatggacataaagaagtacaatacagtatggatagtggctgagtatagtggttcatgcctgtaatcccagcactgtgggaggtctaggtgggcagatcgcttgagcctaggagttcaagagcaaactgggtaacatggtgaaaccctgtctctacaaataatgcaaaaactagctgggcatggtggtgcacacctgcagtcccaactactttggaggctgaggtgggaggatcacttgagccctggaggtggaggctgcagtgaggcgtgattgtgtcactggactccagcctgggtgacagagcaaaaccctgtctca

SEQ ID NO: 237897 - DNA, 1617 bp, Homo sapiens
  misc_feature (1444)..(1444): n is a, c, g, or t
  misc_feature (1597)..(1597): n is a, c, g, or t
cctgggtggcattttttatctgtccatcctcagtattcaagatggaattactgaagtcaagtctgcaactgaggatacccacctgagtgaagagtaccttgacaactaagtggtcagctgtttcatggctgagatcaactgcagttatagaaaggacacccgttgagaacaagcaggctgcccaagccccttctgcctctactgaatgtgctcttcattctggtatcgaggccaatttgagattgagtccctccatgaaggggttcacatctatacctctgtgcacatgagcagctggaagaatcaaaagccaccccagtccctggcaccctacacctgtggagaaagccataagcaatgtcacccagacatatcaccagtccttcacgggtggctctatttatatccccaagatttaaaatctcttatagggccgggcatggtggctcacacctgtaatcccagcactttgggaggccaaggtgggaggatcgcttgaggccaggagttcaagaccagcctggccaacatggtgaaacctgtctctactaaaaatacaaaaattagccgggcctggtggtgcatgcctgtgatcccaggtacttgaggggctgaggcactagaatcacttgaacttgggaggcaaaggttccgatgagctgagattgcaccactgcactccagcctgggtgacagagtgagacttatctccaaaaaaataattaataaataagataaagtctcctacaggaagaactagaactgaatttatttacaggcagtatgatcttgtatgtagaagacctggaagaatctacaaagaagctaccagaataagtgagtttatcaaggtctcaagatcaatgtataaaaacggttatctttcgttatactgcaaatacacaattggaaaatgaaattttaaaacttctgtttatagtagcacccaaaacttgaattactcaggtttgaattgagtgattcaactattccagaataatattaattaatcaattggagtaatctgagcaagtaattgttctttatttcattccccagtctcactgtgggacatcttttttggtgttaagtcttctgcatgagttatgaagcatacctaaaaggtctcaaactacctttctcagagttttttctcagcatcccgaaggcagttcagactcgttggattatgtcaaggttatttagaaggggttgagagttcaccctgccttaggctcagcatagtgctggcattatacataatacaaaagaaaagtaagaattggtcctgcccttcagccagctttacagtcttctaagaaaacagatggaacaggccgggtgcggtggctcatgcctgtaatcccagcattttgggaggccaaggagggcggatcacaaggtcaggagatccagaccatcctggctaacatggtgagacccngtctctactaaaaatacaaaaaaattagctgggcgtggtggcgggcgtctgtagtcccagctactcgggaggctgaggcaggagaatggcgtgaacccgggagggagagcttgcagtgagcggagattgtgccactgcagtccagcctgggtnacagagcaagactccgcctc

SEQ ID NO: 237898 - DNA, 237 bp, Homo sapiens
cgggtgagggtggggtaagaggcacttactgtgaggccgagctcccgcacgaattagcctcacaacaggacctaggtctcctagggagacgaaactaggccagcgaaatcgcggccagggagcccctggcccccactcgggagacaacccgcccggcgcgaagggtgcgtctcctgagctccacgccgggagctggaaggcaggcagacgcgcgaggcttgggaagggtgggatctt

SEQ ID NO: 237899 - DNA, 494 bp, Homo sapiens
cagtactgtgatgaactgagggacagaggacacccacagctcccagaaaggggcagcctcctggcggcagtgcccctccatggctgacctggacactaggggacaggcatgtctccaaggcccctcggagaccttgaggctgagttggctgccataggaaactaacacctcccggggaggaccgcacccagcctagagtacctccgtggtgctaaatgagaaaagagagccaagcccagacttctggtttcctgagggctgacctatctcttgagggacagacaggactgctgggcccacgggccccatcatctggtgcaatgagaccaagagtcaccccactggagacagatggaggaggtctttggctcctttgaggctggcatgtactcttgcatgttttgtgtgtacacttgcgtgtgcccatctagctgtataaatctaagagtgttcacagcacattgacaaatgggttggtccgcatgtgtacagcc

SEQ ID NO: 237900 - DNA, 349 bp, Homo sapiens
ggtccctttctcctggtgccaatggtagagttggggagaaagttcccgatagagagcataggaggaaatgcgccacgtgtgcttgccttagagacatatgtgagttgagctctctctctcctctctctctctctctctgtgtgtgtgtgtgtgtgtgtgtgtaggtggcgagtggagagggttaaggctgcttctttgctggggggaaaagaaaggcaaaagtgtgaggatacacagagcagggaacgagtggagtcccctctccaccggggcagtgtgagaacggagggcgtgcagtcagggggtcctaggacttgggtgggtgctgcagaagtgaccaggagggctg

SEQ ID NO: 237901 - DNA, 643 bp, Homo sapiens
  misc_feature (643)..(643): n is a, c, g, or t
agtgatacctgccacacctgctggatgagagctggctccgattttggtattttaaactttaagaggcttttggagattatctctactttcactcctattcccagattataattaagatttattttttattttttatctatttattttttaaagatgtccctcttgtgtgttcattttgaagttttagaccaagatgaggttgtgtgtgggctcagcttggaaactgatctgaaattattctaatttatataatgtaatgtaaacagtttcagccttaccatacgtcagggctatcgtttcatgtgcacctttgactaggggctggggcgtacttttccagtttctgactattttaaatgctcttctgagcagaacgttgagattactgtcttccctctcactctgacagagggacatcaaatgtctgcatctgatcttttaacagcttgtgcaacaagagtgaaactcttgtctcagaaaaaaaaaaaaatgtatgcaactagctgggggctgagacgcgtacctgtagtcccagctacttaggaggctgaggtgggaggatcactgatgctcatgagttcgtgaccagactaggcaaaatagcatgacaccatctcaaataacacaaattcactggccggcn

SEQ ID NO: 237902 - DNA, 180 bp, Homo sapiens
aattgattttctacactgccatgcccatctttgagtggtgcctttgctttagcctttctttgcatgcccacaaaccattcagcatgcatgcccctgttctgagcccataaaagcccccacccagccacactgggagagaaaccaccagacttcaggggtggggaaccactacctcctccg

SEQ ID NO: 237903 - DNA, 2475 bp, Homo sapiens
tgttccatgctctctaggtgtgcctctttcaatatttcctgtccttttcgccactgctcataaatggtttctaatcattcttataattgtaccttcttggagccttgagagacaggcacaggttctcttacataggctattattgatattggttgcttttattttccctccaacccccactccagataacaactgttgagtgcgtaccatgtggcaaacaatgggaatgaagagattaatgagccctcaaagaattcatgatttacgtagcacatacttctagctaactgttctagctacaccagccagttctagagaggtacccatggaggttttggatatgtgcttaactccttgaagattcttctggaatgatgcctaaagtaattgtcaagagaagctatgctaatcttcctcttcagaatattcccatttctttcttagttataggtatgaggagtctaaaatatgctttaacatagtaagcttattgttataactggaaccatgcaaaatcttaatttcctataatataatttcttgctcctccaaagtcattcaaatattaaattggacttattctatatgttgcttagtggaaaggtatcacaaataaaaagtgggccacaatgagtaggtcaattaaataaatgcaaaaaatatattgatttattaattacaatataatactgtgctaaatgcttagcttgcattatctcatttaattcttaccaaaactctttgaggtgattattgtatacactcccatttacagatgaaaaactgaggtttaaggaaaagatgtgtatgcccaaatttcttaatgactaaatggcagcagaccaggactgtcttgactccaaagaacatgttctaatactgtacagcttcagactccttcatgagagctgtgatgctcaataatatatgtcaggatatgaatacttagactcatgccagaccatgtcataagccttagacctttttcatttgtgtttatagatagtgaccttttagtgcagtgacaatttcttaccacacagcaatctgcatgcaaggaattgctaatatctgctttgctcagaaggaagcttgtatgtagcattaattatggcaccattaatccattcagttatttattgaaactattatttgttgagtttctgctacatgcttggaagtttcatgtgttatctcctttaaactcactgtaaaaggcatgaggataccaattttctatatctgcagtaattttcccagggttacgtagctcctaactggatgtagtgtcttggattcagacccagctgtttgtctccgaagtctataccaaactaccctggtagtttagagcttatgtttaccagaaatttatgtcccaccagcacgtaatttttaaaccaactctgttgaggtataatttaaataaatgaaatgcacatgttttaagtgtgatacatttggtaagatttgattatgtatatacccttgtagctaccacccccactcaaattatacatttccatcactcagtaaattgctttgtgcccttttgcagtctctcttactccttgccccaggctaccattgatctgatttccatcactgtagactagtttttccaattctagaagttcatataaaaggaatagtacagtatatactcttttttgcctgattttttcacttaatgtaaagttttgtgagattcatacatgttgttgcctattcaatagttcattcttttttattaccaaataatattccattatatcacacatcacatttgtttttccatttgtctcctgatgtgtatatggttgtttctagtatggggtgatgttgaataaagctgctatgagcgttcgtatcccagttttattggctcatccactgttgtccaaaagaatttcttgaactctgcatttgtcctgaaggattctctgattgttcttcatacaagaactctaggaatataacatggaatccagctaatttctgaaactcatgtatttaattatacatttacactaacggccgtgtgcactgagaaaaatcctcctgattaatggcattgcttttagagtcagtgatcttttatttctcatgcaagtcatagtcaccactgtcagtcaggcttctcagttccaagcaactgaaaccaatcctggctcccttaaaaagtagatgaatctggccaggcatagtggctcacgcctgtaatcccagcattttgggaggtcaagccgggcagatcacgaggtcaagagattgagaccagcctgaccaacatggtgaaactctgtctttactaaaaatacaaaaattagttgggtgtggtagtgcgcgcttgtagtcccggctacttgggagactgaggcaggagaatcgcttgaacccgggaagcgtaggttgcagtgagccaagatcgcaccactgcacttcagcctgggtgacagagtgagactccatctc

SEQ ID NO: 237904 - DNA, 118 bp, Homo sapiens
tctactttttttttttctcacaccaactggggaccactttccccagtaaagcctgccagaactttgacactagacatttaccctgaactccttgcttcctccaccccttcgctttagc

SEQ ID NO: 237905 - DNA, 533 bp, Homo sapiens
gattacaggcatgagccactgtacctggccaattatctcttagagtctttcacataactgcaacatgatggtggttggaaaaagagtcatccaaagctcaactagaacgcacgtccgaggtggcttcttcattcatgttgtcttgtgtcttagtagatggaatagctacaaactagccaggaaacaatctctgtcactctccacgcagcctctctacaggactcacttgggcttcctcacactatgatgccttcatgacacttggacctctgacacagggggctgcattcccccagaacacccatttcaagagcaagtattccaagaggttggaaacagaagctgtcagtccttctaaagtctggaactaccacaaggttacttttgctgcattctattgggtaagcagacactgggccacacagattcaaagggaggggaaataaactctatggggagaatgataaagatttttgcagccattttaaattcattacaatgactatgaaacatttcctaggtatattaagtgg

SEQ ID NO: 237906 - DNA, 382 bp, Homo sapiens
tattgtgttctaggagtttggcacaaacaggagaggaatgaggtggaattttttgaggacaatcaaatcatgttgttgttggttaagccctctctctggtgctagcaggaggtaaggtggaccagatggccctgatgatgctggttctctatggccacatacctttggtggctctgtggtcatcttgatgctgacctgcaagattgagatagggaagtctgggtgggggatggagctgagccagaggcggaaggatggatgaggatcctccacctgcagctgctccaccagcttgtccagattaggcatccaagacagtgacaggtggcagtttgccaggaacacccagtgtccctgagtcacacccttctgtcgtcttctc

SEQ ID NO: 237907 - DNA, 526 bp, Homo sapiens
tgaaattgcagaaagcactctcatgatgtttttaaaaaaaaaggtgtattggtctgggcatggtggctcacacctgtaatcctagcactttgggaggccaaggcaagaccagcatgggcaacacagtgagacctcatctctgtttaagaaaaaaaagtgtattcataatttggtgtttagattagtttaattttaatgtagaaatcaggccaggaaaatctaaactccacttgacttcagcctccaaagaagtccacatgaacatagcaacataaacaacttaaaagggggaaaaaaacaatgctaagtggatatataatggttttgcttttctccccagggcaaagattatagtggaatgagaaaaagaacagaaattaatatagtttagatcttgctaacttactgctccagtaaaactgtcatctttcaataatcagaagcataaaatcttctagggttaccaattttttcctcatctgtttctgttccatgatgacactttaacacttaagagagaaagaag

SEQ ID NO: 237908 - DNA, 490 bp, Homo sapiens
tagggaccctcggtgaggagcagagctgagcctggtgcgtcgccctgagcaccctgcctgcctcagcctcaggagcctttgactcatcggccagcacctgcgtgacctgcactgtgtggtcaccaccctcggggactgaggccccacgaggtgatgcccccagcttagccttgtctcatgggtgctcacacctttcacaccagcagggggtctcctggctggtccccaggacctccctcaacaggttctcgacacagacatcgaggagcacctggcagtgggtatggtagcctccagctctcccacctgctccacttctgtgtattttggaaggctggagactcctaaaggtttcattcactgctcgcttcttcatgcatccaacaaggtctcccggcttccagctcaagatggcggattgaacatgggcatttgcttcacctttgccttgaactcactaaaacagcagtgaagccattttttaaaggca

SEQ ID NO: 237909 - DNA, 453 bp, Homo sapiens
caggtgttgacccaaagtattttctctcatgcctggccactctgccctggaccctcaacccagccgaatatgacacatctccagaaacccagcaggcgcaagccgcagggttggccttaaaatcctgcttaaacaggagaccctggaggcctgcttcagtgccaccagcctaaccgccagggctcatcaaagacgctgcccagatgcattgaacgtaagcaagatcagcaaaggtttatctcaacttcagactcactcccagaaactcactcttgggagctctctgtggaattgggccccccttcttctggtattatgttttcaaaactgacagggatatgaaagaaaaacttatccaggaaagaaaattgggttgaacatttaacatctcatttaagtcttgcaataatggctatatgtatttttgctaaataaatcttctattaatctttt

SEQ ID NO: 237910 - DNA, 484 bp, Homo sapiens
tttattgagatataaatcccatactataaaattcaccctttaaaagtgtataattcagtggtttttagtatatttgtgcaaccatcacccatatctgattccagaacatcatcatcctcaaaccctggaagaagcattatttttacaacttaattttacatctatgtagattggcattctctccctaaaattaacctcaatcctgattttatagtaagtacttcttacagttttatcacccagatgtacatttccggacaccattatccctgtggccccctcttcctctacacttttgagtctgtctttataagtgccccttcctcttcctaacagtttatttgttggagaacctgtaggattttccactttgggaatttcatgattctgtattcatgctataatttaagaaaagtatttttcaatatagaaaagtaatcaggattctactttaaatacccaaaataaaacttgtttctgttaa

SEQ ID NO: 237911 - DNA, 701 bp, Homo sapiens
  misc_feature (295)..(295): n is a, c, g, or t
  misc_feature (431)..(431): n is a, c, g, or t
  misc_feature (496)..(496): n is a, c, g, or t
  misc_feature (633)..(633): n is a, c, g, or t
  misc_feature (690)..(690): n is a, c, g, or t
gtgataaacagccattccagccagggattttaagaagctggcggaccaaatccatttctcaacccacttcaacctaaaccactcaaagtgttcatgcagatgggagggagggattattgagcgctgagcaaaggaagctagcatgtactcatcattttccaaggagcccagtggcagagctttcttttacttgcatgtcatggggagcaggaagtgggacccaaagggaacagcatgggcaggagtggtggtgagaactgtggatgcaggtgcagtcccaccaggtacacacagnctgccccgtctccaggtgtctcaggctgccggcactaggaaggagaagctttgttctcagatggactaagtgcctcttcctgctccctaaagctttatgcctccacatcaggctttccataagatgcctcagctanaagctccatccctggggaccacccttgaggtctgcagtccatttcactgcttcctttccaaaggntacatatttgcttctgtgctcaggttagttagaagcctgatgaatcgggatggttccttaagaaactaagtagttagttttaaatcacagagaaatgaaaccaaactgacacgaatttcagtttcacaacctggganaactgtcgccttgctcgatgtattcccaagggttcacctggccctgggattcaggcntgccaagtggg

SEQ ID NO: 237912 - DNA, 422 bp, Homo sapiens
tacctctaaagagtgtttcatcttgaagaattctacatgaacatgaaagataacttaggtaaaatccaaacataactacattgacccaataaaatgacattaacttggaatgtttcaacaagagatattaatgcataaacacacttttcagctttctctttaccaagattgtttatagtttgtttgcttgttttttaaattgagaaacaaacaagacacacatttaaaaattagcactagcctcagtcaaagtcttctgtaatttgtgagccttatggatgatagtaaatcaggaagggttgttgatttaatgtcacaacaagggctagttttagtctgcttgactgcataataatcaacaatattcaaacaagcaaatattgagtgtgttatgaaaccctggtggtgagggaaagaataac

SEQ ID NO: 237913 - DNA, 450 bp, Homo sapiens
ctggccggtcggcccgatggcgatcgccaagagcgataagaggccttatctttggccaccaggcccggccgggttggagaacagcgcgggggcgccgcgactggggcgagtgggggcttggaacggcccgggttggggccggggagccggcgtccctgcgctggtctgtctgggggagttttctccccaaacacacttaattgccaagaagttgatcctcccctgtggccggtggtacagtccgtcaaaatgaaagaaaactggctttgccccggccaggagggggaagggggaggacaccccgccccgagtcctcgtagatggtgcgagaccgctagaggtgggtttgtcacctccagagggagagagggtgttttccccttgaatcatgctggtgttgctggtagttcctagcaagaaccaagtgtacactgcttggagttttcttga

SEQ ID NO: 237914 - DNA, 408 bp, Homo sapiens
attttatagtttcgctctatttgaggaacacctacaggtgttcagttcaggcatggaggaaatggggcaggcaagttagagggcaagcaagggaggaatggagcaataggaatactagaactgtcaaatgtgggcccttcaagggaccctaaagactacatgttagcccagtgcatttatttcccagaagatgaaatggctgaagtgtgaagattttagtgctctaatgagaaatacatgctctatttttacttattttaatgctgttctcattaattaaatacattgatacatatatacacacatatatatgctgagtgtagcaaaaaacagcaacagtaaatattattctacagtaagatatttttgtgtctatttttatgtctcttcaaaattgtgatattaact

SEQ ID NO: 237915 - DNA, 501 bp, Homo sapiens
gaggtaactattactgtttagaaatggcacaacagttgtattcagcctgaaaggtcctcgctggctttacataaatgaagatgcttgtgattccagtttatctctgaaactattcaacatggagttatttcagttttgtttatcagcaaagctttgtttactgaaggagctatttaatctatgttacattaaaaaagaaacgcgtgtacattttaaaagcaatgatgtaaactttgttcttgcattagactgaccagtttaaaaatatgaactaaaacctaatggctaaagtaacttgaccatatttgatgcttttctatgctcatttcaacttggctttttgtcttttaaatttttaaaaaatgcagtagtgtgttagagactagaaagttatatgtatggtttccctgttctactatacataacgttaaagtacaccttctttgttaaaaatgtacttgctaaacttcagcgtaaataaaaacattttgactttgtcaa

SEQ ID NO: 237916 - DNA, 849 bp, Homo sapiens
aggaaatcagtatgggggcccaaaagaaatgaatgtaataaaaatggaaatcagggtctaacaatgattcaaatgaaatttttacccctaaccaactaattaagcctacaagtcgagctcagatttctcaacaggtccttgactgtgaactaagaaatcaaatatttgttaatgcagcccttccaaaaatgaaagcaagatttgtaaagcttgcctatatagtgaaaagaaaaggtaagaagttaagagtcaacctgaattatacagggggaaatactcttttttaaaaaatgaagacagagtgactttgagaagagtgaaagagaacccgcatttcaccaagaacagaatgcccagggatccctgctctagcgctccttcacgctccacatcaaccctgctaactataacagaagccttgaaactcaactacagaactgcgatcctctttgtcaactaagacttggggaaagtattttaagatatgcacataaataaaaactgacagtgtgcaaagacaaatcagtgtttctaatggtgtgagtctgtaaacattgttttggaagagaaagatatgaatgttctttttgatcaaaagggtgattttttagaagccttggattggtagggctgtacccaaggagtattccatggactctttttgtcatctgtggaaggagagataactctcatctgacagtggtgattcttcctttctgtcatcatctacctccgcctttcatttccttcctcccatgaattcactgtctcctcatgacttgtaattggcctcagtgcctcccacatcttgtttaatctctttggaattctgtacctaataaaaaagga

SEQ ID NO: 237917 - DNA, 471 bp, Homo sapiens
ttaacttcactggttatttctcagtctcctctgtggacccttcttttctccccaacttcttaattttgcatcactttagagttcaatcattggccttcatttgtatccacacttactccctagtaatcacatctgttcccatggctttaaaatcaatctgcttgccaatgactaatacatttatattactattaaaactcttttccaaactcaagacatatgtatccaatagcctgtttgatatctcttggattccacccaatagccatctcaaactcattatgtctcagatcaaactccttatccaccctctccacccagcctacttcacctgtagtctttctcaattaagttgatggcaactccaccttttcacctattcaaataaaaactcttggaattattcttaagtatcttttcccctcccactttacatccaatccattatgacattctgctcattctggttgg

SEQ ID NO: 237918 - DNA, 676 bp, Homo sapiens
cctcacttccactccagccacactggtgtctctctatcgggcataccaagatcaacccagaccttggcaggattgcctcattttcatcacttaagctttaattcaaatgtcaagccctcagagaggtcttctctgactgtcccaaactgaaaaagacaccccctcccatgcaagcactgtgtccggtcccagctctttatccttagtgcgtgactttcaccctgcctccaggctccatatgtcagtccagaaggaaaaggaaaacagagcttcccagaactgcccagtatactttctcctctgttgcactcgcccaaaatgcctacccctacctacaaggaactaggaactccggctttttagccagccatttgtttctccaaacaaaatcatagaaagagggaagaatagatactaggtaagcaaacagctgttgctgcctgccgcatgtgtagtttcattcaatttcatatttgtttggtgtcgttccagagtttcctcttagttaattcatgagacatgattatggattcttatgaaacagtaatagaaattactcattaaatacctaggtaatatatataaagttgtcatcttactttgaaacaatatgaaatttaacgaggtcatcactatcaaattgctgcagccaaattcactaacctttagccacagc

SEQ ID NO: 237919 - DNA, 935 bp, Homo sapiens
ggcacttccttcatttgggaggcgacgggggcctgtgccccatcatggagctgctagcctccaggagcactgtaaaatgtgtgatccgagaacgggaggccccacattaggaaattgtttaaagctgatgacctgggagactgtgtgggtccaagacaacaagcgctattcaccagtctgagaaggataagctgcctcttattagaagtgcaacctgaatctatcgcccccacccctaccccagagggttaggaggaatgatgtgtaaaatctcggatctatggaaatgaagaccagaccttcatgcagtgttacagatggccaccggccagatgcagacagggttgagtcctaggaatccaaaacttgtgcgtttatcatagcctgggccagtgttttcttcggcatgattgctgttttaaaagaggtttgtcttcagtcattacttcaggaagttttcccctattatttttatcccaactgatttctccctttcgttgcattttggtaacatttcatagacagttttgaatgcattatagattggtttttattttctttcacatgtgtctgtcttggttctcataataaacttgtataataggggggaaaagcatgatttgtcaggcagattaataagattatgaagggactgtttatccagtctaagaaagtaactaccttcattccgtctttacagacgtacaatttccttgaaaatcattgaatttcagatcttcttacctggttgctgaagggactttggccacactactaacctagtttaggtttgtgtgtatccttgtaagttacttagggatgtcaactgaatagtttgtaatagctcaccactccctatctctccaggctaaatagataccttcttttttgaataatgaggtccagacaagatgaataaaaagtacatgatcaaa

SEQ ID NO: 237920 - DNA, 1846 bp, Homo sapiens
  misc_feature (191)..(191): n is a, c, g, or t
  misc_feature (219)..(219): n is a, c, g, or t
  misc_feature (596)..(596): n is a, c, g, or t
  misc_feature (991)..(991): n is a, c, g, or t
  misc_feature (1498)..(1498): n is a, c, g, or t
tgtttgtttgtctgttttttagagacagggtctcactctgtggcccaggctggagcatggtgacacaatcatagctcactgtaacctccaactcctgggctgtagcaatccttggagacatattttaaaaccaccacctacttcctattatttcttgaaatatattaaacagattttccttatgttctgtncatgatgattttatcagtcttctggggntgaattcattgttacttctgcagtttttgtttgatgttgtggtaagttcgtgttcttggaaatttatctttgaggccaggttttaaaatacagtcctctagataggatttgtatttgcttctgccaggctacaagatggttggctttcagaccaacaagataggtatgattctggcccccaaactccctgagaatgggcctagaattaagaattctcagtggagatcactgtcttttacccagacccaaggctaagacaggcaaatttcctatagaactggctccttacttctttacccatcaaaggtgtgacttctgggggatcctgtctttacgctttgttctctagggtgtttttatgtaatcctgctcttcanctcattttcctgtgtttgccccattaaaaccaatgcttaattccagtagggataggcaggctccccagttcaggtactgccttcagcttgcttagctctcagggtctgtgctatcttatcagtttccattattgactcaagatctgccttatgttcttgcctactcatctatttctgttacacacagataaatgcatgtatgtgcatatatacatgcattatttttacatagcatttttatgtgtttttatgccagagttttgttttccatgatttatttttctctatggtatcagacaccaaactacccaggaagctctttagaaatacgaatttgctggcccaacccagagttaggaaattagcaaattagaatcttctgagatgggtaccangtacctatatgattttttaaaacctccccagaggatgctgatgcctgtcactgttaaagataattattataatgaagacatggtccagaagcagtggaagctcagcaagagagctaaatttggccgacacaaccgaggaaggctttatagaggaggaaattgcatttcgcctttttaaaacatttcctctcatcctttgactgctacagttagctggacagtatgtaagccccttagcgccatgccatgcgtttgaagaccccagggggatgtccagaggcagccattgtctcactgtgtgtgtagcaaggtcgtgggacttagccactttgcaggataagattctgtagcacttatcagtgcccatccacttatctgcccattgcctaggctcagagccactatggaccagcttacagagcaggaacttgccagcattgttcttgggtgctattgggggtatgaattgggctgtctgggctggcggtgtaatgtaaatatcagatnaattgcctaggctcagagccactatggaccagcttacagagcaagaacttacctacattgtttttgggtgctattgggggtgtgaattgggctgtctgggctggcggtgtaatgtaaatatcagataaattgcctaggcccagagccactatggaccagcttacagagcaggaacttacctgcattgttcttgggtgctattgggggtatgaattgggctgtctgggctggcagtgcaatgtaaatatcagataaatgtagcagggaggattctatagaggcgataactctcagaaggttggataccattatttcacaacccagagctgtgccaaaccctgcaatgtc

SEQ ID NO: 237921 - DNA, 167 bp, Homo sapiens
caggatcacagctcactgcaactttgaacacttggcctcaagtgatcctcctgctcagcttcccaaagtgccatgattacaggcatgagccaccatgcctggcctgtttgttctattttaagattcattaaagaaagtttagaaaataccagaaaatagaagagtta

SEQ ID NO: 237922 - DNA, 345 bp, Homo sapiens
ccagtaaacaccgatgactcccagatctacagctccaggctgttcccttctccgtgtctcatatcagctttgccaactgtttattggacatcaccgcctgagtatccctgagggacacgattatcctgtttggagtgtattgaacttcttggatacatcgattagtgtctttcctcaagtttgagtaatttgcagtcatttttcctttgaagtgtgctctgttcatttttcacattacttttatttttctgctcctcggactgaataatctcaattgacctattttaagttcactgattcttttgcctgcccaaacctactgttgtacccctctagtgactttta

SEQ ID NO: 237923 - DNA, 481 bp, Homo sapiens
taggggaggacaaagcattgaagaacaattgctcgtctttgcagcatttcacattccatacaagagacaaaaggcccaacccccactaccctctgagaagcagaaaggggaacggaacaggactgtgtctcctgggtgtcggcagccacgagtgctgctgcaggtcagctactgagactccaaacaccctggggcccatggctgctcacctgtctctcatcaagtaatttcccttctgggctgatgtttcctcatctatattgtagaagaaaggccttcagtcttatttaccacgtaagtggaggtgcccagggggtcaaagaattaatgtttataaagtgttctgctccccagggagacagtggtaaagcatagggtgtggttatggctcattcaggacctcatttctgagggtggctggtgagagcttcccatgaccaggtgctgccagcaacttgaactccaagtctaacgaggtaag

SEQ ID NO: 237924 - DNA, 522 bp, Homo sapiens
tgtgcttgaaagaaatcctccaatgccctcttcctgctgcccctcgaacaaggtgatttaaaagccatgctctcaggaggtactgtaaaagttgggtgctttatgtgtgataaatactacttacctctcaggaagaatttgggagttgggatttccttcccagtgtaaggttctgtgctcagggtaaggttagtacacaatgtatctctgtttttcctacttatttttatgtgcacattttctcagtcatccaatggtaggaatctttcaactggattccggttttctcttggaaagattgatgtgtatgtagatatacattcagtgttgtctgtggactagtattatcttaatagcacactgtattatttaggcctggaaatggacaaagtgttgtatttctgctcagtgtctttttgagttgtgttctgtgcttctccactcatctgctaggaattttattcatttatgtcatgggttgaagttcaaagacttaattaattttccattacttttttcctt

SEQ ID NO: 237925 - DNA, 379 bp, Homo sapiens
acataatcaacatatttacaaacactgacttcactgtttataaagaagaaatttcccctcctatttcccattactgaaaagtcaagtcatttttattgatacatgaaaattaatttttttgtaaatgactacgtatagtcatttttctcctttggaaaaggtaaatagcttattaactaatcctgtcttgttcttcacaaaaataatagtccatccgtgttttgactcaaataacctaaatacacattttgtaaaaattttgtaccctatattacttatttttaaaacagtacagtgttagactaaacaggaaaactcaaagttataaaatctcttcagatcctctagtttattaaatctattttcatgttgatgtttt

SEQ ID NO: 237926 - DNA, 671 bp, Homo sapiens
acagggtctcactctgtcacccaggctggtgtgcagtggcatgatcacaactcgctgtgaagccttgacctcccgggctcaagtgatcctccagcctcagcctcctgagtagctgggactacagacacgtgccaccatgccccaccatgcctggctaattttcaactgctttgtagagagaaggtctcactatgttacccaggctggacaagggtactattaaaaagaaatatttgaagaataaaaagagctctttcaaattaaaagcaaaacagcagaagtgaaaaattcaacagaagggttaaatgattaagttaaagaaatctcccagaagaagatatgaaaaataggagagaaaagtaataaaccaggtaagtctaggagatccatcatccaaaaagcaaagttgtataatgagaaaacagaaaaaatagaaggcaggaaattatcaacaaaataagttttccaggacatttgctgatagattaaagtgactaaagtacccagtataatgaatgaaatatatatgtatagaaaggtacatcactgcaaaatttagaacccaggaacaaagagaagatactacaagttttaagaaagaaaaataaaattttaggattcagaacaatttcggacttttcaatagcaacagaggaagcaagatgaggata

SEQ ID NO: 237927 - DNA, 617 bp, Homo sapiens
acagggtctcactctgtcacccaggctggtgtgcagtggcatgatcacaactcgctgtgaagccttgacctcccgggctcaagtgatcctccagcctcagcctcctgacaactgctttgtagagagaaggtctcactatgttacccaggctggacaagggtactattaaaaagaaatatttgaagaataaaaagagctctttcaaattaaaagcaaaacagcagaagtgaaaaattcaacagaagggttaaatgattaagttaaagaaatctcccagaagaagatatgaaaaataggagagaaaagtaataaaccaggtaagtctaggagatccatcatccaaaaagcaaagttgtataatgagaaaacagaaaaaatagaaggcaggaaattatcaacaaaataagttttccaggacatttgctgatagattaaagtgactaaagtacccagtataatgaatgaaatatatatgtatagaaaggtacatcactgcaaaatttagaacccaggaacaaagagaagatactacaagttttaagaaagaaaaataaaattttaggattcagaacaatttcggacttttcaatagcaacagaggaagcaagatgaggata

SEQ ID NO: 237928 - DNA, 375 bp, Homo sapiens
cagacagtgggagaggccaacttcctgccccccagtggctccccacactggcccactggaggcagcaatctctgccccccagaactggccaaggcctcgggatccccgcatgcagtctacttcctgctcctgctgactctcctgatccagagctgaggggctagggtcccagcaccacttcccccttctccaccctctacttcccgcccagtggggctggaatgtggcccagccggctggaacctcaagggccccacccaccgagattgcagcggctctggctaattgggcctcagtgcccgggctattttgaacccaggaatccttgggggtggtgggaggagcggacaataaaggtgtaaacacaggtacctg

SEQ ID NO: 237929 - DNA, 301 bp, Homo sapiens
gtctctgctgctggtctaaggtacaccttctaaggttctagaacagtggctgtccaatccagcaacatcagggaacttgtcggaaaggtacattttcaggctgtaccccagacctactgaatcagaaacttgaggggggacccagccacctgtggctttgcatgccctccagctgattttgatgtgtgctcaggggtgagaaccgcccttccagaattgttctcaatgccagctgcaagttagaatcacctggggactcacttaaacttccagcctgggcgacagagcaagactcatcaaa

SEQ ID NO: 237930 - DNA, 560 bp, Homo sapiens
gttcccttactttctaagtctttttccattttcaagccatgtgtgttatgtgctgattttggaatggtctggaatgctctcttcttaacctcaacctctctgagaccttaccaatccgcagagtccactggagtctcacctccaagataacttccccaacctctctgagaccttacccatccgcagagtccactggagtctcacctccaagataacttccccagccacctaaaccaagccccagcatccccagcatcactctagtgcttagttattattcggggatgaggtgaggggttgctagatccacatgaaaactctacatgctgtgaagtgcagtacagatgtgagagggcaacactgttttccttgcattattatttttgttttacctgttatgtgtttgtcctgtcatccccttcccccacattatgaccctcctagaggtcaaaagctttatgtttcttaacccatccccaagtgcaaaaaataaaaaaaaatcaaagcagtatagagctggaatgaatgagtgagtgaacagaatgatgctctctctgctc

SEQ ID NO: 237931 - DNA, 243 bp, Homo sapiens
ttcctcctttaacaaattcaaataggatacaagccactctgtcccatctcctgcccttgccttctcttctttcattcttttattaactgatttttctcttgagaaatcaccactgggtcaggtgtggtggtggctcatgcctgcaattccagcagtttgagaggctgaggcaggaggatcacttgaggccagaagttcgagaccagcctgggcaacatagggagaccctgtctctataaaaca

SEQ ID NO: 237932 - DNA, 1063 bp, Homo sapiens
cggggagtcactctggttctgagaggcagtttccccataacaactgcttacaggaggtgttgctgccacaggccagcctataggatttatcttggtttattctctgttctccacttccaacctacttaattagaaaaataatatgcctatttattgagaagatctaaagtttatggaaggaacaggattgaaaaaaaaaaaaaaacatccaaagcatatgaagaatctattctcctctgtatttgccacacagaaccctacctgagcaggcacccccaatttgctcaatattttgttgacttcagagaaacaaagaatggttttagaaaaagctaaggaaaaggctgatcttattcacactgactctcccagtaatccagtaagggcagctgctcagattgcagttcccacctctgacctgggatggaatataaacactggagatagatctaaccttgaacactatcaaaactgcattttgatcagcctctgcaagggagtgcccaagcaaaggagcctcaataaggtccaggatggtcaagcagaagcctaatgagggttgctttggaattcttagaacaagtctttgaagctttcagagaataaatggatattgacccagaagccccagaaaatttgatgatagctaacatgatgtttatccaacaaagtgccccagatattcagagaaagttacaaaacgtagctgaggcattggacatgtttttgtctcaattagtgaagattgtttttaatgtatttactgatcacaagtttaaagagtggaaaataaaacacaaggaataatgaaaatggcaagctgacttgttatctgtggctctgaccctagtagtccctggaccacaacaagggccgtcatcagacactccatctatggtagaaccacctgggcccccaaaagccaataaaaacggacatcccattgcaggtcccaaccagtgtgcttactgcaacaggggggacactgagtggaaaatttctcatgccctacaaagcctgatgttaaacagtcagccttctgcccaccaaatgcctgggatag

SEQ ID NO: 237933 - DNA, 671 bp, Homo sapiens
atggaaagagatattcctactgtgatcaaaagagagcaggggtggctctactaacatcaggcaaaatagacattaaatcaaaaagtttacaagaaacaaaaaggacattatatgttaatacaagtttcaatagagcaagaagacataacaattacagatattagttcacctaataacagaccatcaaaatgcatgaagcaaaactgacagaattaaagtgagaaacagacctataataatagctgaagaatcaaatatcctactcctaataatgggtgaaacaaccagacaggagataaggaaagaaatagagaacacaaaaaagctgtatataacagacatatacagtacagtctacccaacaacagcagtatatacattcttcttaaatgcacatgagacattttccaggagagtccatttgttaggccacaaattaagtgtcttaaatgattttaaaagatagatatcaggccaggcatggtggctcatgcctgtaatcctggcactttgagaggcctaggtgggtggatcacctgaggtcaggagttccagatcagcctggaacatggtgaaaacccatctctactaaaatacaatgaggtgggagaatcacttgaacccaggagacagaggttgcagtaagccaagaccgtgccattgcactctag

SEQ ID NO: 237934 - DNA, 318 bp, Homo sapiens
ttcttttcattctatatattgaagcaatgttgactgatgcatatttgtggatatttataatgtaactacatattttattcttttcattataaaatgttaattataaagccattaagaatcctttttaatatatttgccctgaattcagcagtgtctgattttattactcaattgtagctttcagtttatttgtgtttgtctgatgtattttttcaactttaggctttttgcttagttggattctttttgtatcaattatatttaatacggaattttaatctttctatgttcattgcaataaatgatatatttgctcct

SEQ ID NO: 237935 - DNA, 2695 bp, Homo sapiens
gagctcgccctgtggctgctcggtggtgggtgaggtatcagctttctccgctagttcccaccctggtagtccttagcccctggaatgcgtgagggagatgcttagggagttctcgaagtggggcgtagaggcatcgcctggcaaggcctgggagcgaaaaagatctctacttcgtggagccgttggacgctaccggggagccactggtggggaccttttttgggccccctttccttcgtggggtactatggagttcccagaacacagtcagcagctgctgcagagcctccgggagcagcggtcccagggtttcctttgtgactgcaccgtgatggtgggtagtacccagttcttggcccatcgggctgtgctggcctcctgcagcccattcttccagcttttctacaaggagcgggaattggacaagagggatctggtgtgtattcacaatgaaattgtcacagccccagcctttgggctgcttctggactttatgtatgctggccagctgaccctgagaggggatacccctgtggaggatgtgctggcagctgccagctacttgcacatgaatgacatcgtcaaggtgtgtaagcggcggcttcaagcccgggccctggcagaggcagacagtaccaagaaggaggaggaaaccaactcacagcttcctagtttggagtttttgtctagtacttcccgtggcacccaaccttcgttggcatctgctgagacatcaggccactggggcaaaggggaatggaaaggctctgctgctccctcacctactgtccgtcctccagatgagccaccaatgtctagtggggctgacactacacagcctggcatggaggttgacgcaccacatctgcgggcacctcatccaccagtggctgatgtctctcttgccagccctagtagctccactgagaccattcctacaaactacttctcttctggcatctcagcagtttcattggagccactgccatctcttgatgtgggtcctgagagtctgagggtggtggaaccaaaggatcctggaggaccactgcaaggcttctatcccccagcctcagccccaacgtcagccccagcccctgtctcagctccagttccatcccaggctccagccccagctgaagctgagctggtccaggtgaaagttgaagctattgtgatctctgatgaagagactgatgtgtcagatgaacagcctcagggtcctgagagagctttcccatctggaggagcagtgtatggggcacagccctcccagccagaggcttttgaagacccaggggcagcaggactggaggaggtggggccaagtgaccacttcctgccaacagaccctcatctaccctaccatctgctgccaggtgcagggcagtatcatcgaggactggtgacctcacctctgcctgcacccgcatccctgcatgagccactttacctgtcttctgagtacgaagcagctccaggaagctttggggtttttactgaggatgttcccacctgcaagacatgtgggaagaccttctcatgctcttacacactacggcgacatgccacggtgcacacacgtgagcgaccctatgagtgccgctactgcctgcggagctacacgcagtcaggggacctctaccgccacatccgcaaggctcacaatgaggacctggccaaacgcagcaaaccagatccagaagtgggaccccttctaggggtgcagcctctccctggctccccaacagcagacagacagagcagcagtggtggagggccacctaaagattttgtattggccccaaaaactaacatctaagggagcatgagctgatgctaggctgctcttaccatccttagatggcagctcagaaggttggtggcaccttatcacccctgctgggtgacaagaataaaggctctgcccaggctgaaagttcctacccttttttttttttaatcttttatttttttgagacagagtctcactctgtcacccagactggagtgcagtggcgcgatcttggcccaccacgcccgcctaattttttgtattttttagtagagacggggtttcaccgtgttagtcaggatggtctcgatctcctgacctcgtgatccacccgcctcagcctcccgagtagctgggactacaggcgcctatcaccatgcctggctaattttttttgatttttagtagagacagggtttcaccgtgttagccaggatggtctcgatcttctgacagatctgacctcgtgatccgcccatctccacctcccgcagtgctgggattacaggcatgagccaccgcgcccagctgccttttttttttttgagtcttgctctgtcactgaggctggagtgcagtgagccgagatcacgccattgcactccaaccctgggtgacagtgcgagactccatctcaaaaaagaaaaaaagaaaagggggaaaatgacaagtaaatattcttctctctttttgagtctgtgtcatattcagcactgtgaacccttaccagcaagtgactatttttgagttacaggaaggaaaggtgagcagccatgtggctaaagaaagctccttaactaggacatatgggaagcaaaagatggttaacatttttctgctgaatgaattctacattctttcacattctttgtgttgaaataaacttctagcttatctttc

SEQ ID NO: 237936 - DNA, 320 bp, Homo sapiens
ctttaaattaattcactttttcccaaaaagaaataagaaggaaattttgtatcatggcaaatggaaaaccagcttacttgctgtaaatacaagaatgccatttaaaaatatatggtaaaaacaaaataatgtttttgaattctggccaaatactgatgtttgccaacactctgattctgacacctgttgctatttgtctaaaaagagaaaatgtgaaaggaggagaatggcaagtatcaaaagtgtcaaagtcacactatcaccaaatgcggcgctctccctgagcagaagggaaaaaaagtaaaaatccaatgtttctt

SEQ ID NO: 237937 - DNA, 574 bp, Homo sapiens
aggacccctgcaagaaaaagtcaggaatggattcctggaacaaagaatgtccacagggctcttgatgctgctgcctctacccctatattttatatagttctggaagtactcactgcagagacaaatggaaatgagtccactctaggaagaagaataactggaagcttgagctgtgtaaatgtgacttggaaatgtgacttcaggagaaagaaccaggtagaaaaccctgatggtgaaagcaagttttaactgaaatgagaagaaactgaaagttacattaccatggcttttatgagtcaaagaagagacattatgggtatgtgaactaaaataatgacatttggcatggggaaagtgatagatacagtaatttcaattttctgcaagatagagaacacacagagaagtagtgattgatatacagtatgagaatccatcccctatgatgtgtgcaaaggaaattaatatgactggctagaccctggaaacgtttaatactataaatcaccggtgtgaaaaaaaaggtgggtatgaaaattggaataattggataataaatactaaacaatgaaac

SEQ ID NO: 237938 - DNA, 2476 bp, Homo sapiens
  misc_feature (997)..(997): n is a, c, g, or t
  misc_feature (1546)..(1546): n is a, c, g, or t
cgtaacattacaacctcaaacgcaggttaaagaaaataagacccaaccgccagtagcttatcaatactggccgccggctgaacttcagtatctgccacccccagaaagtcagtatggatatccaggaatgcccccagcactacagggcagggcgccatatcctcagccgcccactgtgagacttaatcctacagcatcacgtagtggacaaggtggtacactgcacgcagtcattgatgaagccagaaaacagggagatcttgaggcatggcggttcctggtaattttacaactggtacaggccggggaagagactcaagtaggagcgcctgcccgagctgagactagatgtgaacctttcaccatgaaaatgttaaaagatataaaggaaggagttaaacaatatggatccaactccccttatataagaacattattagattccattgctcatggaaatagacttactccttatgactgggaaagtttggccaaatcttccctttcatcctctcagtatctacagtttaaaacctggtggattgatggagtacaagaacaggtacgaaaaaatcaggctactaagcccactgttaatatagacgcagaccaattgttaggaacaggtccaaattggagcaccattaaccaacaatcagtgatgcagaatgaggctattgaacaagtaagggctatttgcctcagggcctggggaaaaattcaggacccaggaacagctttccctattaattcaattagacaaggctctaaagagccatatcctgactttgtggcaagattacaagatgctgctcaaaagtctattacagatgacaatgcccgaaaagttattgtagaattaatggcctatgaaaatgcaaatccagaatgtcagtcggccataaagccattaaaaggaaaagttccagcaggagttgatgtaattacagaatatgtgaaggcttgtgatgggattggaggagctatgcataaggcnatgctaatggctcaagcaatgagggggctcactctaggaggacaagttagaacatttgggaaaaaatgttataattgtggtcaaatcggtcatctgaaaaggagttgcccagtcttaaataaacagaatataataaatcaagctattacagcaaaaaataaaaagccatctggcctgtgtccaaaatgtggaaaaggaaaacattgggccaatcaatgtcattctaaatttgataaagatgggcaaccattgtcgggaaacaggaagaggggccagcctcaggccccccaacaaactggggcattcccagttcaactgtttgttcctcagggttttcaaggacaacaacccctacagaaaataccaccacttcagggagtcagccaattacaacaatccaacagctgtcccgcgccacagcaggcagcgccacagtagatttatgttccacccaaatggtctctttactccctggagagcccccacaaaagattcctagaggggtatatggcccgctgccagaagggagggtaggccttattttagggngatcaagtctaaatttgaagggagtccaaattcatactggggtaatttattcagattataaagggggaattcagttagtgatcagctccactgttccctggagtgccaatccaggtgatagaattgctcaattactgcttttgccttatgttaaaattggggaaaacaaaacggaaagaacaggagggtttggaagtaccaaccctgcaggaaaagccacttattgggctaatcaggtctcagaggatagacccgtgtgtacagtcactattcagggaaagagtttgaaggattagtggatacccaggctgatgtttctatcattggcataggcaccgcctcagaagtgtatcaaagtgccatgattttacattgtctaggatctgataatcaagaaagtacggttcagcctatgatcacttctattccaatcaatttatggggccgagacttgttacaacaatggcatgcagagattactatcccagcctccctatacagccccaggaatcaaaaaatcatgactaaaatgggatagctccctaaaaagggactaggaaagaatgaagatggcattaaagtcccaactgaggctgaaaaaaatcaaaaaaagaaaaggaatagggcatcctttttagaagcggtcactgtagagcctccaaaacccattccattaatttggggggaaaaaaaaaaactgtatggtaaatcagtagccgcttccaaaacaaaaactggaggctttacacttattagcaaagaaacagttagaaaaaggacatattgagccttcattttcgccttggaattctcctgtttgtaattcagaatcaacccatgggggctctcccatcccggttgccctctccagccatggtcccctttaattataattgatctgaaggattgcttttttaccattcctctggc

SEQ ID NO: 237939 - DNA, 722 bp, Homo sapiens
tcttgctctgtcgcccaggctggagaacagtggcatgatcttggctcactgcaagctctgcctcccgggttcacaccattctctggcctcagcctcctgagtagctgggactacaggcgcctgctgccacgcccggctaatttttttgtatttttagtagagacggggtttcaccatgttagccaggatggtctcgatctcctgacctcatgatccacccgcctcggcttcccaaagtgttgggattacaggcgtgagccaccgcgcccggcaggaccatacctcttgagcaggcttctctgcaggtgcttggtagctggctcgatgggtcagatcataagcctttcatgtcacagaagtggccctgatccatgatcccacaagcacacagactcagagcctacagagaagatgactctggagatctggttccctttactgtccatctatgattcatcatacaaaggtaagcacattccacatttccttttttgaaataagactgctgattttaaaaaaatggtaattacatctgctatactgcaaactgcagaagttcaagcttaaggaaagaccttttacatccttccctcttccttataccttaaaattaaagtctaacatcaaacagggggattcattatttaatttgtaagataagaaacatatctgcatgtgtaagttttttaaaaagaagggagaggaaacaaacaactgtttcc

SEQ ID NO: 237940 - DNA, 667 bp, Homo sapiens
tcttgctctgtcgcccaggctggagaacagtggcatgatcttggctcactgcaagctctgcctcccgggttcacaccattctctggcctcagcctcctgagtagctgggactacaggcgcctgctgccacgcccggctaatttttttgtatttttagtagagacggggtttcaccatgttagccaggatggtctcgatctcctgacctcatgatccacccgcctcggcttcccaaagtgttgggattacaggcgtgagccaccgcgcccggcaggaccatacctcttgagcaggcttctctgcaggtgcttggtagctggctcgatgggtcagatcataagcctttcatgtcacagaagtggccctgatccatgatcccacaagcacacagactcagagcctacagagaagatgactctggagatctggttcctttttgaaataagactgctgattttaaaaaaatggtaattacatctgctatactgcaaactgcagaagttcaagcttaaggaaagaccttttacatccttccctcttccttataccttaaaattaaagtctaacatcaaacagggggattcattatttaatttgtaagataagaaacatatctgcatgtgtaagttttttaaaaagaagggagaggaaacaaacaactgtttcc

SEQ ID NO: 237941 - DNA, 732 bp, Homo sapiens
gtttgagtggaaaagattgcacgtgacctttgattttaaggatggattgactttggataaaatatctaggtgtagagtatccactggaaaatcttaagtgtaagggaacgtagtcagattagtgtgggaaataatgttagagtgaggaagttagaagactcttgggaattagagtttgaaggtctgggttgtagtccagcctttgccattagctggttgtatgatttggggtaagttatttaacctgtctagaccttgttctctaacactataaaatgactggtatgttatcagcattctttagaaacatcctggtaagacagagtagtaagagaaagctttcatcaggaaggaggtcatctgcatcttgaaaggtagacagcctctagataggagaagaggaaaagggaaagccattagaacaggaatgccgaattaaagaaggcataactggaggtaaagacctatactatcacagggaggagtgcatgttggaaagtaatgagaagttaaggttatcaattctgtgctccagaagtaggctctatatagttatgtttgctgtttagagatgatgcagttggaaaatggccctcttatttaaataaaggttggtgagacacctgctggagtataactagattcaccttgccttgggctcccgaagtgctgggattacaggcgtgagccaccatgcccggccgattagatgtttcaagaagcaggaactgg

SEQ ID NO: 237942 - DNA, 447 bp, Homo sapiens
caggagagctgccaggtaggacggcgggcaaagcgcttcttcaagttcctgcgctggagtcaccacccgagaggcatcgccgtctggcgttggtgtctgagcagaagccgcaggaaccagcgggagcagcaggaggagctgcgggactcgtttgccgagtcacgtaatgatcgggtatcagaaaaagacgtcagcatcctagtccctcaaggaacaaattaactattctgtgctgtcctcttggatgataagatccggagtcatcgacttctcataaacacctttcactcatacaatccaatttttaagaagtccaattgttttgatggttttcaatttcacccatttcccaaggacagcctcaccaatcggagctctggtctctggaattaagcatcatcaagctctcctattaataaatttaatttagatctcctaaaaaaaaaa

SEQ ID NO: 237943 - DNA, 421 bp, Homo sapiens
atccgaacatggtttttggagagccctctttgtcaacatctgcctgcctgttgcctttaagtacagaatattttgttgcactgttgcgctccgatttttattcatgaaatgacttcctttttttttttctcagtcacgtaatgatcgggtatcagaaaaagacgtcagcatcctagtccctcaaggaacaaattaactattctgtgctgtcctcttggatgataagatccggagtcatcgacttctcataaacacctttcactcatacaatccaatttttaagaagtccaattgttttgatggttttcaatttcacccatttcccaaggacagcctcaccaatcggagctctggtctctggaattaagcatcatcaagctctcctattaataaatttaatttagatctcctaaaaaaaaaa

SEQ ID NO: 237944 - DNA, 385 bp, Homo sapiens
cgcacttgagcctgggcgatagggctagactgtgtctcaaaaaaaaaaaaaagaccacatggtgtttatgtgattatagtttaagccaacttcaatttaatgctttttgggcaccagacattatattgagaatttaattttcacaacagtgttctgagatcattgtcacaatgtcctcgcttttcagataaggaactaaattagaaggattatgctgggctcaatggctcactacaaaaaatttaaaaataaactgatcatggtggcatgcacctgtggtcccagctacatgaaaggattgtttgagtctggaaggtcaaggctgcatgagctgtgatcacaccactgcactccagtctgactgaatgagaccctgtctcaaaaa

SEQ ID NO: 237945 - DNA, 814 bp, Homo sapiens
agtaaagaacaggtttttgtaatgcaaacactgtgtgggccaaaattagcaatgatgggtcaactaatagcataagttaatttttttaaaagactacattcaatgtagtgattgccaaactgtatccataaacatgagaatccccagtaggaggttgctgggagaaaataaattatggctccagaagtcaagtgactcaacgtcagcttcatcgcctgtgaaacttaccccaagcccaacaacgaccatgtgattcctgagcctgaaaaaactctaaatggttcctcagtcaccaaggttttgaacactgttggcctccagattagctttgggattgaaaaagtctggttaaagttctcgctctgctgctacagggctgtgggaactctgaacaatttagggatttagcttacacctaaaatattctgagcaaaacttgtgggtgttcactgacatggccacaataaaatctatggaacaagaaatatttttgtgattgaactcacctactagaaatgttaatcttaatggtccacctgctgagactctaggtaaggctcagagtccccagcttttgagactagtacacatagttcttagtgcaagaattacattaccacagtcaaaagttgctctctacagagaacaattctggtaaatggacacttcacaaagtaatattagttccagtcatttccaggttcagaggaaagtagctctgagaagatgatgcccttcccccaccttcccttatgtataattcaaaattaaaacatatatgtgacactacaaaatatgtgtacaaaagtcctcc

SEQ ID NO: 237946 - DNA, 428 bp, Homo sapiens
agctttccctaataagaaggcagagctcctcttcacccagacttcagacctatagaggcagcctggggtcccgggatgcccttgcactcagagatgtccccagagtcctagggaaatggaggataactaggaggaagctgttcatggctggcgatgaggtctataccttcttgtccgtctcagtgctgtctgctattgaatttttgtgcagatcacattaacttaaagccagttctcaagaagctccccctgccgccggcatatccaccagttgctcccctttcctgccattaatcagggtctgctagttagagaacaaattcctatttgtccaaacagttgccaacacccccaccccaaggtagttaaatgaggatgaatgggtcattcttattaaaaaatgacttaaatttctcaaattctattta

SEQ ID NO: 237947 - DNA, 393 bp, Homo sapiens
agaagttttccctgctctgtggcgccctctgtacctttccttcatggcgtttatcatagacagcactcaattcttgttcattatctttctctcagtaaactaaaagcttcataagggtaaggaccatttttatttatttaccactgccgagtttccaacagtgccaaatttggtgccttaatgtgtgttgaataaatgaattactgttaagataagaattgatactgctgctcccagccgaatatattaagctattcagatgcttcagtgttaaacagacatgtgctcatgctccattgttccttgttctgtgaggtcgtgtacatttcagggcatagatttcaactgttatggatgataatgggtagatttacccatttttcattgagcagg

SEQ ID NO: 237948 - DNA, 407 bp, Homo sapiens
aaaaaatttatatatatttttacagtatttacataactaatatttatggataaaataacatgcgccagggcctagggatccagaaaggaagaagacacagccattgcccttggccctgtgcagacctgcaggtggggctctgtctccatttggtccccttcctacctcacgtccacaagtatgcagggagtatgcaaatcagagaagacttcttcgcagaggagtagaagtagtgtagaagaagaaagactgaaaacttgataatgatgcctccgctttaagattttacagcttgtacacaggaatggcaactcccagagagtgagcaggccaggaataatcccaccccacagatcaccagaagtatggtgtcaggaaagaatatcgatgactctgttttgccatta

SEQ ID NO: 237949 - DNA, 467 bp, Homo sapiens
aaaggacaaaattatgtcctttgcagaaacatggatacagctggaggccactatcctaagtgaattattgtaggagcaggaaactgaatagtatatactctcacttataagtaggagctaaacactgggtactcatggacataaagatggcaacaatagacactggagactactagaggggggaataagagaaaagagcaagggtctgaaaaactacctatgggtaccatgctcacaagctgggtcatgggattaatcatactctaaacctcagcgttatgcaatatactcatgtaacaaaactgcacatgtgcccccgaatctaaaataaaagtggaaattatttttaaaaaaagtccagcagaaaaaggtgagttatagatgaaacaattatatgcatctgtatgatgcatatttaaaaatttttctttactattgtgtagttttgcaaattttaaataaaaagt

SEQ ID NO: 237950 - DNA, 156 bp, Homo sapiens
gtcttgggtgctgcagcttgctccaaagttatagcagtcgagtcagagtagacttggttaattttcttatcccatcaccttctgaaagctgttcaaatctacagagtgtgaccatcacctcctctttcccttgtgtctccttctatcctcacctta

SEQ ID NO: 237951 - DNA, 487 bp, Homo sapiens
gggaatgggaaatgactatgactgctcattgatttggggtttcttttggagatgatggaaatgttctggaagtagatagtggtgatggtttcacaaccttgtgaatatactaaaaactaccaaattgaatttgatggtatgtgaattatatctcaataaaatttttatttacataatatgctgtgtaggcaagttggggtagcagaaagaatgtgacagaactttagtattgggtcctgttcagagtccttgctttgggagagtttttaaactatctgagctttagtctccacttctaaaattaaggcagtaatatcagtcttacatacttttatgtatattaaatgaaaagtgtatgtaagctgttttgaactgggtctggtggtgtgcccctatagtctcagctacttgagaggctgggataggagaattacttgagcttaggagtttgagtctagcctgagcaacatattgagacccccatctc

SEQ ID NO: 237952 - DNA, 448 bp, Homo sapiens
cccctcacattgtggcagctggcttccatcagtttgataagtcagggtgcaaaagagagtgagcaagattgaagccagtctttttctaacctcaccttggaaatgacatatcatcacttttgctgtatctcattcactgaagtaagccactctctatagcccacactcctgaacagtagaggcaggagccatcttcttagaagctgccaccataccaaatacttcctgctaatatttgctgcctctctgagccatatagcagagagggctgggaaggcagccctaagaagtgtgtgttttgttctacagctattcggccccacctttcctttggagaaaacactcttcccacaaggaaggggaagcaagaattagtggcagcaaggacaatttaagcccttgaaagaagcaatcatcacattgattaataaatacttaaaatttcttt

SEQ ID NO: 237953 - DNA, 489 bp, Homo sapiens
taatcggtaatgggtggcttgaggggtatacagcataattagaacttaaaactcagagtaatccagggcagatggtggcctgagtatgtattttcgatcccctcattgtcacactgcctaaataactttgaacaaccgtgggagcctttgtacctggtgttagaggggagcacatatgcagctgagactctgggtcttgggcagaagttgtgctgtatagatggggttgggggagtgatcttatctgtattccttgtggtgatggagagaagagtccaggacctagaatctggagagtcttagctctcccatagacctggggcagtgtcttgaaaacttatcagacccagtaatcctcttatataaaaagtgttttgcaacgtaccctttattatactgaagtgaaaatcttgaataatataatctatgcacacacataattaacaaatcaattagcacagtgctctgaatgtgattaatataaggaaa

SEQ ID NO: 237954 - DNA, 375 bp, Homo sapiens
gagaatttcctaatagtcgataaatataaatatttgctcaaactcaccaatgaacagaaaaatccaaattcgaacagcaatgtaataaactagttctcctactccaaaattaacaagtacaatagtttgttttaaactcaaggatttagaagattctaagggaatagactctctcatattattaggattttgagttatggcagtgtagtagtatctattaaaactcaaaatacaattgtcacacgcttgatgaaagcaacaaaaatcccattctaaacatccatcttaaagaacaatcgtacatgagcccaaggagacataaaattggtcgtttgttgagccacagtttggaataacaaaaacatttccagattc

SEQ ID NO: 237955 - DNA, 498 bp, Homo sapiens
gagctatttagacttcatcctgaggtcgctgggagccactggaaaggttctgttaggttttttcctcctaaccactagaccgccagagatgaagttttctaaaagatgtttttaaaggtttttttttcaagtgaagcaggcggagtagggaaggattttttaaattctttaaaaactggttgtgatttgttgtaaaagatcctttaagaaagaagtagcatcatatttgcattttaggacgatatcttagcggatggagaagagattggaaaaatgacagtcactgccttaacgtgaaactccattgttgctagagtcacagctctgttctgcaaggtggctcctattttgagtcaactaactatgactgtaaatgttttcttcaaacttgtggaagctgctctttagcctaattgtattctttttccctggctgaggatccttttgtttgccaaggtttgtttgtttgtttgtttgttttttgagacagagtctcgc

SEQ ID NO: 237956 - DNA, 505 bp, Homo sapiens
tgacagctgggccaggtctgtacagccactgctgggtttccagggctcaggacagctcctggctcacagcaggcctccataaatacttgttcaataatttaaaatctggagggtagggagaaagccccacgtatccagcaatacaggattaatcaagtatagtttgacagtatactggagtccagtacagtcatctaaactgacaaggtagatgtatatttatttaacatagaaaactgatcagaagatattgctgggaggtaaaagcaaatgatcaagtcatatccattgtgtgacccagtttttataaaaagtcatctatgcttatactgtacttataccatgtattggtgaattttaaaagtctgggaggataaactccaagaatgtaaaaagcagttttcctgagcagtagattccagtgcttttaatttctctttgagttttatgtactttccaatttttctacaatgaacaggtattaaatgcataatttttttcatac

SEQ ID NO: 237957 - DNA, 308 bp, Homo sapiens
gatatgattcccatacatttgtttgcagatatggcaagtttccttaacccaggaaacctgaacacttcaaagcacagaggaagcatttcatccagggcttattgtttctctctaattagggtgttcaaattggtgtctggcctgatactccaggacttctctcctatttcagccttcttaaaaataactagaaacagtattatctctaaaagcttaacaatgatccaacaattctttctaacaactgaaaccctctactttttcttagagtgttcaggagaaaaataaaccctttgggacaaaagaaa

SEQ ID NO: 237958 - DNA, 1551 bp, Homo sapiens
  misc_feature (945)..(945): n is a, c, g, or t
aacaaaatatgcacaagatttatgtgagaaaaactataaaactctgctgaaagaaatcaaataactaaataaaatggagatatattccatagtcattcataggaagatccgatattgtcaatatattggttcttgctaacttgatctataatttcaatgcaatcccaatggtataagttggatgtttgtctcctttaaatctcatgctaaaatactattcccagtgttggaggtggggcctgggaggtgattggattgtgggggcggatgtctcaagaatgttttatcactttcccattggtgagaattgaattcttgctcaagatctggttgcttaaaaatctaggccctcccccactggctcacttgctgttactctagtcatgttacatgcctgctcccacttcgccttatgccatgattgtaagcttcctgaagtcctcaccagaagccaagcagatgttggtgccatgcttttatagcctgcagaactgtgagccaattaaacctcttttcttcataaattactcagtctgaggtattcctttacaccaaagcaagaatggccaagtacacccaaccaatatcccagcaagttattttctgcatattgccaaactgattctaaaatttatatggagaggcaagagacaggatagccaacacaatattgaaggaggagaacatagttggaagactgacattacccaacttcaagactaattattaaagctacactaatcaagacagtatggtattggtgaaagaatagacaaatatgtcaatggaacagaatagagcccagaaatagagccaaataaatacagtcaactgacctttgacaaagcgacaaagcaatacaatgaagcaaagatattgttttcaacaaattgcgctgaagaactggccaaacacttgaaaaaacatctaggcaaagatcttacntgtttcacaaaaattaactcaaaatggattataggcccaaatgtaaaatgcaaaatcatagaactcctagaagacaacaagagaaaatctgtgtgacattgggtattgggtattagttatggtgaagacttttttacatgaaacaccaaaggcacaacccatgaaataaataattgataagctgggattcattaaaattttaaaagttctgttctgtgaaagaccctgttaacagaatgagaagacaagccaaggatgcaagaaaatatctgcaaaagacatagttgataaactgttgttatccaaaatatacaaagaactcgtaaggctgggtgcggtggctcacgcctataatcccagcacttcaggaggctgaggcgggcagatcacaggtcaggagagcaagaccatcctggccaacacagttaaaccccacctctactaaaaatacaaaaaattaggtaggcatggtggcgggcgcttgtagtcccagctactctggaggctgaggcaggagaatggcatgaaccctggaggcggaggttgcagtgagccaagattgcgccactgcactccagcctgggcgacagagcaagactctgtctc

SEQ ID NO: 237959 - DNA, 302 bp, Homo sapiens
ctttcctattactgcacctaatgcaatgtctccctctcaggaatatcttagtaactcaggtggtgagagaatgaatataatctgagtttgctgcttgaacttgatcctgcatgaagacatttgtttacgagccatctattctcatttttacacttctgcacatatgatgtcttaatatgccagaaagacatggagaaataacatacatcaaaatagcatgttttagaacgttggacagttcttctcaaacctgaaaatacctgcatataaaagtgacctttgatgtgaaattgaaaaatatt

SEQ ID NO: 237960 - DNA, 334 bp, Homo sapiens
caggtttaggagggagaaatacatttgccagcagggtttaccatgggcagggggaaggggatggtgttagtagctgcttgtctagccttgtgatttcgtctggttattctcaataggagacttcttcatcagttgccgtatttcacaaggaaagatgacaccaataagaaagaaaacgtatttgctcttgagtataatactgtgatttatcatctctaagaagtctgtgtgaataaaatgttatttgaggtctttgggctcaccgattgggggaaccagaaaccaccttcaaaagttaaagtacccattggtcttacagacaagcatcaggaac

SEQ ID NO: 237961 - DNA, 240 bp, Homo sapiens
attcacaaacaggctatgctctaggctctgaataatgaaatgccgaagtaccacaaccatattcctagtccaggacttaaggtttttggcaaagcagagtgtgctggaatgtatattcaatgtgttgaattcaaacacctacaatgggtaaatcgtagtcttttaaagcattcaaaaaccatgtgtccagtatccagtaaaacaggagaattttagttctgggaattttgtttgtttttt

SEQ ID NO: 237962 - DNA, 205 bp, Homo sapiens
tgccgaggacggccaggtgagcagcagaggacgatgacaggaattctgagtccgcctcagtgaacaaagcggcgtgtggcacacggtcatgccacgagcctgagagcagattgcaaagcaaagcgtgtagtgcaatccaacttttggaaagaaaaataaatcctttatatatgacggtgtaataaagaattgaaccttgcccaga

SEQ ID NO: 237963 - DNA, 410 bp, Homo sapiens
caccagccacacgtatgtctgctgctgacaaatgtgcgcacgccttggagggcggggccaggcaggacagagccgcccatgacagggggacacctcctggacagcagccagattacctccaactccagaccaccacattcaacaccacagtgaacatctctttctagaattcttggactgattatccatcttgacaaaggaggccttgaatcaaatttaatctggtttagtgcacttatcaaagagacatcggagagatcccttgtgccttctgccatgtgagttatagtgagaagacagccatctactaggaatcagaccgtcatcagacaccaaatctgccagcaccttgatcttagatttcccagactccagaactgttagaaataaatttctgttgtttataagcc

SEQ ID NO: 237964 - DNA, 348 bp, Homo sapiens
caccagccacacgtatgtctgctgctgacaaatgtgcgcacgccttggagggcggggccaggcaggacagagccgcccatgacagggggacacctcctgttctagaattcttggactgattatccatcttgacaaaggaggccttgaatcaaatttaatctggtttagtgcacttatcaaagagacatcggagagatcccttgtgccttctgccatgtgagttatagtgagaagacagccatctactaggaatcagaccgtcatcagacaccaaatctgccagcaccttgatcttagatttcccagactccagaactgttagaaataaatttctgttgtttataagcc

SEQ ID NO: 237965 - DNA, 504 bp, Homo sapiens
gtagggccagatgtcttagaatttggagttttccagattttataaaatattatgactcagacaccaatatggtttggggcaacacctataatcaagtatattaacatttctgtagcaaaatgagtattaaagtaggataaagaaagactacatatgtacataaaaccttgccggggaagtcaggctcagctaccaggtgagttttgttgccaaaatgctaggaaaatctttaacttttcagagatttttggtcatggaattgtagcaacaaaaccttttgtagaagagtaaccaaaatcatgtatgcatttagttccaactagttaatgtcacatctctattcctgtcacccttccctgtgatctagtcccttttgtaagagaaatatggtagttgaattataaaatctaaaattaattttgtggtccaaagaaaagcaaaatagatctttagaatgtaaagccattctttactttgcccaataaaaattttgttattccctga

SEQ ID NO: 237966 - DNA, 471 bp, Homo sapiens
cttgcagtggcctttccttgtcatcagagtaaagaatgcacaggtgttggtgagggcgtgtggctgagcactacatgtcaagtccagagtcagtttctatcccaattctccctgcagcctgaagaacggatccttgtctccaatgtcagcacaaaggaggctttttctgtgctttgacattctagcacttcagggatgagagggagggagaatcctggatgctggatggagtatttctttgaggcccacacaaagctggacacccccaggctctactccatcccattggagtctcttctttttttgatagcgggagggaggaagtacgactaatgttggagcctgaaactatggaaatgctgctaaaatttttatattgacaaacattttcttggtacttcattgtcatttttcattaatcaaccatattaaatttataataaaaaatgcccctcagaagtttgcctctga

SEQ ID NO: 237967 - DNA, 354 bp, Homo sapiens
agtatgtttttcagaccagattttgaataagggttggcagccttaaaaataaaggtttggctgggcgcggcggctcacgcctgtaatcccagcactttttgggaggccaaggtgggtggatcacctgaggtcgggagttcgagaccagcctgaccaacatggaggaaccctgtctctaccaaaaatacaaaattagccaggcgtggtggcacatgcctgtaatcccagctacttgggaggctgaggcagaagaattgcttgaacccagtaggcggaggttgtggtgagccaagattgcaccattgcactccagcctgggcaacaagagcgaaactcttatgtcaaaaaaaaaaa

SEQ ID NO: 237968 - DNA, 368 bp, Homo sapiens
agtgagccaagaccgcaccactgcacttcagctctgggtgatggagtgagactcttgtctcactccaaaaaaaaaaaagaaagatcttggccgggcgtggtggctcacgcctgtaatctcagcactttgggaggccaaggcaggtggatcacaaggtcaggagttcaagaccagactggccaagatggtgaaaccccgtctctactaaaaaatacaaaaatttgctgggcgtggtggcaggagcctataatcccagctacttgggaggctgaggcagagaaccacccaaacccgggagctggaggttgcagtgagctgagattgcaccactggcactccagcctgggctacagagcaagagtccatct

SEQ ID NO: 237969 - DNA, 394 bp, Homo sapiens
cgatctcggctcactgcaagcttggcctcctgggttcacaccattctcctgcctcagccccccaagtagctgggatgacaggcgactgccaccacacctggctaatttttttgtatttttagtagagacagggtttcaccatgttagctaggatggtctcaatctcctgacctcgtgatccacctgcctcagcctcccaaaatgctgggattacaggcgtgagccaccacgcctggcagtttatcatgttttttcacaatgagagcctcccagcgcccctgcttctagtcagccatcttggcctggtcccccagaatttttcatgcagaagtgggaataatggcctctacattctttacatggtagaccagaaactgaaggtctctgattttat

SEQ ID NO: 237970 - DNA, 335 bp, Homo sapiens
ccccattaccattgggactagtactttctaattcccatgcatgtgacatttgatattttgacttctaaatcgatataacacttcactacacatggcatcattagattccttttattttaaataaaaataatgttttatttttgaatataaaaaggtagtttttcccttaacttaccaaaccacatactgttcaaataattttatttccagctccttctcctggaaattgaattaattgaagcactgttctttttaatgtatgataggcttgaaggaatggctacaactttactgcagctggggaaaaaatctgtaaatgaatcattgacagcttc

SEQ ID NO: 237971 - DNA, 1251 bp, Homo sapiens
tttaagtttctgtatggtaaacttaatgatacttccagttcttttgctgaccctacaggcagaggactcagaggcagttccgcttctttcctaataatgctgtcttgcttaagccactgtcacaatatttacaggtagccactcacaaatagttacactttaaaaattcatgtaagtctgagttttggaatttgaaatacacttcccactgggaaaaaaatgtataaataaataaataaatatgtttctaggcaaccctttacaggcttattaaaccttaatctataatgtagctgaaatactatacatttatgatgaaaaaattaggaaaatcatatttcagatgcatattagttccactatatgacatttaagtaggattttatatggaatagtttggctcctttaacaccattgttggtggtgagaagggtaagtagtggtgtcacgaggttctagagagaagacattgagaatggtcctcgagaaagcccatcccatctcctgtgtggcatggaccagccatctgcatgtgagacagtcttaagtcacatacttgtatatcaggagtattgtatgatcttactagttgcaaaatgtgaaaaaattcatttagaataatcttgagtgagggagtgaaaagtatatatattttgaaatttcctaagcagatattgttggaaaaatgcctttttcatgcatttacagataatatattcatatatttagtgaccatttttagttgtgttttccttcttttgtctttaaaaaaaatggttttattaattattggtgctacttagttttaaatgtaaaggacttaattcatttaaaaagaaaaaaaggtaccataaagttaatagtttaaacatttaattctataattgttctagagttttaatgttttagttctttaccaggcacaattatttcaagagattttcattatgttgaagctaactttttaccattagttaacttatattcttatgaggacagtataattcctgacaaagcagtattttggaaagttatagaatgtagaagagtgtgtgctttggattctaggagggagatgtgagttcttattcaagtctagatacatttctcagcttctgtttctttacctacaaaaggaggctgatgaaacccacttgcctcccagggttgctaaaattgcataagattgattgagaatgtatgtcagcccatactactataggaatgggctgtccatggaacaggtaggga

SEQ ID NO: 237972 - DNA, 286 bp, Homo sapiens
agacaggaggagacagcaggagacatggaaaggattatataaagactgtttcttcctggactcatggaccaatggggagaaaagctagttacattctgtaacaagcaaaaaaccggaggaaaaaactccttcagagcagaagtttggacacctccgtccccatgctgagcccctccagctaaaccagtgttcttggagccccgtttttgctttactattagctccatgaaggccaagactgtctttttcactttgatcatagctattcagtcatagcttgttgaaa

SEQ ID NO: 237973 - DNA, 457 bp, Homo sapiens
ctgtgtctacaggagtgccccgaaaacaggcccaaactgcaaagacaaagacagtgttggctgtgtctacaggagtgccccgaaaacaggcccaaactgcaaagacaaagacagtgttggctgtgtttacaggagtgccccgaaaacaggcccaaactgcaaagacaaagacagtgttggctgtgtttacaggagtgccccgaaaacaggcccaaactgcaaagacaaagacagtgtgattatttttcttgtctttttatttttcccctctttcttttcttttctttttttctttcttttcttttcctcctggtgttcaaggagaaaatctctctcaaatttgtcaaaacatcagattaatgcaagctaaagaaatagattccactattgccttataatcctttgtatttctgtgatacaaataaacagtagaagacctagagaaaacaaatagaaa

SEQ ID NO: 237974 - DNA, 516 bp, Homo sapiens
attgtaacaggttcggaggctccaggagagagagttccagtaagagaaattgaagtgcatacctggtatgtttgaacatactggaacatacatagataactgaggaagagtttaggtgtgaataaatgatgtttacatagaaagctaagaaaacaggcaaaaagaacagttactaactccagagagaagaaaggaagaaaaagcaatcattgttacttactggcttagcagttttcataattataaaaatgtaaattctaaattctggaataactaaaattatgatacaagtacgctgggtcatggaggtgaggaaatgaaaaccaaattctcatcttccaaagtgagatgacaatacataatgcccaaaactgaaaagcatgttgtgacagattctgtcatagggaattcatgttatttagagaaatggcaacaaagaagaaataggtgggaggtttgaaagtggttgttgtagaaagtgggatttggggatggatggagccagatgggggactc

SEQ ID NO: 237975 - DNA, 482 bp, Homo sapiens
ggcagggcatcatggtcaccagatggctcccagcacaggagaggtacagagccatccctccagggtcagcctccctgggcaagcaggctgagtctaccttgtccgggaggggaggaggcgcatcctgagggcttagggggcgtgagcggaggggagctcagggtccctcggtggatgatggaggagccacatatgggttacagggacagacagaaagatggagaggaagagacagggaggcagacccaaggtccactgacagggtctgaaggaggaggggctgggggcctggactcctgggtctgacaggtacagagaggaacagacacacgctgaaagagacacaaagagagaggggacaggcatagtgattcacgcctgtaatcccaacactttgggaggccaagcggggaggatcacttgagcccaggagttcgagaccagtctgggcaacaaagtgagatccccgccccatctctaca

SEQ ID NO: 237976 - DNA, 450 bp, Homo sapiens
ttagattagggattccctgaaggttggcactgctcttgcaggatgtcttcagctaatgaaattacatatgataaataacccagaatcatttgctccctggccaatgtcacataagctatataaatctctggagtatatacaggagatgtttcttaatttacattcttcgttacatgttggatgaggtaatctggcaaaattgcatttagagaccacatctgttatcctccggagaatgcatgactgatgtggaaggaatgacccggggatccatataggatgactaattaagaggatgtttgtgcctcttgtctgtatccttgaaattacaaatagagcttgatactggatgagatctctgactcagttgaggctgattggtcaatctgatcctgtgtgttagtgctacattatacttccattaaaaagcagcatgtgtaatgctcctct

SEQ ID NO: 237977 - DNA, 660 bp, Homo sapiens
tttttgactatacagtcatcttagtgtgaagtggtatctcactggagttttgatctgcatttcctgatgaatgatgatattgagtatctttttgtatgcctgttggccatgttaggagttttaatgtattgtatttacatccaaaaatcgtgatttttaaatgtcatgctacaacatgaaaggatacaattgagatttgctttaaaatatgaagcaaaaaaataagtaaatttattattatcattactattactattacttggaaatagagtctcactctgtcgcccaggctggaatgcagtggcacaatttcggctcactgcaacctccacctcctgggctcaagcaattctcctgcctcagcctcctgagtagctgggattacaggtgcataccaccacacccggctaatttttatattttagtagagacggggcttcaccatgttggccaggctggtcttgaactcctgacctcaggtgatccacctgcctcagcctcccaaagtgctgggattacaggcgtgggccaccacacccagccagtaaattttttaaaaggaaaaaaaagaggatagaagaaaggaatgtggcaaaatcttaaccactgaagctggatgatggatataatggggtgtctgtatcattctctctacttttc

SEQ ID NO: 237978 - DNA, 606 bp, Homo sapiens
tttttgactatacagtcatcttagtgtgaagtggtatctcactggagttttgatctgcatttcctgatgaatgatgatattgagtatctttttgtatgcctgttggccatgttaggagttttaatgtattgtatttacatccaaaaatcgtgatttttaaatgtcatgctacaacatgaaaggatacaattgagatttgctttaaaatatgaagcaaaaaaataagtaaatttattattatcattactattactattacttggaaatagagtctcactctgtcgcccaggctggaatgcagtggcacaatttcggctcactgcaacctccacctcctgggctcaagcaattctcctgcctctatattttagtagagacggggcttcaccatgttggccaggctggtcttgaactcctgacctcaggtgatccacctgcctcagcctcccaaagtgctgggattacaggcgtgggccaccacacccagccagtaaattttttaaaaggaaaaaaaagaggatagaagaaaggaatgtggcaaaatcttaaccactgaagctggatgatggatataatggggtgtctgtatcattctctctacttttc

SEQ ID NO: 237979 - DNA, 391 bp, Homo sapiens
ataaaaacagtttgtttctaattgtagctctgatggctattcaaaaaatgccgtgagctgatgtgtttctatggacatgtttaatgaaagagctgagtcttgggccgggcgcggtggctcacgcctgtaatcccagcactttgggaggccgaggcgggtggatcatgaggtcaggagatcgagaccatcctggctaacaaggtgaaaccccgtctctactaaaaatacaaaaaattagccgggcgcggtggtgggcgcctgtagtcccagctactcgggaggctgaggcaggagaatggcgtgaacccgggaagcggagcttgcagtgagccgagattgcgccactgcagtccgcagtccggcctgggcgacagagcgagactccgtctca

SEQ ID NO: 237980 - DNA, 2261 bp, Homo sapiens
  misc_feature (216)..(216): n is a, c, g, or t
  misc_feature (355)..(355): n is a, c, g, or t
  misc_feature (397)..(397): n is a, c, g, or t
  misc_feature (440)..(440): n is a, c, g, or t
  misc_feature (470)..(471): n is a, c, g, or t
  misc_feature (473)..(473): n is a, c, g, or t
  misc_feature (480)..(480): n is a, c, g, or t
  misc_feature (484)..(484): n is a, c, g, or t
  misc_feature (486)..(486): n is a, c, g, or t
  misc_feature (490)..(490): n is a, c, g, or t
  misc_feature (492)..(493): n is a, c, g, or t
  misc_feature (517)..(517): n is a, c, g, or t
  misc_feature (1035)..(1035): n is a, c, g, or t
  misc_feature (1243)..(1243): n is a, c, g, or t
  misc_feature (1394)..(1394): n is a, c, g, or t
  misc_feature (1752)..(1752): n is a, c, g, or t
  misc_feature (1932)..(1932): n is a, c, g, or t
  misc_feature (2195)..(2195): n is a, c, g, or t
  misc_feature (2258)..(2259): n is a, c, g, or t
tacagtgatgctgaggcattttttcatttgtttgttttatttgttgttttaaagagaaaagggagtatacttgttgcttcagggcaaaacaaagaccagtgggaagaaagttatcaaaggttgatttcagctcctcacaaagagctttctaaggacaggctatttgtgaagggactaaatgtgtttaagtagagctgggcggtcacatgagaccantgtcctgaggaagctcacccaaaaaccccgatggccaggatgttgactgatggctcaccctggagagttgacatctggagcctccgctgacaagcagcatggtccgctggcaggtgaataggggccatggttctgcggnctctctccaggggtggctgaggctggcactccacagtgctgntaagcacatgggtcacagctgcaagaatgctggggtatgctgnctaggcaggtgtgcggaggtcacgatgcanntncatcttnaaancnggangnntttctcggagctgtagtctcacanactctagagagatttgagaggagactgtcagagagacacagaggcctgggtgtgtgtggatgaggtgatttctaaccggttgataataaggtagtaagctttatgtttctatcatatttatttcccccctcagatcaggttgtctgagccagaaccacatatcccagagcaggcatgttagtgatctgggatagagagaaggacgttctaaacaatgtctggaaacataaggggctgagatgcatttagccatttgaaaagataatggaaatttctttcaactaattcctttgaggtttaactgtatagtattgcctttttcatcctttcacaaaacagaccctggaaggactcaaattggtaagtgagaagccagttactaccaactactgggcagcttcttggcaggaggtgagagctttctgcttcctttttaggacaattccacccttccttgagtgggaggagttggtgaggtggctgaatgtcatgagggtttggagaggaggtggctgtantcgcacaggcactggcattgaagagaccccgggaagggaagtacctctggctccatggcaggatctggagggaggaagggaagattcatagcatagcaggtctagcgtaccgcacttgaaaagactatggtatttattggttcattgaactcaactaaacccaaaatactgggtacctcatgtgtgcagttcttagtgccaggaatgntgggctgtgtaaggaagaatccagtaactccctcaactaacttagaatatttatttcctaactaaaagaaacataagtaagagtcaacaatattgtttgttttgctttttatgtagtgtcaggcacagaaatatgctcagtaaacacttgntggttaatggccactgcaggtccctgaatttgcgttgagttgaaagaaatgccaccaacctgcccctccactgccaggagttcaagtcaggagagcagccagcctgactatagaagaactacacagtgcctaaagttccaggaaaccttccagttgcaaggagagagagcagtgctattttaataaatagtacatgatagttttgctgtataccaggcctacacagtgctagacactggaggcaaagacagacaaacagacaaaataattaaaatgtggttaagatcatatccaaatgtaaattaggtccaccactgtggaaaacagtgtggcagttcctcaaagacctaaaaacagnactaacatttgacccagcaatcccattgctggatatacacccaaaggaatataaattgttctattataaagacacatgcacatgtgtattcgttgctattcaaaatagcaaagacatggaatcaacctaaaggatcatcaatggtagacgagataaagaaaatgtggtacatatgcaccntggaatactatgcaaccatacaaaagaatgcgatcatgtcctttgcagaaacatggacagagctggaggacattatccttagcaaactaacacaggaagagaaaaccgaatattgaatgttctcacgtacaagtgggagctaaatgttgcaaacacatggacacatactggggcctatcggagggtggagggtgggaagagggagaagatcaggaaaaataactaatgggtactaggcttaatacctgggtgacaatataatntgaataccaaacccccatgacacaagtttccctatatgacaaacttgcatatgtacccctganntt

SEQ ID NO: 237981 - DNA, 291 bp, Homo sapiens
tagtagagacggggtttcaccgtgttagccaggatggtctcgatctcctgacctcgtaatctgcccgcctcagcctcccaaagtgctgggattacaggcgtgagccactgcgcctggccaattttcaggctttttattggtagatactttataatgtttctttagttggtttgcaaaaatggtcatagcttcatggttgtggcgtctgattttcctcatgtcaagtgtagcatcttccttgagttctaaccttctgttcacattattatgggaaagttattgaagagttga

SEQ ID NO: 237982 - DNA, 678 bp, Homo sapiens
tggtttcgaacacctgagctcaagcagcccacccacttggttcccaaagtgctgggattacaggtgtgcaattaatgacaaattctttcagtgtttatctaggaatgtcttaatttcctcttcatttttgaaggagagttttgctggatgtagaattcttggctaacagtctttttctttcaacactttgaacatgtcatcccatttgtcttcttacgtccatggttttctgatgacaagttagccattaatcttattgaggatctcatcatgtatgtgaaaagtcgtttttcttttgctgctataaatgttatctctttaagttttgtcaatttgattatgatgtatctaggtgtggatcttcttgactttattctacctgttgtttattgagttacaattagaattcattatgtaaactaatatttttcataatattttatttatttttggtcatcattcaaatatttttcctgccctttttctctcatcttctgggactctcatttatgtgtatgttgctatacttgatggtgtcccacaggtctctggagctctgttcaattttcttcatttatatatggattctaggtattaatgccaattaatttgctgatttttttttaattttgcaagtttttatattctgtagtgacctttacattttctgttattata

SEQ ID NO: 237983 - DNA, 425 bp, Homo sapiens
gctaagtgtttgctaggggcagcttctggccctgactgcttgtggggtccaaggaaaagcactggcagctcttctgctcagtggctttgtcccctgaagatccacttcaccaattctttaatgcgtgatctctgacttaatggcaaagaaaagtaaaagaacacggcttagtggcaggctgtgatgatcccagaagaggcattaacattcggcttcaggaatgaagcctcattcccggcccaccgtgcggtctcagagtctgagaaccacgagatcaacagcggcgccccctcccggcgcacagtcccgcggacggccgcgcgggggcagcacgcggcccggcccccgagcgcccgcggttgactttgcaaaaaattgggggattttccacactcgcttccctcgtcgttcgtccggcggccgct

SEQ ID NO: 237984 - DNA, 446 bp, Homo sapiens
ggctctggagccagcctgcctggagagttgctggctcctgcctcatggggcagttgtggggattgattataagtgcagttagccctctgtatctgcaggttcctcatttgtggattcagctgacaacagaacgaaaatatttgaaaaaaaaattaacaatacaatagaatacaaataagatgcaatatagcagctgtttacacaatatttacattgtattagttatgaataatctagagatgatctaaagtatacaggaagatgtatgttggttataggcaaatactatataccatgctatataagggacttgagcataaggagtttggtttctgagggaggtcctggaacaaattccccgtagatactgggattagatactgaaggacgactgtgcctgggacatagtaagtgctcagtgaatgctataattatattttaataaa

SEQ ID NO: 237985 - DNA, 860 bp, Homo sapiens
gacagataaattttgaaatgcaaatgatcaccttctgttatttaagtatagtttctgccaacttagtgatcctagattttaaaaagtcataattatttcaacaatgtatactcccaaggatgcccaagattcacaagtttctataacaaaactgagaacttttaaaaaagttgccacttttttatattaaagaaaacaaatccaacaacaaaaagacaaaaaccatggagctttctctggctacatctgtgaaaaagccagcgcataaatggctgcagctgcagacccatcaagagggtcttgagaatacgaattcactgatcaaacccagccctgttttcaaagtagaagccattccttttaggttcactttgtatccttagattatctaggatgattctctagaaaggttttattttaaataaacatcattcatggtaaatgggttcctttcataccacagaaacacagaatggagttcaggaagagaaaaggcaaaagaaatagtccacaaagtaggaacagattgtatagcatgacaatataaatataacactgtctggtttccacattaggagacttgtagatactttattaggatacttttacacaggttcttctgctttttttgttgtgagggattagagaataaaaactggagtaaattggttatttttctctggaggactttcttctggttactctgattttatatctgtttttacacacatacacacaaaagttttagccaaaagattttatgtgctttatcatttgatttattaacttatgataataaagaataaacctttgtttatagtgttttaagtataaaggaaaaataaaatgtcaaagtactt

SEQ ID NO: 237986 - DNA, 284 bp, Homo sapiens
ccaggaacatgtatctcagtgatccaccattgacttggttaggaaatttggggtagaggagggcttctcgaaaatgaaattgccttcaggtcttgccagttgatgcaaaatgcatcgaggaattataacattggaaggaaagggggctttcctttctccatcatttatcatcagggagtcagtggaaccaacgttctttctttgaaaggtgggtctttaagagtgaaatattgaatctttctttcctttttctttcttttcttaatagtccacgactttttcta

SEQ ID NO: 237987 - DNA, 573 bp, Homo sapiens
actatttcaacaagctttttcatgtaactaatctgcggaaggtagaaaggggaaaactgttgggtgctaaaatgacaactggttcaaggtacaatggcgaatatttttatttctgcaacttttcttagaggttggaaactggactgggcaggaagattcctttttgtaagattagtctccagttttcatcaagcagtttagtggggtattttaggcccagttccctctccacagtccccaaaggtcttctgttaactttaaatccgcaaagagagagatctctgccaagcagcaactgcaagagcatgtgggtcaatgttaccagcagacactcaaagccccttccctttacttcaacaccgctttataaattatcttagagacgttgtcaggttggtattagaggtgagtggtcatgacttcacgatttctcatctttctgaatgcatagtggctgggagtggtggctcatgcctgtaatcccagcagtttgggaggccgaggtgggcagattgtttgaccacaggagttcgagaccagccggggtaacatggcaagaccccaatctctacc

SEQ ID NO: 237988 - DNA, 572 bp, Homo sapiens
atggaggaaagtgaatggattcaagaaatatttgaaaggtagagctgatgggattcggtaaatgatgcaacctggggagcaagggacaaggtaggaaaaaacggagaaatcaaggaaaacatccaagttttctactttgggcattggacagcatggtgctgtgacttcaccaagctctcggcagtacagaaatggaaaatgagcagtctccagtcgtgcggtttgaaactaaggcgctgcgcctccccggataagtatcaaggtaacacagtggtgtagggcggcggctcactcagttggaggaaaccacaccttcaagcaacatcctctcctcggaacgagctttaaagtgaactgttgatggaatccctccagccatctttgagctctttctttgtccggagaagaggctgatccctccagggctgatctacatctccaggataacctctgctccagaggggctgacgggagcccagctttttattctctcgaggttcttcccaagaaaagcccaatcttataaactgttacttcccctaacaaagaaatacagattatccaagaatcta

SEQ ID NO: 237989 - DNA, 283 bp, Homo sapiens
aatcctcctgcctcagcctcccaaatagctgggattataagcacatgccaccaggcccagctttctaatgctttatttaaaatgtatacaatgctatgtatcaattgatggagcaccctaagattttagaggtcagaaatgtaaaacaatgaatgtttaccagactacctaacaatgtaattacttttgtatagccagatttctatattatctataatatattctaaaataatatagtcattaaaatgacgtttatgacatcagatgttggctgagcaatgtt

SEQ ID NO: 237990 - DNA, 808 bp, Homo sapiens
ctaatatgggaatgacagccttgacctacattttggggtgaggaggagaaacaacataacaatcgttgccaagtccgttgcagatgtcaagcaccatctaagagcttcagtataacacagacatgcttcccatcaagctgtcattttcttttctcctcctttcctggtgcctgggtggcttttcagccacatgctgcaaatttgccattcagttcctatgatttctactgccccataaccttaattttaccttcctgtttgaagtgtacccccaccccttccatccctgcttctgggcctgtcagacttagcttaaaccttcccaaaccttccctctgctttcccacccaaccaagatgcacttcctccaccaggtctccaacagcacttgagtctgtagcgtgcagggtagcacttgctgccctactgccttaaataagtcttgcatggtttctggagtattcatcttaccaggaaaactagattgtaagctcttcaagggcagggactagatcttacagatctctagtctcccttaaaagggctcaaaagttccccagcagctttgcaagttgggcctctctctcttcctctgcatttctttcaggtttcatggcctgtctctccgatcatctatttgtttttttgtctgcctttcaggcaggcattataacttcttctgtcagcttctccatctggcctctgttgctattccctgcagtccagctacctgcttgtagcttgctgtccctctgtctggtcttctgtctatcagttgcttaggcatctctcctattacccaaatcaa

SEQ ID NO: 237991 - DNA, 478 bp, Homo sapiens
ttccttccactcattccacaattcccaaagttactatatgatatgacatgcctattagaagggatttttatatgctataaatattcatttcctcccatgggctacctgatgattcttttgaatactactgtaccatgtgttatttctcttttccttagacactgctatcaacacatgatatgcaaactaaaaaaactgagctttttatgaggtgcttttaattacaccatctcacttccaaaaaatcatctttggtacacatggataaagggaataattgaaatttaaagcctttaacacatacaaattacagtttgggctacagtttaagagttgtgttgagtgactttttattcctataagtaaaaataaacatttgtctgcatcttaaacagctctgaatgtctccagggcagcaaattcagtggttgctaataatgtagaaatttaataataatatttgatacctacacttcta

SEQ ID NO: 237992 - DNA, 602 bp, Homo sapiens
atgaattttgtaaactgtttttgagagcatctaaatgtagttttatgagtagcattgttaccattgtcgctgttctatttgctgaatcttgtttaatttggaagctccctaattcacagtgatttgtatagtggggtcatcactctgtaggagctctaaatggagactctgtccatgatttccaaaaggtcatccaccccagagtcacatgagactggaaagcaaatctttttcattaattggcttcaagtactttcagcttcaaatggaggtctctaagggtccttggctggcacatcaagggggcatttcaaagaaagtggcaaaatcttgactaaacttcagagcaaacacgcactcttttctttgctactctctttctaaaaagaaaaacaaattatactggtctgggttgtgtgagcatgtgtgtatcagcttgttctaattctcttttcccaaccccttctttgcttgtcccattttcaagataggataacacccaggtttttatattaccttctgtgttaggactttcttaggattcctaaaaattttggctaagtagcattaggcctgctctatttcacaggtaggcataaaaa

SEQ ID NO: 237993 - DNA, 311 bp, Homo sapiens
taaccattgccctgagtgacaggcagagagagccaagagccttgaagctaaaatggataagtgaatgtgatctccaatcacatactcagccaaagaggattcctcataggttcattctaatgttttctacatcagtggccaatggatgtgtgcgatttgcacggatgcattatcaggcatagtagatacatgatagggacatagtagctatgaggtgatggcaaatttagtggcctaacttatttcattgttatatcaaaatagcaatgaaaagtctaacagtaataaataatctacttaattaatacagt

SEQ ID NO: 237994 - DNA, 313 bp, Homo sapiens
atttggaatgtgtaagccgacattataaacatccacctacaggtttttgtgtgaacttggtcttcatttatcttgactaaacaccgcatgggattgctgggtcgtgtgacaagtgcatgtttaactaactagtaagaaattacaaaccgcctttccaatgtggctgtaaattttgcattcccaccacaaatatatgagtgtcctaattgctccacattcttgccagctcttcatattgttggtgtttttttattttagtcattcttttgtagatggactattctgtgtgcattaaatttcctttgcatcttta

SEQ ID NO: 237995 - DNA, 572 bp, Homo sapiens
gtaaatggaacctccatacatctaattgtgcaggccagaaacctagggtccatccctgattcttccctgtccttcacatccaatcagttctcccatctttaaaatgcatctggaattgatgttttttctacctccactcctagccttttagtcaaagtcaccaccatttcttgcctatattactgtgatagcctcccagctgctcttcctctttttccccctctggagtcttgctctgtctcgcccaggctggaatgcatgagttgagatcgctccactgcactccagcctgggcaacagagcaagattcttgtctcaaaaaaaaaaaaaaaaaactcaaggggggacccaatacccaattcaccctatagtaagtcatattacaattcactgaccatcattttacaacatcataactggcaaaaccctagcattacccaacttaatccccttactacacatccccctttcaccaactaacataatagcgaagaagcccacaccaatcacccttcccaacagttacacagccttaatggcgaatggcaaattataaaccttaatattttatt

SEQ ID NO: 237996 - DNA, 523 bp, Homo sapiens
ctgatttacttggagttgaaaatattttcaagtacctgggctcatgaaggaagcctgttggagcattgtaatacaagggttgcaagcctctgggaaagtctatcttgcattcccatgcagaatatttaacagtagtaggatccacagcaaagaagtatgcctattcctgcaattatcatcaaggtcacaagtaactttttccaccaggatggtcctgacctgaatcagagtgcaaatcattgatctagtggaaatgtagggtcagacgtgatgtgaatttgtttatgcatattatttagggctaatgagatatttcccaagttgtctagaatgtattatataacacttggttttaatgtaggcaaaggtgcccccttgaacagccattagaatatctagtgccagctgggcacggtggctcatacctgtaatcccagcactttgggaggctgaggcgggtggatcacctgaggtcaggagttcgagaccagcctcgccaacatggtgaaatcccatatctgct

SEQ ID NO: 237997 - DNA, 396 bp, Homo sapiens
taatgggagaagaagaagcactcccatctagattgctgtatcagaatggactgttatgattgcaaatggcagaaacctaactcaatgcaactataacaatgagggaaatgtcttggcagctcttgaaatccatggaagaacaaaatgatccaggtgctggagggacagcaacagagctggacctcaggtgctgctggagccagaggctcaattttcactagtcttccttccagcttcatctctgtctctatcagtgtattgatattcttctctctcaatacagcctggttctttccacatagtcccagcgcagcatttatcactctgtattaacttatttatttgttttcttgcttactttcagtctctcagtacaataaaatatgttgaaggcaa

SEQ ID NO: 237998 - DNA, 460 bp, Homo sapiens
agtgggcacaattcttcctgtgcagcgtggttagagtggacagtgatgattcgtgaagcagggtggagcgcctgggggattcgtgttaaacaagcacataaacaaaagccaacacaacccttacttaatcagcaagcaggccttgtctgaagcccctgggcagcacctcatgccatccctaggttccaggccggtggtgtcgccccgtgtctctctcacccgcaagctggtgtttagaagccctgctctgtgttctggctcccattctccctgtgacctttccctttcttcatcctaaaaagcaatgcacgacggggcgtggtggcgggcacctgtagtcccagctgcttgggaggctgaggcaggagaatcacttgaacccaggaggcggaggttgcagtgagctgagattgtgccagtgcagtccagcctgggcaacagaacaagactcccatctggg

SEQ ID NO: 237999 - DNA, 665 bp, Homo sapiens
caaatagaatccacacgactttctctccaaggttggcaggaaaggggggcttgaatgctgcttttctctggtttctccaaatctcagtccttggctgtcctcacctgatttccagcaccatgtctttccatgtcagtttactctcattcagaatttaaattcgtttactctgtaatggagtttaagatagtttttcagaactgatggatgatgaacagttgcagcgtccaggaaccacttcctagtgtcctgggagacaatcctcccagtgaatgaaaatgacaaaaacatccttcccacagaagtcaccctgtgtactggttggttatttccaacctggtttgaaaagtaaagaagttgcactgaggggtaagtagaactgattgaaatctaggtgcctgtgctgtcctgctcttcccttatgacgtttagaacatttggtccatttttgtaatccctgtttatgctctaagtgaggaattgtaattttgatgttaactgtatgccttttttttttttttttggtaaaaaatgtatcttgatatccccagttcagaatcaaaacaaattactgtgcctgttaccgtgtgaaatttgaagattgcaaatatctctcttaatgttattacttgactccattaaaaatagattgtgaatattccatg

SEQ ID NO: 238000 - DNA, 376 bp, Homo sapiens
ttcaatacaatagccactacccatgtgtaattcttttttttaattcagtttttttcctgacaatagtttgttgtttgaccagtgaacatacattttaagtgcatattcctgtgcttagaatttcatgagacagccaagcatggtggctcatgcctctaatccaaacactttcggaggccaaggcaggaggattgcttgaggccaagaattcaagaccagtctgggcaacacagtgagacccatctcaaggaaaaaaaatttggctgggtatggtggcttatgcctgtaatcactgcactttgggaggctgaggtgggcagattgcttgagctcaggagttcgagatctaggcaacatggcaaaaccccatctctac

SEQ ID NO: 238001 - DNA, 684 bp, Homo sapiens
ccgcggtcaggccaggccgggtccaattaggggactcacagcctgccccgctgtgcaccccgaggaggcccggcccctgtgtccaatccggaagtcgcagggaagtggggaggtcaggatggtggcgcccgcggctcgggtcttcctccgggcagtgcgcgcggctctcacttccacggtcccggacctgctctgcctcctggcccgaggctccccgcgtggcctcgcgtctggtcgcctacccctcgcggtccactccgcccagcatggacctggatccggggcgccttggttgcgaattgccaggagggccctgagccaaagaatttagaacgagtctacgtggacacgcaagtttcagcgagcggggatttcctgcgaggccgagcgcgaggaacagccggccccggaggctcgggctcggggtctccccggggacgcggccgactgagaaggccggggcgctcgccgggcgcggcgccgtcctccgtgtcgcggggacggaaggaggcgacgcaggccaggagtcgtgcgcgcgggcggcgagggggcgctgtggcccgtgtctgccggcccgagtcccggcaacggtgggcgcgacccacctcctcccccggcggcttaattcggggaagaagaaaaaacggcatcgaggcatttcaataaaacctaagcgactcctga

SEQ ID NO: 238002 - DNA, 888 bp, Homo sapiens
ccgcggtcaggccaggccgggtccaattaggggactcacagcctgccccgctgtgcaccccgaggaggcccggcccctgtgtccaatccggaagtcgcagggaagtggggaggtcaggatggtggcgcccgcggctcgggtcttcctccgggcagtgcgcgcggctctcacttccacggtcccggacctgctctgcctcctggcccgaggctccccgcgtggcctcgcgtctggtcgcctacccctcgcggtccactccgcccagcatggacctggatccggggcgccttggttgcgaattgccaggagggccctgagatttgtgttgtcaaaacactggggggatgattgttacctgacaaaccgcctctggcaggacctgaagcctcccagtcacgtcgagaacgggcaggagctcaggttggcgccgccggtgcagtgggcattacaggtgcaagggaaccagttgcaaactgcagtgctgtgcttgaggatggctcctcctgagccggcaggctcccgccaaagaatttagaacgagtctacgtggacacgcaagtttcagcgagcggggatttcctgcgaggccgagcgcgaggaacagccggccccggaggctcgggctcggggtctccccggggacgcggccgactgagaaggccggggcgctcgccgggcgcggcgccgtcctccgtgtcgcggggacggaaggaggcgacgcaggccaggagtcgtgcgcgcgggcggcgagggggcgctgtggcccgtgtctgccggcccgagtcccggcaacggtgggcgcgacccacctcctcccccggcggcttaattcggggaagaagaaaaaacggcatcgaggcatttcaataaaacctaagcgactcctga

SEQ ID NO: 238003 - DNA, 2815 bp, Homo sapiens
tagtacattgaaattcaaagtcatgcttgttactgttaatgaaagcagatttaaagcaacaccaccatcactggagtatttttagttatatacgattgagactaccaagcatgttgctcttattcagtgtaatcctaatctcatgggtatccactgttgggggagaaggaacactttgtgattttccaaaaatacaccatggatttctgtatgatgaagaagattataaccctttttcccaagttcctacaggggaagttttctattactcctgtgaatataattttgtgtctccttcaaaatccttttggactcgcataacatgcacagaagaaggatggtcaccaacaccgaagtgtctcagaatgtgttcctttccttttgtgaaaaatggtcattctgaatcttcaggactaatacatctggaaggtgatactgtacaaattatttgcaacacaggatacagccttcaaaacaatgagaaaaacatttcgtgtgtagaacggggctggtccactcctcccatatgcagcttcactaaaggagaatgtcatgttccaattttagaagccaatgtagatgctcagccaaaaaaagaaagctacaaagttggagacgtgttgaaattctcctgcagaaaaaatcttataagagttggatcagactcagttcaatgttaccaatttgggtggtcacctaactttccaacatgcaaaggacaagtacgatcatgtggtccacctcctcaactctccaatggtgaagttaaggagataagaaaagaggaatatggacacaatgaagtagtggaatatgattgcaatcctaattttataataaacgggcctaagaaaatacaatgtgtggatggagaatggacaactttacccacttgtgttgaacaagtgaaaacatgtggatacatacctgaactcgagtacggttatgttcagccgtctgtccctccctatcaacatggagtttcagtcgaggtgaattgcagaaatgaatatgcaatgattggaaataacatgattacctgtattaatggaatatggacagagcttcctatgtgtgttgcaacacaccaacttaagaggtgcaaaatagcaggagttaatataaaaacattactcaagctatctgggaaagaatttaatcataattctagaatacgttacagatgttcagacatcttcagatacaggcactcagtctgtataaacgggaaatggaatcctgaagtagactgcacagaaaaaagggaacaattctgcccaccgccacctcagatacctaatgctcagaatatgacaaccacagtgaattatcaggatggagaaaaagtagctgttctctgtaaagaaaactatctacttccagaagcaaaagaaattgtatgtaaagatggacgatggcaatcattaccacgctgtgttgagtctactgcatattgtgggccccctccatctattaacaatggagataccacctcattcccattatcagtatatcctccagggtcaacagtgacgtaccgttgccagtccttctataaactccagggctctgtaactgtaacatgcagaaataaacagtggtcagaaccaccaagatgcctagatccatgtgtggtatctgaagaaaacatgaacaaaaataacatacagttaaaatggagaaacgatggaaaactctatgcaaaaacaggggatgctgttgaattccagtgtaaattcccacataaagcgatgatatcatcaccaccatttcgagcaatctgtcaggaagggaaatttgaatatcctatatgtgaatgaagcaagcataattttcctgaatatattcttcaaacatccatctacgctaaaagtagccattatgtagccaattctgtagttacttcttttattctttcaggtgttgtttaactcagttttatttagaactctggatttttagagctttagaaatttgtaagctgagagaacaatgtttcacttaataggagggtgtcttagtccatattacattgttataacagagtatcacagactggataacttctaaccaatagtttatttgtttcataaatctaaaagctgagaagtccaagatggtggggctgcctctggtgagggtcttctcgaagcatcataatatgctggaaggcatcacaacatggtggaagggatcacgtggcaaaagagcatgtacatgggagtgagagaaaaagagagagagagacagagtggcgggggccggggaggagcgcaaactcatcctttataaagacaccactcctgagataacaatccaatcccatgataatgacattaatccattcaagaagatagagctctcgtgacttaatcaccttctaaagatctcacctgacaacactgttgcattggcagttaagtttccacgtaaactttcggggacacattcaaaccacaggagaaactcaaattgttcctgggcaaatcacaacatggggaattttattcataaatgtccacagaaacagtaaatgttctcgcttcagaacttaattcatctaatccctcctgtttgtctcaaattataggataactttgaaactttctgaattaacgttatttaaaaggaaatgtagatgttattttagtctctatcttcaggttattatcacttaaaaacctgcgaaagctgtcaacttttgtggttgtagcaagtattaataaatatttataaatcctctaatgtaagtctagctacctatccaatactaaataccccttaaagtattaaatgcactatctgctgtaaacgg

SEQ ID NO: 238004 - DNA, 710 bp, Homo sapiens
  misc_feature (675)..(675): n is a, c, g, or t
  misc_feature (683)..(683): n is a, c, g, or t
  misc_feature (689)..(689): n is a, c, g, or t
tagtacattgaaattcaaagtcatgcttgttactgttaatgaaagcagatttaaagcaacaccaccatcactggagtatttttagttatatacgattgagactaccaagcatgttgctcttattcagtgtaatcctaatctcatgggtatccactgttgggggagaaggaacactttgtgattttccaaaaatacaccatggatttctgtatgatgaagaagattataaccctttttcccaagttcctacaggggaagttttctattactcctgtgaatataattttgtgtctccttcaaaatccttttggactcgcataacatgcacagaagaaggatggtcaccaacaccgaagtgtctcagaatgtgttcctttccttttgtgaaaaatggtcattctgaatcttcaggactaatacatctggaaggtgatactgtacaaattatttgcaacacaggatacagccttcaaaacaatgagaaaaacatttcgtgtgtagaacggggctggtccactcctcccatatgcagcttcactaaaggagaatgtcatgttccaattttagaagccaatgtagatgctcagccaaaaaaagaaagctacaaagttggagacgtgttgaaattctcctgcagaacacctaacttttcaacatgcacaggacaagtacgancatgtggnccaccntctcaaatcttcaatgtgaaa

SEQ ID NO: 238005 - DNA, 131 bp, Homo sapiens
aatcacagcaccaggataaaggagctgcttgggcatggcctggatagaggggaggcagcggacatgtttgcacaacagaaagtgttcaacttgaaggccaaggctcatggtaggtggtctgtgaaaggcac

SEQ ID NO: 238006 - DNA, 1316 bp, Homo sapiens
  misc_feature (703)..(703): n is a, c, g, or t
aacaaatgattgatacccacaataacctggacgaatctccacagaattatggtgagtggacgaagggtaatcccaaaggttacatgtagaattccatttaagtaacattcttgaaatgaataaattataagagtggggaatagattagtagttgccaggggttaaggagggaaggaggagcagcactgaatagaaggggtcataactataaaaaggcaacatgatgaatcccggtgttgacggaaatgttctgtaccttgcttgtataaatgtcaatctcctggtactgtggcatttgcaatatttgcaaattttatttatttattcattcattcatttttctgagacggagtcttcctctgtcgcccagactggagtgcagtggcgcgatcttggctcactgcaacctccgtctcctgggttcgcaccattctcctgcctcagcctcctgagtagctgggactagaggtgcccaccaccatacccagctaattttttatatttttagtagagacggggtttcactgtgttagccaggatggtctcgatctcctgacctcatgatccacccactttgggaggctgaggcaggcagatcgcgaagtcaggagttcaagaccatcctggccaacatgctgaaacccccgtctctactgaaaatacaaaaattagctgggcgtggtggcgcatgcctgtagtcccngctactcgggaggctgaggcaggagaatcgcttgaacctgggaggcggaggtagtggtgagccgagattgcaccattgcactccagcctgggcaacaagggcgaaaccccttctcaaaaaaataaaaaataaataaatataaggttttatgtttttggatgaaacaatatggtaaatagtaggctgggcacggtggcccacgcctgtaaccccagctctttgggaggccgaggcgggcggatcacttgaggtcagcagtttgagaccagcctggccaaaatggtgaaaccctgtctttactaataatacaaactaaagaaaaagtaagaatggccgggcgcggtggctcactcctgtaatcacagcactttgggaggccgaggcgggtggatcacctgaggttgggagttcgagaccagcctgagcaacgtggagaaaccctgtctctactaaaaatacaaaattagccggacgtggtggcgcatgcctgtaatcccagctactcaggaggctgacgcaggagaatcgcttgaacccaggaggcagaggttgtggtgagctgagatcgcaccattgcactccagcctgggcaataagaggaagctccatctcg

SEQ ID NO: 238007 - DNA, 349 bp, Homo sapiens
ccagctacttgggagactgagctgggaggatcacttgaggccaggagttggaggctgcagtgagctttgatcatgccactgcactccagcctgggtgacagagcaagatctcatctcttaaaaaaaaaaaaaaaaagataaaaacaaatattcaaactgtgaaggtgaagttctccagccaattgaagatttaatgttggtggagatttactttagaatgatgatggattggcttcttttgtggtaatagctgaagagtttgggaagctgaggcaggtggatcactggagctcaggagttggacaccagactgggccatgtggcgagatcccatctctacaaaaaatac

SEQ ID NO: 238008 - DNA, 2192 bp, Homo sapiens
ataaaagaggaaaccgaagctcagaaagattaagtgctcgttggggtgagctgagaccttcaccgggtctcctgtcatctctctcccctcgcatctgctctcttttctgaggacagggcctgatcttagtcatctttgaacccccttctggtagtatgcacggtgctttgcagcagtcaaagctcaacgcataatggctgaataaatgattgcctggaattgagcgtccaccgagctctttctaggtcagggagtgggaatggggctaaggaggagaggtcaggtggggatggcgggtggcgtggcagccctttgccgtgtctgtgaactgtcacggtctcctcagccacgcggaaagcagcacactggtggtgtccggttgggtcaagctgcaccaggtaattaagatgccttcctgctcagtgaaggaggaaaaaaaaatcattgatgctgggattgttccaaaatctccattattagattttatctggatgagtttgcatttgaatgaaaaactgtccactttgctaaaagcacagttggaaggtccatcaagtcatctgttttgatcaattacacttattccttagcaaagattggctgtgtttcccacaggcaatgctcttgccgcccatgctggtaacatttttatatgtctctttaacttaagggaagagcctgaagatttcaccctagtgccaagttccaaatgcccttggtggaggctacccaactggccccagctgcttcagagctggctgcaatcctgtctccccccagacccacatctgtcaccctccccggggtgcccagtacactaggcttttcccagggagtgatttttatttctgtgagtcgtcgcctgtctcccttaggacactctagcacatagggcaccttgatgcacgttagaaatcggcgctgcccctgggaattgcaaaagatgctcccctctgggtggaccaatgataacaagagtcaccttcctcaggactacagacgtgagctggggcacgtgtctggcactcacggctttggctagtgatgcctgggctagatttcaggtgccattccagccccctctgcagggcaagctcctgtggcacactgcacagctacatgttcgggttctgcctctgtctccaaagcctcctcggtgaggaagtgagtggggggtggacttgtacttggttacatgcatgcacacataaatgcatagcagcacatgtatatacatggtacacctgccacatacatgcatgcacacatatacacacacacctgcacacgtatacacatggtacactgtcacatgcatgcacacacacgcacagcagcacatgtatatacgtgacacactgccacatacatgcatgcacacacacacacctgcacatgtaaacacatggcatactgtcacatacatacatgcacacattcacaccttcacatgtacatacatgcacacacacctgcatatgtacatgtgcacagtgccacataaatgcatgcacacacatacctgcacacctgcacacgtatgtacatggcacactgtcacatacatgcatgcacacacatgcacacctacacgtatacacatggcacagtgccacatacatgcatgcacacacatacacacctgcacacgtatatacatggcacactgccacatacatgcatacacagacacctgcacatgtacatacatgtgcacactgccacatacatgtgtgcacacacaatctaggagaaagagccctcaagcatacagggaggcattagagtggagcgattaagggaaggcgttttcgcactgtgggaaacagctcattgaaattagtgcagttggcaacagaagcacccgggcggtcttccttggccacccttgtcctttgttgcttcatttttctctacagcattccccaaattaccaccgtggatgctgcaattttgcatgtgggtcttattcactgtctccctccagtcaaacgcaagctccaggcaggcaggggtttttctctctcaagatgagtgcattggacacggcgagtattattctgtttttggactccgtttcggttctatgcggacgcgtatgtgtacactgggagctgatgtagaatgtatttcttgctgtgagatgaacaaaaaggtttgaaaacacggaattaaaccatgtttttgaagct

SEQ ID NO: 238009 - DNA, 1253 bp, Homo sapiens
ggaggggcggctcagccagagatggccctggcccgtcctaactgggctggggtgcccccattccctcattcacggggaggagagggaagtcttagtcttactactttatatggtcgacctccctacctgcctggtctgggaatggcttctcaagagcactcgggctcattcttagcagaggaagctcttctggctagcctggcgcccgtgtgtgtgtgtgtgtgtgtgtgtgtgtgtgtgtgtgtgtgtgtgtgtgtgtgtgtgtgcgcgcgcgcgcgcgtgcgcgctgaggtggagggagggtgatctggattccaaattgcagtttccaacattaaagttatgctgtaatgcttctgattcataaaatgagctcatagtctcacagtatcctgaatgttgcttcgaatgcaaatgcaggtcccttagtaagaattggggatttcagcctactacaccctagccccggcccagcatgcaatttttcagtcccagagtcaagagttctcatgtgcagaaagaagcaattcctccaacagaatgcggccactggctctgcttcctgccacctgcagtgagtcagggaagaatggagccccaggctgcttctgtactgatgcatgcacgcctgcacacacacaggaagggtgccaatctgggctgaccaaaggaagtgcccaggctagcagatccctagggagatggctccacaactctttcaccctgaggtccccttagggtcaggatgaccgacacatgcactccacaaggccagctacagggcagtgccaggaaactgggttcaccagccccagaatcacccacggtggactgacatttttgaaaccagtgatgcaatctgaggaggttccaggagcagggactcactgggcccaacacatgacaagtacacaatttttttgatggagatctttcactaatttgttcaactaacatgcactaagaccaggtgaggtagttcaagactgtaatcccagcactttgggaggccaaagtgggtggatttcttgagcccaagagttcaagaccagcctgggcaacatggcaaaaccccatatctacaaaaatagaaaaattagccaggtgtggtgatgtgtacccgtagtcccagctacttgggaggctgaggtgggaagattgcttgagcccaggaggctgagattgcagcgacctgagatcgcactactgcactccagcctgggcgacagagaaagaccctatctctaacaacc

SEQ ID NO: 238010 - DNA, 522 bp, Homo sapiens
gctgcgtgagcattttaggcgggtccttacatcattcatcacattaaactgtaacatactgtcagaattcactgggcattagagtagctgtctggcttttgtgtagacaaaatactttctcaactccaccgcttgggcaaaggcaaggctgtgctgacccaatttccattccttctaagcaagcatttttctcatttatttgttcaactgtttatacttcatgctaaagccattttttaaatgagctatacatagattcatatgcaaaactatcaacaataaatgatatgtaattactaaactatgtttaatattatactaaattcagctcaagatttgaaatttaattaaagattttttttaaatatgaagctgtggtgacttatttaaaaacgaacatcctggacgggtgcggtggctcatgcctgtaatcccagcactttgggaggccaaggcaggtagatcacttgaggtcaggagttcaagaccagcctgggcagcatggtgaaaccatgtctctac

SEQ ID NO: 238011 - DNA, 575 bp, Homo sapiens
atcacttgaagccaggaggttgagactagcctgggcagcatagcaagaccctgtgtctacaaaacccaacaaacgtgtgtgtttgtgtgtgtgtatgtgtgtaaaacatatatatgaagatatgatatatgaagatacattacgaagataattcaaatatatatatgaagatacataggaagataatttagcttgctgcaacagaaattccaaatttagggctaaagaaattatcaaactgaagcctttttgtaaatttaagtagttttgttgattttagaagtagacttttctggccaggcgcggtggctcatgcctctaatctcagcactttggaaggctgaggcaggcagatcacctaaggtcaggagttcaagaccatcctggccaacatggtgaaaccatgtctctactaaaaatacaaaaattagccaggagtggtggtgcgcacctgtagtcccagctactcaggaggctgaggcaggagaatcgcttgaatccatgaggtggaggttgcagtgagccgagatcgagccactgcaatccagcctggcgacagagcaagactctgtctc

SEQ ID NO: 238012 - DNA, 453 bp, Homo sapiens
agtagccgggactacaggcacatgccaccatgccaggcaatttttgtatttcttttgtagagatggcattctgccatgttatccaggctggtctgaaacttttgagctcaagcgatccaactaccttggcctcccaaagtgctgggtatagtgtgaaccactgtgcccagcctacaattaatttttgttttattaaatattacttgcttaattccaacaaaggctaagtgtttgtgtgtgtgtttgtgtttaaatacctgtatatttgatcttgtttggttactaagctaatgttaaattctttcttaatgacacagaggaagtcccaaggcaattcttatgtatagacccacccatctatcaggcctctgttaaatatagacaatgtctttgatgtggaattgcttgtatttttgcagtaaatgcccataaaataaaagtgaattgacaatg

SEQ ID NO: 238013 - DNA, 184 bp, Homo sapiens
gattacaattcttagaactttcttctttctttctctctcttcctccttcccaccctctctttcttcctctctccctccctcccttccttcctttcattctccatctttctctttttttccttccttcttttctctttctttcatcagttattgtttcatttagcaatgtgctactgaaataaaa

SEQ ID NO: 238014 - DNA, 420 bp, Homo sapiens
cacccagcctgtttctttttttagtaagtttttcacggaccgtaaaattcatcccttcataatatagaattctatggttatttatttattaatgaatgaatgaatgaatgaatgaaatggagtctcactctgttgcccaagctggagtgcagtggcacaatcttggctcactgcaaccccctgggttcaagcgatgtttttatttttattttattttttcagaccgggtctcactctgttgcccaggctggggtgtgtaatggcacaatcttgtctcactgtaacctccgcctcccaagctcaagccatccttccgcctcagccccccaaatagcttgggactacaggcgcacaccaccacacccagcctgggcaacagagggagactccgtctcactaaaaaaaaagagaaaaaagaaa

SEQ ID NO: 238015 - DNA, 502 bp, Homo sapiens
acttgttgctaatatgtgtccattttaaaaaggaaaaagtggtatctaatgagttaatcattaaggagtatgcgcagtgccggccatttcaggacatgaaagtttctgtggagctgcttgaaacaggaaggagcgacttgacatcaagtatttaaactttttgatttatgttttgatagatgacattgataggtataaattataaataagtttgagtaaccagtttaatatgtaaactggtatttcatctacagaaagttctctgtcattgtttggagctctttaaaataactcagctggggtgtttaagaataaaaacactagcagtgagttaggacatctaatgcttttaaagatagatgtatatgtcgcaacgatagtgtaagaatcagctgaagctaccggtgaggttttggttattttctttcagtcatctgagtccatttccaataaaggttgtttttttgtttcgttttttgtttttttttaatggggacaatga

SEQ ID NO: 238016 - DNA, 730 bp, Homo sapiens
cactgtaaatttcataaaatataactgtaggcatatttcagagaggttacatcatagtgatacttaatctccttttaaggacacatggcatttttccatttattgcattttatactgatgtttttcagtataaactttttgcataataatcattttttatccttcttgagacttttttggacttcaagaaaattagttttaaaattagtggccaggcacggtggctcgcgcctataatcccaacactttaggaggtcaatgcatgcagatagcctgagttcaggagttcaagatcaccctgacgagcatggagaaaccccatctctactaaaaacacaaaattagccaggcgtggtggcagaggcctgtaatctcagctactcaggaggctgaggcaggagaatcgcttgaacctgggaggtggaggttgcagtgagccaagatcccaagatcgtgccattgcacttcagcccaggcagcaagagtgaaactttgtctcaaaaaaaaaaaaagaaagaaaataaattagtccagcctgggcaacatggcaaaccttgtctatacaaaaacttacctggtcatggtgatgtgcgcctgtagacccagctactcaggagactgaggtggaaggatctgttgagcctaggagttcaaggctgcagtgagccaagatcccaagatcgtgccattgcacttcagcccaggcagcaagagtgaaactttgtctcaa

SEQ ID NO: 238017 - DNA, 352 bp, Homo sapiens
tgagtagcatggggcagagttaggtcctcatttttaatggtctcatataagatttctgaactacagaggacattactatatctgggtaggaggaaataaatctttaaatttgaaataataatatacaattttaaatatcattttccaaatttaatttcattttcacctttaatatttcctaaggattcaagaatcagatgcagggattctgtttctctccatttttattgttattgttgttgttgttttacatttaggatttcaatgtggaatctcagatttcttttgtgaactcctttactgtcagacaattaaccagaaataccaaataaatgaagatgggaaaacacta

SEQ ID NO: 238018 - DNA, 906 bp, Homo sapiens
cagcctacttcattttcaagttatattattttattaatgtagtttggtgatcttacagcagagctggaagctgtatcttcaaaatatgtctgtttgactcaaaacaatcaaggtattcaacaggagttattatgtatgaaaaaatacaacaggaatgtaaaaatcttgaggaggctaaaaagatgttggaaaaagtaatattaaatcttaaaaaacgtatggaaagtacacattggtgaagacacattggtgaagtacaaaaatataaattggatctagaagaaagggcaatgcaggcaatggaaaaattagtacaaatccctttacagtaatgattctcagtgtggagtcatttgattattaagacccattgacatgagattacatcctctgcctataaaaatcctggaagaaaacctaggaaatattcacctggacattgcacttggcaatgaatttatggatagaaaatgcagttgaaagatatttcataaaggaagaaaaagtaagaatacaggtgagagatattactgagattttctttcagtgcaattctggtcttttctgactagcaatatttttatgtgcagaagtagtagaaaagataaatattttgtacagtagaaaaacgcatcatttctgtgccatggaagagagaactcacaaagatgacagcttctggctatgttggatactaaccagtactgtaagtacccagcgatctgacgttaacattggctgtaaagctcctttaatgttccttgcaatgatttgaacctgttactggaaccctcatcgcttattgagttgaaaaacattgttgatatgtgtttatcttatatttgcagtagagtcataattttacttcttagaaaattatacattaaacaaaaaagacacatgaaa

SEQ ID NO: 238019 - DNA, 704 bp, Homo sapiens
  misc_feature (499)..(500): n is a, c, g, or t
gtgatgagaggatatattaaaggctaaagaagggcatgtacaaagacagggtataaacatctcataagtgtctttttacatgtagttgattcaatcctaatacttgtagagggccagtggtgaagaggagggagcctacgcagtattcttagtctgcaggagagataaacttcttgagaaatctcttactgtacacattcttgccacttgatattcaaagatcaggaaccaggctgatttggacaacttgttatctacgccttactctctgaactcggaacctcataaatttggatagtgaggaatacattattcctcgtgccgaattcggcacgagatctgcctccactcggcctcagttcctcatcactggtcctgtgctcacagtcatcaattatagaccccacaacatgcgccctgaagacagaatgttccatatcagagctgtgatcttgagagccctctcccttgctttcctgctgagtctccgaggagctgnngccatcaaggcggaccatgtgtcaacttatgccgcgtttgtacagacgcatagaccaacaagggagcttatgcttgaatttgatgaagatgagatggtctatgtggatctggacaagaaggagaccgtctggcatttggaggagcttggccaagccctttcccttgaggctcaagggcggcttgcctaacactgctatattgat

SEQ ID NO: 238020 - DNA, 599 bp, Homo sapiens
agatgtcaggcttttttaatcttactcaactctgaagaagctgagtggcctatagatgaccaaaatgctctgatggcttcttgcagggagtgtgcatgtgtgagtgagtgtggcgtgcatgtataaagaaaagcttttctctgaaaagagcagagaagggcatggtgacctcgatgaaagtgaatgatgcatcttttccctgcccactcccagccccatctcacatgttatttattatattgaagggttagaatctggggcaccctggtatcttcctgtatcctatgctcttgctgcctaccgtttttggggttcactgacaaatccttgctgactggagtcggggtgtgtggagtggatcacttcaattcatgccaggagaagaatcattagattctaaatgcattcagaagacagggggcagagagacagactcggaggatcacagaggctcctcaaagctggttttgcaaagctgtgacagaaagcctcagaaaagcactggaaggctggcttctgcttcaatctatcatgagaagccatcaagatgttgcctttcttgtactgccattaaaaatgcaacatctggctttaaaata

SEQ ID NO: 238021 - DNA, 2069 bp, Homo sapiens
  misc_feature (117)..(117): n is a, c, g, or t
  misc_feature (699)..(699): n is a, c, g, or t
  misc_feature (1267)..(1267): n is a, c, g, or t
  misc_feature (1560)..(1560): n is a, c, g, or t
  misc_feature (1580)..(1580): n is a, c, g, or t
tgtatttttagtagagacaaggtttcaccatgttaaccaggatggtctcgatctcctgacctcgtgatccgcccacctcggcctcccaaagcgctgggattacaggcgtgagccacngcgcccggcgataacctgaattttttcatccacactggcctttcaaactttgagtagttgttttgcttaagtctcacaacttttaccagcattctaaagtctgaccaaaagttctcatcaattaaatatgcatttgcaaagttaagttgatttattagacattggaaagtggttggtgttgttagaactactgaaaaatacagactcaaatggttttttccactgcatgtctttgtttgaaggcagtctactgtagaatatattcggacttcctgacatatccatccatctctttgcatacacttgttctttgtcctttggccgtgcaccaaagtatgacatcatctgcctttaaaaatgggtgagggtagtgttaaattttcaaaaagaagttctgatactctcattttaggaattaactctgttttgtggcttgattcctaactgcttttaatctgatttctttttcatgtagtagcatctaccgtgtgtttttgcacaggtgggaaagagcaaggttcgtttatacaccatttctccctccaccttacctttaaactttttttttttttttttttgagncggagtctcgctcagtttcccagagtgcagtggcacgatcttggctcactgcaacctctgcctgctgggttcaagcaattctcctgcgtcagcctcccaagtagctgggactacaggcatgcaccaccacgccgggctaattttttgtatttttagtagagacggggtttcaccatgctggccaggctggtctcaaactcctgaccttgtgatccacctgcttcagcctcccaaacctttaaactttaaacctgccttgcaactatctcgttgacatctgtcaccattgtcaggttcatttccattatatgttgcattctgccttaaaaccatgatagctactatttgtttatttactttatttatttggatgctctgcctccttccagagatgattgaaggtaactcatagtcatcactctatgtctgcattcagacacagaggagcagataggttagataatagacattttctgttctataatattttgtttggtcaccaaacagtgctgcccatgttatcaaactgatcaccgactccctgactttaggttcaaatgtttgaacntttttctctatttggaatccttctcacctctttaaaaaggaaactgagctccttgtgggcaaggatcctggcttcctggacactgccaaatgtgacttcgttttgaagcctaaaagatgagtcttcccccgttgtttctgctgagacaaggctttgcagaagaaattctttggcagctcagccctttctgtaaccagttaataagttacattttctagaaatgttctaactttttgagggagttactgcatgtcttagctttcttctagatcatgtttccaaaagttgcctgntcatgtgaatcgagtagagnaccagttcctaaccttctccaggagataattctgggaatctgtattttaacaagccccttgacattcatatgatcagacaagtttggtatatactgttttggatgagtagtgactcttccccttctgttttgctgacgtaaggattaaaaaaccaaactgagcaatctggagtctcttgtgatttgtatcaagctcattttctcatattcagaatagtagcagccattctcctaaattaaacactacctgaggacatggattatgtcctatttatttttgtgtccttagcatcttgtaccatctctggcacatggtaaattctcgtgactgaaccctagtacagcattgtgaaggacttaactttgcagaagagagattttattttgttatctaaataatttttccttgtgtgtctttcatcagaatggttcacgctgtactatagttattactactctgtttcttctaaaattccagcaagggttgat

SEQ ID NO: 238022 - DNA, 169 bp, Homo sapiens
gcacctgttgcaaaaagcgttgagttcttgatttgattctcagcttggtcattgttggtgtatagcagtgctgttgattttgtgtcctgaaactttactgaatccagtaaagatgtcatagatggcttttattactttaagatatgccccttctgtgccagttttgctt

SEQ ID NO: 238023 - DNA, 361 bp, Homo sapiens
ctctggttctatgtagttatccaggtgataccaggtatgcttatgttaatctttaaaagagtatcagaatggaagcatgaaatgaaaaataatttagaaaaactgcttcttggcttaactggccagttttaggaaatattctcttctccaggttcaacttggataccagttcttctgggaagccttctgtaatttaaaggcttaaaagcatacctattgtatttgtcagggttctccagagaaacagaacatattagtttagacatatatgcacacatatacatatacatacatatatatacatatataaaatgtatacacatatatacatatgtaaatatatatgtatatatatgtgcac

SEQ ID NO: 238024 - DNA, 849 bp, Homo sapiens
aggggttttcccttaaaaaacccctaaggaaattggtaaggggcattttaaaaagctgtactttaaaaaataataattcttacattcatttgaaggttttttgtttgtttgtttgtttgtttgtttttgagctgaaggcttgctcttgcactccagcctgggggacagtgagactccatctcaaaaaaaaagaatggactaacccttgtttaggtgttacaaaatccaggccagaccagtctaaactttaatctcatacccagttcctagatgagtcccttctccagctcaggttcggcctaagcctcagggttccttacttggtgggcaccacctgctcccttccccgcctttgttcctctttttcctctgctggctcctccggggttgggtgtgttcagaggcagagacaggctaaaggtctttggcttttaggttctgttgatgggtgagttccagatactagctttctcttgtaggatatttcatttatttatctattaaaaatatttatttagaacacaccattcatgtgccagaccctgttccaggcactggggatagggtgataaatgagatcaacaaaaatacctgcccacattaagctcctgttctagggaagacaaaaaagaaagaaaatacacgtgtccttagtacattagaaggttccaagtactgtagagaaaaataaagtaggttggactcggtggctcatgcctgtaatcccagcactttgggaggctgaggtgggaggattacttgagctcaggaatttgagaccagcctgggcaacatcgtgaaaccccatctctaccaaaaattaggtagatatagaagagtgcacttttg

SEQ ID NO: 238025 - DNA, 866 bp, Homo sapiens
aggggttttcccttaaaaaacccctaaggaaattggtaaggggcattttaaaaagctgtactttaaaaaataataattcttacattcatttgaaggttttttgtttgtttgtttgtttgtttgtttttgagctgaaggcttgctcttgcactccagcctgggggacagtgagactccatctcaaaaaaaaaaaaaaaacacaaaaaaagaatggactaacccttgtttaggtgttacaaaatccaggccagaccagtctaaactttaatctcatacccagttcctagatgagtcccttctccagctcaggttcggcctaagcctcagggttccttacttggtgggcaccacctgctcccttccccgcctttgttcctctttttcctctgctggctcctccggggttgggtgtgttcagaggcagagacaggctaaaggtctttggcttttaggttctgttgatgggtgagttccagatactagctttctcttgtaggatatttcatttatttatctattaaaaatatttatttagaacacaccattcatgtgccagaccctgttccaggcactggggatagggtgataaatgagatcaacaaaaatacctgcccacattaagctcctgttctagggaagacaaaaaagaaagaaaatacacgtgtccttagtacattagaaggttccaagtactgtagagaaaaataaagtaggttggactcggtggctcatgcctgtaatcccagcactttgggaggctgaggtgggaggattacttgagctcaggaatttgagaccagcctgggcaacatcgtgaaaccccatctctaccaaaaattaggtagatatagaagagtgcacttttg

SEQ ID NO: 238026 - DNA, 1803 bp, Homo sapiens
  misc_feature (1366)..(1366): n is a, c, g, or t
tttttataaaaaccctagaagaaaacccaggaaatactattctggacataggccttggcaaagatttcctgacacagactccaaaagcagttgcaatgaaaacaaaaattgacaagtgggatctaattaaattaaagagcctctgcatagcaaaagaaacaatcaacagtataagcagacagcctacagaaagagtgaaaatattcagaaactatgcatctgacaaagatctaatatccagaatctataaggaacttaaacagatcaacaagcaacaaacaaccccattaaaaaatgggcaaaggacatgaacagatacttctcaaagaagacatacactttgccaacaattgtatgaaaaagtgctcaacatcactaatcattagagaaatgcaaatcaaaaccacaatgaaataccgtctcacaccagtcagaatgactacaattaaaaagtcaataaataaggctgggcatggtggctcatacctgtaatcccagcactttgagaggtcaaggcaggtacatcacctgaggtcaggagtttgagaccagcctggccaaaatggtgaaaccctgtctctacttaaaatacaaaaaagtacccggatgtggtggtgggtgcctgtaattccagctacttgggaggctgaggcacaagaatcgcttgaacccaggagttggaggttgacctgagatcacaccactgcactccagcttgggcaacagagtgagactccgtctccaaaaaaaataaataaaaataacaaatctacaaacctttagcttgactgacaaagaaaaaaagaagaaatgtgaataactagaatcagcaatagaagtggagacattactatcaaccttacagaaatgaaatgtaagagaagaaatgaaatgtaagagaaaaaacgatgaacaccaacaaattagataacctagatgaaagacaacttcctagaaacacacaaattatcaaaactgactcaagatgaaatagaaaatacgaacaagcctataatatgtaaatagattaaatcagtaatttaaaacctcccagcaaaaaaaacatctcaaactacaggactttcttattgaagtctacaaaacgcttaaagaataatgaacactggccaggcacggtggcttatgcctgtaatcccagcactttgggaggcggaggcaggcggatcacctgaggttgtgagtttgagaccagcctgaccaacatggagaaaccctatctctactaaaaatacaaaaaaaattagccaggcatggtggcgcatgcttgtaatcccagctcctgggaggctaaggcaggagaattgcttgaatccgggaggcggaggttgcagtgagctgagatcgngccattgcactccaggctgggcaacaagagcaaaactctgtctaaaaaaaaatgaaaagaataatgaacaccaaacctcctttttaaaaaagttttcttccctaaaaaggaacactttttaactcattctatggagcaattattacatgtataccaaagctacctaaagacaccacaagaaaaaaaaaaagcaatatttccatatgactgtaaatgtaaaaaattctcaataaaataatggcaaactcaatgtaacagaatattaaaagtattatacagtatgacaaagcaagatttattacaggaatgcaagggtagttcaacataagaaaatcagtgtaatacaccgcattaacagaatgaagagaaagaaaaccacatgattatttcagctgatataagaaaagtatttgacaaaatctaactcttttatgatt

SEQ ID NO: 238027 - DNA, 682 bp, Homo sapiens
aaatagacaaaactatgatgtaaaaatgcttaaaaacaattattcctctctgctaattttaatgcaaaataaatgatgctagcatttaatatgtttatatgatcttgtttttaggattgaaattttaatacaatggccttttgtaactatttttactattatagctcaggtgtttgaattctctctaccccacctatcacccctatcccctaacaaagagtctggcttcataaatactgttgaatgaaaattggttctctaaatggttaacaagatgaatccacataaatcataattcagtactgaggaaccgaatttatacccaacatctaggcaaaatatattataatgattttctgcatgtgcattttggagaacatgatgccatatttcctggagaagtacaatatatttaatctgaataataatgagctgcattatcaggtatttcagcattctggctgataacattttattttgtaatgaatgaatgattaaatcatattatttaatacaaatatgaaaatcactacattgaagagtaaatcttatgtcttcctaaagatgacagtcataaacacaaaaataagcaagcagatgaaagcactcataacaaacatgataacagtataacaaatttcctttgtggctcaccaaatagcaaagttgaaatgtttccatg

SEQ ID NO: 238028 - DNA, 542 bp, Homo sapiens
atattgtaacatgaaatacatttatatccagaatttcctccaaatagcttatactaaaggaaatactgacttcctccgcaccgttttatataagaaacaagctgcaagttcacttctagtactatttacattttaaaagaaaataaatacatagtatttaagtgatttttcaagatctacaaagaggaatttaattctaccacatctttaaaaaaataaacagctttatgaagattcgtgaagacagataaaaaggaagtgaatatattcctgagggtctgaacaattttccttacctgatgtattatggaaaaattcagaatttaccagtcttccttcagtcagctacattttacactgacctgccctttggactgaaagggaaaaaaaaaagattaacttgccattgaaaaatttaaaataataatcagaaaccggacaaactgaaggtaaaaatatacaatggctacaataaagataaatatttatttaatcacagtagaggttgtgtttggactgtaggaatgtttcatccttccctt

SEQ ID NO: 238029 - DNA, 497 bp, Homo sapiens
caacatggaggtgcctcaaggatcagtgctgagggtcccgcccccatgccccgtcgaagaaccccctccactgcccatctgagagtgcccaagaccagcaggaggaatctcctttgcatggtagttgtactcaatgctgtggagtttgagacattatttttaaactttaaatagccccacaggtaagctataagggagaatgcagagaccacaggcattttcaaaacataaggagttttaatgttaaggagtttaaggagaatgtcaaagaaacattggccttggagtcaaatcctgagcttcctgcttgatggttttgggcggtgactctcgctgtctggattttactttcttcatctgtgaattaagaatgaggtggccgggcactgtggctcacgcctgtaatcccaacatttgggaggccgaggcgggcagatcacaaggtcaggagatcgagacgatcctgtctaacacgatgaaaccctgtctctactaaa

SEQ ID NO: 238030 - DNA, 2690 bp, Homo sapiens
gaagccaaacttggtcccccggctcgcggagtgcctgcgagcggtgctcatggcgctctatgagctcttctctcacccggtcgagcgcagttaccgcgcggggctctgctccaaagccgcgctgttcctgctgctggccgctgcgctcacgtacatcccgccgctgctggtggccttccggagccacgggttttggctgaagcggagcagctacgaggagcagccgaccgtgcgcttccaacaccaggtgctgctcgtggccctgctcggacccgaaagcgacgggttcctcgcctggagcacgttccccgccttcaaccggctgcaaggggatcgcctgcgcgtcccgctcgtttcgactagagaagaagacaggaaccaggatgggaagacggacatgttacattttaagctggagcttcccctgcagtccacggagcacgttctcggtgtgcagctcatcctgactttctcctatcgattacacaggatggcgaccctcgtgatgcagagcatggcgtttctccagtcctcctttcctgtcccgggatcccagttatacgtgaacggagacctgaggctgcagcagaagcagccgctgagctgtggtggcctagatgcccgatacaacatatccgtgatcaacgggaccagcccctttgcctatgactacgacctcacccatattgttgctgcctaccaggagaggaacgttaccaccgtcctgaatgatcccaaccccatctggctggtgggcagggccgcagatgctccatttgtgattaatgctatcatccgataccctgtggaagtcatttcttatcagccaggattctgggagatggtaaagttcgcctgggtgcagtatgtcagcatcctgcttatcttcctctgggtgtttgaaagaatcaagatcttcgtgtttcagaatcaggtggtgaccaccattcctgtgacagtgacgccccggggagacttgtgtaaggagcacttatcctagaaaggccatttctgaagactcagcaggaccgtggctgcctcattgtcatcttctgggaacatcttaggaccttttgaaagagcccagcggacacctgcgggcttgtgtgcttttccctcagagacaacggttctttccggttttgctctacacagttccgtatcttcagagctcctgcagaattgtcagggactagtttgtggaaaggtctgagagttcctggaggctataattagctttttgggttttccttctttgccttagcgttgaatttcaggagaaaattgcagtcagttcagacatcttggaaagagtcccatctctggtcaagcagagacttttcctctgttgaactgaggaacacactgtgcatttctaccttctgttgtgagccactcttactcttttcagggctctcttgtgacaaacatgccaatcactagcactttgcacccctgggcttctccatttcccattcacagctttgatttccagagctgaggcctttaactggagacctggaggggcagggcccaagggcaagggccgcattagcacaggcaatcagggagggccgctgaaggacacttggaccgtccacctgccccagcccaacagtcagtcatctgtcatcagctcagctgagcagccctggatctttgccgtactgtgactgggctctttgccctatttttccctctgtctgtgcccctggatggcaggctgaagtcagaggggctgtttcattctcagccccctcagcagcactgggggaagaaagcattgtcacaacaggttctttctggccctcacccaacagcctgggcacttggccctcctcctccttgacagccctcccccttcctgcaaaggacaggggcgacaggggttggtgttgggattggctcccgctgcctgacaaccacaagtttatttggaaggctagcgggaagcccagcggctggcgtttcccttgactaaggaacagggtgcccatcagagtggggcgggcagctttgggaaggacacaagaagcagtaagagtgtaaagaggatgctggcctgggcaggccagtccagcctggccactagcaggataccaagcagtccagtggattaccctcgtggctaagcaagtgtctgcaggagcagagatggctggaaggggcctctgcacacggaagatggcttgttcagcccattcacctcctgaggatgtgggcagtctcctccaagaacacatggagctgcttcctgatcccaagcaggtcattgccactggaaggacatggccccggtgatccatgcttcatgcccacccagaaacacacccctcagtgtgtgcctcagtttactttggagatcagttgtcgtttttagtgctcctttaggcttactaaaacagttttggaaacaaagctattttgaagtattcaagcagaggaattccctaacactgacccccttgtctttttttaatattcaggctgttttatatgcctaaatttttttcttaagatctaaacgaaaaatagtttcttgtttaaattcacataaggcaatgagatatggaaagatgacaagatacgtataaacattggtttgcattttattaaattattctaatgcaaatcttgtataaagaacccatgatgttttgtaactttctaattaaaatgttcaaaatgag

SEQ ID NO: 238031 - DNA, 927 bp, Homo sapiens
agcgggggcgcgctcggccaggccggcctccctaaccgcctccctaccgccctctttaactcagggtttggctgaagcggagcagctacgaggagcagccgaccgtgcgcttccaacaccaggtgctgctcgtggccctgctcggacccgaaagcgacgggttcctcgcctggagcacgttccccgccttcaaccggctgcaaggggatcgcctgcgcgtcccgctcgtttcgttgtgtacagcaagacagtgggtcattgtgtatgtacagaagtgatgtggattcctcccagactcattagtgaccagggctgctgggcctgtttgggtttcctagactagagaagaagacaggaaccaggatgggaagacggacatgttacattttaagctggagcttcccctgcagtccacggagcacgttctcggtgtgcagctcatcctgactttctcctatcgattacacaggatggcgaccctcgtgatgcagagcatggcgtttctccagtcctcctttcctgtcccgggatcccagttatacgtgaacggagacctgaggctgcagcagaagcagccgctgagctgtggtggcctagatgcccgatacaacaaagaaagactgagagtaaatggggcttaaattgttgccagagagtttattcctctttgacggagacgattattgatacttgcgtaaggccaccaaagaacaagaggtggctcctgtgggacccgccgggggtgggcaggccagccctgtgtttatcccatccttgcagcaacacgcattttgggtctgcggtataggccccgcagagccgagggtattccgggaccacggggcccggccccttgcgcttttagtttgaccttcccattttggtgcgcctccaggggaagggcggttccccgcgcctgtaggttcc

SEQ ID NO: 238032 - DNA, 974 bp, Homo sapiens
gaagccaaacttggtcccccggctcgcggagtgcctgcgagcggtgctcatggcgctctatgagctcttctctcacccggtcgagcgcagttaccgcgcggggctctgctccaaagccgcgctgttcctgctgctggccgctgcgctcacgtacatcccgccgctgctggtggccttccggagccacgggttttggctgaagcggagcagctacgaggagcagccgaccgtgcgcttccaacaccaggtgctgctcgtggccctgctcggacccgaaagcgacgggttcctcgcctggagcacgttccccgccttcaaccggctgcaaggggatcgcctgcgcgtcccgctcgtttcgttgtgtacagcaagacagtgggtcattgtgtatgtacagaagtgatgtggattcctcccagactcattagtgaccagggctgctgggcctgtttgggtttcctagactagagaagaagacaggaaccaggatgggaagacggacatgttacattttaagctggagcttcccctgcagtccacggagcacgttctcggtgtgcagctcatcctgactttctcctatcgattacacaggatggcgaccctcgtgatgcagagcatggcgtttctccagtcctcctttcctgtcccgggatcccagttatacgtgaacggagacctgaggctgcagcagaagcagccgctgagctgtggtggcctagatgcccgatacaacatatccgtgatcaacgggaccagcccctttgcctatgactacgacctcacccatattgttgctgcctaccaggagaggaacgaaagctcccagtgaggaactggtcttctggagaatcacttggactccagaggtggaggttgcagtaagctgagatcatgccactgcaccctagcttgggtggcagagcaagactctatcaaaaaaataagtaataaatttgttcaaaagtcctgca

SEQ ID NO: 238033 - DNA, 2795 bp, Homo sapiens
gaagccaaacttggtcccccggctcgcggagtgcctgcgagcggtgctcatggcgctctatgagctcttctctcacccggtcgagcgcagttaccgcgcggggctctgctccaaagccgcgctgttcctgctgctggccgctgcgctcacgtacatcccgccgctgctggtggccttccggagccacgggttttggctgaagcggagcagctacgaggagcagccgaccgtgcgcttccaacaccaggtgctgctcgtggccctgctcggacccgaaagcgacgggttcctcgcctggagcacgttccccgccttcaaccggctgcaaggggatcgcctgcgcgtcccgctcgtttcgttgtgtacagcaagacagtgggtcattgtgtatgtacagaagtgatgtggattcctcccagactcattagtgaccagggctgctgggcctgtttgggtttcctagactagagaagaagacaggaaccaggatgggaagacggacatgttacattttaagctggagcttcccctgcagtccacggagcacgttctcggtgtgcagctcatcctgactttctcctatcgattacacaggatggcgaccctcgtgatgcagagcatggcgtttctccagtcctcctttcctgtcccgggatcccagttatacgtgaacggagacctgaggctgcagcagaagcagccgctgagctgtggtggcctagatgcccgatacaacatatccgtgatcaacgggaccagcccctttgcctatgactacgacctcacccatattgttgctgcctaccaggagaggaacgttaccaccgtcctgaatgatcccaaccccatctggctggtgggcagggccgcagatgctccatttgtgattaatgctatcatccgataccctgtggaagtcatttcttatcagccaggattctgggagatggtaaagttcgcctgggtgcagtatgtcagcatcctgcttatcttcctctgggtgtttgaaagaatcaagatcttcgtgtttcagaatcaggtggtgaccaccattcctgtgacagtgacgccccggggagacttgtgtaaggagcacttatcctagaaaggccatttctgaagactcagcaggaccgtggctgcctcattgtcatcttctgggaacatcttaggaccttttgaaagagcccagcggacacctgcgggcttgtgtgcttttccctcagagacaacggttctttccggttttgctctacacagttccgtatcttcagagctcctgcagaattgtcagggactagtttgtggaaaggtctgagagttcctggaggctataattagctttttgggttttccttctttgccttagcgttgaatttcaggagaaaattgcagtcagttcagacatcttggaaagagtcccatctctggtcaagcagagacttttcctctgttgaactgaggaacacactgtgcatttctaccttctgttgtgagccactcttactcttttcagggctctcttgtgacaaacatgccaatcactagcactttgcacccctgggcttctccatttcccattcacagctttgatttccagagctgaggcctttaactggagacctggaggggcagggcccaagggcaagggccgcattagcacaggcaatcagggagggccgctgaaggacacttggaccgtccacctgccccagcccaacagtcagtcatctgtcatcagctcagctgagcagccctggatctttgccgtactgtgactgggctctttgccctatttttccctctgtctgtgcccctggatggcaggctgaagtcagaggggctgtttcattctcagccccctcagcagcactgggggaagaaagcattgtcacaacaggttctttctggccctcacccaacagcctgggcacttggccctcctcctccttgacagccctcccccttcctgcaaaggacaggggcgacaggggttggtgttgggattggctcccgctgcctgacaaccacaagtttatttggaaggctagcgggaagcccagcggctggcgtttcccttgactaaggaacagggtgcccatcagagtggggcgggcagctttgggaaggacacaagaagcagtaagagtgtaaagaggatgctggcctgggcaggccagtccagcctggccactagcaggataccaagcagtccagtggattaccctcgtggctaagcaagtgtctgcaggagcagagatggctggaaggggcctctgcacacggaagatggcttgttcagcccattcacctcctgaggatgtgggcagtctcctccaagaacacatggagctgcttcctgatcccaagcaggtcattgccactggaaggacatggccccggtgatccatgcttcatgcccacccagaaacacacccctcagtgtgtgcctcagtttactttggagatcagttgtcgtttttagtgctcctttaggcttactaaaacagttttggaaacaaagctattttgaagtattcaagcagaggaattccctaacactgacccccttgtctttttttaatattcaggctgttttatatgcctaaatttttttcttaagatctaaacgaaaaatagtttcttgtttaaattcacataaggcaatgagatatggaaagatgacaagatacgtataaacattggtttgcattttattaaattattctaatgcaaatcttgtataaagaacccatgatgttttgtaactttctaattaaaatgttcaaaatgag

SEQ ID NO: 238034 - DNA, 417 bp, Homo sapiens
ggagaacctgtacttccatttacagcccctgagtaagtccaggacaaagtctccaggctctgtattccagaacaccgcctctccagtagggaagactccgggagcatcctgccttcccaggcgggaatggaggccaggaggctttgcccagaccttgactgtgctattgccaagtgaccagctctggggcctggctcctctgccacttgggagaggactcggcagatgggcttcccttcaccccagtccctgctccccagccagagaccctgagttccagcccagggtaatgaggggaagtaacagatacacctacttttaatccaaataaaggaaaaatgtttgccaccatggagtttataaaaataacaatgcattattcgggtattaataacaataaagatgtcaaactgtcag

SEQ ID NO: 238035 - DNA, 2603 bp, Homo sapiens
  misc_feature (550)..(550): n is a, c, g, or t
  misc_feature (1843)..(1843): n is a, c, g, or t
  misc_feature (1895)..(1895): n is a, c, g, or t
tcttcgattcttcgagccttttggcctactgaggtggtccaagtactccaagatgttgggtgagagaagctcatgccaggtaaagtcactaactaggtgagacagccaggaagagtttgggattcacaacggcagcacctacgacagagatactgcccttcatcaaaccactggggcaagatgattcattgaaatgttaccctgtgctcatttggtttacatttgctcctcccctggctctttcaagcagagagtgagtcccttggtgtttccttgccttgggtatttctggtggtcagagcataaaagctatcggaagttggtgggtctttctgtcttttgcaataatcttgacctaaatttttttttaaatttcttaattatttttagagacagggtctcactctgccacccaggctggagtgcaatggtgtgatcatagctcactgaagcctccaactcctgagctcaggtgatcctcccgcctaagcctccagagtagctgagactacaagtgctcaccaccatgcccggctaatttttctttttngtagagacagagatctcgctatgttgcccaggcttgtctcgaactcctggcctcaggtgatcttcccttctcagcctctcaaagtattaggattataggtgtgagccactgcacccagccttcgttgactctttatagagactctgtaaggtgtcctggaaagagaagaaagaaagggtgggcctatgattttttgttttttgagatagagtcttgctccgtcgcccaggctggagtatggtgacatgatcagggctcactgcaacctccatctcctgggctcgggtgatccttccacctcagcctctggagtagctggaactataggtgcatgccaccatgcctggccaatgttttgtatttttagtagagatggggtttcaccatgttgcccaggctggtctcaaactcctagtgctgggattacagatgtgagtcactgcaccaggccaagggtgggcctttgagagcaggaagaagggagaggaaaagatttttaccccagaagggaaaggggcagagtgtgactagggctgggggtagggaggaaaggtctcaaaccttgactctaggcagtgtccaaaggtgacaaggccttagaggacatggctgcctggtacactcagggagagtggatctgagcacagagctttcgcccctccctcacaattcccacattccaagggtgactccaaatcagcagagccaccaagcctgaggtgccacaaggctgggatgatggatgttctgcatttgctagtgtgaccagtggagccagcctgacgcctcagcactgcctaagaccctgggaccttggcaaaatcttgagaatgggggagggagactcaacgatatgcctgagattgaatttcttgccagctcagtgggatagtggcttagagtcagatttaaattgaattagaaaaaatcaagaaacaggccaaaccactccagccttgcaatccctcgggctatccctagccacaccccttactctcatgctcaccaacaagcagtgcctaccaccactggatgccccatgtgacccatagctgaggatctttatacaccctctccccaggagtgggcatccacttgtgtttccctggacagggagcttccaatcttccatcctgaggtcctgctagaatgggctgttagaatattccctcactagatagaggggtggggaagcaggagtccagtttcagaagcagggaagggactacagtcatagcgagtggtggacacgtggcggagggtgggacaccctttcacaaagtggcccatcanaccacaacacagtatgggacagggctggcttctcttcagctctgcatggccngggagggtacctacctggggtccagctgcccccccgagcctgtctatcagccattgtacaccaggccagtccatgatggggttcacccaggatgagacctggacagcagttgagccatgcagaagcaagtgggtggttaagaggcagatggtccagttggtgttttcaggcaaagtgccagctcctcatcatggctcatgaggatgcttagatccagcccctgatgaccccctatttcacctctagccatttcctagcacagcgcctcctctgtcctagctccagcctcactgagctgctttcagtcccttgaaggagttgcactctccttcctctcggctcttccacaggctgctccagacgcttgaccactcctttctttcatgtacctaattcctactcatccctcaggacccaatgtggctgtcttctctaggaagccatctgaacttataagttgagttaggagtctgttctggacctcccacagcaccctgattctcctgtcttggcccctgtcataccttgtgaagtcttgtttaatcatctatctcatacatgtcagtatgcttctgggggaaggaaatgtgtccatcttgtttaaaacagtatctttagggcttgatgtctagtgagggaggaagggaaggggaaggaaacgataagggcatgggaaggaaggatggaaggaaggagggaaggaagaag

SEQ ID NO: 238036 - DNA, 874 bp, Homo sapiens
ttttattaagaaatatcacatataaaaaaggtttataaagaatagtaaaataatactcctgtatctaccactgaagttaagaaacattatcagcaggatgatcattaactcacaatctaaattggaacacttgagaaagaaatgtagtgctattaaaaattgtatcagtatactaagcatgaactggaaatcagaacctttatttaccagtggctttacaagtaacttggttaccccctgaagttcacatcccctcttcctactctcaagaggtaaccaataaaaccaaatatatttatctattctactgttaatgaacatttttttgttgttgttattgtggaacatccctgtacaaatctcctggtacacaagtaaagattttctctacagtacttacctaggagttgaaattctcagttgtagaataaatgtgtgttcaattttaatacacaatgtggcagtaggttaatcattcacctatattttcttttaattttttccttttatttatataacctacacctctgtaatctgttttgattttaatatattggtgacaatctaatgttttccccctcaaataactaattttcgtaattctatatgttgaataatcaattcttttccagttggtttggcatgtttcccctaaaatcaagttcttatacaaattataatttgctttagccctacctattgtgttcaattaggttgctagtattaactatatattatgatgacattaccaatcaatctagtacaagataatatacagcaattaagtgaccagaaggtttgtgtccctgaatttactgtcttaatatctcctggccaaaggctgtgacaacttaagtctccttttcctttatca

SEQ ID NO: 238037 - DNA, 705 bp, Homo sapiens
  misc_feature (332)..(332): n is a, c, g, or t
  misc_feature (354)..(354): n is a, c, g, or t
  misc_feature (463)..(463): n is a, c, g, or t
  misc_feature (564)..(564): n is a, c, g, or t
  misc_feature (699)..(700): n is a, c, g, or t
atcaggtaaggctatttttacatcttttgtggatcttcagttacttcaggccatctggatgtatacgtgcaagtcataggggatgccatggcttggcttgggctcagaggcctgacaatagggactttacataggattaggatggattagaacagaagttctagaagcaggtgagaaggagtggagggtagggataaggaaggaagggatttaagaagacattgagaaggaaaggaccacaagactgagaggaatggatgaggagagagggaagaaggccgccacaaggagagggaagacaagcaacacccggccaaagccgcgccggcggngaaacagagacgacacgcacancacaacagaagcccacaagcagcgaaccacaaacggacccccgacaaagccagacgcccgaaggacaccacggaggcacacaccaccgacgacggacccaaggaagacncgccacccccacggagaccccggcccgccgaggaccccccacgcccgggcaaccgccaaagccccgagcgaacccaacccccccacaaagcgcgccacggnccaacaaacacgggccccgggcgcacaaccggccggcccccccacacaaccggacaagccccccacccgagggcgcgccccgcacacaccccccccacacccaacaacacccggggccgccgccggacccccgcnnccccg

SEQ ID NO: 238038 - DNA, 493 bp, Homo sapiens
ctaaacactcctcaacttggggcaacaaaagtagaaaaatattaatcaaatgctctcccgaaagggtggaagggaggaggagaggagatgtcccattcacagtggttgacagccaggagtggagctctgccacttggaaaagggaaagtccctcatgggtgggcagtgcctggagagaagcgggtatttgggatgtgcgcagcggcgcaccacccttcttgcttggagatattttggcttcccatcctatagactgtggccccttgatgcgcagttggctgataggttgactggctactacttaattttcctccgaaagaaaagcccacctgtgccaggcctgagaggtgtcctgagctccacccactcctgggggagtgtgtttcacagttccctcgagtaagccctccctccgccctcttttcttcacactgacggaagcttattagagtgcaggggagtgagggtgtgattagagagcaacattgagcct

SEQ ID NO: 238039 - DNA, 382 bp, Homo sapiens
atggcttaccccaggagcagcacttccagagcagttgccgttcccatctgtgagccaacagtctcccctctccctaggcaccaagcccacagctgtcccatcaccacctcatttgatgctcccagctatcctgtgatcaggtaagggaacacaggctgcataccaaggctccaggtcccagggctgaaagcccttttcctgggtgggcagcgctgcctggaagcacgtggccaaccacctgctccttcactggagggtctggagtaagctatccaatgtggcagccattggccacatgtggctttctggtacttgacatgtggctagtccaattgagatgtgctatgtgtaagatacacaccagatatcatagattaatacc

SEQ ID NO: 238040 - DNA, 483 bp, Homo sapiens
tcttggggccatcggattgctagagactagccggcttctcacagccacccctaagacacctgccttaaccccaaggatggaacaattaggtctcaaaggatctattgcctcggtcagcttggcacaggctgagagggagatgctgctgctgccgccttttctgcactctctccagcagacacagccaggacccaatgctgatgatgaagaaatacaactattaaagaagagagaaagaaggaaacttctgcagctatttgatctgctcaacatccaagaaccgatctggcatggattttatggctttattttgttttgctttgctttgtttttccttgaattcatgagttgttctgatgttatggagacagtgtcagtaatagttccaacctcttgcctcctgggggaggtaagaaacaactacgtgcaatctatgaatttccaccttggttattaaaggaattatttttgtaaccattaagt

SEQ ID NO: 238041 - DNA, 1799 bp, Homo sapiens
  misc_feature (165)..(165): n is a, c, g, or t
  misc_feature (260)..(260): n is a, c, g, or t
  misc_feature (389)..(389): n is a, c, g, or t
  misc_feature (890)..(890): n is a, c, g, or t
acagtttatgtccttactgaacagaagtttgtatgtctactttccaagtatcttggaagcattactgtagattaacaatccaataagtgatcattggcaaaggagtagtacatgtgaggattaaatactgaatagctccagtgtatcacactcttgaattctcanaaagagaaccaaataaattggaaagaaaccaacactagacatatggaaatttttcaaataaaatatgttttcctctggctcagtccttacagctnttgtacaacagcccaactttagctgtcatgccagtgcctctaaaaacttccatttcctggcagagctttactggcagtgtttctatctctggtcgaaatcacagtgatacaatacatttacacggtacnttagtctcaccagctcctcccacttttgcaaatagttccgtaagtgaacgtttgacacttggaaagacaacaaatgtttttgcttactatgtgtcactgtaacattagttgaagtcattttctatattaataaatgatgcaagtgcctttaaaaatatctaatggaccataacctaggacataacagtctcttattgaatctagccagtattcttagcaaatatctcagtatttccataaagccactggcaagtgatagcagcccgtttttgcagttaagaaaattgcagtagcaacttagatgtatcatctaaagcctccttgtccaataatatttttcttatatatgctgtttccaaaataatatgcctcaaaataaaataagcatattcacatgtcagataacaagtttatatagtcccttggttacagatgcagttgcaaaaggaggtggaaggcatccaaaacacaataatttttataaaatgagataaaggactnggaaacagtccaagatgtgtctagacaataatagcctcccctaattggagtgatagtattcattagatttattaatatccactgaaatacaaaatgaaataagaaacacattttataccttggcttagtaagtggcagaaaaacagtatttgtctgcatttgttccgttaataactttataccagtagtaaccagaagaaactcctagataggctgtacaagtggttttctagcttcttttaaaaaggaactactgggttgatatctaagatatattaaatttattaaataacttcttaatgtcagaaattcaagtataaattgtttttgacattaagaccaactcctgttcattacaagcacctgaccaactgtcttaatagaaagtactctagactcagtagcttataaacaacagaaatttatttctcacggttctggtggctaagaagtctgagatcaaggccccaataaattaggcctctgatgagggcctgtttcgtgattcgtagatggtaccatcttgctatgttctcacataatggaaagggaaaggcagctctctggggcctctttttattagtgcacgaatcccattaatgaggaccccacccttatgacctaatcactccccagccacgcctcccaatacgatcacattggtaattaggtttcaacatatgaattttgtggagagacaagcattcggaccataacaacaacattcttaaaactaccattgtaggccaggggcagtggctcacaactgtaatcccagcactttgggagcctgaggtgagagaattgcttgagcccaggagttcaagacctgcctgggcaacatagtgagacctcatctctacaaaaaatttaaaaattggctggggtggtagagcaagatgttgtctc

SEQ ID NO: 238042 - DNA, 895 bp, Homo sapiens
cgcgtccccatgcagccctggcagtgcctccggcgctttgccctggcctggtgggagaggacggcggagggcagagcccgctctcccagggaggaggctggaccgagggaccctgggggccgaggggagccagatccggagcggagcagcccccccatgctgtctgcggacgatgcggagtacccgcgggagtaccggaccctggggggcgggggcggcgggggcagcgggggccggcgcttctccaacgtggggctggtgcacacgtccgagcggcggcacacggtgatcgcggcccagagtctggaggcgctcagcgggctccagaaggcggacgccgaccgcaagcgtgatgccttcatggaccacctgaagagcaagtacccacagcacgccctggccctgcgaggccagcaggacaggatgcgagagcaggttggcggctggaccgtggaccccgtatgcctcctcagctccctctgctcccacctccatggcgactccgccccctccggggctggccagccggcccagacccgcagctcacgccacactcagggagcccagcccgggctggcagaccaggcggcaaagctgtcctacgcctccgccgagtcgctggagaccatgtcggaggccgagctgcccctgggcttcagcaggatgaaccgcttccgacagagcctgcctctctcccgctcggccagccagaccaagctgcgctccccaggtactgcccgcccagtccaccctccctccccacacaggctcctccctctgctcttcactccctggagccccctcctcccctacagcacgccagctcgcctcaagctctgctctctttcccacagccccttctccccaagcaaccccagctctctccatctctctc

SEQ ID NO: 238043 - DNA, 429 bp, Homo sapiens
ttcccgcagggacccccttgggggatgggcagccccaggccgggcgcgccgtgacccagccgtgcccctctcacctctcgcagatccggagcggagcagcccccccatgctgtctgcggacgatgcggagtacccgcgggagtaccggaccctggggggcgggggcggcgggggcagcgggggccggcgcttctccaacgtggggctggtgcacacgtccgagcggcggcacacggtgatcgcggcccagagtctggaggcgctcagcgggctccagaaggcggacgccgaccgcaagcgtgatgccttcatggaccacctgaagagcaagtacccacagcacgccctggccctgcgaggccagcaggacaggatgcgagagcaggtgagtgggctcccggctgcggctgcggctgcggccgcggccag

SEQ ID NO: 238044 - DNA, 758 bp, Homo sapiens
aaacctgccacttaattaatgtctggaactaatgccccaatttgctcaacgattctgctgctcacctcggtgacaaatttgtgttgttcttcggaagcctgaaatagcagccgtgcccatggctcccactcacatggcctcttgtctggcttcccagggtgcctgggtcctttgcccattccttacctgccgggtgtcccagggaggccaaggccagcagagactggggaactctcttgtggccatgccaggagtctgtaatctgtgtgggagtctgtaatctgtgtgggtgtcgctggctggcaggaccttcccaggcctggatatgggcagtgacaagcaaaggggggggggggtgctcatccttggttcctctcaccctgcccggcccctgcagacccgcagctcacgccacactcagggagcccagcccgggctggcagaccaggcggcaaagctgtcctacgcctccgccgagtcgctggagaccatgtcggaggccgagctgcccctgggcttcagcaggatgaaccgcttccgacagagcctgcctctctcccgctcggccagccagaccaagctgcgctccccaggtactgcccgcccagtccaccctccctccccacacaggctcctccctctgctcttcactccctggagccccctcctcccctacagcacgccagctcgcctcaagctctgctctctttcccacagccccttctccccaagcaaccccagctctctccatctctctc

SEQ ID NO: 238045 - DNA, 675 bp, Homo sapiens
cgcgtccccatgcagccctggcagtgcctccggcgctttgccctggcctggtgggagaggacggcggagggcagagcccgctctcccagggaggaggctggaccgagggaccctgggggccgaggggagccagatccggagcggagcagcccccccatgctgtctgcggacgatgcggagtacccgcgggagtaccggaccctggggggcgggggcggcgggggcagcgggggccggcgcttctccaacgtggggctggtgcacacgtccgagcggcggcacacggtgatcgcggcccagagtctggaggcgctcagcgggctccagaaggcggacgccgaccgcaagcgtgatgccttcatggaccacctgaagagcaagtacccacagcacgccctggccctgcgaggccagcaggacaggatgcgagagcagacccgcagctcacgccacactcagggagcccaggcggcgtctccttcgcaggggtgctgttcctgcagttcggggaggagactcggcgcgtgcacatcacgcacgaggtcagcagcctggacacgctgcacgcactcatcgcgcacatgttcccgcagaagctcaccatgggcatgcttaagtcgcccaataccgccatcctcatcaaagacgaggctcgcaacgtcttctacgagctgg

SEQ ID NO: 238046 - DNA, 773 bp, Homo sapiens
gcctgggtgacagagctagattctgtctccaaaaagaaaaaacccatcccagtttactgttgaaacctcatccccagccaagtccccacttgttctacatgcttctgttcggccacctttccctgaatgctacagcagcacccctgcgtgtaacgctgttgagcctggaatgcccttcctctgtttttctgttaagggccacctcaaattccctacccccacccccaactttttcatcagagtcagttcttcctcctctattcctgttacacctaccacataactagtataacaataggcatgctacactgttgtttgcttatgtggccttctggcattaaaagctgctagttcctggaggtcagggacatgcactatttactatttatccacaagatcaggcattcaagaaatgttcgttggatagaattgaggtgtttggacaggctgggcttataagtgccagtttgtttcagggaagacattttctcaaaggttttctgatttaaagtttatactgtcatttcctgagtattccagtggattattaattacctttactttgccccttggctacaacctacttggcaataaaaataccaagccttttacttttcaacatttaggacttggtagaagacttgattaggcatagggaactgttggctaaaaggaagttgatgaattgcttaaagatttcatttgttatgattttctcttataagggattaactgaggaatactgtaaagttgttatttatcttctggtggtg

SEQ ID NO: 238047 - DNA, 515 bp, Homo sapiens
gcggtatgatgaatttgaggcatctgtaagacctgaagtgctggcattcagaaggcttaaaatgtatgggtgtggagctcggaagtggggtttgggtaagattagggagtttttcataaagatggtgtttggagaaagaggaaatgactcccctggaaaggacttttaaactgttaagaagagggcctggaaaagaggtgggagtctatgagttagggtctggagggtgggaagagaatctgaaagtgctttattaatcccagcactttgagacgccaaggtgggtggatcatgaggttagatcgagaccatcgtggctaacatggtgaaaccctgtctctactaaaaatacaaaaaagtagccaggcgtggtggcacgagcctgtagtcccagctacttgggaggctgaggcaggagaatcgattgacatgggaggcggagggtgcagtgagccgagaccatgccactgcaccgcagcctgggcgacagagcgagactccctgtcaaaaaaaaa

SEQ ID NO: 238048 - DNA, 133 bp, Homo sapiens
agcggtaatttaatcaccataaaaagtgaaaactactaaaattctgaaaaatctgccctcaccattgccctttatgaattacaagctctttattttagccacagatgactctacacccttccaggaacactcc

SEQ ID NO: 238049 - DNA, 713 bp, Homo sapiens
gtttaacctaatccaactagatggaactagaaaaagaatatagaaaatttagggggaagaggtggctacttgtcagatgtagccaatttcctagtgctttaatagagttatgacttccagaaacaggcagggtatggtggctcacatctgtaatcccagcactttaggaggctgtggtgggcagatcactttgagctcaggagtttgagaccaacctggacaacaatcccctctctctacaaaaaaatacaaaaaaatttagctgggcatggtggctcatgcctgtagtcccagctactcacgaggctgaggctggaggattgcttgagcctgggaactggaggttgcagtgagccaagatcatgaccctgaatgccagcctgggcacagagtgagatagtgtctcaaaaaaattaattaaagacttccaaagacagcaatacttatttttctttaccttttatgtattagaagaggattccaaattttccaaagtccctcctaacaccaaatatgtaacttgttctatcaaaccaagtcttaaaatacaacttcaaaagaaaatatgtgcttggcattcaacaggccttccataagtgttcactgaaggttccaaatctcccaatcatagccaagaaatatatttctccccaatacatgttttctcctaaactcaatagaactgtatattaagatactaaatacatgaatca

SEQ ID NO: 238050 - DNA, 354 bp, Homo sapiens
tggggaggcagcagggaggaaaacctgcagtcactcaccccagttacaacacatgcagttaccggcaggtccgagataacctaagggtttccaaatgctaggaagtgactcaatgactgatatgtttaatacaatacaatcccggttgcaaaatgcccagggcaagggtgggggtgttcagttttctaatgctcccagttcaaaaaggagctgaaatgaattgtcaaagaagtgacaagctgggcgcagtgactcacacctgtaatcccagcactttgggaggctgagagaggatcgcttgaacccaggagtttgagaccagcctgggcaacatagtgagatcctgttcctaca

SEQ ID NO: 238051 - DNA, 473 bp, Homo sapiens
ggacctggtgggaggtaactgaatcgtgagggcggtttccccatgctgttctggtggaagtgaataagtctcacaagagctgatggttttctaaggggaaaccccttttgcttgttctctcattctctgtcttgctgccgccatgtaagacgtgccttgcgccttccaccgtgacggtgaggcctccccagccacgtggaactgtgagttcattcaacctctttttctttataaattacccagtctcgggtatgtatgtgtcagcagtgtgaaaactgactaatacacctagtttgacttgaatcagataaacagcaaataatttttcgcatatgtatgcttcatgcgatacttggaacatacttacactgaaagtatttctagtttatgtgaaattgaaatttaattgaaagtattgtgcttttgtttaatgtatttctagtttatgtgaaattgaaatttaattgaaagta

SEQ ID NO: 238052 - DNA, 484 bp, Homo sapiens
ctgacactggattgggaccagactagagaatgtgggcccagaggaatgatgtatgagatgtgaaagagttttcctaaattcatctcatattttcttgtctgatagttttcaatgtggaatgaacatagctataagccatttcttgccacaagcctttcctcctatttcatgttagtttttaaaattatatataacgaactggccaggcgcagtggctcacgcctgtaatcccagcactttgggaggccgaggtgggcggatcacgaggtcaggagatcgagaccatcttggctaacacagtgaaaacctgtctctactaaaaatacaaacaattagctgggcgtggtggcgagcgcctgtagtcccagctactcggcaggctgaggcaggagaatggcgtgaacccaggaagtggagcttgcagtgagccgagattgcgccactgcactccagcctgggcgacagagtgggactccgtctcaaa

SEQ ID NO: 238053 - DNA, 361 bp, Homo sapiens
cgaaagaaggaaaacaggaaatggattaagagcagggggagcatctgactgagagcacaaactgcagattcatgggttcaaatccagactctagctgtgtgatcttggtcaccgttctgtgccttggctttctcatctataaaatgaagacaataatagaacatgcctcataggattgttgtgaggatgtatataaaatacttaaagcctggcacatagtaagcactcaagaaatctttgctgttatcgtcattctaaaagccgagtgttcaagtctccacctgaacattcagaggcaaagcagagcctggaagctcacaacagtctatagtttctggcctgtcatagaacaggattactt

SEQ ID NO: 238054 - DNA, 596 bp, Homo sapiens
cttgaggtctctctttggaaattgactataaactctagccctgccctgattggaatccaaggagtttggtcatggatgtttacagtgtgcctttggtgggataattctttatcctggtggatggcttaatgtctaagtgtccaacctgtgaccagatgtccctttcacaggaaacctgtttatattggcagatgcccttgtggttctcctctgacttgtgtccagtttattcttactctggtagccactctctaggagagctctgactgggaaagaagtcaggttcaggtgtgttggtcaggtgagacagaggaagcagcacaaaaaaaaacatagggagtaacagaagcagtgtgttccttacagatccatgaaagaagagggatgctgatgaaagacaagcagaagattgcagagggagggacaggaggagactggaggtgggggtgcttgggggagaggccaggcatcatcatgctcaaccagcaggtagcaagtgagagagaaagagagagagagacagacagagagacagagagagagacagggccctgtgaggagttctaattggtgggtttagagaaagtggacctgag

SEQ ID NO: 238055 - DNA, 1860 bp, Homo sapiens
tttataataaaatacctacatgttactttagaaaaaaataagccagtgaattctgatataggcaggtgagacttaatgaagtatgtgggttatcaactggaccttgaagtacggctaattatttggctaagtatagggaaactggaaaaacatttcagaccagagacccaggatttaaggcacagaggtgagaatgggcatgtttgttgatacagcagcaaagagattgaccttaggaaaccagtggtgcattaggggattaatgatgtagataaagactgagagtcaaggctgattttggagtgtcttaacagtctgaaacagaagtttagatttgatttctggttaaaaaaaatcagaagaatttgaaatctgttctttctacctccctttattcatttttttcctctttctcttctgtgtatttcccttcctaggaaaatacttcatacaaataaaacggaaagattaattttaccaccaaatacaagacaaattacaagtttactttttaaattttggctttctgcattcttttaaaactagaagctgttttccattaacagtgacagacagcagtgtaaccatgtgtgtttgctagaactaaagagacgtccctatctcagattgctgtggcataacccgtggcatttattcagagtgaggctgttttaagagaatgagcattaactgcaatgtagtcctacagagataactgaacagtctttttgctattgttcttacaggtgtcctacgcattattccttaccttctctggagaaattgattcaccagatttgtcagatttttaaatgtaatattttgttttatttgaaatcaaagctaaagaaatatgttctttgctctaagaacatattttagctatgtttagctaaatagctaaacacagtttaatcttttaatttaatggctactgacttgtgcttacataatctgaaagttcacattgtcaggctgcttttttccttctaatcaacaccagtaattttactctgcattctaatatattacctgtgttattatctttaaaatgcatccacgaatgatctgtttacatttaactttttcatccctttgattcttcatcataaccttaaaactttggttttaatgacaatcaaattcaaaccagaacgaatttaactctaagttcatattattagatatctttccttatttcagctatctctaccagcagagcttaagaaaatccgatttgacttgactagacttactaggacatatctttctgtaagatttccaggtcatcacacacagctcagcttctttttgactttctgaactttgccatgtatttgttgcaaagtatttccgtagttcaaccctgtactcataccttcctagtcagtgacattgccaaaggacaagtcttgcatagaattaaagtgatgggcagaatctttatgatatttttcaaagtgctttatgtaaaatattaggtaattgactagctttaggtcaaaccatgggtaaatatcaagcacatgattagaaaccagttcttggccaggtgtggtggctcacgcctgtaatcccagcactttggtgggctggggtaggcagatcacttgaggtcaggagttcgagaccagcctggccaacatggcgaaaccccatctctactaaaaataaaaaaaaaaaattagccaggtgtcatggcgcatgcctgtaatcccggctactcaggaggctgaagcaagagaatcgcttggatgcaggaagtggaggttgtggtgagctgagattgcaccattgcattccagcttgagcaacagagagagactccatctcaacagcaacaacaacaacaacaacaac

SEQ ID NO: 238056 - DNA, 440 bp, Homo sapiens
agcacaagtgaggaggtgtgcttgaaagagaaatggagtgtctggaagtgggtgagtatattctggtaggtgtgacaaaggcactgttcctccaacaccagtcctgggaaaggcatatgatatggtttggcgctgtgtccccagccaaatctcatgatgaattatgagcttcagtgttggaggaggggcctggtgggaggtgactggatcatgggggtgaatttcccccttgttgttctcgtgctagtgagttctgagatctggttgtttaaaagtgtgtggcactgccccttcactctctctcctgccgccatgtgaatatgtacttgcttcccctttgccttccccatgattgtaagtttcctgaggcctccccagccatgcctcttgtatagcctgcaaaactgagtcaattaaaccttgtttctttataaactatc

SEQ ID NO: 238057 - DNA, 128 bp, Homo sapiens
ttatggaggcttgggttgccctgatgggggtcagcaatgttagggctttcaggtacttagtggttattaattatattccttatataatagctgaggagattaaggattaaggaagagaaatgatttgc

SEQ ID NO: 238058 - DNA, 291 bp, Homo sapiens
cagcctgattttaataatgaaggaagaaaatcatagttaatctagggatgaaaccttacctcttttggtgcctagaagttaaactattaggctacattcacatgtaatattttagaacatatgttatcttttttactgtccagtggtcacattttcctactaagaaacattaaaatctgccaggcgcagtggctcacacctgtaatcccagcactttgggaggccgaggtgggcagatcatgaggtcaggagttcgagaccagcctgaccaacatggtgaaaccctgtttc

SEQ ID NO: 238059 - DNA, 404 bp, Homo sapiens
tgggattacattgtttgagattactaggatatgtggttcataagcactttcatgtatagtcaagttattgctacccgtctcagtgtagaagtggcttacaggaaccaccacccactgagataactcacctgacatcagagactaaagtgaaaggtcagagatctgtcacaataagaatgtgtgctgtgacatgaggcaccagaagtctgtggacagtgaagccaataaatccttttaacccctagatgtagaaaattataagcgtattactcagtctcatcaaagtctagtcaaaatggaagctctcttctttaggaatatacttattaaatatgcatatacaattatacatacatcatgaaataaaatgatctcttgcatatttgcacatgaaattaatagaa

SEQ ID NO: 238060 - DNA, 439 bp, Homo sapiens
cgatctgatcccatgtgccctaaaaggcagaaagcctcctcccactgatcgcaacataggatttcacagagatttgaagtatgagaaaatttgaagcagacatactcagtacgtgttgctgtttggaacctggaggagaccacatgagaaggagtgcaggcagcctctaggagccaagagtgacagctcacagcctgtgaggaagcatggatctcagtcctacagttgtaaagaaaaggaattctgccaacaacctcaatgagtttgaagcagattcttccttggtgccttcagataagagcccagccctgccaactccctaatttcaggcacgttaaaactctgagtagagaatccagccaaccctgtcccacactctactcccacttctgacctagagaactttgagctaataaacgggtgttgttttcagtcacta

SEQ ID NO: 238061 - DNA, 3170 bp, Homo sapiens
aaagtacatcctttttgtctccattttttccctttcttaaacaaagcaaacatttgtatactcacacactgaaggaaaaaagtgcaagtgttataagataattagaacggttaggataattgccttttatggatacataatgcttcagttgtttactgctaaatgaaatgtaaaagtatatattagactaaggaatagtgtacaaaatagatctaaatacaaaggaaattgtgttctgtctgaaaatttgtagatgggtctaaattaacaagaataaattaagaaggatatatacacactcatttatacccttgtgcgtatctcacatatgtgaacacacacaccaaatacactgaaatgtccatatttagtgccaaaaattgtgatgaaaaaccagtgggattatcctttgtaatagctcattctttaagttgcatttcaataaggcattgctgtgaatccagaggagattgtcaattacagaatttttttcatgatctagtatttgcttggtgcctcagagaaaatggttgttcatctctgcccctcactgttcatgtttgggactattgtttggctgcgccagtagagcttattctgataagctcaccaaatttcaggagtagcctcctttcaataactccacacttgtgcatgtggcttagtgaacttactggtgactcagtcatagcaagaaagggcatctcatgtctatgtgactacaaatatcagggaacagattctccatcaccaaccccaacctctaccctaacacaaaggtgtatgacaaaatgagacaaaatgaaacaaaattgctccacatgctacagtggcctactgttgactagaagccttactgataacagaaacagttgattgacacatatttttaaataaatataatatttctctagttaggttttctatttcattttattttaaagatgacaaaaactaaatatgcttctcaaacctctacctttttcaaattaagtgaagtcttcttctcatttaaagctgtttatactcaatttgaaatatgaaacatagcttcaaatccaacaaagagaatgttgctaactctggataacacttggggacttgagtccctgaaaggctgattgacaaccagattgacaactctgattgacaaccttgcttactttgatagggcttactatacttagtatgatagtttttaaattaatttagagcagaacctttccaagggatctgtgacaagaatggttaaatactgaagtgttgaagaaggaaataatttatcctgaactttgaaagtgtattattactaatgaatttaaagataagtgtagaattgatcatttatcatttttaaaccttttaaattagaattataatgaaaaatgcactccccatcccacacacacaaaccccaacaactctttaggtgcctacaggtaggaaaaattgcatttatctgaattaatcttggagtgaatactaaagttagttggaaaagctcctgaaatgtatgagacctcgaaatatcaattaacaaaaaatagtacctaaaatgtcttctaagaagtgtagtcttttaactaggatccttcttcctgtgtaaacactgaaatgaaattttggaatgaacctaaggtggtcctgaagtgctgtgttactagaaaaagatataattggtggaaagggtgggtggatacacaggaagaagcaagaacctgaactcctgctggctgatggaagaaaatgggtgatcaagtttttgcttctgaatatttgacataaacatcataattaacctcacctaaagaaaacttaaaaggccaggagtagtggctcacacctgtaattccagcactttgtgaggctgaggcgagtggatcacttgaggtcaggagttcgagaccagcctggccaacatggtgaaacctcgtctctactgaaaataaaaaagttagccaggtttggtggtgcatgcctgtaatcccagctactcgggagaccgaggcatgagagtcacttgaacctctcatggcggaggcggaggcggaggttgcagtgagccaagattgcatcactgcactccagcttgggtgacagagcaagagtctgtcaaaaaaaaaaaaaaaaaaagaaaaaaaaagaaaagaaaacacaagaaaaatatttgagagtcctcaaagctttgtataaacacattctttctggtacattcaaaaggaactgatttcagattggtgtagggcaaagcagaaagtaagtgtgtggtcacagaaatgaaaggacaagagagttgacaagagttacaaaagacagacaacagatcattaacattgctgttgatttaatttggtcactagaaatgcggcattcatttttaaaagaacgtctatctatccataccaataatctggagatgatcacactttccaagcagagagctgaagtgaaggcttgaggggatgcctctgcctctcttcattttctttcatctacatggctgaccaatattcacgcattaatagattttggtttctctctggttccaacatttacataatacagtaatagttataggaaagggtttgcatgttcattatataaacccataccgattttttttctacattcatctataaattacatacgagtggggtagctctatttcttgctaattcctgacagtatttattttaagcatgtctttaattcaaagggatcaaatatgttataaggaccacgtatttattatttcaggtgttttacacagtatatcacattttatccttaaacacatgcacatataggtatgacactttatacttgtatagtataaaaatattaggccaggcgtggtggctcatgcctgtagtcccagcactttgggagactgaggcaggcggatcacaaggtcaggagtttgggaccagcctgaccaacatggtgaaatatacaaaaatacaaaattatacaaaaaacatgcaaaaaatatacaaaaattttgtcctaaaaatacaaaaattagttgggtgcggtgacatgcacctgtaatcccacctactcaggaggctgaggcaagagaattgcttggacccgggaggcagaggttgcagtgagccgagatcgtgcaactgcactccaacctgggcaacagagtaagactccttctc

SEQ ID NO: 238062 - DNA, 378 bp, Homo sapiens
aatagagacgaggtttcaccatgttggcaaggctggtcttgaactcctggcctcaagtgatccacccgcctcggcctcgcgaagtgctgagatatcaggcctgagccaccacgcctggccctatgacaatgatctggtgctcccaaatgacccagagagacctctcagggattccccaccctcctaacccttctggtgttcacagggaagctggtctgagctctggccaatcttccatcggcctcgtcttctctcagatttccttttttgcttcccaatctgtcgcccagtctggagtacagtggtgtgatcaaggctcactgcaacttcaatctcccaggcccaagggatcgtcccacctcagccttgtgagtagct

SEQ ID NO: 238063 - DNA, 442 bp, Homo sapiens
ggaaactatactcaaaatgccaatgttataaaagacagagtgaaaagctgttgcagattagttgagattaaagagctatgataactaaaggcaatggatgatccttaccaagacttgtagtggttgagggaaagggtcataaaagacacattttgcggccgggcgcggtggctcatgcctgtaatctcagcactttgggaggttgaggtaggtggataatttgaggtcaggagttcgagaccagcctggccaacatagtgaaactccgtctttactaaaaatacaaaaattggccgggcagtagtggccatgtgcctgtagtcttagctactcaggaggctgaggcaggagaatcgcttgagcctgggaggcggaggttgtggggagccaagatcgcaccactgcactccagtctgggccaacagagaaagaccctgtctca

SEQ ID NO: 238064 - DNA, 487 bp, Homo sapiens
caaatgggagagaaaaacaggaaaagaaaccatgggagaaaaccagagcctgggcaaacgaacatgcaagtggagacatagtgttttctaggacaacaaaacactttagtttggctagagctaagagtgtggtaggtagacaaaattagaatcagattgtagaaggtcttggatgccaggttaatgattttgaactttatattttttattttcctttgttcaaatcccctgtgataagttgttttattttgtttagagtgggtatcaggcagatttctgggtgaggcccagaggagcatttttattcatccatccattcaacaagggactatgtcttatccaacttgtatccctagagtataacacaacatctgcatataagacagaaagtaagtgcttgttaaaattaagcattttggccgggtgtgagcccctgcgcccagctggcatcctgcttttgagcaggaggtggcccaggccgtagccc

SEQ ID NO: 238065 - DNA, 611 bp, Homo sapiens
caaatgggagagaaaaacaggaaaagaaaccatgggagaaaaccagagcctgggcaaacgaacatgcaagtggagacatagtgttttctaggacaacaaaacactttagtttggctagagctaagagtgtggtaggtagacaaaattagaatcagattgtagaaggtcttggatgccaggttaatgattttgaactttatattttttattttcctttgttcaaatcccctgtgataagttgttttattttgtttagagtgggtatcaggcagatttctgggtgaggcccagaggagcatttttattcatccatccattcaacaagggactatgtcttatccaacttgtatccctagagtataacacaacatctgcatataagacagaaagtcagtggattcaaaacgatgaaagtggattcaaaacctctgtcaaggggtgctgtcctttcctggccaagtctcttttattctcttagggctgcaacctcttcacctgggaaatgaatggtcctgtgatttacaagagcagggtccaggctgaaggtgcaggccctatccaagacacaacatttccagtggcagagataaaaaagtaagatttcagactca

SEQ ID NO: 238066 - DNA, 201 bp, Homo sapiens
acgtgataacaaacaaccccaaactctcagtgacttacaaaaagccaattgctttcttcatcacattacacatcacagctgtagattcactgcagctttgctctgtgtcttttcattccagggtccaggctgaaggtgcaggccctatccaagacacaacatttccagtggcagagataaaaaagtaagatttcagactca

SEQ ID NO: 238067 - DNA, 418 bp, Homo sapiens
ccccccgacgcccggagccgccctgactttccgggcgggggggcgaggcagagggggaggggaaggcggcggcggggagcggctgctttttcttctctttcgggccctttcccggccttgctccgcaccgacggggcccgagcacggctggagaccgcagcccggccgggagggcgggcgggcgggggcagagagtgaaaccgcccccccgccccgcacaaacaagcaccgccgtctgcagcccgaacccgcacccaggccgccacccccggccgcctctttccagccggggagcgcgcttcagccgccccccgcgccgccgcggcgagacgagtcggcttcgctacggtgctcggttctcccgccggctcggcgagcggtggcggcggtggcggcggcactgggaaaatggcggccg

SEQ ID NO: 238068 - DNA, 832 bp, Homo sapiens
aggtcaggtcataaaaggatatatagctggcttccttttggctctctctcactcttttacttgctctcttggaaagctcacctttggaacctagacgccatgttgtgaggaagctcaaactagcacacatggagaaaatctcatgctaccagcctgcaggcagcatcaggtggtcagacatgtgagtaggcagactttcaaatgattccaggccctagatttcacagagcagaaacaagccattggtactgttctgtggtgtgccatgccaaacccctaacctaccgactccatgaacatggattgtttatgcaactaagttttagagttatttattgtgcagatataataactagaacaactcttcaatttccaagttatgtactattgtcatatattttatctgtattgtgtgttttaattctgttgtcatgtactttaatgttctttaattctaagactttatatagtcagtgtttgtgtttatacatacacatatatataaaactttctttgcttttcattattttttgtatctaagacttactcctatgggctgaacgtttatgtcttcccaaaatttatgtgttgaaattctgatcttcaaggtgatgtaatttggagatggggcctttgaggggtgattaggtcatgggggcagagcccttataaaagaggctggagatctctcacccctaccatattaggacacagcaagaaggtgccatccttgagccggcatgtggaccctcacgagacactgcatgtaccagtgccttaatctgggacttcccaacccctaaaaataaatttttgtcacctataagccagt

SEQ ID NO: 238069 - DNA, 392 bp, Homo sapiens
atttcagtacttaaaatgttcttttaaaatataaatctggtattctcaatgccaacatatggaactgaatttaataacatctctactactgaataccttcttggtaatttgcccgtggaaatatttggaacacttcgtaaattaagcaatcaaagtgtttccaaatgaatcagtaagaaacataattttttcatattttgccaaaattttaaaacataaatttgtgcttataaaatgtttaattgtagcaataaaccctcagtaaatacaagactcaagtttgccaaagggtttcttctttcttcttcttttttaaatttttttcagttcattggaatcttcctcaagagataagagtttgtctttggcttatacaaaacaaaacaaacaaa

SEQ ID NO: 238070 - DNA, 481 bp, Homo sapiens
cctcccaccaggcccttcctctaacatgtggggattacagtttgagatgagatttgaatggggacacagagccacaccatatcagacccataagcatgtggttacagatgaaggcacagtagctgtgaccaataggataggaaagtggatggcttaagaacagctgatgaacactgccccatacaaagctgactctcagattgtctcccacattatagcattacagctggtgcccatctgacaagagggagaggtgtgtgaagaaagcaggatgttgagagcagcgtgagccaaacagcaggacctcgggtcatggtttccccaatagggttgaattgaggaaaagaaacaaggctttctcccagctaagaaaagcttttagttgcctactaatttctgtgctttggggtttctttgactttgttttccctttacacatggtgaaattccttttgaaaataaattcagccctgtcttaacc

SEQ ID NO: 238071 - DNA, 380 bp, Homo sapiens
agaaatggagtcacaggataatgtataagaggcaagaatgccagatgcaggatattactcatcatttgacaatcaataaagaataaattgtcatctatgtcaaaagaatgcttttattgatcaaccaatccttgtctgcaagttgagttacggataatgtcagtcactgctgttctattgccagacttcatgcctacctggctctatgaaacgtcggagaaagcaactcattcctctttacacaaatgatagaccgaatataggaaatgcaaagcctaacaagaatgggtggcagcactgggaatagcatattgtgtaatcttgtctagtagcctgtaggggaaatgaaaatgcatcatgacttgcagccacttacaaga

SEQ ID NO: 238072 - DNA, 394 bp, Homo sapiens
gttggtggctcagagaagctggtgcctggaaggagcgtggccagtgaggaggcacagcaggacttaagttgcttattatatgtattcccaaccgcttgttgaaactaaagtgaatcctcccttaaataacatatcaactagaacctcaggtcatctctatagtttttaaaacacaattttccatttcaaaaaactatgctgataaaaatataagaagtgactgataatcaagagaaaaaatcagacaatagaaacagacccacaagagatccaggtatggaagttatcagacacaaactataaaacagttgtgattaatatgttcgagaaattaaatgacaagatagtttcagcacagatgtggaactcataaaaaattgaagtgaatttatag

SEQ ID NO: 238073 - DNA, 603 bp, Homo sapiens
tgagagtagagaccacaacaagactttattataacccttgccctgcctgttctaagttctgtatcttaaatggcccatggtgagcaagatcagttaggtgacaagcaactggtctgtacatctcaatcttacttctattctttctcagtactgatttcagcagaagccagtggccctcctggaaatgctttttccttatgctttgggctaatttagaaaaggcagaagttatcaaaaagcatactgcagaaagcctgttttgttacctgcattttgttttacatagatatattgtattcttagtgggctttcaattctatccttgcagaaatagactattgtcacccaactactgtttccagccgagactccctgaagtgcctctggtttttgtcgttttcatcagcctccttttctgcttcctttattatttaccttgacttaaagcttcagacaagctaggacagattcaggcaaaatgctatgacaaacaggcaaaccagaatcaaggtacaggaggtttgtaggtagtcctgattgatgaattcattctcatcacatctttctttcacacccacttgatgtggataccaaagacttatt

SEQ ID NO: 238074 - DNA, 332 bp, Homo sapiens
gtagcctcctaccaaatgccacggagtgagtcactttggaagtagatcctccaaccttggtcaagcctttggctgactacaacttcatgagagacccagaggtaggaccacctagcttagccactcctggaatcctgactcagaaacagtgtaagatgaaaagtacttggtgtaagccactaagctttggggttatttgttacacagctataaataactaatatatagggtaaaaggaaaaacagtaaatgaatgtatgagttctttgtactgtttttgcaacttttctgtaagtttgaaattatttccaaataaaatgttaaaaagtaaat

SEQ ID NO: 238075 - DNA, 497 bp, Homo sapiens
cggctgcaggctggagagggctcgcagccgggctcggagctggggccgtctgacgggctggtgcccacagggtcgttgccgccacccaccggcaagtcgcagacccggcctgagcctccctggacccttcctggcctcttcctcctgtcctaggtaccgcggcgccaggagaaggcgaccgcgtccacaccccgccatgacagagaggggacctcaccctcccccggaacaccccaagacccctggaaatgcagtattaacgtagaaaagatgttttacttccatgttttggctaggaaggtaataaggtcgagacaaaataaaaagactcaaaactgacctttaatctggggataataatgaagtctgcgatatctcttccaaaaactgtgtttggtgtgagtgtaaacaaaggtgactattttacttctagggatctacaaatgggatgcatttcaaacacttcttgtaataaagcataacaattgccttgaaaa

SEQ ID NO: 238076 - DNA, 468 bp, Homo sapiens
gaatggtatttagagagtaaaccccgatagagagggtgtgtgtctggcacagagaagagcctgtgcaaaagctggtggggcgagaggacaccgtgtgttcatccacctgaggggcgaccagcaggctggagctcagcgggttgagaggaggatgcagagcccgggaaaggcaccctaggcagagggcacagaagtgcaaaggcctggagtcaggcctgagcctgtgtggtttgaggaacggacagaggcctgtccgtcaggaagggaatggcacaggggagagaccttaggccacagcagagggcagggcagagggcagggccgtgctgggcactgtgggctgtggatggtgctggcatttaagaggggagaccatagaccagggcagagggcagggccgtgctgggcactttgggctgtggatgggagctggcatttatgctcaggtgatgggaatgtgttaaaaga

SEQ ID NO: 238077 - DNA, 328 bp, Homo sapiens
gacatcatttgtgtctgggctattgacccaaaacctcaaagtgggtactgaagagcgacaattctcacccagttcctgacacctccggggcaggcaacactgcaatgtgggaacctaaggcaacaaacaggcatctctttagaggagcatgtcctttatcatgccaaagggggctggattttaggaggtcatcatgcagctcttcactgacattttacccatctagagaatattcttcactgacattttacccatctagagaatatttccttcctagattttgcttccctgtcatcttccttttaataaataactccatcctttgaat

SEQ ID NO: 238078 - DNA, 434 bp, Homo sapiens
tatactatctctggcaagctctctctccatgtgatacctcctaccatgtgatgacacatcaaaaagatcatcataaggtgtggccccccaatcttggacttcctagccttcagtaccattcagccaagtaaacttccattgcttataaattacccagtttgtggtattctcttatagcagcacaaaacagagtaaaactgattctcagtgaaaaatagatctatagatgcaaaacatcccttgacaatctatgggaagagtggttatttcttttttgattattgatgttcccagcaatctaggcacaatctctggtccaataaatatttgggactagtctactgcaagtcgatatctgttgaactatgctatgtctagcattcttgtaggctaaaatatcaccaatatcttttctttgtgtttccaatgacttg

SEQ ID NO: 238079 - DNA, 428 bp, Homo sapiens
tcttgaaaagatcataaaaactcactttaaggtgtatatgaggagttttgtctcccaggaaggtttgcattgtatctgtaatggtggagtctcaggcattgacttcccaggtgaaggaagggtgattttgggatgggggggccttcctgaaacctctgaagaaacagcacaccagcacctctgccagccagctgcatccaggatcaatgttccccctagttctggttcactcttttgaagctttccaagtcccagaagtgaattcttagcctttctttgagctctctttggtccaggcacagctgtaggaaaaattgtacagtggcatgaaaaaagtgaagggtttagtgtagtaaattctgcaaattttcttttaaaaaaaactgcattttaaaaaataaaaatactatgtcctattgtaaggtaaa

SEQ ID NO: 238080 - DNA, 2294 bp, Homo sapiens
ataaggtataaggaaggggtccagtttcaattatctgcatatggctagccagctctcccagcatcatttactaaatagaaaatcctttccccattgcttgtttttgtcagggttgttgaagatcagatggttttaggtgtgtggtcttatttctgagttctctattctgttccattggtctatgtgcatgtttttgtaccagtaccatgctgctttggttactgtagccttgtaatatagtttgaagtcaggtagggtgatgcctccagctttgttcttttttgctgaggattgccttggatattcaggctctttttggttccatatgaattttaaaatagtttttttcctaattctatgaagaatgtcaatagtagtttaatgggaatagcactgaatctataaattactttgggcagtatggccattttcacaatattgattcttcctatccatgagcatggaatgtttttccatttgtttgtgtcttctctgatttccttgagcagtggtttgtggttctcctcaaaaaggtcctttgcttcccttgttagttttattcctaggtattttattctctttgtagcaattatgaatgtgagtttattcatgatttggctctatgcttgcatgctgttggtgtataggaatgctagtgatttttgcacattgattttatatccccaggctttgctgaagttgcttatcagcttaagaagcttttgcactgagacaatggagttttctaggtacaggatcatgtcatctgcaaacaaagataatatgacttcctctctttctatttgaatatctttatttctttctcttgcctaattgccctggccagaacttccaatactatgttgaataggagtggtaaaagaggggatccttgtcttgtgctggttttcaaggggaatgcttccaggttttgcccattcagtatgatattggctgtgggtttgtcatatatggctcttattatttagaggtatgttccttcaatacccagtttatttagagtttttaacataaagggattttgaattttattgaaggccttttctgcatctattgagacaatcgtgtggtttttggctttagttctgtttacgtgatgaattacatttattgatttgcttatgttgaaccaaccttgcatcctggtgatgaagccaacttgatcatggtggataagctttttgatgtgctgctggattcggtttgccagtattttattgaggatttttgcattgatgttcatcagagatattggcccgaggttttatatttttgttgtatctctgccaggttttggtatcaggatgatgctggcctcataaaatgagttagggaggagttcctccttttcaattatttaaaatagtttcagtagaaatggtgttagctcttctttgtacctctggtagaattcaactgtaaatccatccagtcccaggcttttttttgtaggctatttattactgcctcaatttcagaactcatttttggtctattcagggattcagttttttcctggttcagtctttggagggtgtatgagtccaggaatttacacatttcttctagcttatgtgcacagaggtgtttatagtagtctctgatggttgtttgtatttctgtggggtcagtggtgatatcccccttatcatttctgattttgtctatttgatacttctttcctttcttccttattagtctagatagtagtctcttttattaattttttcaaaaagccaacccctggattcattgatttattgaaggttttttcgttctgtatctccttcagttccactctgatcttggttatttcttgtcttctgccagctttggggtttgtttgcttttggttctctagttcttttaattgtgatgttaggttgttgattcaagatgtttccagcttttatcagccaggggaactcttgtacactgttgatggaaacgcatactggtgcagccattatagaaaatagtatggagatttcggctgggtgcagtggctcacacctgtaatcccagcactttgggaggctggggcaggaggatcacctgaggtcaggagtttgagaccagcctggccaacatggtgaaaccccgtccctactaaaaatacaaaaattggctaggtgtggtggcacttgactgtaatcctagctactgaagaggctgaggcaggagaatcatttgaacctggaaggtagaggttgcagtgggccgaaatggcaccactgcactccagcctggatgacagagtgagactgtcaaat

SEQ ID NO: 238081 - DNA, 415 bp, Homo sapiens
atttcaggaaaaataacccagaataacaataattagaaggatcttgggaaccactgatctacaaagatttcagaaattacttattttaatttgaccaactgaccctgttcttagttaccagagggaaaatgtttcagagtcggatttatggaataaatttttgaactatacctaatgttggcttttttattgtaaaccacttgataggagatgtgcagtacacaactttcttattttgctatttattaaaaagtttttttaaatacagaaacgtctctagtttagtggcattaaaaccatcgtttttttttttttaattaaaaaaaattggctctctttaatcatgggaaaagctgtttttgtggccttcaataacattagttgcctgaatttttcttatgtttctcagtcatta

SEQ ID NO: 238082 - DNA, 168 bp, Homo sapiens
tagcccccattcaccactctggttttctctttctttatttttggtccctggagatttcccttacttttttgcaagttcagtgaagcatctgagaggatgtttggtatatattgtccaacatttctagatgttttgtagtggaaagattttcagattcaaaatgagggt

SEQ ID NO: 238083 - DNA, 403 bp, Homo sapiens
cagagtctagtgtctgtcatttaaaatgcaagaatgagacacctgtattttaaattaattgtgtagttattgagacataaaatgtttcatgggcatttttttgtgtaattactgaaagctccatgtgcgctttttagagtaattactgagaggccaacaattcgtttttgttacttgtattttaatatttaaatttttaaattttaaatcattttcattaggattctttctcaaagtttctgaaaaccctaatgtctgcttagaggcttccgtatttttgttgttgttgctatttaaaatgaaatgctatagattttggacaatgtattgtgaagaaaatggctcccaaatataagtaaagcacgggtaaacgtggaggaatacaacgaagcactaagacaaa

SEQ ID NO: 238084 - DNA, 172 bp, Homo sapiens
tcgttagagtattgtgtagtttgttccccaatcttcaaaaaataagaaggttattgagctggaaagaattcagaatcaagcagcaatgataattaactttattgtgtaggatctactttccttcctgttaaattgaatcaaggctagaaaaggaatggcttgagcacctgat

SEQ ID NO: 238085 - DNA, 1318 bp, Homo sapiens
  misc_feature (1315)..(1317): n is a, c, g, or t
tccggcagttttacttccgttgtttaacagctggcccggaagtttaagtgaatatgcggcttgggctccaaaagttgctgtacggtattttattttaaagtagaaatctgtccgcttttcacttacggaggccttacagtgtgtgttctgtgttacttgagtttatacgcactgcagaatttgtttatcctgctcttttggaaacgtattccggaagcgaaaccctgagtaatcggaagtggttaggagtgagagagctgctggatatgcggagggactgggcgggtcggcttccgaatggaagaggtctgtgagaagttaacctggtgataccgatccgaagagcctatcaagtgaagccccctgaaatacggagaataagaatcttagaggttgttcagcagaagtcttggagtgcattttcagtggttaaggtgaaaaaatgactactaaaaatttagaaaccaaagtcaccgttacttcatccccaatccgaggagcaggagatggaatggaaactgaggaaccacctaaatctgttgaagttacctccggagtccaatctagaaagcatcatagtcttcagagtccatggaagaaagcagttccatcagagagcccaggagttcttcagctagggaaaatgctcactgaaaaagcaatggaagttaaagctgtaagaatattagttcccaaagctgctataactcatgatatccccaacaaaaatacaaaggttaagtctctgggacatcataaaggagaattccttggtcagtcagagggagttatagaacctaataaggaactctcagaggtaaagaatgtattggaaaagctcaagaattctgaaagaaggttactacaggacaaagaaggtctttcaaaccagctccgtgtacagacagaggtaagaagagccttaatcgataaaatgagtactactctttacgtctggaccttttaaacgtgcatgttagaaaactacatttctttatgggaatgtcattcatcctagcttgtcagttctctaaaatgcttcctcttaaatttctcattctttctcagttctctagggatactttatattgggaacttatactctaaacctcattgaagatggaggtgtgaggtgctttggacaagaccaccaataagttgtaaaagtaggttacaattataaactgccagaccaaagattgaccaagtcaggcatagtaattgaccagcagtccttgttttaaggatccgtaaattccaagtagttttgcttgtgtatacgggatacttggaataaagagaatggcgatataannna

SEQ ID NO: 238086 - DNA, 2169 bp, Homo sapiens
tccggcagttttacttccgttgtttaacagctggcccggaagtttaagtgaatatgcggcttgggctccaaaagttgctgtacggtattttattttaaagtagaaatctgtccgcttttcacttacggaggccttacagtgtgtgttctgtgttacttgagtttatacgcactgcagaatttgtttatcctgctcttttggaaacgtattccggaagcgaaaccctgagtaatcggaagtggttaggagtgagagagctgctggatatgcggagggactgggcgggtcggcttccgaatggaagaggtctgtgagaagttaacctggtgataccgatccgaagagcctatcaagtgaagccccctgaaatacggagaataagaatcttagaggttgttcagcagaagtcttggagtgcattttcagtggttaaggtgaaaaaatgactactaaaaatttagaaaccaaagtcaccgttacttcatccccaatccgaggagcaggagatggaatggaaactgaggaaccacctaaatctgttgaagttacctccggagtccaatctagaaagcatcatagtcttcagagtccatggaagaaagcagttccatcagagagcccaggagttcttcagctagggaaaatgctcactgaaaaagcaatggaagttaaagctgtaagaatattagttcccaaagctgctataactcatgatatccccaacaaaaatacaaaggttaagtctctgggacatcataaaggagaattccttggtcagtcagagggagttatagaacctaataaggaactctcagaggtaaagaatgtattggaaaagctcaagaattctgaaagaaggttactacaggacaaagaaggtctttcaaaccagctccgtgtacagacagaggtaaatcgtgagttaaaaaagttactggtggcttctgttggggatgatcttcagtatcactttgaacgtctagcccgtgagaaaaatcagcttattttagaaaatgaagccctaggtcgaaacacagctcagctttctgaacagttagaacgtatgtcaatacagtgtgatgtatggcgaagtaaattccttgcaagcagggtaatggcagatgagttaaccaactcaagagcagctttacagcgtcaaaaccgtgatgcacacggggctatacaagatctcctaagtgaacgggaacagtttcgtcaagaaatgatagctacccagaaattattggaggagctcttagtttccttgcaatggggaagagagcaaacttactcccctagtgtacaaccccacagcacagcagagctagcattaacaaatcacaagttggcaaaagcagtaaattctcatcttctgggaaatgttggcattaacaatcaaaaaaagattccatcaacagttgaattctgcagcaccccagctgagaaaatggctgaaacggttctaagaattttagatccagttacctgcaaagagagttcacctgataatccattttttgagtcttcaccaaccaccttacttgctacaaagaaaaatattggacgatttcatccctatactagatatgaaaatataactttcaattgctgcaatcactgccggggagaactgattgccctttaacagtcaatatgttggaggcatgctaagaataaacaactaaataactgtattagaaaaaaaagaaacttactaaatatcataatctgatgatatgtggtcctgaattggctactagtttaagcaaataaactgtaagtcatttatgggttagttggggaataaatggatatgggctggatattcggtaatatcattaatgaaaagcagattgcagaaatacagtatgatctcagtattttgaaattgtaaatacatgtacagacaaatacttagacagtatgcatactggtgttaacagtcacaatttctgggtgatgaaaatgtaacttgaaaccgctccatttctacaatgcacatttactgtttctgttataataaaagggtatgttagaaaaacaaaaaggaggctgggcatggtggctcatgcctctaatctcagcactttgggaggccaaggtgggcggatcacttgaggtctggagtttgagaccagcctgagcaacatggtgagaccccatctctac

SEQ ID NO: 238087 - DNA, 203 bp, Homo sapiens
aaggaagtaagttgtcttttcaatcagattagtcattctgtttttttagtaatagttatatattaatgaagtgaaactttataggtaggtatacatcaatgaaatcttaggcttttaccatctatattgcatacttctgacattatatcttattttccttaggttctaagaattttagatccagttacctgcaaagagagttc

SEQ ID NO: 238088 - DNA, 309 bp, Homo sapiens
gttgttcagcagaagtcttggagtgcattttcagtggttaaggtgaaaaaatgactactaaaaatttagaaaccaaaggtaagtggcttttttataattgtttttaaaacatgacatttatgacgatgtgaaggaacgtttgagccagataactagatctcatggacccccttgggaatcatttgttatttcagatccctttatgtttattttttagtgcagtgtttatatttcagtactttagatgtacaagtgaaatttaacatcattagttagaatttattaggtgactactcttaaacatttaat

SEQ ID NO: 238089 - DNA, 2768 bp, Homo sapiens
tccggcagttttacttccgttgtttaacagctggcccggaagtttaagtgaatatgcggcttgggctccaaaagttgctgtacggtattttattttaaagtagaaatctgtccgcttttcacttacggaggccttacagtgtgtgttctgtgttacttgagtttatacgcactgcagaatttgtttatcctgctcttttggaaacgtattccggaagcgaaaccctgagtaatcggaagtggttaggagtgagagagctgctggatatgcggagggactgggcgggtcggcttccgaatggaagaggtctgtgagaagttaacctggtgataccgatccgaagagcctatcaagtgaagccccctgaaatacggagaataagaatcttagaggttgttcagcagaagtcttggagtgcattttcagtggttaaggtgaaaaaatgactactaaaaatttagaaaccaaagtcaccgttacttcatccccaatccgaggagcaggagatggaatggaaactgaggaaccacctaaatctgttgaagttacctccggagtccaatctagaaagcatcatagtcttcagagtccatggaagaaagcagttccatcagagagcccaggagttcttcagctagggaaaatgctcactgaaaaagcaatggaagttaaagctgtaagaatattagttcccaaagctgctataactcatgatatccccaacaaaaatacaaaggttaagtctctgggacatcataaaggagaattccttggtcagtcagagggagttatagaacctaataaggaactctcagaggtaaagaatgtattggaaaagctcaagaattctgaaagaaggttactacaggacaaagaaggtctttcaaaccagctccgtgtacagacagaggtaaatcgtgagttaaaaaagttactggtggcttctgttggggatgatcttcagtatcactttgaacgtctagcccgtgagaaaaatcagcttattttagaaaatgaagccctaggtcgaaacacagctcagctttctgaacagttagaacgtatgtcaatacagtgtgatgtatggcgaagtaaattccttgcaagcagggtaatggcagatgagttaaccaactcaagagcagctttacagcgtcaaaaccgtgatgcacacggggctatacaagatctcctaagtgaacgggaacagtttcgtcaagaaatgatagctacccagaaattattggaggagctcttagtttccttgcaatggggaagagagcaaacttactcccctagtgtacaaccccacagcacagcagagctagcattaacaaatcacaagttggcaaaagcagtaaattctcatcttctgggaaatgttggcattaacaatcaaaaaaagattccatcaacagttgaattctgcagcaccccagctgagaaaatggctgaaacggttctaagaattttagatccagttacctgcaaagagagttcacctgataatccattttttgagtcttcaccaaccaccttacttgctacaaagaaaaatattggacgatttcatccctatactagatatgaaaatataactttcaattgctgcaatcactgccggggagaactgattgccctttaacagtcaatatgttggaggcatgctaaggtacttccttattacccaagagtcattattatttgggagctggggttcttacaatgctagaaataatatcacttcctatttacataatgtatacacccaaagatattttatgtactagactccagattaccctttcttaataaatatctcagggtaaggaaagaaagaaactgtatagatatatttaaaatagagaatactttccaagcaatacatgatacttttcctaaaagactctaaaagaaaaagattctgtaactctcttttagcaccaaattattgtttatcttgctggatattttatatgaacagtgttaatttagatgcactaaagcaaaggtaggcaaactacaaccatgagtcaaacatggccacacccattcatttgctattgtctaagctggttttgcactacaactgcagagttgaatagatgcagcagatcctttacagaaaaagttttctgacctcaattctaaagtaattgtagtagggagctggaggactttctttccctttatggtaattttttgagctacaaaagagccttgcagaaatgggtgaagggattaatcttttaaaaataaatgctatatattaggaaaataaaaaatattttagagccaagttaacaagtacttcagcaaaacatgctagttttatgcaggggattctgtattccaaatggatacaatccgacatatataaaagaaacagattcttaactattgactcttatttagcaaatgcaacagacaagaatatccaacttgatatttataaaaggtagactttttccaaaagtgtataagctcaaagaaaaaatgcaacctgtcaattaatatatactatgtaatatatattattgtgtatttatgattagccatcataaatgcccattgcttggcctttaagaataatcacaaaatatttatattaaattatacaaatttgttgcagaagtgcctgtgagagaaatcttcaaaagacaaacctggtcaaataataataattttaatgtcaatgattttttttgtctgactcatctgagttatatttagttttcaagtggcaataaatttatctaccttcttta

SEQ ID NO: 238090 - DNA, 2857 bp, Homo sapiens
tccggcagttttacttccgttgtttaacagctggcccggaagtttaagtgaatatgcggcttgggctccaaaagttgctgtacggtattttattttaaagtagaaatctgtccgcttttcacttacggaggccttacagtgtgtgttctgtgttacttgagtttatacgcactgcagaatttgtttatcctgctcttttggaaacgtattccggaagcgaaaccctgagtaatcggaagtggttaggagtgagagagctgctggatatgcggagggactgggcgggtcggcttccgaatggaagaggtctgtgagaagttaacctggtgataccgatccgaagagcctatcaagtgaagccccctgaaatacggagaataagaatcttagaggttgttcagcagaagtcttggagtgcattttcagtggttaaggtgaaaaaatgactactaaaaatttagaaaccaaagtcaccgttacttcatccccaatccgaggagcaggagatggaatggaaactgaggaaccacctaaatctgttgaagttacctccggagtccaatctagaaagcatcatagtcttcagagtccatggaagaaagcagttccatcagagagcccaggagttcttcagctagggaaaatgctcactgaaaaagcaatggaagttaaagctgtaagaatattagttcccaaagctgctataactcatgatatccccaacaaaaatacaaaggttaagtctctgggacatcataaaggagaattccttggtcagtcagagggagttatagaacctaataaggaactctcagaggtaaagaatgtattggaaaagctcaagaattctgaaagaaggttactacaggacaaagaaggtctttcaaaccagctccgtgtacagacagaggtaaatcgtgagttaaaaaagttactggtggcttctgttggggatgatcttcagtatcactttgaacgtctagcccgtgagaaaaatcagcttattttagaaaatgaagccctaggtcgaaacacagctcagctttctgaacagttagaacgtatgtcaatacagtgtgatgtatggcgaagtaaattccttgcaagcagggtaatggcagatgagttaaccaactcaagagcagctttacagcgtcaaaaccgtgatgcacacggggctatacaagatctcctaagtgaacgggaacagtttcgtcaagaaatgatagctacccagaaattattggaggagctcttagtttccttgcaatggggaagagagcaaacttactcccctagtgtacaaccccacagcacagcagagctagcattaacaaatcacaagttggcaaaagcagtaaattctcatcttctgggaaatgttggcattaacaatcaaaaaaagattccatcaacagttgaattctgcagcaccccagctgagaaaatggctgaaacggttctaagaattttagatccagttacctgcaaagagagttcacctgataatccattttttgagtcttcaccaaccaccttacttgctacaaagaaaaatattggacgatttcatccctatactagatatgaaaatataactttcaattgctgcaatcactgccggggagaactgattgccctttaacagtcaatatgttggaggcatgctaaggtacttccttattacccaagagtcattattatttgggagctggggttcttacaatgctagaaataatatcacttcctatttacataatgtatacacccaaagatattttatgtactagactccagattaccctttcttaataaatatctcagggtaaggaaagaaagaaactgtatagatatatttaaaatagagaatactttccaagcaatacatgatacttttcctaaaagactctaaaagaaaaagattctgtaactctcttttagcaccaaattattgtttatcttgctggatattttatatgaacagtgttaatttagatgcactaaagcaaaggtaggcaaactacaaccatgagtcaaacatggccacacccattcatttgctattgtctaagctggttttgcactacaactgcagagttgaatagatgcagcagatcctttacagaaaaagttttctgacctcaattctaaagtaattgtagtagggagctggaggactttctttccctttatggtaattttttgagctacaaaagagccttgcagaaatgggtgaagggattaatcttttaaaaataaatgctatatattaggaaaataaaaaatattttagagccaagttaacaagtacttcagcaaaacatgctagttttatgcaggggattctgtattccaaatggatacaatccgacatatataaaagaaacagattcttaactattgactcttatttagcaaatgcaacagacaagaatatccaacttgatatttataaaaggtagactttttccaaaagtgtataagctcaaagaaaaaatgcaacctgtcaattaatatatactatgtaatatatattattgtgtatttatgattagccatcataaatgcccattgcttggcctttaagaataatcacaaaatatttatattaaattatacaaatttgttgcagaagtgcctgtgagagaaatcttcaaaagacaaacctggtcaaataataataattttaatgtcaatgattttttttgtctgactcatctgagttatatttagttttcaagtggcaataaatttatctaccttctttattgcgactattccttttttcccccagaattagtgctttggtttaggtctttgtctagcttaactacttccaattgattcttcagccttt

SEQ ID NO: 238091 - DNA, 1853 bp, Homo sapiens
tccggcagttttacttccgttgtttaacagctggcccggaagtttaagtgaatatgcggcttgggctccaaaagttgctgtacggtattttattttaaagtagaaatctgtccgcttttcacttacggaggccttacagtgtgtgttctgtgttacttgagtttatacgcactgcagaatttgtttatcctgctcttttggaaacgtattccggaagcgaaaccctgagtaatcggaagtggttaggagtgagagagctgctggatatgcggagggactgggcgggtcggcttccgaatggaagaggtctgtgagaagttaacctggtgataccgatccgaagagcctatcaagtgaagccccctgaaatacggagaataagaatcttagaggttgttcagcagaagtcttggagtgcattttcagtggttaaggtgaaaaaatgactactaaaaatttagaaaccaaagtcaccgttacttcatccccaatccgaggagcaggagatggaatggaaactgaggaaccacctaaatctgttgaagttacctccggagtccaatctagaaagcatcatagtcttcagagtccatggaagaaagcagttccatcagagagcccaggagttcttcagctagggaaaatgctcactgaaaaagcaatggaagttaaagctgtaagaatattagttcccaaagctgctataactcatgatatccccaacaaaaatacaaaggttaagtctctgggacatcataaaggagaattccttggtcagtcagagggagttatagaacctaataaggaactctcagaggtaaagaatgtattggaaaagctcaagaattctgaaagaaggttactacaggacaaagaaggtctttcaaaccagctccgtgtacagacagaggtaaatcgtgagttaaaaaagttactggtggcttctgttggggatgatcttcagtatcactttgaacgtctagcccgtgagaaaaatcagcttattttagaaaatgaagccctaggtcgaaacacagctcagctttctgaacagttagaacgtatgtcaatacagtgtgatgtatggcgaagtaaattccttgcaagcagggtaatggcagatgagttaaccaactcaagagcagctttacagcgtcaaaaccgtgatgcacacggggctatacaagatctcctaagtgaacgggaacagtttcgtcaagaaatgatagctacccagaaattattggaggagctcttagtttccttgcaatggggaagagagcaaacttactcccctagtgtacaaccccacagcacagcagagctagcattaacaaatcacaagttggcaaaagcagtaaattctcatcttctgggaaatgttggcattaacaatcaaaaaaagattccatcaacagttgaattctgcagcaccccagctgagaaaatggctgaaacggttctaagaattttagatccagttacctgcaaagagagttcacctgataatccattttttgagtcttcaccaaccaccttacttgctacaaagaaaaatattggacgatttcatccctatactagatatgaaaatataactttcaattgctgcaatcactgccggggagaactgattgccctttaacagtcaatatgttggaggcatgctaaggtttacttactataaaagtctcagaagaaagcataaggggaaagcttcgtgacattgtatttggcaatgatttcttgaatatgacaacagaagcacaggcaacaaaagaaaaaatagataaattgaatttcatcaaaatttcaaatttttgtgcattaaaagatgcagtgaaaaggcaaca

SEQ ID NO: 238092 - DNA, 323 bp, Homo sapiens
tgtgagtgtcttgagacatagactttatgccagcatagtgcctggcacataatagacacttaataaaggtttattgaatgaaagcaccgcacagtgagcatattcgtgcttatagctttttctgtcttttggactatgtccttaggataatttcccagaatagagatttctatgccaaagtgacgtgaacatgtttatgaatcttaatacatcatgccaagtagctttttgtctacttgaggtgccttccaagtttgtgactctcatattgcatggtacattattgctagaatgtcagtcttgtgttccctattttctctacc

SEQ ID NO: 238093 - DNA, 279 bp, Homo sapiens
ctctacaaaaaaaaaaaaaatgctagaggctgaggtgggaggcccggagttcgagatcaccatgagcaacatagtgagacactatctctatagaaaatttaaaaatttaaaatttaaaaattataggcacatgccgggtgtggtggcacatgcctgtattcccaactactcaggaggctgaggcagaagaatggcttgagcccaggaggtcaaggctgcagtgagctatgattgcaccactgcatttcagcctgggcaacagaatgagaccccatctct

SEQ ID NO: 238094 - DNA, 410 bp, Homo sapiens
taataataataataatagtaactaaatgtaatacaataatgaaatactgtcttcagcctttagtatcatgggagtataataatagatactatttattgaagatgtatgatgtgccagaaagtgacttgggcaattggggaacattattgcctttctacttagatttacaactctgtcaaggtagggggaaataagtgcctttaacagataagaaaattgaggctcaaaagttacccagcaaataagcaacagaaaaaggattcattccagatcattctgcctccatatattggctttttgcactgtagcagcttataaaactctgggagacaagaccatacacccacctgttaaatgacaattaaacacagcatgtcattaaacagcagtgcagacagcagagaccaaaa

SEQ ID NO: 238095 - DNA, 531 bp, Homo sapiens
atccttttgtaaacaagaacattcatctttcttttgactgacatgcctggtagggcatgtgcctctcagaagctccatgtcatctgatctcatttgggatttagtgtttttatttgaaaatgtagctgccctgaggaacagcagttaggagccaacccccagtttaagcttcaagtcatggaaactggcctggtttacccagacgtcagtgatgcctgggaaagctcttgcttttccagtgcccactgagcagagatttaatttactcaatcggtacgtgtctgttaagcacattgctgtatgccaaacactttgggcataaaaggtatataggccttgccttcaaggattgtccaggctaactggggcaatgcaacatgcatggaccaaaagacagctaagtacctgtcccatgtggaattgggggagcagatgtgggccctggagacaggacagggagagctttggggagatctagccaggaaggagaacttcactgcacctctgggatttgatcagggaggatgaaga

SEQ ID NO: 238096 - DNA, 381 bp, Homo sapiens
ctaataggtgtggggtttcttttgcagcgtggtgaaaatgttctggaattagatagtggtgatggtttcacaacctcgtgaatatattaaaaaccactgagctgtatactttgaaaataatttttaaataaacagataaaataaatattaggaaagtcaatttaaaaacagaaataagctgggtgcagtgattcacacctataatcccagcaacttgggaggctgaggcgggaggatcacttgagctcaggagttcaaggctacaatgagctacgatcacgccactgcactccagtctagttgacagagcaagatcctgtctcttaaaacaaaaacaaaaaccagatgaaattactgcaaatttgattttgccacagtacc

SEQ ID NO: 238097 - DNA, 460 bp, Homo sapiens
gcttcctaggagcatatgcaaaatgtgcggccagctgcccctgcagcctcacccaaggccacttctcttttacatgctgcacctgtgggtatttgcatgtttggccagctcgcaagccagttctgaggctgagaacatcctagtctctcaaacgggattccttgttcccttgggaaccagctcctccctcccctcccaccctagaggcaaagccttgctttctgcatttctgccctgtgggtgggtgccatggaggggagcagcctcgcagaggaggcctaaagttttgagcggagtaaaggacagcgacaccttacttgcgcctttgagaagggaaacaaccagctcaggagccgcagtccggtctggtctgccagctcctgtttccccctcctcttggctgctggccttttgttcttgtcatggctcattagctccctaaacagaggttgattaaaga

SEQ ID NO: 238098 - DNA, 350 bp, Homo sapiens
gcgatctttgtggagggatcgggaccaggggaaggggcgacttggaactgagctggaagggggtgcctgaaaatgggtttatggcgtggagccagagggaaaaagatgctgcctggaccccctctgagagtctctcccttccttcctgtttggaaatgattgttacccgagactttgatgacggtcccattcagtttttaaacttcaggagggatcacagaatcttgatcgtcttgcttccctcgcgcccacttagtcctgcgtgggtagggtttccacttcttgggagcctagcccttcagctcatttttctttgagattttccctgaacgggccatcatcgaggcttt

SEQ ID NO: 238099 - DNA, 490 bp, Homo sapiens
gcatctcatattttcctcaaatagaagtttagggatacttccatgtatcagtgtttacatgtccctcatggtcaaacattttcatttttcattgaaaaactaaattttgattttagtcataattttggagatggaatgtctcccactttgtcatattttccatgggaccatgctgtattgatcaatctagcaaagccaatatgctactatgagcattaaaacaacaaaaaagaacctccaatgcctgcattgtaaagaaagctatacttgttatcttctaaacatgctgtaataaaaccagtgtaaacacactttttcatctagaatttgaaactagttttcctaaacaatacccatacccttgccctttaatcatgaaatggtgactagattgttttacaagctgttacttattaagaaatgtcgtagccctctaggcaatgtgttactcacagaactttgataatacattcttggcttgactccatca

SEQ ID NO: 238100 - DNA, 701 bp, Homo sapiens
gatggagcactcccaagtgaagagataggagagaaaggaagtagctggtgagatagggtagaaaacaagaaagcgttagtgtgctggaagccaagggggagatgtggatccagcatggagtgataaaatttgtaacaaatttctgatactccaagtaaattaggacttgcaattaacaattcgattttgtggagatgaatgatgaccttttcatgtacagtttagtagactagtggggtgtgccgggagggacggaaagtcctgactagggtgggttgagaagagcaagaagtgcctgacatctgggaactaatctaacacaagtaagcctcaatgctattacagattgatatgacgctttcggcaaactatgcttttcttctgtttttcacataacatacacttcagacaagttggttactgtccaactcaaaacaccaaacctccctcttgctaaacgagtgacttactttatcagtttcacctttatccctcctttagtctgccatccttatagataagatttcagatcctagaattgccctggttttctgagagcacccaattcagaacccctacttacttagaccctcccccaaattacccaacaaaagccaagatcctataatcaccatcttactgaatcaccccacacttctcccttgttgccatgagtaataaactaaacgtatttgacaaca

SEQ ID NO: 238101 - DNA, 301 bp, Homo sapiens
gtttgtgggatgaaaaggctagtcttggcttaaacaaaaacagctttgccacacgctacacattacatattccaaagctaacatttgaacttcaagttatccatggcactgctctcctccatttggacaatcacaattcaataatctgtagctattttactagtcttcaatgtatgccctcaaaaatttgaagaaggaaatacagaggttaactatagattattaatatttaataatagcaataactaagactgaaacctcaatatgtgcaggcaatgccatgcaattttcataacatctc

SEQ ID NO: 238102 - DNA, 170 bp, Homo sapiens
agggcctccttaaattgtattaggtttcaggccttttaaaagttgcataactggccgggcgcggtggttcacacctgtaatctcagcactttgggaggccaaggcaggcaaatcacgaggtcaggagatcgagaccatcctggataacatggtgaaaccccgtctctatt

SEQ ID NO: 238103 - DNA, 454 bp, Homo sapiens
agtggttgttgtttctgttcttctctctaataagtgtatacaggtggctaaatgcttttgttgagctatgagtacctcattctgtggagtgactcagaaagtctctaggtgttagactggaaacaggtgatgttcagtgcacgcaatgcttgaagtgttcccaggtatttagtttcaggtaaattttactgtttaaaaaaattgtttttacttgctattaagtgtgttgaccttggataatttacttaacctctctatgccttgcttccttttctgcaaaatgagagtaagaaaagtgcttacctcattggctttttgtgaaattcaatgagttaacacgtgggagaaaagatgtttttaaataatcaattcttagcagttggtcattgttatgagttacatcatgcgtagttaaatattttttaaaaaattaaaatttattttcctataggaa

SEQ ID NO: 238104 - DNA, 577 bp, Homo sapiens
ggcttgtctatggatcttttcagatcttgccaaacattagtaactcctcactctaatattcttacaatccctgctgtatttttaataatttattaactcttcaaagtcctttcacatacttttatcttgtgctgctcccagtgagcctctgaaatagatagggcatctgtcattttacagatgaaaaattggggcctggaaagtcttaacaactggctgagtcactaataaggggcagagctgggatgcatatttagtgtgcctgtatccaggcagaatagtattattatgatggaaggatatcatgcttcagggtcagatagcacaagtgtcaaattctaattcaactacttagctggttacataccctcatcaattaattaacctccacgagcctcagctaactcatatctgctctaatggagttcatggcacatagtatacatttcaggaatatttcttccctacccactatttatcatttacccactctcttacgttcataaatcagctatgtgactgattctagcagatactgtggaataattttttttaacccagaatacagactgtggga

SEQ ID NO: 238105 - DNA, 2042 bp, Homo sapiens
  misc_feature (675)..(675): n is a, c, g, or t
  misc_feature (1678)..(1678): n is a, c, g, or t
caaactggaatatatgagtacacataagtgaaaagagataatgcaagtttaaagtacagtttgatttaaagtttcctagattattagggtttcattttcctgtgtttcccttgaccctgtcttcctggctaacttagattaatgccttcatgatatcaaaatgatttccacagttccagcacaagtttcttcactgatatcttgatgaaaagaaaaaatgtctctttcttttacaagcagacaaaagctccacacttcctctcactggatcagtgaaagactggtgcccattcctaaaccaatcactgatgcaaaagagatatgagtgtcatgattggctcagactttatggctggaaagttcaagtccttgcaggatggtgaaaagaataacagatactttggaggccactgacaactctcctgttagactaggctcctaatggtcatgcgtttcctgccatattcatctacgggttcccaacatgtagcacagtgtttgatacccacatagtagataatcaacacacatctgcttagctgatgagaattgagcctgcctggaactgaaaatcacattctatatccacgcttccctctccactttagctctgaagtgctaccaccatgctgcctacctcctgcagctgcttctcaaccttcttgtaaatgaatncttctgcctaaaatgggtttccatttgtcttagactaggttacattttctcaatcaaaattcaacttaacccctccccttccaatcccagaaagatctgcctgtttagaggtactctgagacttcccttacaactggaaaattctgtgataaatgcaagaagctgtcaccagaaatgatggaaacatcaaaagagaatgttttgccagttagtccctttttattaaatattccctgaaggcagctactatgtatcttttgattattcctataaaagaaagagtataaccaagtagaaagagactagactttggaaacaggtctgggtcaaattctggtaccactacttcttcactctatgaaatgttgcccaaatgatttaatctctctgagctcagattcctcctgtataaacgggaataataatctccacctcccagggttataagagttacataaaatgaaccgtgtaacgtggctgggacagtttatggccaaattgttacactcccttcctccccttgcggcatccagactatattaccggtaggcctaatgtttttggttccataattcccatcttcaggtgatctaggctgttgaataagttcactgttgctggagaagctcttctgaaaactgctctgacctcagtgtctaatcacagaaactcgaggcttcttagtaaactttgatatcttgtctccaaaaaacataattatctgcctaccttggcatgccctggttttgtttgcctggtgaagcagaaaataaatggcttgccagcggtggtcatgatgaagacctagatattaaataagatgggtgtgaaagtcaggattgctgtggattcaaagaagccttaagtattctcagagttcccttaactctgggcttccacacatgctgcctctgtgatataaaactcaccctcctctcctatttccaaaaataaaccctattgagaatgtgtgccaggaagagaagttgtctgtagaccttcngatttatccttggacatccctgtttataaaaccctacacagggctagtgtctggtattccttcagatatttatgccttcttttggtttctctctataaattctccttctcctttcctagttttcgctctactttccttctgggcacaaaacaaaattcctcttactatctcactcagggcattttatcatcaacttttatggttttgagcactagtcctcattctaccctgtagagctcatcacaaaattttatccaacaaagatggttccctctttcagaggaattttaattttagctacgataatcattattaacaacatatgtatttcatctatcaatgtgattagattttattccttgtg

SEQ ID NO: 238106 - DNA, 457 bp, Homo sapiens
ttggtatgttgatgcttattagttgactagattttgctgtagtatctgtagcttttgagtattatttggaaacgtttgtagatccttaaggacattgggaaccatcctttaaaacttactcaagtagagaggaagagtgattcttggggaggggagaaaatcatctttgcaaataaacagattttcagaagtaattgccaacctgaattcttaccggtgcattttaccactaagggaaaaatgtagatcttcagttcaaaatgcattcaaaactcttctgtcaccaatgtgtgtgtgtgtgtgtctgtgtgtgtgtgagagagagagtgatgtgagaaagtaaaacttgtgggctggaaagtagcgaatttagtgttgttcctgtttatagtgtattttgttctgtgcaaagaaaataaaagagtttctgatttcaaggaacttatgataactgtag

SEQ ID NO: 238107 - DNA, 1028 bp, Homo sapiens
gtcttgcaaattttgaagtgaaaaaaagagtaacagttgggatccagaggtaaggatttaagtatttatgaataaaaacagtggtaggcgggttaggcttagaacctcagaggtcagtttcatgtgatagcccagtagggaaggggattaaggtggtgatctctcttctccagttttttttttttttttttgagacagagtcttgctctgtcacccaggctggaatgcagagcgagactccatctgaaaaaaaaaaaaaaaaaaaagccaaaaagtttataaaagcaagaaagatagaaaatgaaatgtaaataacaaaaaccataaaaggaaaatcataccaaacctttacacaaaacatcattgcgttgtgtattttgtgtcacaaaatgcttgacaaattatagtaattaaggcagcacgcattcatggaagggcagagcatctggcttaaccagaagcagaaccacacacaacacaggtcattggatccatgccagtggtgacgctgcagtgcagtggggagaggatgaccttttcaatcaatggcactaggtcaactgggcatccatttggacaaaaatgttatctggatgcccgcctcacccacacaaatcaattccatattcagcaatcccacttgtgaatctatatcttaagaacttgaaatcagtatgtcaaagagacatgtgcactcccatgttcactgcagcactattcacaatagccaagttatggaataaagccatgtccatcaacagatgaatggacaaaggaaatgtgacacatatatatataaacaatgtaataataatcagtctgaaaaaagaaattctgtcatttgcaacaacaccgatgaacttggaggaccttatgctaagtgaaatacgccaggctcagacagacaaatactgcatgatctcacttcttttttgagacagagtctcactctgtcacccaggctggagtgcggtggtgccatctcggctcattgcaacctctacctcccaggctcaagcgattctccc

SEQ ID NO: 238108 - DNA, 974 bp, Homo sapiens
gtcttgcaaattttgaagtgaaaaaaagagtaacagttgggatccagaggtaaggatttaagtatttatgaataaaaacagtggtaggcgggttaggcttagaacctcagaggtcagtttcatgtgatagcccagtagggaaggggattaaggtggtgatctctcttctccagttttttttttttttttttgagacagagtcttgctctgtcacccaggctggaatgcagagcgagactccatctgaaaaaaaaaaaaaaaaaaaagccaaaaagtttataaaagcaagaaagatagaaaatgaaatgtaaataacaaaaaccataaaaggaaaatcataccaaacctttacacaaaacatcattgcgttgtgtattttgtgtcacaaaatgcttgacaaattatagtaattaaggcagcacgcattcatggaagggcagagcatctggcttaaccagaagcagaaccacacacaacacaggtcacaatcaatggcactaggtcaactgggcatccatttggacaaaaatgttatctggatgcccgcctcacccacacaaatcaattccatattcagcaatcccacttgtgaatctatatcttaagaacttgaaatcagtatgtcaaagagacatgtgcactcccatgttcactgcagcactattcacaatagccaagttatggaataaagccatgtccatcaacagatgaatggacaaaggaaatgtgacacatatatatataaacaatgtaataataatcagtctgaaaaaagaaattctgtcatttgcaacaacaccgatgaacttggaggaccttatgctaagtgaaatacgccaggctcagacagacaaatactgcatgatctcacttcttttttgagacagagtctcactctgtcacccaggctggagtgcggtggtgccatctcggctcattgcaacctctacctcccaggctcaagcgattctccc

SEQ ID NO: 238109 - DNA, 974 bp, Homo sapiens
gtcttgcaaattttgaagtgaaaaaaagagtaacagttgggatccagaggtaaggatttaagtatttatgaataaaaacagtggtaggcgggttaggcttagaacctcagaggtcagtttcatgtgatagcccagtagggaaggggattaaggtggtgatctctcttctccagttttttttttttttttttgagacagagtcttgctctgtcacccaggctggaatgcagagcgagactccatctgaaaaaaaaaaaaaaaaaaaagccaaaaagtttataaaagcaagaaagataacacaaaacatcattgcgttgtgtattttgtgtcacaaaatgcttgacaaattatagtaattaaggcagcacgcattcatggaagggcagagcatctggcttaaccagaagcagaaccacacacaacacaggtcattggatccatgccagtggtgacgctgcagtgcagtggggagaggatgaccttttcaatcaatggcactaggtcaactgggcatccatttggacaaaaatgttatctggatgcccgcctcacccacacaaatcaattccatattcagcaatcccacttgtgaatctatatcttaagaacttgaaatcagtatgtcaaagagacatgtgcactcccatgttcactgcagcactattcacaatagccaagttatggaataaagccatgtccatcaacagatgaatggacaaaggaaatgtgacacatatatatataaacaatgtaataataatcagtctgaaaaaagaaattctgtcatttgcaacaacaccgatgaacttggaggaccttatgctaagtgaaatacgccaggctcagacagacaaatactgcatgatctcacttcttttttgagacagagtctcactctgtcacccaggctggagtgcggtggtgccatctcggctcattgcaacctctacctcccaggctcaagcgattctccc

SEQ ID NO: 238110 - DNA, 781 bp, Homo sapiens
gggaaaacgtatcagcacatgaaataccttgtaactatttcatttatataatttgctacgtgttctttgcaacatagtgaaaaataatcatgtctgatgtttagtaggcacataataaatagtaatggaatgaatggttgtatatttagagagccatgctgaaaggttaaatagcaaaatatgactacttggagaataatgttaaattgtcaaggagagcagtgttatatgaatactcggatggatatatagaaaatgagaaaagcgacagaaggaacttaaagagattttaaaaatagctttgtctaaagattaaaaattaaagttctaagtaacttcctaggaagatatacaagaccacaatgagatgccatgacacctctaccagaatggatccaattaaaaaaaaaaaatcaagagttggcaaggatgtagagcaactggaacttccatacattattgtaagagtgtaaattagtacaaccacagggaaaaccgtttaataatacctgctaaaatgtaaatcttactctgtcctttaggatttccatttttaggctacatatacccaagaaaaatatgctatatgagctccaaaacaatctgataattttatagcagatttataatagagaaaaaatagatacagcatagattcaaaagtagaatggataaattgtggcattattcatacactggcatatactataaagtaataataaagaactgttacacacaactgcatggatggattgcaaagatatgatgagcaaaagaaacc

SEQ ID NO: 238111 - DNA, 286 bp, Homo sapiens
cctttatttcctgaaagtgaacgaaaatggcattgcttactcctgagaattagaaagtaacaaaaattaatttaaaaattctaatgatgatgtgtagtttctttggttaattgtaattagtggccacttctcttttcttagaaaaaattactcttaaaaatattaatggagccgggcgtggtggctcatgcctgtaatcccagcactttgggaggccgaggtgggctgatcacctgaggtcaggcattcgagaccaggctgaccaacatggtgaaaccctgtctct

SEQ ID NO: 238112 - DNA, 553 bp, Homo sapiens
caacccatgcttactccattaatgtcctcaagtgtcaacaagccttctccagctggattggctaacttttctatttgctggaacatgccaagttgattccattcttagggtcactgtacttgctcaagttgtctttgcctagaataataatctcccagatctatacaggtatgttctcatcctttgggtctcagcttttatttttcttttttagtgacaggatctcactcttgcactctagcccaggtgacagaataacaacaacaacaacaaaaatatatatatacacagagagagagagaataggcatatacatagagaaagaaaatagagtttactgggtactgggggaagtggtgttactggttacagagtttccatttcaagttttggaaataaatagtagtaatggttacacaccattgtgcacgtacttcatgccactgcattgtacactacattaatattagatgaaggagatttcagggacaaaaactttacaaaatgcaaactaatcagtcctcaagttcatttcctgacacctccaccaaaa

SEQ ID NO: 238113 - DNA, 458 bp, Homo sapiens
agcttgggtgacagagtgagaccctgtctcaaaaagaagctgtatatttcaggcatgttaagtatattcacattgttatgcaaaagacttctaaaagttttacatcttgtgaaactaaaacccagtacccattaagtaacaacaacgcatttaccctcttcccagcccttggcaaacacccttccaatttctgtttttataagtgtgactacttaagatatataagcggaatcatacagtattcatcattttgtttctggcatataggtgacataatatttgcaaagtttatcttaaaatgtgacaatattttcttctttaagactgaataatatttcattgtgtatatatatatatatatatgcaacacttttgatgtgtttataaatcaagagacatctgagttgtttcagccctttggcttttgtgaatacgggtacaataaacatggatgttct

SEQ ID NO: 238114 - DNA, 496 bp, Homo sapiens
agcccaggcattctcttccagcccctctcgccatgtacccaagttgccctttttgcctgagctctcgaccttattctgagtactctactctttcaatgctgaacttccctgggttgcttttgcttctttcttcagcctcattaacatctcccgggaggtacaatctgagatggagatgagattcaaagcagtgagagagagagagtgtgtggtgcatgtgtagatttcatcaacaatttggcccagggggaggtggagccacgtagaagattgtggctggtttctggactcagcttggccatcctctctattttctagtgccgtgaataataactgaagactggctgcttacaccctttacataatcccatcaagctctgatggaacagataagaaaagcacattccaaggaattcactctcagcctgtgtcaacatgtattataacgtccagctaaaagctaaaagaatctaataaaaacaaagagactttaccc

SEQ ID NO: 238115 - DNA, 374 bp, Homo sapiens
gagcgccgcgggtgccagtgggcccgcaggtgggaggttcggggcggggaagagcccgcgagaggcggccaaggctggaggtgagcgggaatgaggccaggccacgactcctccctcctctcaaagatagtttcccacggtggcggcgagatgcggcccttggccctaatccgggctttggccgcccttcgcgctttccaggacccttccctcggcctgggaggggcgacggtaacggcgcgagggctaccaaggcgggttccgtgacccctccaacatgccttgtctgccggcgggggctgccccagtgccaagccctgtggtcccagaacttagcaaagaaaaagacggccaattaaaattgaatttcatat

SEQ ID NO: 238116 - DNA, 347 bp, Homo sapiens
tgctaaggtagaacacagagaacatcttaagaaattccaaaatcaaaaaatcagataagccaccttttctgaacagactgcagaaaaagtaagcattaatatcaaaaggctggcaaaatggttctatttcaatattttaaaacaccccttaagataaaaaagaaaataaaaactaaataactgcagttagttatggattgaaaaatgaatgtccatgagagtaccacgtcatgaaagacatggacaaagcagtcatcagaggaaaatttgtagctctcaatcctggtgctagaaaacaagagaggcagaaaaaaataataaaataagtgcaaagatagcaaaagtaa

SEQ ID NO: 238117 - DNA, 461 bp, Homo sapiens
actattagctactgtcatgggtccctgcttatctcacccaagtgtcttgggggtccttgtgggccagttcttccctagcaaacagcgtggggctagcacactggcagagcccacccaattgcctagggaaggatgggggcagtctgggattggctttcttccacccaaatccaacaaaagagactgcatagaacagtatctgtgcagagggccagggtcaggcccatagcttgttgctaggaggacatgcattgcaatcgtctgagccagcacctgcctctgcctagcaaggcgtccgaattctcaaacacaccagagactcaaagatggagagaaccccctctggttcctttctcactgaggccctggatgcttctcccctgagtatttcccacccctggctgggtacgtggcacacctccagcatcatctcctagccccggggcctccagcccattcct

SEQ ID NO: 238118 - DNA, 409 bp, Homo sapiens
gaacaacaacaacaacaacaaaaaaccctgccagatgataggtaaaataaataatctagaatttataattaaggaagaaaaaattgacagctgcctctctcaaaaagggaaattaaatacttaagtatctcactccagaacatctgaattgcgtttcctctgattattaaatgaaactgcactaacaaaaccgaccttgctcctccctcaaacctgatccagttaacaaacttacatttaatctgtaacaatgcattaaaacaccacaaacgtgggcaaatacagtctcaaagactaaaatttgtgtttatggccgggtgtggtggctcacatctgtaatcccagcactttgggaggccaaggtgggtggatcacctgaggtcagaagttcgagaccagcctggccaac

SEQ ID NO: 238119 - DNA, 497 bp, Homo sapiens
ggcagcagcaactgagcaatgaagaggttttctaggatgtttttgtcttcgaattacaggtttctgcatgagagagagacttagagtttcctctagcagtatttttctaaagagaaacttgcctaaattttaaaagatatattcttgtaatacttaaataaggcctttttggttctaatgttggcttttctttaaagccatcattttgtttggaagaaaaactacttaatgtccattttagtccctcttccttcaaagacatttaaaaggaagtcatgtttgtactagtggacctcttgggcaaataatattaaaaagatattgtgtttgatttgtgaatgaaacccagggttgattttaatacggtcatcataaaataagttaaaggacattatttcattgtgcaatctaataaacctaaccacactattaagattcagttaaattcaattttactttactatgatggttaatttgtattggcaattgtaaataaa

SEQ ID NO: 238120 - DNA, 446 bp, Homo sapiens
caaataaaaaaacggaaccggttgcaagcagggttaaatagcgtggtcagagtaggactcactgagaatatgagatctgagtcaagtcttcaaggatgtgaggaagtaagtttctggcagaagagctgtgaagggctgtctggccagagaagattgcaatgcaaaagccctgaggtgggaacgtgtttggtgtgtttaaaggaaagcaatgaggccagtgtagccagaacagagtgtgcaaggagagaaggaacagaagatgtggagggcagatcagtttgtaattgtacgcccagtatgctgattctttgtgtaatctccagactgtattaaactgcaagagcagggcccctctctggctttgctcatcattgtattcccagagccttgcacaatgcttggtgcataggagatggaaatttgttaaataaatgaattatggataa

SEQ ID NO: 238121 - DNA, 538 bp, Homo sapiens
ataagccaaacacagaaagacaaatatcacatgttctcacttatctgtgaaatataaaacaattacattcttagcagtaaagagtagaatggtggttactagagctggggggtgggaggaatggggagatggtaatcaagatataaagcctcagttaagatgggaggaataagtttgattgttttttttgagatgtgtttcatagcatgatgaatatagctaaatagtaaatcccaaatgctctcatttgacaaaaatgtcaaatatttgagatgatggataggttacttagcttgacttaataattccccattgtgttcaaagatcataacttcatattgtaccacataaatatatacaactgtactatcccaatatataattttaaaactaatataatgaaaaagaaattgaagttcaacattcccagaagctaagtgtaacttaaaagttttgtgagaatttgttttaacaaacaaacaagttttctctttttaacaattaccacattctgcgcttggatatacagcagtgaaca

SEQ ID NO: 238122 - DNA, 503 bp, Homo sapiens
tgcaaaattttaagaagtagatttacaaccgccacaattttaggtgatttttttcagcttgttagtgtttcctttcttatgtctattaacttttcacatatcagaaactagaattctgtagcatgttgggtaagaccattctatggtgggaagagaaattaatcatgagcattaaccaaaacccactgtgtaaaactactataggttagtcttactccctgctcaaattttctaaaacctctgttgttgaagtcaactataaatgaaaacagacgagcagagagttaaaagcatggctacattcagctactgtggtaagtggtggatgttcattcatcgtgtttttctgagtgatgggcactattctaggaactagaaatacagcaatgaacaaaacaaagttcctacccttacacaactgccattccagggtcaggtgtgatatcctcacagggctcaacgctcctagtgtgactttttccctattgatgaccatgcattga

SEQ ID NO: 238123 - DNA, 647 bp, Homo sapiens
  misc_feature (215)..(215): n is a, c, g, or t
ctcccaagcgattataatttgggatcccccagggtttttccaattaagcctttgtaaaacgacgggcaatttaatttaatagggccccccttaaggggaattgtggacgcgggccccccccagaggttttgtttacggattcactcaggtatgtgtcagtggacctgcatttggtatgggtggtccagctcgtttcttctcatgttatgttgttntcattgttttttatttttctgctacagtatttattgagagaactgcatagcaaaacaaatagtagcatatgtgtaagttcacctttgcccactgaattctgaaataacaaaaaaggatctaatgggactgaacatcaaactccagccattggattgtagggcttttaagctacctaatgagggaaacaccaaactactctggtatgatcacagaggcatccaactgtagtaattatgtcatggccaaaattgatcttcagtcctcttccaccacgttggcatccttcagttaaaggaacaacagcctttcacctggtgtggtcagtggattcgcatacaaggtttgtagttcttatttatgatgtgacagaccagtgatctacttcgccatttcagcatcctggtataacttccttccttccttcctttctc

SEQ ID NO: 238124 - DNA, 441 bp, Homo sapiens
cagaggagtcggcttagaagccctgatgatgcattttgttttgatgagttgagtttgaggttgatcacagcaagtgatcaatcataaaattagacatcttggatagagattggagatggcaacagatagaaagtgggttgaaaaacaaagaatgggccgggcgcagtggctcatgcctgtggtcccagcactttgggaagccgaggcgggcggatcacttgaggtcggggtttaagactagcctggccaacatggcgaaactccgtctctaataaaaaatacaaaaagcagctggatgtggtggcacatgcctgcagtcccagctactctgtgggctgaggcagaagaatcgcttgaatccaggaggtggaggaggttgcagtgagctgagatcgcgccactgcactccaggcctgggtgacagagccagactcggtctca

SEQ ID NO: 238125 - DNA, 522 bp, Homo sapiens
ctaaaagcacagcacttaatcctttaccttgtctatgatgcaaagacctttgttcacgtgtttgtctgctgaccctctccccacaattgtcttgtgaccctgacacatccccctctcggagaaacacccacgaatgatgaataaatactaagggaactcagaggctggcgggatcctccatatgctgaatgctggttccccgggtccccttatttctttgtctctgtgtctttttctttcctaagtctctcgtcccaccttacgagaaacacccacaggtgtggaggggcaacccaccccttcaaatctatctacagatgagaagcctactaaaattttaagaattgtattaaaaacacacacaaaccttggctacaacaacttgtggctattccaaattaagagaaattacagtccctagtcatctaagaaatggtctcaaaaaagctgtgcaactcccaaagttggcatatatatccctcagtagctgttcagatgtagccatgaagattaaaaaaaaaa

SEQ ID NO: 238126 - DNA, 224 bp, Homo sapiens
gctcccataggcactggtttctcatcttcccactggctttccccacaatcctctaccccagaaaggcagcttgatcctagcctcccactcccagccagcccctgacccagctctctggttggacatccctctagctttccaaatcccagaggtactatcagaaaccactcagtcacagacccctctgcaacacaggagctcaccaaggggggaaatgcctatat

SEQ ID NO: 238127 - DNA, 361 bp, Homo sapiens
tagagacagagtttcacactgtttaccagattggagtgcagtggtgcaatcctagcttactgcagcctgtaggtcccgggctcaagcgatcttcccacctctgccacttgaataggtgggactacaggtgggtaccaccatacccagctgttgaaaaaaaaatggtggggtattactctgttgcccaggctggtgttgaactcctggcctcaagcgatcctcctgcctcggcctcccaaagtgctgggattacaggcttgagctacttccccaggctcttcccccgtttgttaatacataccatgaccttggcctttcccacctcttaggttttgcttactttcccttctgtcctttactt

SEQ ID NO: 238128 - DNA, 1491 bp, Homo sapiens
ggcaaagctcggagtcccggcggaggggcggacaggtggaggggttccactcgcactgaccgcagcgcacgggcagcggggctgaccaggcgcttcccggccccataaaactcgggcgggaggcgaacgccgttttatgcaggcggccgggcggcctggctcgctttcattcccggctccgcgaggcgcgagggccgagccctccaagctcgtaaacgccttggccgcgagctccctccccgggcccgcgggccgtcatataaggcgcagcgccggcttggggtccagccgcccgcccctgccgccaccgcaccatgtcctgcctctactcccgcctcagcgccccctgcggggtccgcgccttcagctgcatctcggcctgcgggccccggcccggccgctgctgcatcaccgccgccccctaccgcggcgtctcctgctaccgcggcctcaccggaggcttcggcagccacagcgtgtgcgggggcttccgcgccggctcctgcggacgcagcttcggctaccgctccgggggcgtgtgcggacccagccccccatgcatcgccaccgtgtcggtcaacgagagcctcctcacgcccctcaacctggagatcgaccccaacgcacagtgcgtgaagcaggaggagaaggagcagatcaagtccctcaacagcaggttcgcggccttcatggacaaggtgcacttcctggagcagcagaacaagctgctggagacaaagctgcagttcttccagaaccgtgagtgctgcaagagcaacctggagcctctgtttgagggctacaactctgcgacgggaggccgagtgcatggaagccaacagtgggaggctggcctcagagctcaaccacgtgcaggaggtgctggagggttacaagaagaagtatgaagaagaggtggcactaagggccactgctgagaatgaatttgtggccttgaagaaggatgtggactgtgcctacctgcgcaaatcagacctagaggccaacgtggaggccctgacccaggagatcgacttcctgaggcggctatatgaggaggagatccgcgttctccagtcgcacatctcagacacctcagtggtcgtcaagatggacaacagtcgggacctgaacatgcactgtgtcatcactgagatcaaagctcagtacgatgacattgccacccgcagccgggccgaggccgagtcctggtaccgcagcaagtgtgaggagatgaaggccacggtgatcaggcacggggagaccctgcgccgcaccaaggaggagatcaacgagctgaaccgcatgatccagaggctgacagccgaggtggagaacgccaagtgccagaactccaagctggaggccgcggtggcccagtctgagcagcagggtgaggcggccctcagtgatgcccgctgcaagctggccgagctggagggtgccctgcagaaggccaagcaggacatggcctgcctgatcagggagtac

SEQ ID NO: 238129 - DNA, 575 bp, Homo sapiens
agcctgacagtaacccagcacagcccacaggcctctcagtctgtcgctcatcccatccaggcccacctggacagaccctcacttagccctgaataagcaattatgaaacaaggattctccagctgcatcctcaggccaggagagaccagcaggggccatgtggtctaccccttgcctctgcacatcttactgccggttctgtcttgactctggctgttccccaaggagggctggggatattggctcctccaaccaacatttctcccacttccacaccaggtgcacttcctggagcagcagaacaagctgctggagacaaagctgcagttcttccagaaccgtgagtgctgcaagagcaacctggagcctctgtttgagggctacaactctgcgacgggaggccgagtgcatggaagccaacagtgggaggctggcctcagagctcaaccacgtgcaggaggtgctggagggttacaagaagaagtaagtgcagtgggaggagggtttggagaaattaaatgggattaagtcaaagtatgatagatttgggttcgaccataagaggaacttcccaa

SEQ ID NO: 238130 - DNA, 994 bp, Homo sapiens
ggcaaagctcggagtcccggcggaggggcggacaggtggaggggttccactcgcactgaccgcagcgcacgggcagcggggctgaccaggcgcttcccggccccataaaactcgggcgggaggcgaacgccgttttatgcaggcggccgggcggcctggctcgctttcattcccggctccgcgaggcgcgagggccgagccctccaagctcgtaaacgccttggccgcgagctccctccccgggcccgcgggccgtcatataaggcgcagcgccggcttggggtccagccgcccgcccctgccgccaccgcaccatgtcctgcctctactcccgcctcagcgccccctgcggggtccgcgccttcagctgcatctcggcctgcgggccccggcccggccgctgctgcatcaccgccgccccctaccgcggcgtctcctgctaccgcggcctcaccggaggcttcggcagccacagcgtgtgcgggggcttccgcgccggctcctgcggacgcagcttcggctaccgctccgggggcgtgtgcggacccagccccccatgcatcgccaccgtgtcggtcaacgagagcctcctcacgcccctcaacctggagatcgaccccaacgcacagtgcgtgaagcaggaggagaaggagcagatcaagtccctcaacagcaggttcgcggccttcatggacaaggtgcacttcctggagcagcagaacaagctgctggagacaaagctgcagttcttccagaaccgtgagtgctgcaagagcaacctggagcctctgtttgagggctacaactctgcgacgggaggccgagtgcatggaagccaacagtgggaggctggcctcagagctcaaccacgtgcaggaggtgctggagggttacaagaagaagtaagtgcagtgggaggagggtttggagaaattaaatgggattaagtcaaagtatgatagatttgggttcgaccataagaggaacttcccaa

SEQ ID NO: 238131 - DNA, 1031 bp, Homo sapiens
acttcatcattatgtttatttcattaattcatcaaacattttattgagcatctactcaatgttgtaggtgctatgttgggctctgagtgggaaaggagtaaggaagtaagaaggaggagaaaggagaggtaccagaactgggcagggttcctgccccaaaggagttacagcccagaaacagagaggaggtcttcgaaaatgtgcagggcccccaccctgacccacatcaggaatgaaagtccctgaaatagaaagagctttgagtaacatgggttggtttgaatgcccagaagaaagggatggacaagttcccttcagtccaacacttttttgattcttgtgaccacctccaaaagatccagttcccggaatgtgtttgcctgtgccttcattcccattttttttcctccccagatctgagccttgtgtgttttgtccccaggtatgaagaagaggtggcactaagggccactgctgagaatgaatttgtggccttgaagaaggatgtggactgtgcctacctgcgcaaatcagacctagaggccaacgtggaggccctgacccaggagatcgacttcctgaggcggctatatgaggaggagatccgcgttctccagtcgcacatctcagacacctcagtggtcgtcaagatggacaacagtcgggacctgaacatgcactgtgtcatcactgagatcaaagctcagtacgatgacattgccacccgcagccgggccgaggccgagtcctggtaccgcagcaagtgtgaggagatgaaggccacggtgatcaggcacggggagaccctgcgccgcaccaaggaggagatcaacgagctgaaccgcatgatccagaggctgacagccgaggtggagaacgccaagtgccagaactccaagctggaggccgcggtggcccagtctgagcagcagggtgaggcggccctcagtgatgcccgctgcaagctggccgagctggagggtgccctgcagaaggccaagcaggacatggcctgcctgatcagggagtac

SEQ ID NO: 238132 - DNA, 450 bp, Homo sapiens
tcatgcacgtcaccatagacctgaaaatttctttggaaaacagaccctgtaacatgattgctaggtcataaaatagtctaagcttaatttgtcaagtactgccagattgtagtgatgtgatcatagcacacagtaaccacctgcctcagccttgcaattaactgggattacaggtgcacaccactatacctggctaatttttatatattttttatagaggtgaggtctcactatcttgctcaggagttcgaggccagcctggccaacatggcgaaaccctatctctactaaaaatacaaaaattagctgggtgtgctggcaggtgcctgtaattccagctctttgggaggctgaggcaggagaagcacttgaacccgggaagcggaggttgcagtgagcagagatcacaccattgcactccatcctgggctacaagagtggaactccatc

SEQ ID NO: 238133 - DNA, 346 bp, Homo sapiens
ctaccctaaccaccatagaagatccggacttagtggtattggactggaatgataaaaactatccagggaaggccgagcgtggtggctcatgcctgtaataccagcactttaggaggctgaggtgggtgggtcaggagtttgagaccagcctagccaacgtggtgaaaccccgtctctactaaaaatacaaaaactagcggggtgtggtggtacatgcctgtaatcccagcagttacttgggaggctgaggcaagagaatcacttgaacccaggagtccgaggttgcaatgagccgagagcacgccactgcactccagcctggatgacaaagcaagactctgtatca

SEQ ID NO: 238134 - DNA, 512 bp, Homo sapiens
atattctctcctacccatttcctttattaatatcttgctgttgtgtggtagatttgttacagttgatgaaccaatattaacagaagtccatagtttacattcaagttcattctgtgtgtttgtgcagtctgtggattttgacaaatatataatcattcagaatggtttcactaatccagaagtctcctggtgctcctgtcttccctcctttctctaacccctgacaactatttttttttactgtctccatagttttgccttttccaaaaatgtcctatggttggaatcatacaaatgtagccttttcagattggcttctgtcactaagcaatatgtatttaatggcttgataacttttcatggcttgataactcatttctttttaatgctgaataatatttcactgtatggatgtaccacaagttgtttatcattcacatactgagtaacatcttggttgtgttcaagttttagcaattgtgaataaaactgctgtgaataaatatttgtgt

SEQ ID NO: 238135 - DNA, 234 bp, Homo sapiens
cacaaacaatgagaggtttttttccaatggtagaaatgacataaattcattgtaaggaactttggaatttatcaaaaagtgtaaaggcagaagaataaaaattgaccatattcctagatgtcgagtaagttttcctcagaataaatctttagaaatgacgttgacagaatgaagagggttcaaatattaagtttttggtaacatactgccaaatgcccttcagaaagtttgtac

SEQ ID NO: 238136 - DNA, 583 bp, Homo sapiens
aaagcctcacttcctcaacaggaactaacagcatcacaaaagaatgacaggcctccaggttccctggtgtagcctgaccggcaccagcctagtctggtgtccggaaacctgcctctccccgcctgtatgtgtgcctgattaaggcagcataacactgaagggtgagagtcctggctccgatgtgagactccttgggttcaacttccagcttgccgcctcccagctgtgtgaccttgagtacgtcatcctcccctcaagcctcagtttcctcatctgccaaatcgggataataacaatagctcattcataagggcgttgtgaggattaaacctgacaacttcataaattacttagaaaaggcctggagctagtgagtgctcagtgaacatccagtattaccatgatcgtgtatatgtcactagacctctaagttttctttcaacatgtgaattctgggattaagtctaatattgaaaagaaaaatcaggaacaggggagctagcatcaggcagaaccaaagctccggtctatcatttgcagactttgtagtaactgaggctccaggacagtgcatgacaaaaag

SEQ ID NO: 238137 - DNA, 396 bp, Homo sapiens
tgctttctacaggaggacagggatgtttgtcttgctcactgctgtgtcccccgggcctagaaacttgcttagcacagagtaggtgctcattaaacaagcgattgagttaatacttgggtacagataggtgtgaagcgtgggcatgggtgggggacacgctcggtttgtttagtatctcccgggtttccccgttctgatgcgccctccccgtgcccccgtcgtgcctccagacctgggcggcccccgcctgtgcccggtccccgccgccgggggcgcacgcagcccgagctcgccctactcggtggagacgccctacggcttccacctggacctggacttcctcaagtacatagaggagctggagcgtggccccgctgctgccgcgccccgggaccc

SEQ ID NO: 238138 - DNA, 1705 bp, Homo sapiens
  misc_feature (1088)..(1088): n is a, c, g, or t
  misc_feature (1172)..(1172): n is a, c, g, or t
atctaaaatgcttttgttttaaatggacaaaatttgccaaacacctttttacctttctgcctggaaaaatgttttgatgtgttggctttccacctcctgatttttgtgtgtggctccttcccctaccccctcccgccccgccaaatgttgttgtacactgccttgtctgtttcatttccacgtgtgggttcactgaccacattagctggtagctcctggtattgtatgcttcctatccagaatttgttccatagaaaacctgtgtcttcaacatacttgctttgaaattattttgatctgtatcagcaggaataggttttgagatcctggatattaacttctgggtgccactctctctagaagctaattgactgatttgtggtggaggcgagatgagagtctatacatttgacctatttcacagagcttaccttgcaagctattgaaatgcaaatacagactagcttagagattctaagaattcacacattcagttctttgtttttttctgaaaaataagcattcaaatttcatgcacattctattattcatgtgccttatatttaggttccgcttgtatgtctagataaatcttatcaccattatttaaaatttcatgaatgaaactttgcatctttaatactaacactagcctagaccaatcaaaataatttgaaatgcagcccttaaatgaactcctccgtgtgtctgtatatatacatttacatatacacctttgccaatgccttatctaccactgtcttttaaatctactccatgtaaaatggggaacgattcaaaacctcttttatattgttgtgcctcagaaaaaaatggaatctttggaatgtgctgcttaaaaggcttctatgagatagcacattaatgtcaaagcacattttctttgtttgatagttgtcacgttagtggtcctgaaacagaatactcttttccgtgctgtccattcatttgtatttttaagtcatccaccacttttcatttgtcaagcacttgaaaaagaatattgtgtgtcagcaagatagttcctctgtcatttgatctacaagttagccttcctgaacagttantgccttcagaatcctttttttctctgagctatggtcgcttaacagagaggagaatgattttcttagccagatccaagactcccncaactgagtctactgcctaatgcctattggtgctagcactaacattttctgatacagtcttcaatatgtgatgaggctgagtatccggcattaagtttggaagaaggaacatagacttaagtgaagttctttgttaagccttatgtccccatagagtgttgatgatggtttgaattgagtcactttctgtcactttctgggagccatatcaaaaaagactttaccagttctctttgctgcctttgaagttctgtaatttctaggtagggtcaattttctgggaaaaataacaaatattcatgggaattttgatacacagcctgggtgacagagcgagactccatctcaaaaaataaaacaacaacaacaacaaaaacacaaatattagctggaggtggtggtgggagcctgtaatcccagctacttgggaggctgaggcactagaatcacttgaactagggaggcggaagttgcagtgagctgagattgtgccactactctccagcctgggtgctggaacaagactccttctc

SEQ ID NO: 238139 - DNA, 109 bp, Homo sapiens
tgcaggtccacagtagctctgcatatttactggttacatgaaatattttgatccaggtatgcaatgcatattaatcatgtcagagtaaattatatatacagataaatgc

SEQ ID NO: 238140 - DNA, 490 bp, Homo sapiens
tcccttttgcagagaggactggggaagagtcagggagtcggggacatccaggaaataggtggtaggagtgtctgttcatgtgacacactagcagtgcctgctttccaggtacaagtcctcctgtatggattcatttgttaacttagttcttaaagtgtttgaatcttagtaatgattttaaaggaaatttaaaatagggagaaaatgggctgggtgtgatggctcacacccgtaatcccagcactttgggaggccgaggcaggcggatcacctgaggtcaggagttcaagaccagcctagccaacatggtgaaaccctgtctctactaaaaatacaaaaattagctggatgtggtggtgggcgcctgtaatcccagctactcaggaggctgaggcagggagaattgcttcaacccaggaggtggaggttgcagtgagccaagatcgcaccgttgcactccagcctgggcgacagaacaagactccatctc

SEQ ID NO: 238141 - DNA, 387 bp, Homo sapiens
atggtggaattttagatcattgattttaaatctttttttatataagcattaagtctataaattatcctctgagcactcagttacacccaacttaattttagaacatgtcttttttcattcaatttgaaatattcaatttgaatatccttcttagattcataagttattgatatgtggattatttattttacaaatacttggcaattttctaggtatcttattgtgaatttctcactgaattttactatggttaaacacttcagtcttttgaaattatggtctctcttgccaaatgtttcaaatgcacatggtagcattgggatattatgtaaatatcaattaggtcaagttggttgattgtattatttatatcttctgtattcttac

SEQ ID NO: 238142 - DNA, 459 bp, Homo sapiens
gattaatataatgcacctaagccatgcctagaagataatgttttgtaagcattgattattcatgtcttggtattattatttttatctgccaataaaaatactgaattatcatgtgtatgtcattctaacatgcagacatagcaagtaaaaaaaccatcaatttatcatcattaaacctgtgttttattctgactctatcacctatggggtatgtgaccttgggaatgtcacttcatgtctcctggggtgattaagacactaagtctgacttctccactgaaaaatggggttcactcatctgattgtcttgaaaatcaaatgcaattttcttagaaagtaaataccaatgttgaaatgttttatatacacgtgaaattagtaatgacaggagaaagtataacagtagaaataaaaataagagtaagaagagtaatttatgttaatcatagaaaaaaggaa

SEQ ID NO: 238143 - DNA, 509 bp, Homo sapiens
tgtccaattctgtctaatggagccctaaggaccaacaatagagcgggcgagcggctcattgagagtctggcagcgccgggcaactgggccccggctgcgcgcagcgtccggcgcgcaccgcgaggggacccggcacggcgagagtcaggtcgcgggttccaaccacgcggcccgcagacgagcctccgacccggatttctgaagggagggttggactgcgctgcgttctgaggggtccggaagttcggacatggtgactgaaggagggtgacgtggtcagataaggggccgggggcaaagggaagcggccaagagctccagcgtcgccagtggagccgggaggcgcgtgcagcgccagcggaggaggaggatcccggagcccaaggtcctgtcatggagctgcgctcggagctgcccagcgtgcccggcgcggcgacggcggcggcggcaacagcgacggggccgcctgtggcgtcggtggcgtcggtggcggcagccgcggcggccgc

SEQ ID NO: 238144 - DNA, 680 bp, Homo sapiens
gctttgtggatggcattcattttacttactttaaacctcctgcttattagcaactctgctttagcacatgagtttatctgagcaaaataggcaaaaagtgcaaatggtttgaatttaagatgactgatgatagcagcattatacacttgattatcagctctttgcttatctctgtccatggagggtaacagtggtacagacaattaaatcttttgtttgactttgaactgcctcgtcatattctgggatccttagatcttgcttatattactcctaaagaccaagttgctttcatttcacttacagtgggcaaagaaaagccaacctttaaaaaaaagtttcaggttgtgtgtggtggctcacgcttgtaatctcagcactttaagaggccaagatgggagaaccgctggagcccaggagtttgagaccagcctgagcaaggtagtgagatgctgtctctacaaaaaaatttaaaaattagccaggcatggtggcgtgcacttgtagtcccagctccttgggaggctgaggtgggaggattgcttgagcccaggagttcaaggctgtagtgagctatgatcacaccactgcattctagcctgggtgccagagtaagatcatgtatcaaaaaaaaaatttttttttttaaattccatggattattcacaagcaggctatgt

SEQ ID NO: 238145 - DNA, 161 bp, Homo sapiens
taaaaaatgtgaatttacaattctacagtttagccccaaaagcacttgttagaaggatgaaagcgccaaaaaactggtttcttgcccaaataagtttgggaatgggaatgggtttaaaaatgattacaaggcttttttttttttttttttgagacaggatc

SEQ ID NO: 238146 - DNA, 440 bp, Homo sapiens
attttcatcaaagtgccaggcttatttatagtggcaaggttgaaggtttactacaagaactttaggtcctttctgttaaagtgtttataggtatttctcttgccttttttcaaggtaattatcaacttcagcaaataaactgaatcagggagtgaataattggccctatatataaaaaagagttttttaaactaacaaaacagctcagtgcagatggacataaacagaatctctttatttcaacactttggctcaaatgcagcatcaaaacttaatcctatttgttacaagaggatatggcttttgtagcaaaagtacactggaatctttaaattaatcagaacccacattgtagtttgtccaagccaaagtcagtgcagttaggcttgaacatgcgaatgtgaatcttgatcaattttaaatgtaatattacatttttt

SEQ ID NO: 238147 - DNA, 428 bp, Homo sapiens
cagaaggtatttcagtagagagaatttagtacaaatttatgccggagagagagaatataaaccaacagtctaaggaattagttgaattgatgttggggggctgtaagcaacggagagccctggggcaacctagagctgatgagtgcagggagcagccctttcccctgagccagagaaatgacaggaagggccacctaccacaaccgaaaggcttacaggatttgaaaccagtctggccaacatggtgaaacccccatctctactagaaatacaaaaattagctgagtgtggtggcatgtgcctgtaatcctagccactcaggaagctgagggagcagaatcgcttgaacccaggaggcgggggttgcagtgagccgagatggtgccacggcactccagcttgggtgacacaagtgaaactccatctca

SEQ ID NO: 238148 - DNA, 431 bp, Homo sapiens
tgccctgcagatggacttgcaaaggtagaggatgtatgtgtcctagaattgttcaagcagcaaaaagcagaaaaactctgcccacagaagcttgtcaaataaatgatagcgtgtctcacagtggagtgctacacagcaggtaaaaaacagaatccggctaggtgttttgtatcaacatgaagctaagatacaatggcactctgtagcagcggttagagagaatcccgcaattgctctgttatcaaggaggaacaattgctaagttacagtgctaacaattgggaaaagcaagcagctacactcagggccacgctcacccacttggggtgggagggagacctggtcttcacctataccctttggtgctgttttaatattttgcttcatacataattcacttattcacaaaataaaattagcaaaatggagac

SEQ ID NO: 238149 - DNA, 1607 bp, Homo sapiens
attataatgaggattaaagtaaagaacagaccgggcatggcagctcactcctataatcccaggactttgggaggctgaggcagaaggatgacttgagccaggggttcaagaccagccttggcaacatagcaagaccccatctctatttaaaaagataaatataaatatataaagaacacattgcaaagcatgtggcagtagtgagctttcaggaactggtggtgctaatgaataaatagcaccttagtaatgctcattctatctcactcacaaactggacagttcatgcatttgctggggtttcattttgaagtaagaggatggtttgtttctgcttagttttccccagtgactgagaaccctagcaagaaaacgaaacacctgtgcagacacattatacccatggagctgcatttctgtatgtactttttgcaggccattatcagacattacactgccccagaggttaattgtaatctccagagtccattgcacttccacagtggctgggatctttggccactttcccagcctgtttatggggagcctgacctgaagcacatctcctaagtgttttccaagttggcactgagtctctccgacttggaaatgccagcacacagctttgtgtgtgcaatgatttagctcttatgaaggcgccagtgaaatgcccactcctacccgggtgttggacattttggagacctggaaagaagtaagcagtgttattgacaagcacaggccctgcaggggactgtgggaagttaggcatgattctgtcccttgtgccttaacaaggactggtgaggacactcagccattccctcagtgcatcaaaatggaggccagcacattgtatagccttagtttctctatcagggattagggtgataatgattaaccagaggacttagggtcaactaatccccaaagtggttctcagaatactatgaaaatgtagcacaggaaaaggttccatggccaaatatatttagaaaatgcaatgcactgtctttccttctttgcattttataatatgcaatttgcatattcaaggccctgagaagtcctgcagtaaggaaacaaacttaaccttgttcagtccagcagcacccaaatcaaatttccatgagcatctttttccctttaacatccccagcagctaggaaaaacactgaagaaattctagattatctaattatccccaaagtttatttttatttttttaacttttttttttagtttttttgtattatatcctgctccttctgtagattgcaaaagtttataacaagtgatatgtgaatattaagaaaggagaatctgagccaggcgcagtggctcacgcctgtaatcccagcactttggcagggcgaggcgggcagatcacaaggtcaggagtttgagaccagcctggccaacacagcgaaaccctgtctctactaaaaatacaaaaattagccaggtgtgatggcaggcacctgtaatcccagctacttgggaggctgaggcaggacaatcgcttgaacccgggaagtggaggttgcagtgagctgaggctgtgccattgtactccaggctgggcaacaagagcacgactccatctc

SEQ ID NO: 238150 - DNA, 343 bp, Homo sapiens
agtagtttactttcaagttaattattaacataaagtacttaaaactcatcttcacaattgccaaagtgattttaagtacataccttcttttattatgttgcatagcatttttaatcatataaaaatttgctcacaggttttagtcaaaacttctatgatactagtctatactatataatttggcatataattatatacattgttgggatttgtgaagtattaactatgttttccaaccagattgtaagcaccttcattgcaactttgatagatataggtgtatctcacagatattgcaggttccgtcccggccaacagcaataaagcaaatatcacaattaaa

SEQ ID NO: 238151 - DNA, 236 bp, Homo sapiens
gctgtttcttacaaaactaaacatactcttactatacaatctactaatcaagctctttgatatttatccaaagaagttgtaaatttatgtccccaccaaaaatgcacatgagtgcgtatagcagctttattcacaattgtctcaaactggaagcagtaggtgaatggataaacaatctgtggtatatctatatcatggaatattattcagcaataaaaggatgtgaactatatata

SEQ ID NO: 238152 - DNA, 846 bp, Homo sapiens
ggggcttgcaggggtgcctgggtcgggggctgcaggtgggagtgagcaaatgtgctgtctcgccacctcgggacaggtggtagggcctctgacacagagtggtccttcctgctgttcacagctcagctcaccgtgggctgaccatagattctcgttgaaatcctaacgccccaggcaatgatgttaggaggcggggcttctgggagatggcaagttcgtgaggctgcagctctgctgggggatcagtgtccttctacaagcggctccagggaggtcccttgccccttccaccatgtgaggacccgagatggtgccgtctatgaaccgggaagtgagtcctctccggacgtggaacaagttggtgccttgattttgaacttgcagcctccagcttcatggggtttaagtacgatgatgctgcattgagacgttgtactgtgtgaagtcagggccttctgtgcatcggtcgagggtgcaatgcacacggcacccccgagcagccacccatcctcccttccctccaccctgcgaggccccgttgtccgtctgtccacactctgctccatgagcacacgtgacttagcttcgccttgtgagccgctgcttggggtgagcatgcttcctgctggatgcttctctatgtaagcacctgcctgagtgtcagccctcttaaggtgaaccgctccgtgtcattcgtacattcacaagtttgtgccgccatcatcgtgatcggattccaaaacattttcatcacctccaagaaagccttgtacctggcagcagtcactgtctctatggatttgcttattctggacatttcataaaaatagaatcaaacagcatttg

SEQ ID NO: 238153 - DNA, 479 bp, Homo sapiens
ggccttggtgatacaggacagaggtgcccgtgcaggttgtgcctgtggctgggtccccagggagaaggtggcaaccccaggccagcagcctcctaccctgaactccaggcaacatcgtcggccccctggcactgcacctgcactgtgggcagagaaggagggaaggctgggagaggaggaggaggtcgaatgtcgctggaggtcggcgtccttctgcagccgtgggtgagccgctgcttggggtgagcatgcttcctgctggatgcttctctatgtaagcacctgcctgagtgtcagccctcttaaggtgaaccgctccgtgtcattcgtacattcacaagtttgtgccgccatcatcgtgatcggattccaaaacattttcatcacctccaagaaagccttgtacctggcagcagtcactgtctctatggatttgcttattctggacatttcataaaaatagaatcaaacagcatttg

SEQ ID NO: 238154 - DNA, 294 bp, Homo sapiens
ctccactttccgatttcaagcaattctcctgcctcagcctcccgagtagctgggactacaggcgcccctcaccacgcctggctaattttttgtacttttagtagagtcagggtttcaccatgttggccaggttggtcttgaactcctgacctcaagtgatccatctgccttggcctcccaaagtgttgggattacaggcatgagccactgcgcccagccagaaacttcattttctgtcagttaagcagtccgttttgttatcacacatatctgttctcccttctgcaaataaac

SEQ ID NO: 238155 - DNA, 668 bp, Homo sapiens
aacatgactcttgcacctaaccactatcaaaagaggtcctttctcaggtttccaagaatgcctatcccaaacaggcattgaactctgtccaacgttcttcctgctgccatcaatacagtcatctgatttctcttctcacccaaatgcaccgacgcattttctgatgtgaaaccgtccttgcattcgatccagtccattcggtcaggccagtgttcttggtaaaatactcttatttggatagctaatatttgatctaggatttttgcctacatggaatgagtctgcagttactttacttgttactgtcctctcttggttttagagccaagtttccgctgcctttgtgggatgaggtgagctgtttttcctccatttaaaatttctgggccaggtgcagtggctcacgcctgtaatcccagcactttgggaggccgaggcgggcggatcatgaggtcaagagatcgagaccatcctggctaacacagtgaaaccccgtctctactaaaaataaaaaaaagttagctgggcgtggtggcgggcacctgtagtcccagctactcaagaggctgaggcaggagaatggcatgaacccgggaggcggagcctgcagtgagctaagatcgagccactgcactccagcctgggcgacagagcgagactctgtctca

SEQ ID NO: 238156 - DNA, 435 bp, Homo sapiens
gcctgtaatcccagcactttgggaggccgaggtgggcggatcatgaggtcaagaggtcgagaccatcatggccaaaatggtgaaaccccggctctactaaaaatacaaaaattagctgggcatgctggtgcgtgcctgtagtcccagctacttgggaggctgaggcaggagaatggcgtgaacccgggaggcggagcttgcagtgagccgagatcccgccactgcactccagcctgggcgacagagcgagactccgtctcaaaaaaaaaaaaaaaaaaaaaaaaaaattgtatgattcagtgaatctatgatttgtagatggtaaaataacagccagcactcagtgtggcacgtgctacgtgccaggaactgtcctgtgtgcttttcacatggatgaattttaatcctcaccgtacccttcccagccagctacta

SEQ ID NO: 238157 - DNA, 687 bp, Homo sapiens
aaagccaggaaatgcataattaaagtggtgaaaaaaagtgagataaaaaaacctgtaaaccaagatttctgataatgcaaaactatttctcaaaaattaaagagaaatccggccatttccgaattaaattgaaggagatcattattagtagccatgccctaccagaaatgctaaagggagtccttcatgttgaaatgaatgactacggttaattaggcccttatttgatgtgaagttatgagtggcttggcgtttaagccaagccacttaataaaacccagttccgacaaagtaagcctgtttttcaacacttaattttccctttctgttttttttattttttattttttggtctcactgtgttcccccgactgacctcaaactccgaggcttaagcagtcctcctgcctcaccctaccaagtagctgtaatcccagctacttgggaggctgaggcaggagaataatttgaacccaggaggcagaggttgcagtgaactgagaccgcaccattgcactccagcctgggcaacaagagcgaaactccttctcaaaaaataaaaaatctcagtcgagcatggtggcttgcatctataatcccagtgctttgggaggccaaggcaggaggatcacttgaggccaggagtttgagacctgcctgggtaacaaagtgggatcctgtctctac

SEQ ID NO: 238158 - DNA, 394 bp, Homo sapiens
gctactaacatattgattatagaggactttttttcattccttttatattgcagtatgattgtcttgtattaaatgtgtctgcttctttccttcctcctctctctctctctggatacttgtccttggaccccagccaccatcctgtgaggaagcccagagcacatgaagagaccacctgcacatgttcagatccactgccccagctaagatctccgctgacagccagaccaatcaccaatcttaggagctggcgagccttcagatggtccaacctttgaggccccccagaggagccaggtggagcatagatgagccatccatgtggatccctccaccaaatggaagatttaggagcaaaataaacaatgttgtcattgctttcacccaaaaaaaa

SEQ ID NO: 238159 - DNA, 681 bp, Homo sapiens
aactccaggcgattggcgcgaaggaggcgaaaagggcggattccctttccgggtcgcgcccgggctgcaggtccttatcccgaagctggggttactaggtgaacacggccggagggagagcgctctgaaatccattcttcagccgcacgtggaaaatggacagctgtgactcttaaagagaattaaagcaacaaagcatctcagcctgctctatgagctggatatttcgtaggaaagagccgatttggcgaaagttacgtaaacaatggaattgtctcagtttgcgcctttgtttcgtttgacagcccttcagggagtcatcgtgattgctggagacggtgaactaacactgtggggacccttgtgctaaacgtgtcaagtggcacaacaaggataggaacacgggtcctttggactccacagcttctgctccttccagattaaaccacactgctttctccaagttgttactgtagtaacatcattttggctgcagtttgtggatgggttggaagatgggaagtcaatgcagaagcaccgttgaaagtattccactgggcagggcgcggtggctcacgcttgtaatcccagtacttcgggaggccgaagcgggaggatcgcttgagcccagaggttcgataccaggctgggcaacacagtgagacctcgtctctatataga

SEQ ID NO: 238160 - DNA, 431 bp, Homo sapiens
tatgagaataaatctttaaaaattggcattttattactgctttctggaatctttaaaattaaataatttttatgcattagagtaggtgtatatatatctctgggaataactggaataaacaacataaaagagaaagaatagagaaaatttattttttataagtcttcattctgctcagtttaacagtgcccaaatacagagtaaatattgatactagtgaaataacttttcacaactttttttgggtactataatagaatacttggattttaaatagaatatagaatataaaatattgttttaaagaaagcagggccaagtgtggtggctcacacctgaaaatccagaaccttaggaagctgaggtaggaagatcacttgagcccaggagttgagaccagcctgggcaacatagtgagaccctctctctta

SEQ ID NO: 238161 - DNA, 827 bp, Homo sapiens
acataaatctttcaggtagtagtgattgtctaccaagaattctagaatttgagacttccagtgaattgagtgaatcggaaacagaggttgtgtatatcatatacatgaacatattacacaaatacacatataatgcatgttgtgaacacagatgaatacaagcaggttcaacattaacttagtgtttgattattaatcctaatacacataaatagataactttaatatcctcaaaactctcatacatatacatacttgtccactttttgcttctctattgataatcaacctcttacagatgtggctctacatgcagaagctgaggagagtgtggtattacttaaatcaccacaggtatcagatctgaatttctcaacaaagttgatagttttactttcctggcatatgtaatatggcattgcttaatattactatgaaataatgatgcatttaaatataaattttgatatattctgaaccagagttcatttgatattttgaaccagatttgggtcctttgtaaagcagaatcaatcttgtaaataaattaaatcatgctaaaactgtagaagtcaaattaaagcaacttttagaatatctttgctgaatgaggagcagcatatcagattcaagattgaaggaagagaaccagaagaagggactccatacttggtgtgccaagttacctcttcattgagaaaaggaagtgagggctgacatgaagtgggatggtccctgtctgtccttggcatcactttgtagtggccctcagtatggaaccactagaatcagaaactggaagctgggaggttccacggaagtcattg

SEQ ID NO: 238162 - DNA, 331 bp, Homo sapiens
tgattatatccttctaactgtggtgagatattttattgtggttttgatttgcatttccctgatgattagtgatgttgagtattattttgtatacctgttgcccatttgtatgtcttcttcagagaaatgtccatgcagatcttttgcccatttcttttttttttttttttgagttatttgaattatttccctgttttggatattaaccccttgttggatgtgtagtttgcaaatattttctcccattctgtgggttgtctcttcactctgttgattgtttcctgtgatgtgcagatgctttttagttcgatgtaattctatttgtctatca

SEQ ID NO: 238163 - DNA, 352 bp, Homo sapiens
acaaatacacaagtagtgtgtgattgtctctgtcttcatatttagttgggacaagccgaagctgtatgatgatgtaacaggcattttttttttaaatggttagatctcttcttcactgagtgaccttataacaccacacacgtctcctgcagagaaccagtgccaatctccttcaccagaatattttctgctccacagatagtgatagttgtagcagtagttgtactcattggaaactgtcctgtgagtgtttagtatgtgctaggcactctcctgagcactttatgcatattatttatttaaaccttgtgagatcttagactaagttagcacagggaaaaaaggaatttga

SEQ ID NO: 238164 - DNA, 421 bp, Homo sapiens
tcccatgagatcacaatgttgtctctactctggaagcagtttaccctcaaccctggtgttttattaagagtggaaggatgtgtcctggtagtgggatgtcccatgtttgtagtgcaggacgctcgaccatcttcaacttaacaggcccagtctgaccaaggaggccctctccttctggaatctggggttccagttagtctagatgggtctcttggacagggatgtaaatatggaagccttgagattgcaatattctatctattttatggatggagaaggcaaggaaattggactagggaaagaagcacagatgagagacagagtctggatggcttatcagttctacattcccttatgctaccaaagcctggctgcattcctctatcttttaataaatatcttttcctttcctgtgagccac

SEQ ID NO: 238165 - DNA, 472 bp, Homo sapiens
tcctagtcaatacacgggcctgggaaccaggaactcttgagtcgtaacctcagcttgagcagtagccctcccaccttgtatgactttaggtaaagcatttaacttctcttccatctaccaaataggagttactgatgctgtccaggttaccaagtgactgctagtgactgctctccatgtgagaagtttgcagagtccagagcacacatctgatgggaggggcgaggctttctacagctgcttgacctttgcttggcttcactaattgggagtttcacgcagagttctcattggctgatggaaaacaaattctatgcaatttctgattgtaaacttagaaaattcagagagaaacagccgctaccaaccacctccacctccaccaccgctgccaccaccttgaatggaattgtcctcacttttgttgctgttgcaaatgtactaaaataaagacatctttggaagatgacga

SEQ ID NO: 238166 - DNA, 385 bp, Homo sapiens
agatctagggtcgagctgaacttggctgagtgactaatttcaccagtctgagctttccccagagttaaatgagaaaatatagaaagtgtctaataaattacgtggcccagatggatactcaattaatgtcattgaatgaatcttcatggagagagcacatgtttataaaaaaaagtcttcagtgaatcatgataagagtattgccaatggtctctaatttctttagattagaaaagaggttttcatgttgcttgcatttggtcttttccttatttaatgtctgccacactctgaagactttaagaatgtttaataattgaatgattctgtatttatatactcaaaccctggcataaaatattcttgctaattacataatgcactc

SEQ ID NO: 238167 - DNA, 501 bp, Homo sapiens
ggaatttttttgtatctgtatgttgatctctatagacagattggtgaaattttcccgaattatttcctcaaatgtgttttccaagttgcttactttcatctttttcaagaatgccaataaggcataggtttgattgcattacataatcctgtatttctcgaagtctttttttttttctcccatttccttaaattcttttttcttttgtctgactgggtggatttgcaggatcggcctttgaactttgaaactctcttctgcttggtctagtctattcctaaggcttccaactgtattttgaaatttttcaattccagacgttctgtttggttctttcttaatacagctatgtcatcttttgaattggattgtttttctggcttctttgtgttggatttcatctttctcttggacctcattgagtttctttgctccatatatattctgaattttatactgtcatttcagatatttcattctggttaggatccattgctaggg

SEQ ID NO: 238168 - DNA, 299 bp, Homo sapiens
ggaatttttttgtatctgtatgttgatctctatagacagattggtgaaattttcccgaattatttcctcaaatgtgttttccaagttgcttactttcatctttttcaagaatgccaataaggcataggtttgattgcattacataatcctgtatttctcgaagtctttttttttttctcccatttccttaaattcttttttcttttgtctgactgggtggatttgcaggatcggccttccaaagtgctgggattacaggcatgagccaccacgccgggccaagacaagagtccatctca

SEQ ID NO: 238169 - DNA, 2284 bp, Homo sapiens
ccctccaataacaagcccctctgtggctctctgcctgtggtccaccttcccactgtgaaccatgctggcaaggagctggggttatgaagggaaagagcagggcacaaggcaagtagggctcgtgacttttcccctttcattatgtgtgtccaccgagctgtcctgcttctgttttgtaatgggttcttccatggcaagctgacctttcggctgaataggtcaaactcccactgagcgttaaccctcagccctcctcacgtgagtgcctcccctgaggtgaggagcactggttaggaatatgactgggagggcctggtgtattccccaaagaagggttgccttttactgcactgaattaattctcagagaccaccgtgtgaggttatgctgaaggatccagattagaactttcctgctgacattgtggaggggcaaaactaattcttcagatacatgttttagactgtggttcccctgtgtatcttcccctttttaatgagagaaaggccaaatgcacagtcttagtgattcatcggatcattttggatttctgagacaatcagaattttcctagatgattttttaaaaaaccaataaacccttctccctgtatttctcttccatttaaagtctcttaaaactctaggtgttttatttttaacccttgtaaaacatgaaatagtagagttgtggtgtgtgttgataattatatactggacctacttttgttttaaatgtcataaaacattttttggactatttattaagttttgcaacactaattcccttatagtagctagaaattttcaacatcaaataggcatttagtcatgttgaattgaattttaagttgaattcctgtggcttgggctttcttttttatactagtttgtataaactgttcaactcctatagctcttacgtctcactctcagtgagctggtaacagaatcttcacagacaagtggttgcacattccatttatttagcaatgccctctgtgtgtgtgtgtgtgtgtgtgtgtgtgtgtgttgtgtgtgtgtgtataggttaattttgttagtgttctttaaatttcagaaaatagtcttttagttgaacaaacaaataaatgaaatatgtcagtagatcagatgaaactgtgacccgttcggcaatagtaagtatacagtgtgtctgggctaccagatggttttagaaactgtcaatttccaaaatacagaaatctgagagagcttcataaacaatgtattgctttgctgaagatgacagatcccattgaggaaatgcccctttagttgttttagatcattaatgatactctataaacataataagattaacacggagaaacaaaatacctgtgtttgcagtattctttagttatcagattattgtctcagttctcaaaatgccaaatgtgataggataagtgcaagataagaagtacatttttaacatctattcagttagcattaatgctcaagttaaagctgggctcctaccagggacataatgggctcctgtttaacatatttatgttggttgtaaaattaggaactgtctttgcagcccacatcacctgcataagtgcaaaacatataaatcaagagaagttccagtgacataaaaatgccatcgaatagaatagcatgaaactacttgcaagatacttgtatattatgctagggtgtatgggggtacacactcagatttctagggggtttggagaacaaagaataactatacagatagaactcatggatgaagacatttcctcagagcacagcctgaaccctagtggagaaacagcgggaaaagaaaggccatcagtagccagacttgaataaccgccccaccccccacacccccactgaagacaacagcgtctatgctttcagaaggcatttgagcagctttatgttgttactggagcttgcatcttgggcctcctaagtcagtgaacttttctgtgatgttttagggttccttataacctggtggctattactcccttgccccctcataatccagttctttgtagaatgatttctgttatctaaaattagtccttttttctttttttgggggaggggggaggggacgtgcagtgatttattttgaactttgtaattggagtccctgaagtgcccccccaaattatgagctattaataaggagctttctgaatcctaattactgtctcaaaaacagagtggacacttgagaagtttttcaactcccccgcttctccctcccaaaagccacccacccccataatctc

SEQ ID NO: 238170 - DNA, 171 bp, Homo sapiens
acgtttacacaattgcattgtgacctgccactcataaatacatcacttagtgtgtatgtcagttcaggtatcaggcagcaggaatgtttttgaataaccccagcaatatactcaggggaaagccacggtcatataatctgtctctaattattttcaacaaacagcaaagag

SEQ ID NO: 238171 - DNA, 440 bp, Homo sapiens
tgtcttcttgttccacagggaatggcaaggaacctgaggaaccagcgtgaggaaaacctggatgatctgacgtcttcctcactttatccctacctgtccacgcctccatccatccacccatccatcactgatcaagctctcactatgtctatagtgtagaaggtgccaccaaatgcaatggaacctcttgtctcatgtgtctacttgcatctttaagttgatacacggaaggcacagtccaagcacaggatactggaagctatggaggtacagtggcctctgagcaaactgaaaactctctatcactaaagggttgggcatacagggtatctcctctgctctgccacctaccttgaggatgctttacatgtggctaaaagtggaggcagagatatttggataaataaatgctagagaattggaaattcctaggacaagtc

SEQ ID NO: 238172 - DNA, 488 bp, Homo sapiens
tggtattttgttttgttttaattttacaagaaatatatgagtattctctcatttaaaaaggagaataagggagatactaatgtgatatcttcaattttttactctaggcatttccataaaccagataatatggaaatccctagagtaaaaattgaagttatcaccttagtatcatatcacccttactgtctccttgatatcattccccactgcagaagtaactaccgtcaacttttggtgtatatgcttccaggcttttatctatgtatttttatatacgtgtgtgggtgtgtcagatacatacaaaggtatgtgtatacaaaaagatatgtatgtgcatgcgtgcatgtatacatatttgtgaatgtatgtacatatttatgaacacatataaacacataactggactatcagcctacctctggtccctaactagtctttccacatctcttcttatccatttgcagttcattctttattctgtagcc

SEQ ID NO: 238173 - DNA, 411 bp, Homo sapiens
tatttaataaactatgttagaggctagatctcattcatgtctatataccctatagcatctactcatgtggcttacagatcataggaactagttatcttaaatcttaaattctttttgaagaaactgtagtataaaatatacatctataaaggaaagtagtgaattcaattaacgtttgttcgttagaactgaaggtgaagctaaaagaacaaccccctgtattacaaaaactgcattctgttgtgtatgataaaaaggaaatgcaaaatgcatagggacaatgaatcacctctcccctgctcaaatggtatccgttaagtgtgcatcagaaaggaattttttgtcagggcagctgctgttgtccagccaaaagagatacttggattccggaagaagccagcttacttttta

SEQ ID NO: 238174 - DNA, 489 bp, Homo sapiens
ggtctgccaacaaggtataacaggaagttccaagcatccctaaagtgttttgagaggaatgtggagaacttgagttggtctcaaggcctgtgatgggggatctagtgtagagctgaggatctctaggctgatgggaagttaaaagattgtaggtactgtttgcctgtcttccagtattacttaaaccttttatctttgttggggttgtgtttagctacctcagtagcctcttttcaaagatcccctggctcttggaaaatttcctcaaaatggtgtttctgggaccacaatttaaaaaaattgtttgtttatttattttagagatgagggcttgccatattgcctaggctgttctccaactcctaggctcaggtaatcttcccatcttggccttccaaagtactgggaattacagatatgagccaccatgcccagccccgtaatttttaagtaagccatttttctcatataagttcttttgcttatcta

SEQ ID NO: 238175 - DNA, 456 bp, Homo sapiens
tgtttgcttgtgtgatgtaatgagggtggacttgcttctcctagggaagagcctcattaaggttagcaaggggcttgttcctgggaagttctaaggaccgcctggggctgccacataaggaactccccttttctcattttgtctccggtaagttgttattgatctgtacatgatgtttctctttcttaccagccgtgggaatgggccatcctctggcatcactgttgccttgaacgttaccatcaccaccgttgccatgaagtcatgacagcagcaccattggctctggtttattgggtgtctaccatggacagtagtagggctagacatttagtatactccagggctactgcggggattaaatgaggtatgaagcatctataaccccacggtccaatagggtagccactagccatgtgtgcctactgagatatacattttaattaaagttaaata

SEQ ID NO: 238176 - DNA, 563 bp, Homo sapiens
cttgcagtcacaaccatccactgcactgtcagtcatctcagaaactatataaccttataaccttctctagtaacttgccagctattacacacccaaagatcctgttctctcacagtattaagtaatccctggtactctccaaagtcaaagagatcacatagtttaatgtgaaagagagcaaagctttagacctgacagaaaactgcccatgtctcttcagactccaaaagtaatccaaaatatcccaaaaagagtgtgttcaatgcttttttctgtgttcctgaagggtctcagcggttctagataactcttctagatgtctttacatgatattgaagatggcaaagaggaaggaggagcagaagtaaaggcgagtacaaatcttagaggagccattttcagaagactataggttttccaaaggggtcaaggaagtgttgcattttttcttcagcaaaattgtaccgacaaggaagaaaatgaacagagggaccaaacacataattaaaaagtgtcacaattgactgaaaaaaatttcccaaaatcaggatccaaaagagaaa

SEQ ID NO: 238177 - DNA, 400 bp, Homo sapiens
taaattaggaattcaagtcagaaacaggaaacgcagtttgctgaaaccatgaatgggaaatggtttttttgccgtccgtatttaatttgctaagttagcaaatttaatctgaagataatttaaacagtagttaaatctatccagatttatttcatctacctttctaaaaaaatgtgtctttttaatattcatgctggttttctatgaagtcagatgtagtctttagaaagggtttttttgttttttttgtttgtttgttttgtttttggctgggcggtagctcacacctgtaatcccagcactttgggaggttgaggcaggcagatcttgaggtcaggagatcaggaccatcctggctaacatgatgaaatcccatctctactaaagatacaaaaaatta

SEQ ID NO: 238178 - DNA, 366 bp, Homo sapiens
gctcagccagacagttcttattcgggttctcatgcagttatagtcatcatcagattgtggccgcgactggcataatctcaaaggcttccttagtatttctggcagttgatgctaggacctcagctagtgctggggctggaacatgtctacacatagcttccccacagcatggtggctaggtactaggagtgactgtcccaagaggaccaggcagaagcagttacattttatgacctagtctcagaagtctcataacatcacttccactaaagtcccaagcccccccagattcaaatggagggagcatatatcccatctcagtggtaggaatttcaaagaataaattctgtgaaactgtagtagata

SEQ ID NO: 238179 - DNA, 467 bp, Homo sapiens
ggagtctgatgtttctttgggatcattgttagaatgccagataaaataacatgtaagagttcattgtagatcacacagtctgatccgaggaagcaataatcccttcttttaaatgcattttctagtcacagtgtcctctgtccaggtgctgatctcccactctagaaggaggaatcagcaatggctgaaggcacaggtctcccaggttcacagtcccactgccgggcaattaaaaagccttggtacatcacactctggggactgttgtggggtggggggaggggggagggatagcactgggagatatacctaatgctagatgacgagttagtgggtgcagcgcaccagcatggcacatgtatacatatgtaactaacctgcacattgtgcacatgtaccctaaaacttaaagtataataataataataataataaataaaaaagaataaaataaaataaaataaaat

SEQ ID NO: 238180 - DNA, 437 bp, Homo sapiens
agagataaaatgtagtaggcaagaagagaaaagagatcatctcagctggttttggatattggacatgagctcaaacctgagaactgagaagctgtctgctgcaggtgagtctggatgatggacagtgacaagcagttattcatgtgtgaatctggtcaacatgaacatttagatgctgaacacaaaagcttgatttttattagctatatttgttgcccatatattggaacagatcttaaagtggaagtcagacgtgtattatcagatatcatttggagtaatgagtgtattttcctaatctttccaacaccaacctaaaaactcatgtcaaaagcatgcatactaattaatttgttttccatatagtaataagattaacaacctcgcatttacatggggtactgagtcatgctcaaataaaacaagttctaatgaga

SEQ ID NO: 238181 - DNA, 646 bp, Homo sapiens
gtctgaacagctgctgccaccacttttttaagccaccttcactcaggaacgagccttgtgcagacatacagaacagtatccacaggcagagtcaaatttgcttccactgatccttgctaagtactggtctggggtcgtgctgcctcaccacacacaactgcagaagcacggtcgttctgtcctgccatcagatacacacacggcagaagccagtcagccggactgtggctagtcagggccgcgccctcattgtcccattaaacccttcaccagaaatggagatttggagagtcttaacttctggaaactgagtttgtgacttgcttcccatcatccgtactgtaacattgatcctattgacctgtttgctctcccatttgtctgtgagcaactttctgggggatggaccaaagatatggctcaagctgtgggatcagatggatttaagtttgaatcataggttcacgacatccaaagtgtgtgaagaaaggaagggaagtgtgtgttaaaagaagtgggcgagggccaggcatggtggcttacacctgtaatcccagcactttgggaggccgaggcgggtggatcacctgaggttgggagttcgagaccagcctgctcgtgccgaattcggcacgagcggcacgag

SEQ ID NO: 238182 - DNA, 487 bp, Homo sapiens
tcacacacacccacttcctcatcgggcaatttggggcaagctacttctctaggtgcctggagtttgatgtctgtgtgatggggagaagagttgtgcctactcagaatcactggaggtgaaatacaaacttacagagaggacctggcttgaaggtattcaagaacaagaggattcagaagtgttcagtcttactcccattcttttgctacagttatcacataagctttgttgttaaatgtgggtccatgaagcttttatcattactgtccccaaagtgtgttgatagcatttcctaggaggatttgacctttgttgtattgtgattttctaataagaggcatatgattggataaaagacataatattggaaaggagtgaaaagactgggccctgcctccaattttactgttaactgtaaccctggaaacactcttttgaaaaaaagttaattaaacgagatcatgtcctttgcagggacatggatgga

SEQ ID NO: 238183 - DNA, 1884 bp, Homo sapiens
  misc_feature (228)..(228): n is a, c, g, or t
  misc_feature (439)..(439): n is a, c, g, or t
  misc_feature (684)..(684): n is a, c, g, or t
  misc_feature (822)..(822): n is a, c, g, or t
  misc_feature (912)..(912): n is a, c, g, or t
  misc_feature (1041)..(1041): n is a, c, g, or t
  misc_feature (1063)..(1063): n is a, c, g, or t
  misc_feature (1219)..(1219): n is a, c, g, or t
  misc_feature (1354)..(1354): n is a, c, g, or t
ccttcggatggcgtttctgagtggacgtcctttttgttgatattgatgctatacctttctgtttgttagttttccttctaacagtcaggtccctctgctgcaggtctgctagagtttgctggaggtccactccagaccctgtttgcctgagtatcaccagcagaggctacagaacagcaaagattgctgcctgttccttcctggaagcattgtccctgaggggcaccngccagatgccagccagactctcttgtatggggtatcttttggcccctgctggggggtgtctcctggtcaggagacacaggggtcacggacccacttgaggaggcagtctgacccttagcagagctcgagcactgtgctaggagatccactgctctcttcagagctggcaggcagggacctttgagactgctgaagctgcacccacagccancatttgccccaggtgatctgtcccagggagatggcttcatctataagcccctgactggggctgctgcctttttttcagagatgccctgcccagagaagaggaatctagagaggcagtctagctacagtagctttgctgagctgcggagggctccagccagttgccatttccctgtggctttgtttacactatgaggggaaaaccacctgctcaagcctcagtaatggtggatgcccctcccccgnccaagcttgagcatcccaggtcgatttcagactgttgtgctggcagtgagaatttcaaaccagtggatcttaacttgctgggctctgtaggggtgggatccgctgagctagaccacttggctccctggcttcagccanctttccaggcgagtgaacggttctgtcttgctggcattccaggcaccactggggtatgaaaaaaaaactcctgcagctagcttggtgtcngcccaaacggctgtccagttttgtgcttgaaacccagggccctggtggtgtaggcacccgagggaatctcctggtctgtgggttgtgaagaccgtgggaaaagtgtagtgcctggaccagagtgcaccnttcctcatggcacagtccctcncggcttcccttggctagtggaggaggttcactaaccacttgtgcttcctgcatgaggcaacaccccaccctgctttggcttgccctccatgggctgtacccgctgtttaaccagatgagctgggtacctcagctggaaatgcagaaatcaccctcnttctgcgttgatctcgctgggagctgcagactggagctgttcctattcggccatcttgccacaagctgatgttagtcttttagggcccattagctctcaagccttcctgtacaactgtaagatggccattattantactcccgccagatgccagccagagctttcttgtatctaaacctgtgtttgttttttaaaactcatcaggagagttttttcctccaaagatcatcttaattgaagaactgaattaaaagcatacatgtgccctgtgtctacacttaaaactatccaaaacacaaacctttatacctaaaggaaactgaggcctggatttgctcagataatgctggaattcatacttaaaactctcagacataccctcaagaaattcagaagtaggaaagacagatatttaaacaaatatatgtgaaaatgctctttgaactataaagcaatttacaaaagtgtcatcaattcatcattgttgttatctttatcacagtcaataatattgttgcccaaattagaatggtttaacaaaacattttcttccttgccttagagcaggggtgtccaaacttttgactttcctgggccacattagaagaagaatgtgtcttcggccacacataaaatacgctaacactaataatagatgatgagct

SEQ ID NO: 238184 - DNA, 360 bp, Homo sapiens
acagagcagcacggtgactcaacgctcggtagtggcagcagctacacacagatgccagccgaaaacggctcgctggtgcacaccttggtaacagctgctcctccattttttgctgagaaaccacacagcatcacagcaggataggagagcttgagaagatcccagggatggctgagcagcaccttgtagccaggatagctggagtaagcctcagttcacctaccatctgttggcaggagaccagccgcatttttctacggtgtttttgtatatatttagatacacctgtaagtgtgattaagaagacagcacattgcacacccaggaataaacagaatgtggtttgggcaaactcaaagc

SEQ ID NO: 238185 - DNA, 364 bp, Homo sapiens
tgttctagaaaaagttattttttattcattgtttccatcacctacttgttagctttcttaagaaaaaaatttttttagtataaaaagaattgtgttcactaagccagctcacttctgaccacaatagtgtctttgtgtattcatagaaggtgacctgcctctaaatttcaatggggaattgtgaatgggccatgttatgaaactgtccgaacttcctacttgctagcatgggagacgaggggggcaatataactgccatgttctcttcttttggaaaataacttcaaactgtagactcaaaaagggcaatgtgctacaggtttggaaggaagcttttaaaaaaaatgtttctcagattgtaaac

SEQ ID NO: 238186 - DNA, 515 bp, Homo sapiens
taatttcgtatatacacacaccactcacatgtatacacgtatctctttctatacatattaagaaattttttctaatcttacaatcagttaaatatttgcctatgttttcttttgtatgtgtgcatttatggtttaattttttactctatatatttaatctctttagaatgattttctatattgtatgaagtatggagctgatctttttttgtcctaatcattgaataatgtactttctgccttgctttataatcttttatagtattaaggattatattaaagtctgtattaagtttttatatttttgttggtattatgaaaaggattttttccatatcatattttgttggtggtttctagctattggcttttatgtatttcatttttaactggccatctttctaaatttttatactggtactaataaatactagtagctcttagacttgattcatttgcatcttctaggtatataattatccagtttatagataaaaataattttgcttcctttc

SEQ ID NO: 238187 - DNA, 281 bp, Homo sapiens
ctttcagcactttgaaaatctcatcctgctgtctcctggcctataccgtttctgctgagaagtctgttgccagatgaattggagcttcattatatgttatttgcctcttttctcctattgcttttaggatcctctttgtccttgacgtttgagagtttaggtcaaatctgtttgggttctctgactttcctatacgcggatatgtctttgtcaagttttggaaagtttcctatttttatttctttggataagctctctaccccttgttctcattcaagtcc

SEQ ID NO: 238188 - DNA, 398 bp, Homo sapiens
ttttttttttgagacagggtcccactccgtcgcccaggctggagtgcagtgatgtgatcattgctcactgcagcctccacctcctgggctcaagtgatcctcctgcctcctctgagtagctgggactgcatgcatgcaccacaatgcccatctaattttcgtattttctgtagagatggggtttcgccatattgcccaggctggtctggaactcctgggctcgagcacttctcccgccctggcctcccacagcgcatggcctcccacaatttcttgacatccaaagatacttttgctgtcttaaggttttatattttccagaatgtaatacacgtggagttattcaggatatagccttcacagattggcttccttcactgagcaatgtacttttaagg

SEQ ID NO: 238189 - DNA, 339 bp, Homo sapiens
ttttttcgagacagggtctcattctgtcacctagactggagtgcaatggcatgatctcagctcactgcaacctccacctcccaggctcaagcagttctcctgcttcagcttcccaaatagctgggactacagggtctccaatatttgagaactgacacattcaatgtaaaaataatctgagtaaaaccatcatctagtccctttcctttgagacccattttttttttcctcatccacatcctacctataagggaggaagcaaagtgaagaacacagatttcacagatgggatgcctggctcaaattccagcttgaccgctggtagctgtgtgaccctcg

SEQ ID NO: 238190 - DNA, 410 bp, Homo sapiens
catattatcattttctaaaagtggggtaattaagggatcttcttttaatacttaaatacttaaataattttaaatacttagataattttaagtattctattgttttgcttttctttaaactctactactttgagtgatttattaaagccgaccacataatgttgtataaaaataatgaattaaatatactttgtgtatcaaagtggcttgctagagcataacaagtggttttaaagaaagtaaacaagcaaattaatcgccagttttctcgcagaatgtggcttcttaaatgatgaaaaccttgtaagacttctttcaggttttcaatggctataaacgatttggaagtaatttatcttcttagccattgttagtaccatatgcaagaatttgctcttctccagttttag

SEQ ID NO: 238191 - DNA, 1411 bp, Homo sapiens
agccaccgctcccctcccccgcccgacccctgtgcgacccccgcggggcgcggggtctgagccttgcgggcctccgatcccctcctcagcgttcgcgcggccgagcctgcagaaacagagctggggagaaagcgctctggaggccgctgtgcaccccttcctgcagggctcagactggcggtgtgatgtgggtttattgccttggcctgaggcaggtggcggctgcttctctcggagttttcaaagacagggaaagtgatgccgagtggctgaaggtcactgaggacagtgccgggagatacgtgaagattccttcccagggaaggaatctggaattcccacgcatgagtagagggctctagagagacccgcgcgctggcccttcccgaaaccccttggctccagtgcaccatgtgagtccctggccgcgctcggtgtctctccttcggcccagatttggggatgggaattcctaatggagaaatcgctcatttgcatagtcagtaccctcacgcctcctaagtgtagcctcattatcgacacagacgcctgcagagtcgtttctctataatgcaaattttgcaggatatttttgaacaacgtttttgagttatcatagtaaatgaaaaggcaattactagttatttaggaagaaggaaatggtttgaagtagagataacttttttacctctggggggaaaaaaaggcgaatgacttcagattccatggcaggtcaaaatcagaactggtaagatttctgcatatctggtgagtatccacataaataatcattttcctgaaaattacactctccttatttaatctgtatttttgcataaaaatgtgagattatacctgggtcataaatgcactgctgtccatttatttctgaagtttattgcatagccatggataatttgagttttatattcaatagcagaaactatttttctaaccacgtaagcagtcagaattgatttcagaagaaatgcgcagcaataaaagttaaggcttatttaataacagtttggggccaatttggtccccctggaaactatctttgacattgacaatccgaagagcaaaagtttaagaaaggatctaatacttcaaaatttagcttgtgggccggacgcggtggttcacgtctgtaatcccagcactttgggaggctgaggcgggcggatcacctgaggtcgagagttccagaccagcctgaccaacatggagaaacactgtctctactaaaaatacaaaattagccgggcgtggtggtgcatgcctgtaatcccagctactcgggaggctaaggcaggagaatggcttgaacctgggaggcggaggttgcagagagccgagattgcgccattgcactccagcctgggcaacaagagcaaaactctgcctcaga

SEQ ID NO: 238192 - DNA, 494 bp, Homo sapiens
gttaaaaattcgttcagtcacaaagctagtcaaagagccaggattctatctgaaacatgtcttattcactagtaactacattaggagaattgaaaagtgtattttggtaaattaaaactactgggtttcaaataatgtacataaaatacaaatattggcatattttacctgttaaaaattgtacactttgaagattaaagccattttgaaaatctagccagttgaaaatattagaattacatcattaaatgtcaagaatcgataatgcagttgaatacaaatcaaatcactcttaagccttagaaaaatcccaagactaacagaaatacgaaatgttacgtaagctacatggtacggcatacctgtagtcccagctactcaggaggctgagacatgagaattgagaatcacttgaacctgggaggtggaggctgcagtgtgccaaaattgcgccactgcactccagcctgggtgacagagggaaactgtctcaa

SEQ ID NO: 238193 - DNA, 2085 bp, Homo sapiens
  misc_feature (976)..(976): n is a, c, g, or t
  misc_feature (1379)..(1379): n is a, c, g, or t
  misc_feature (1866)..(1866): n is a, c, g, or t
ttacagccaagggtcaggattaggatgtaaactcctgggagtgtgtgtgtgttttatcctggtatctctcgtggtgactaattccttgcttgtgcatttcaagagctcaaaatatttttgctctttgcaatggtctgaatgtattctcccaaaattcatatgttgagacttaattgccaatgtggtagtaatgcaataaatcagattatatctttgtaagctttaagagataattaagttatgagggtagagccttcatggaaggaattaaggctcttacaaatgggcttaagggagtgggttcattaccttctatcccttcctccacgtgaggacacggcatttactccctctggagcatgcagcaacaacataccatcttggaagcagaccacagtgcaatcaaattggaacacaagattaagaaactcactcaaaaccacacacctacatggaaattgaacaacctgctcctgaacgacttctgggtaaataatgaaattaaggtagaaatcaagaagttctttgaaaccagtgaggacaaagagacaatgtaccagaatctttgggatgcagttaaagcagtgttgagggaaatttatagcaccgagtacccacatcaaaaagttagaaagatctcaaatcaacaccataacatcacaactaaaagaactagagaaccaagagcaagcaaaccccaaagctagcagaagacaaaaaaaaaaacatcaagatcagagcagaactgaaggagatagagatatgaaaaacccttaaaaaatcaatgaatccaggagctttttttgaaaaaattaataaaatagaccactagctagactaatagagaagaaaagagagaagaaccagatagacaaaataaaaaatggttaagggtatatcaccacttagcccacagaaatacaaacagccatcagagaatactataaacatctttatgcaaataaactagaaaatntagaagaaatggacaaattcctgggcacatacaccctcccaagactaaatcaggaagaagctgaatccctgaatagatcaataacaagttctgaaattgaggcagtaataaatagtctaccaaccaaaaaaagcctggggccagacagatttacagctgaattctaccagaggtacaaagaggagctggtaccatttcttctgaaactgttccaaacaattgaaaaggagggatttctccataactcattttatgaggccagcatcatcctgataccaaaagctggcagagatacaacaaaaaaagaaaacttgtaggtcaatatccttaataaacatcaatgcaaaaattctcaataaaatactggcaaaccgaatccagcagaacatcaaaaagcttatcnaccacgatcaagttggcttcatcaatgggatgcaaggctggttcaacatacacaaaacaatacatgcaattcatcacataaatagaactaaagacaaaaaccacatgattatctcaatagattcagaaaaggccttcgataaaattcaccatcccttcatattaaaaactctcaataaactaggtattgaaagaacatacctcaaaataataggcatttatgacaagcccacagccaatatcatacagaatgggcaaaagctggaaatattccccttgaaaaccagcacaaaacaaggatgccctctctcatcactcctattcaacatagtattggaagttctggccaggacagtcaggcaagagaaagaaataaaagctattcaaataggaagaggggaagtcaacctgcctctgtttgcagatggcatgatcctatatcaagaaaaccccatcatctcaggccaaagccttcttaagctgataancaaattcaggaaagtctgaggatacaaaatcaatgttcaaaaatcacaagcattcctatataccagcaacagacaagcagagagccaaatcatgaatgaactcccattcacaattgctacagagagaataaaatacctaggaatacagctatcaagggaagtaaatgaccttttcaaggagaaccacaagccactgcttaaggaaatctgagaggaaac

SEQ ID NO: 238194 - DNA, 1195 bp, Homo sapiens
  misc_feature (12)..(12): n is a, c, g, or t
  misc_feature (17)..(18): n is a, c, g, or t
  misc_feature (33)..(33): n is a, c, g, or t
  misc_feature (39)..(39): n is a, c, g, or t
  misc_feature (49)..(49): n is a, c, g, or t
  misc_feature (60)..(60): n is a, c, g, or t
  misc_feature (64)..(65): n is a, c, g, or t
  misc_feature (80)..(80): n is a, c, g, or t
  misc_feature (90)..(90): n is a, c, g, or t
  misc_feature (93)..(93): n is a, c, g, or t
  misc_feature (104)..(104): n is a, c, g, or t
  misc_feature (125)..(126): n is a, c, g, or t
ctggaaaggagngtcgnnatttcgccatgttgnccaggntgatttttgnatttttagtanaganngttttgccatgtggnccaggttggnccnaaacccctggnttcaagtgatctgcccccctnngcctcccagagtgctgaggcaggagaattttttgaacccgggaggcagaggttgcagtgagccgagattgcgccgttgcaccacagcctgggtgacagagcgagtctccgactcaaaaaaataaataaaataaaataaaaataaaatgggctcaataagaatctctaacacctaaagcaatggtaaaacaaagccttaccaccgctatcttcctgtgctgtatatagggctattcgccagagctggaggtattccagggagggaaaattgtccatgctctgggtctatctataacgctggataaaagatgcctagaacctaggctgcaaatgtacaagctttcctcattaaagaatggtaaaatgggtcccatttggtttcatcaaaaaggcagcaaatctttcacaactgaggaaaacaggtgaaccacgagcttcacattccaacagaactgtggtacctatgctagccacaaagattatttgttgactcaaatgtaattgtaccagtaatgaacaattagtatgctcagcgatgctcaggagagccgctccaaaaacttacattattccccagacaaacgttctctaggggcagccttgcgtatttctacaccttagtagacctaagttaggcgttcaacaccttgtcctggtccaagccagaaagaacccagtagttcagacttttcccaggtcagaaaaccacgaagggcctcctcacaccctgattaaacgttggaagcgggccctgtgctgtaataacgctctggccactcccaaaaaagcgaatcttcgggaggaaagcaggctcccttattagggctcacagcactccgctcaacttactgtaggcgtcggctccagcaagactcgtccctccaagcctttaaattatctgactgcgggccagtagcaaatgaacggcactggtggcggtgggggatggctgcgcgagtgaaatgacctccgtgtgtttgctaaccccgctattatactgccccgcttagaaacttaaagcgcttcagacatcagatctcactcgcttcccaaataggcttccgtccgcg

SEQ ID NO: 238195 - DNA, 445 bp, Homo sapiens
aggctccatcctgcccttcctctcagccacaggtgcaggatggtagatgggaacttgccagaaggatgcgaccctatttaagtagttgtgttttcttccagcccagcatccccaccaaaacaggaaaagaagtgctctcgtgcagggcttgttcacagtgagcctggctggctcctcatgatctctgagtttaaaatgtgccagcagatgattttaacgatcccatcaaaaattgttgtctggatcagtttcgagctagcgtttccttgcagaggccattcttccttttttgacaaaagttgggtcggccaggtgcagtggctcatacttgtaatcccagcacttcgggaggctgaggcaggtggatcacctgaggtcagaagttcaagaccagcctggccaacatggcaaaaccctgtctctactaaaaataaaaaataaaaat

SEQ ID NO: 238196 - DNA, 1198 bp, Homo sapiens
ttccttttttatttttaatttttgtgggtaaatagtaggtgtatatatttatggaatatatgagatattttggtacaagcatgcaatgtgtaataatcacatcatggaagatggggtctccatcaccttaagcatttatgcattgcattacaaacaatccaatgatactcttttagttattacaaatgtacaattaaattattattgactatagtcaccctgttgtgctatcaaacactaggtcttattctttctatttttttgtattcatcagccatcctcacttaccctccaaccccccactacgctttccagcctctggtaactatccttctaggctctatgtccatgagttaagttattttgatctttagatctcacacataagttagaacatgtgatgtttatctttctgtgcctcatttatttcacttaatataatgacctccagttgaatttattttgtctaaagtttttcttttaacattggtttttgagagttagtttgtatatgccagttccagcataccattcattgcaccttaggaaatagatacaacgctaggtacatagaaagtgtacagtaaaattctttattagagtgtactaagacttctgaattataacaatcccactattaggtaatgtgcacctgtccttttagcatatctgttacttaaatctagattttctaaactaaggaagtggagattctaatcttaagcatgttcatctaggactagaaacagagtgtatggaagagaacatagacaactaaaatatgggaggcatattgagagaaacgaaatccctgtggccaagaacaacagttttgttcagatattaaactttatcacaaggttatttgattgggtaatagctatagggagaaagagattgaaatgaaagctaagagctgaatctataaaaataaggtacaaaaacaaaatagctacctaaatgaggacagaaagcacagacaagaggggtagatacagcttatggagaagacaaacacaaaacaggagataaaaaggccagggttataaccatagtttcctaggctaatcttttttacatttcctagaaattaatgaaaacacctccttatagcctaggaagaaagtgaatgcaggaggccttttttttttttttttgtatttttgtctcccttcctttcccttcctcccttcctccc

SEQ ID NO: 238197 - DNA, 1145 bp, Homo sapiens
ttccttttttatttttaatttttgtgggtaaatagtaggtgtatatatttatggaatatatgagatattttggtacaagcatgcaatgtgtaataatcacatcatggaagatggggtctccatcaccttaagcatttatgcattgcattacaaacaatccaatgatactcttttagttattacaaatgtacaattaaattattattgactatagtcaccctgttgtgctatcaaacactaggtcttattctttctatttttttgtattcatcagccatcctcacttaccctccaaccccccactacgctttccagcctctggtaactatccttctaggctctatgtccatgagttaagttattttgatctttagatctcacacataagttagaacatgtgatgtttatctttctgtgcctcatttatttcacttaatataatgacctccagttgaatttattttgtctaaagtttttcttttaacattggtttttgagagttagtttgtatatgccagttccagcataccattcattgcaccttaggaaatagatacaacgctaggtacatagaaagtgtacagtaaaattctttattagagtgtactaagaatatctgttacttaaatctagattttctaaactaaggaagtggagattctaatcttaagcatgttcatctaggactagaaacagagtgtatggaagagaacatagacaactaaaatatgggaggcatattgagagaaacgaaatccctgtggccaagaacaacagttttgttcagatattaaactttatcacaaggttatttgattgggtaatagctatagggagaaagagattgaaatgaaagctaagagctgaatctataaaaataaggtacaaaaacaaaatagctacctaaatgaggacagaaagcacagacaagaggggtagatacagcttatggagaagacaaacacaaaacaggagataaaaaggccagggttataaccatagtttcctaggctaatcttttttacatttcctagaaattaatgaaaacacctccttatagcctaggaagaaagtgaatgcaggaggccttttttttttttttttgtatttttgtctcccttcctttcccttcctcccttcctccc

SEQ ID NO: 238198 - DNA, 1144 bp, Homo sapiens
ttccttttttatttttaatttttgtgggtaaatagtaggtgtatatatttatggaatatatgagatattttggtacaagcatgcaatgtgtaataatcacatcatggaagatggggtctccatcaccttaagcatttatgcattgcattacaaacaatccaatgatactcttttagttattacaaatgtacaattaaattattattgactatagtcaccctgttgtgctatcaaacactaggtcttattctttctatttttttgtattcatcagccatcctcacttaccctccaaccccccactacgctttccagcctctggtaactatccttctaggctctatgtccatgagttaagttattttgatctttagatctcacacataagttagaacatgtgatgtttatctttctgtgcctcatttatttcacttaatataatgacctccagttgaatttattttgtctaaagtttttcttttaacattggtttttgagagttagtttgtatatgccagttccagcataccattcattgcaccttaggaaatagatacaacgctaggtacatagaaagtgtacagtaaaattctttattagagtgtactaagacttctgaattataacaatcccactattaggtaatgtgcacctgtccttttagcatatctgttacttaaatctagattttctaaactaaggaagtggagattctaatcttaagcatgttcatctaggactagaaacagagtgtatggaagagaacatagacaactaaaagttcagatattaaactttatcacaaggttatttgattgggtaatagctatagggagaaagagattgaaatgaaagctaagagctgaatctataaaaataaggtacaaaaacaaaatagctacctaaatgaggacagaaagcacagacaagaggggtagatacagcttatggagaagacaaacacaaaacaggagataaaaaggccagggttataaccatagtttcctaggctaatcttttttacatttcctagaaattaatgaaaacacctccttatagcctaggaagaaagtgaatgcaggaggccttttttttttttttttgtatttttgtctcccttcctttcccttcctcccttcctccc

SEQ ID NO: 238199 - DNA, 507 bp, Homo sapiens
ctgtaaacccttacttaagggtttgtggttcactataatgaccataatcttttcttattaccttaacatttccaatggaaggaacccaaaggtgattcagaagataactaagtgtggctctaatctgttagctgagccagctccacttagcttccattgatgacaccaactgggctctggatattagccgacacctcatgataccttctgtacaaatgagcccgaattggtgcctccttcacacagcttgagactgtgatttcccccagtgtttatcgccaacagttttcaggtgttgcctgcatttcaggacaaagctaggtttaggaggaaaatgatcagtgcaaagagaaggtgctaggctattctagaaaagactctggctgatgcggtggctcacgcctttaatcccagcaccttgggaggctgaggacagaggatcacttgagcccaggagttcaaaaccagcctgggcaacacaacaagaccctgtgtttataaatgaaa

SEQ ID NO: 238200 - DNA, 901 bp, Homo sapiens
  misc_feature (190)..(190): n is a, c, g, or t
  misc_feature (392)..(392): n is a, c, g, or t
  misc_feature (620)..(620): n is a, c, g, or t
taccaactacatgtaaattcctgctatagaataaaacataaagatcattaactacctatggaataagattaagtaatgtaaaatattaagttctcctcttcctccccagaatgctcaaagtggtttggggttcctattgactggagtgtaaataagtaactggacacagtgggtcatctcttccaaggangtgtcctgttccatactgccagttttgagattttttagagtcattaaccaagagtgaacacctctatccctttctacctagacttcatggtagaatctattagagacgttgtctctaaaatttagagcatgatagtccctcttaaggatagtcaaagtgaaaaaattagtaagacctctcaaaattcattcaaaattcatgnttttgttgctcttttgaacctcataaggacaataaattggtgccctctcatcatcttgctaccagagacactctagattattatatggacaatctatgaaattgatttgtaataaatgtctgttggaggtcaaggtgcagctaagagcagctgggtgtcttttgaaaaaaggtcgtggctgttgcatacaaacaagcttgaaaactataatcacccttgaacggtctnttggtcaatgacaacttaaaagctatataaacccaaggagaattggggaggcacagaatagcctttaaaagcaagagccaaatgaacttgaatgatcaaagataactgggacagcatattcagttaacttatttatcaactaaaattaatgtactgacaaattaaaagcaacagtgaattacatgcattccctatctggcagagacatcacttggaaaaaaaataaaaaagaagatggataatgaaatgttttattttaatgttcccaggagatacatttg

SEQ ID NO: 238201 - DNA, 847 bp, Homo sapiens
  misc_feature (338)..(338): n is a, c, g, or t
  misc_feature (566)..(566): n is a, c, g, or t
taccaactacatgtaaattcctgctatagaataaaacataaagatcattaactacctatggaataagattaagtaatgtaaaatattaagttctcctcttcctccccagaatgctcaaagtggtttggggttcctattgactggagtgtaaataagtaactggacattttttagagtcattaaccaagagtgaacacctctatccctttctacctagacttcatggtagaatctattagagacgttgtctctaaaatttagagcatgatagtccctcttaaggatagtcaaagtgaaaaaattagtaagacctctcaaaattcattcaaaattcatgnttttgttgctcttttgaacctcataaggacaataaattggtgccctctcatcatcttgctaccagagacactctagattattatatggacaatctatgaaattgatttgtaataaatgtctgttggaggtcaaggtgcagctaagagcagctgggtgtcttttgaaaaaaggtcgtggctgttgcatacaaacaagcttgaaaactataatcacccttgaacggtctnttggtcaatgacaacttaaaagctatataaacccaaggagaattggggaggcacagaatagcctttaaaagcaagagccaaatgaacttgaatgatcaaagataactgggacagcatattcagttaacttatttatcaactaaaattaatgtactgacaaattaaaagcaacagtgaattacatgcattccctatctggcagagacatcacttggaaaaaaaataaaaaagaagatggataatgaaatgttttattttaatgttcccaggagatacatttg

SEQ ID NO: 238202 - DNA, 437 bp, Homo sapiens
cttcaagggagtctggggaagtgagtttttaacaaggtgtactgctaccccaaacaaactcgggactctgtaagtaagaaagaaaatgaactggatattgacatgggaggcaactagcttgactatttttatgttacagtaagatcttcttgagttttgtaaactcctggaaggtatgcgccatgtcgtgtgcagtttactcatccagtggcatagagctttattatctataccaagcaaacaataaatcattgattgtatatgaaactggtcagttgctgattcctttttatatgacctctcattataaaaaatactatgtgggctgaggcatgggggctcacacctgtaatcccagcacttagggaggccaaggtgggagaattgcttgaggccaggacaagaccagcctgggctacataatgagatgtctgtac

SEQ ID NO: 238203 - DNA, 441 bp, Homo sapiens
tacttttcattgacattgttgtagttgagttgtgtttaactaatttgttaaatgaactgacactgtacattctccctataaaataacagtgtgttttctattatgtctattgcctcaacttagcattatgttaacttatttacaagccagtttatttaggttgtattcaagttagtctttggtgacataaataaaatcagtgatgtggtcataatggagtggtgctatttatgtaaaaatatgttgggtcttgaaaagattagaaaaagctaagttgattaatgtgagggctaagcaatgtaaaaattttaagaaaaaattataaaattagaataataacaaaattttaataagctaaaaggtttttgcacttctgttactttaaatttttgttctactttaaacaaataaaaatttggaattctaattgacttgttatga

SEQ ID NO: 238204 - DNA, 445 bp, Homo sapiens
ttgataatggattggccatgaagtatggcaatgataaaatcttcggtttaaagatgcatcatttgtctgcgttagcatcctttccatctaatgaaattccaggagctttgaatgaatgaatgctacatttacctgaagaagccagccattactgactggctcaaaaataattgtgtatatgataggataagaagacacttatgcaacaatggtgctgtttgatcaccagtattgtttctgccaaatatgtggcctgtagatgagtgcattccaaataggtacctgggtgcccaaagtgacatagaaacacggcacagaagatggaaaaatcgaatagggaatgctcgtcgtgttggggtctattaaatcacagaagaatttcaaaaacagcagtgccatgtagaaaatgaaagtgaacatattctccatggggagccgtgcccta

SEQ ID NO: 238205 - DNA, 365 bp, Homo sapiens
gtagcagtggaaatgctacttgtaaaaccatccttagctccaggatcgtagagctatcactgagacaattgcgcagtgagtgacaagagagataagcggagaatgtgagccatctatgagacagaggacaacttcaataaaaaacaccaggtcagcggataagaccatgtcactcacaggtttgtgacttgaggcctgagcaccaatgatccactccacatcagtggagaatgttggaaagtaaggacgctgtggacattttctgaagttggagaaatggaatggtggagaagccagtattggggtaccatgagtggagcagagttgactacaaatctcaataaagcttttcaactgtaaaaaaa

SEQ ID NO: 238206 - DNA, 665 bp, Homo sapiens
tttccttcttttaatctctccacacacagagatcttgctcttccatgaatatccctctgtctgaaatgtcctgtatccagatagccacatggcttgctccttaatgttcttcaaatctctgttcaaatattactttctaatagaaccttgcctcaattaccctatataaaagtgcatccctcatgccctgcaatccctttcctgaattatcctgctttatttttcccttgatcatttactgtcatctaacatatcatatatttacttgtttgttctttattgtcagacttcccccatctccattctatcttgatcataaactccacgaggagaaggactttatctttcactgtcatgtcaccactgcttggtataactatttggaattcaataaatatccatagagtaaatgaatgaatacgtgaaaacattgacgaaggaaagaatatatgaggaaatagtatttaaattgctactgaaggaggaaaggatgctgccatataaaagtgaggaggactcatgcagagtgaataccatttgcaaaagccaaaacgtttccttaattcatttcttttcaacttttccattacaacaatcatagtgcaaattactgtcatccactgtggaccagtactacatcaggcagctccctgcaggcttttctg

SEQ ID NO: 238207 - DNA, 425 bp, Homo sapiens
gcccagtactacatccattctcccctttttctttagtaatagaaccactgaaccttagctggatgagtaataaaaccgctggataatcttggcctaacatggtgatatgatttggctctgtgtccccacccgaatctcactttgaattgtaatccctgtaattcccatgtatcaaaggaggtactaggtggaggtaattggatcatggggtggtttcccccaagctgttcttgtgatagtgagtgactctcatgagatctgatggttttataagcatctggcatttcccctgcttgcactcactctgtcctggtgcgctgtgaagaaggtgcctgcttctcctttgccttccaccatgattgtaagtttcctgaggcctccctggcaatgcagaactgtgagtcaattaaacttcttttctttat

SEQ ID NO: 238208 - DNA, 1625 bp, Homo sapiens
ttagctaccaatacccacagctgcatcatccacgcaaaagctacccatgcccacagctgcatcatccacgcaaaagtcaccaatacccacagctgcatcgtccacgcaaaagctaccaatacccacagctgcatggtccacgtaaaagctaccaatacccagagccgcatggtccacgcaaaagctaccaatacccacagctgcatcatccacgcaaaagtcaccaatacccacagctgcatcgtccacgcaaaagctaccaatacccacagctgcatggtccacgtaaaagctaccaatacccagagctgcatggtccacgtaaaagctaccaatacccacagctgcatggtccacgcaaaagctaccaatacccacagctgcatcatccacgcaaaagtcaccaatacccacagctgcatcgtccacgcaaaagctacccatgcccacagctgcgtggtccacgcaaaagctaccaatacccacagctgcatggtccacgcaaaagctaccaatacccacagctgcatcgtccacgcaaaagctacccatgcccacagctgcatcgtccacgcaaaagctacccatgcccacagctgcatggtccaccataacaacaatgggggcaacaacccacgcgtccatcaacggacacacaaaacgtggtctttctgcacagtgcagtgcagctcagccacagggaaggaggctccccactaggctccagtgcggggagccacgaaggccccgagctgacaaagccagacacaagggccacacgtggccccgtcaccttcatccgcggtgtccagaacaggtctcctcggcagaagccccttcatgtgccaaggacgagccagaggtggagaagggccgtgggccggccccgtggacgagccagaggtggagaagggccgtgggccggccccgtggatgagccagaggtggagaagggccgtgggccggccccgtggacgagccagaggtggagaagggccgtgggctggccccatggtgcagagtgagccctggtgtcacggctcacgctttataaaagctctcaaggggtcacagtgcagaggggatggggaggagggtttggggagggtaagcacttcgccggggcacttatcatttgtggaacattctctgaggctggctgtggggatcccctgtgagtctggacagccaggtcataggtcatgcttcctcctggcccggttttcacaccgtggtaccccacacgcatgcacacgtgtgcacaccatcacacactcagactttacacacatgcacctgcacgtgcgcccctggcaacggcacccgacgcagtgaccttggggctgctgtcgtcgggaagacagcctgccaggtggcccctcacacggcccctgcttccccctcacacggcccccacttccccatcccggaaaacaggcagagcacacacttccaggaaagaggccgccctggcgctggactcaatgaccataaaacagcctcttaagctgggtgcagcggctcacgcctacaatcccagcactttgggaggctgaggtgggaggatcgtttgagcccaggagcttgagacagcctgggcgatgtagcaagaccccatctctacc

SEQ ID NO: 238209 - DNA, 266 bp, Homo sapiens
atgccaagaacagggtcaactgttccttcaggtagttacatgcttggtatagagctaactaacacatccaaggatctttaaagcaactgactcgacatccagtcaagaatacccacaagttgaaatgtgtctttcagtttactgtcccctttccatctttgtcagaaaacattaatgttgccatcccagacataatgaacttgggaagaatattttagaatttaaatcaaagtgtcaataataaagggctcataatcttagatgaa

SEQ ID NO: 238210 - DNA, 392 bp, Homo sapiens
ttttttttttttagtagagagaaggtttcaccatgttggccaggctggtcttgaactcttgacctcaggtgatctgcctgccttggccttccaaagtgctaggattacagatgttttgattccatagtttaattaattctgtgggcaatttatttcggcattccaatttgaacacacaagcccactatgaggcccattctctctctctctcacacacacacacacacacacacacacacacacacacactctgtccctgctctctctctctcatttgcttgctcatcaaaacatctgctctgtatctcactgaaatatctgtcttctgtttcattcctccaagtaaaatggtaacaacgcgttagaaagagttgcataggccagacatggtg

SEQ ID NO: 238211 - DNA, 1772 bp, Homo sapiens
  misc_feature (440)..(440): n is a, c, g, or t
  misc_feature (445)..(445): n is a, c, g, or t
  misc_feature (463)..(463): n is a, c, g, or t
  misc_feature (782)..(782): n is a, c, g, or t
  misc_feature (873)..(873): n is a, c, g, or t
  misc_feature (925)..(925): n is a, c, g, or t
  misc_feature (940)..(940): n is a, c, g, or t
  misc_feature (949)..(949): n is a, c, g, or t
  misc_feature (1073)..(1073): n is a, c, g, or t
  misc_feature (1075)..(1075): n is a, c, g, or t
  misc_feature (1077)..(1077): n is a, c, g, or t
  misc_feature (1122)..(1122): n is a, c, g, or t
  misc_feature (1381)..(1381): n is a, c, g, or t
  misc_feature (1490)..(1491): n is a, c, g, or t
aatttagaatgtcttacactgtacctattttttcctgtgtaagtctcaaaaacttgatttagacttgaaggttttatgaatgtccctacttttttgttttaagagggaggaagagggaaggagagggaggccatttgattgagaagggcataaatcgcagtggatgagttaccacaaagtcagtccatatgggttacaacagttcaatcaagaactaggccaggcacggtggctcacgcctgtaattccagcactttgggaggctgaggcgggtgtatcacctgaggtcaagagttggagaccagcctgaacaacatggtgaaaccccctttctacaaaattagctgcgcgtggtgctgcgtgcatgtagtctcagctacttggggggctgaggcaggagaatcgcttgagcctgggaggcagaggttgcaatgagccangatcntaccactgtactccagcntgggcaacaagagcaaaactccatcccaaaacaaaacaaaacaacaacaacaacaacaaagaactaaaacataatagcaaccaggaagcccccgggtaggctcgctccctggtaaccattgtcctgacctctattcccattttcttgttttggaactttgtacagatagattcactcagtatggattcttttatacctgacttcatttcctcaacattgtattgagatttgtccatgtcgcatgtagctgtagttcattcctttttcttttcttttttttttttttttgagatgaagtcttgctctgtggccaaggctngagtgcattggtgcaatcatggcttattgcagcctccacctcccaggctcaagcgatcttcccacctcagcgccgcgggtagctgggactncaggcatgtgccaccatcctcagctaaatttttttttttttttttttgtagngacagggttttgccntgttatccnggcaggtcttgaactcctggcctcaagtgatctacccatcgacgcctcccaaagtactgtattatagatgtgagctagtgtgcccagcccattttgacttctgtataatactatagcatgcatntntntacatttactcatgtgtcctacttttgatgagatttgtgttgctngtagtttggactattacaaattattatactgtcattatgccttttggtatatatgtattttcatttctctagggtatgcctcagagtggacttgtaggattgggttagactatgcatttttctaatcccaataacataattttttttgagaaggattctcactctgtcacccaggctggagtgcagtgacgtgatcttggctcactgcagcttctccctccacggttcaagtgattctcctgtctcagccacccaagtngctgggattacaggtgtgtgccaccatgccaggctaatttttttgcattttttatatagagatggggtctcatcatgttggccaggctgttcttgaacttctgacctcnngtggtcctcccgcctcacacctgtaatctcaactctttgggaggctgaggcaggcggatcatgaggtcaggaggtcgagaccatcctggctaacacggtaaaaccctgtctctactaaaaaatacaaaaaaattagctgggcgtgatggcgggctcctgtagtcacagctactctggaggctgaggcaggagaatggtgtgaacccgggaggtggagcttgcagtgagccgagtttgcgccactgcactccagcctgggcgacagagtgagactctgtctc

SEQ ID NO: 238212 - DNA, 618 bp, Homo sapiens
cagttgcccaggctagagtgcaatggcgctatcttggctcactgcaagctccgcctcccgggttcacgccattctccagcctcagcctctggagtagctgggactacaggcacccgccaccacgcccggctaatttttttgtgtgtgtatttttagtagagatggggtttcaccatgttagccaggatggtctcgatctcctgacctcgtaatccacttgcctcggcctcccaaagtgctgggattacaggcgtgagccaccgcgcccggcccatggggagcatttttaacagttgagtaatatcccacccccaaactgctgccagtttctctgtagcataaacagacattactgtgtgcagtttttttcaggttggcaacagtttccttcgacgggattcccagaagccagattagtaggtcaaaggctgaatatttttatggctcatgacaggctttgctaaatattactcagccgtcaacacccctccccttgaaggataggcttgcgggtttccctggggctcagccagtcctagaggtggacaccttccatctctgctctagatttttccacagagggagggccaagcacctttgaggcatgcagttttgtca

SEQ ID NO: 238213 - DNA, 279 bp, Homo sapiens
agtattagggatgaaggggcataatgtctgctacctactctcaaatgatgtgtgggtgtgtgtgtgtgtatacgtgtgtatgtgtgtgtgtagcaaaagagaagggggaatgagagagaataagaaagcaaatggcacaaattgttcacaaatggtgaaacgagatgaatatgagaatttttatactattcttgcaacttttctctaagtttaaacttatatcaaaataaacatttccaaaaatgattgaataaagttaaaatatattataagtccaaa

SEQ ID NO: 238214 - DNA, 841 bp, Homo sapiens
  misc_feature (282)..(282): n is a, c, g, or t
gcaataaatacattcagtcatttatttataaatgaatgacagaatattcaatccaaatagaaacaaccttttgtcagtgatgcaacataacatggagtcttatattgagaaagtgaatatgaatattttaaatagatgcctaggaaatctgtgtttgctgtttacatttaatgtactttgccacattagcagtaccacacttcttttactttcatccttctaagaactaatgaaagatagcttgctattagctttgacatgttgcacatgccattatgttgntctctaagaacaactaaattctctccagtgttcatgtgtgattcctttttcatcattattactttaatgtggatgaatactatttctaggaacttgattatcactgaacagattgcatatgtaaatgcagataattcttgagcaatatagtgaaaatgatttcacaaaaaaaatccatatgtactgtatacatcttcctgaatccttttaaacattaggacattagctggctgcttctataaatgtacctgtattgtctgcctgctccttttgtggagatgtgtttttgtattggatgtttgggccaatgggaggcttcaagctacaacatattttcccactttaaataatatttaacatatgacaaaccccagacaaggcttttaatatgtataaagaactgcagtgttaggtggtttatttgcaaactgttttcagtgttgtccatttttatggcacctttaacaatattcttgtttccaaagtacaaaaaaaataggttaaatatatctagccataactgaatgtcatgcaataaaacaaatgacttttgtgcata

SEQ ID NO: 238215 - DNA, 895 bp, Homo sapiens
  misc_feature (282)..(282): n is a, c, g, or t
gcaataaatacattcagtcatttatttataaatgaatgacagaatattcaatccaaatagaaacaaccttttgtcagtgatgcaacataacatggagtcttatattgagaaagtgaatatgaatattttaaatagatgcctaggaaatctgtgtttgctgtttacatttaatgtactttgccacattagcagtaccacacttcttttactttcatccttctaagaactaatgaaagatagcttgctattagctttgacatgttgcacatgccattatgttgntctctaagaacaactaaattctctccagtgttcatgtgtgattcctttttcatcattattactttaatgtggatgaatactatttctaggaacttgattatcactgaacagattgcatatgtaaatgcagataattcttgagcaatatagtgaaaatgatttcacaaaaaaaatccatatgtactgtatacatcttcctgaatccaaaattctcctgttatccacacagtttgaaatctcatattaaacagtggtaaatttttaaacattaggacattagctggctgcttctataaatgtacctgtattgtctgcctgctccttttgtggagatgtgtttttgtattggatgtttgggccaatgggaggcttcaagctacaacatattttcccactttaaataatatttaacatatgacaaaccccagacaaggcttttaatatgtataaagaactgcagtgttaggtggtttatttgcaaactgttttcagtgttgtccatttttatggcacctttaacaatattcttgtttccaaagtacaaaaaaaataggttaaatatatctagccataactgaatgtcatgcaataaaacaaatgacttttgtgcata

SEQ ID NO: 238216 - DNA, 275 bp, Homo sapiens
acgcacctgtaatcccagctactcaggaggctgaggcaggagaactgcttgaacacatgagggtggaggttgcagtgagctgagatcacaccactgcactccagcctgggtgacagagtgagactctgtctcaaaaacataagaagaataatgaatgaaagtccatgttatttagaaatataaacattactgtttttttcctaactgcaaacataaatatgctcattattaaaacttaaaatgcagattaaacaaatcaatacaccccatcatct

SEQ ID NO: 238217 - DNA, 691 bp, Homo sapiens
cggagccgagctcagaacgctggtgatgaaaagcaggtacactgacgtggtggtcttggacgtgcgcgacaggtcccgaccgagctccagctgctggcgcagcacggtgcacacgatccagcacacgaagggcacgaagcacagcgcgaacagcgtctcgttctccttcacgaagcggtaggcgcgctcggccctcctctcatcccggaagaacttgtagaaatacttcttcttgtccttgtcggagaagccgcgcacctcggcgcactgcggggaacacaggcggccctgcagcctcccgggggcggcggcgcgcgtggtcaccagcaggagggccgtgggcagcagcgccttgctcagcagcccgcctagcacccgcgcgccgctcgccgcctcgaaggggtctgtgcagggcgcggcctcggggccccccagcgccggcagctcgtccgcgccgtccaggatgaagagcagccgctgcggctgggccagcatctgcggcaccggcgcgccgcggtcggggcactggtccaggatcaggtcagccaggctgcgcgtgcccggcctctccagcagctcgccgcagggcatgaagaaggcgaagtccacctggccctggtacagcttgcccgccgcccagtcgtacaggatctttttggccgccatggtcttgccgatgcccgccgggccc

SEQ ID NO: 238218 - DNA, 176 bp, Homo sapiens
attgtattatgtggtgtgtctatacatttttctgggagctccatagcacttaattgctctgtgacccccacctacccccaaaaaagtaaacagtaacttctttgaaagtagcatatgtcaccatatcaactgtcaagtgttttgtgtttttgagtataatcctagacaaattttaa

SEQ ID NO: 238219 - DNA, 217 bp, Homo sapiens
gcatttttagtagagatgaggtatctccatgttggccaggctagtctcaaaactcctgacctcaagtgatccacctgtctcggcctcccaaagtgttgggattacaggcgtgagccaccatgccttgcctccctcatcttttaaaatcatttatgtgttggagtagaaaggttttatttgtgtaagtttattattcgaattgtagaaaccttatgtt

SEQ ID NO: 238220 - DNA, 487 bp, Homo sapiens
aaaacatggagtgggatgtgattaactgagatataaaatctcggagggtgtgatccatgacccttgttgacccatgtcttcctcacacctaggagtgcctgcaacaatgtagatcctcagtgttgaatatatgaatgtgtaaatgaaggtacctatttcacaaatcgtctaggattgacatcaccctaaggatggatgttgtttatttcaccagcagtttgggattgtgaaagccctgtgtatggtcacaggctttgaaatgtgtgatgaatctgcatctttaattgggtctctatagtcaaatgagagtcttcatttttctaaaggttcatactgagaagcacaggctttctttcagtgtattgaaggtgcattgtattagattaacactgaaccaaaccattgtcctttgaattgcatgttgtaatcaaacaatgcgattgttttgttaaatactttaaaaattgtattgacttctcaaactaaa

SEQ ID NO: 238221 - DNA, 498 bp, Homo sapiens
tctctagccttatcgggccagaaaatacggatgtccccgggcagaggttggagaggcgggggaagattaacgggcggcttattaaagagccatccgtcagctcctgcgcgcgggagatagcggcagagcaggcacgggacacgcccgcccgccctagccccggagcgccgagagccgcccgccgcctgggtgctctctgcacctgatcttcccagcctccctgggtcccggggcgagggcggtggcagtttgcagtcagagcagagtggccgctttggggaactactcccttccctgcttggccgcgccgcgccctccctgcatttctggggctctgtcctctagaccctgggactcggcgtttagggaggaacaggcgctccattcctagacccagccattttccaccgaaagcccagccctgccgccgggcggcctgggagtttggccttctccccagcgcaggacgcccgtggggcaaggccagggctgcatccc

SEQ ID NO: 238222 - DNA, 540 bp, Homo sapiens
aatacctaacctagcttagaaagcactctatatagtccgctcccctaccttctcagtctcttctcttgacacttgccctttctctactctgtgtgcaagtcaatcttgacttcttcatgttgcttgaatgctatgctctttccagcctcaggctattgcacatgctgtttcctcaacctggaatatgctgcgctcacatcagcattctgtggctgttcatttttcaggtcttagtttaaatgtcagtttttcagagaagttttcccagactcccagatatccacccctcagccccaacgtgtttagaacccttttgctatatatttcaagatttccctataccttctatttgataacacttaacattgttgtaagtccttgtttcatgtctttcttccctgctagactgcaatctccatgagggtaagtaccatgtcttttctttttccctcttattctctagcccatatttggctcatataggtgctctataaatgtttgttgactcaaaattgagtgattaaaatgtttgacattaaa

SEQ ID NO: 238223 - DNA, 1120 bp, Homo sapiens
caggccctgggctgacatgtgcccccttgcaggtgggtccgaggagagcactacaggtacaagttcagccgtcctgggggcaggcacgccgccgagggcaagtggtgggtgcggaagaggatcggagcctacttccctccgctcagcctggaggagctgaggccctacttcagggaccgtgggtggcctctgcccgggcccctctagacgtgcaccagaaataaaggcgaagacccagcccctcggcggctcagcaacgtttgcccttccctgcgcccagcccaagctgggcatcgccaagagagacgtggagaggagagcggtgggacccagcccccagcacgggggtccagggtggggtctgttgtcacatactgtggcggctcccaggccctgcccacctggggccccacatccaggccaacccttgtcccaggcgccaggggctctgatctcccatccatcccaccctcctcccagaggcccagcctggggctgtgccgcccacaggagttgagacaatggccatcctgacaccttcctccactacagccctgaccatagacccagccaggtagctcttggggtctctagcgtcccagggcctggtttctgttccctcttcaatggtgtgttcccagccaggtcctgaccctcagagccaagtccctgtcacgtctggggcagccaaaccctcgccccacagggacctggacacgcccggccaggatgtggggttggatgggccattttctgtcctatccctcatctccacccccgccacagcctacacgcatcccacacatgcaggcacacacagcctgtgcacacatgtgttcttggcccggtttcatccccccatgactggtgtctgtgaggtgcagatggacacagcgcacacccagaccctccaccaggctgtgacctcgctgcctctgaggccttgacaaggcccctcaatcggaggacagccggccgtgcacactttcatcatcgtcggacaaacagcgtctactgcacatttttcttattcctattcttgagccatagctatggcatattcttctactattcctattataccacttaccagcttactcgaaaacacactgtttaaatg

SEQ ID NO: 238224 - DNA, 242 bp, Homo sapiens
caggccctgggctgacatgtgcccccttgcaggtgggtccgaggagagcactacaggtacaagttcagccgtcctgggggcaggcacgccgccgagggcaagtggtgggtgcggaagaggatcggagcctacttccctccgctcagcctggaggagctgaggccctacttcagggaccgtgggtggcctctgcccgggcccctctagacgtgcaccagaaataaaggcgaagacccagcccc

SEQ ID NO: 238225 - DNA, 1758 bp, Homo sapiens
gagtgcgccctccccgcacatgcgccctgacagcccaacaatggcggcgcccgcggagtcgctgaggaggcggaagactgggtactcggatccggagcctgagtcgccgcccgcgccggggcgtggccccgcaggctctccggcccatctccacacgggcaccttctggctgacccggatcgtgctcctgaaggccctagccttcgtgtacttcgtggcattcctggtggctttccatcagaacaagcagctcatcggtgacagggggctgcttccctgcagagtgttcctgaagaacttccagcagtacttccaggacaggacgagctgggaagtcttcagctacatgcccaccatcctctggctgatggactggtcagacatgaactccaacctggacttgctggctcttctcggactgggcatctcgtctttcgtactgatcacgggctgcgccaacatgcttctcatggctgccctgtggggcctctacatgtccctggttaatgtgggccatgtctggtactctttcggatgggagtcccagcttctggagacggggttcctggggatcttcctgtgccctctgtggacgctgtcaaggctgccccagcatacccccacaccccggattgtcctgtggggcttccggtggctgatcttcaggatcatgcttggagcaggcctgatcaagatccggggggaccggtgctggcgagacctcacctgcatggacttccactatgagacccagccgatgcccaatcctgtggcgtactacctgcaccactcaccctggtggttccatcgcttcgagacgctcagcaaccacttcatcgagctcctggtgcccttcttcctcttcctcggccggcgggcgtgcatcatccacggggtgctgcagatcctgttccaggccgtcctcatcgtcagcgggaacctcagcttcctgaactggctgactatggtgcccagcctggcctgctttgatgacgccaccctgggattcttgttcccctctgggccaggcagcctgaaggaccgagttctgcagatgcagagggacatccgaggggcccggcccgagcccagattcggctccgtggtgcggcgtgcagccaacgtctcgctgggcgtcctgctggcctggctcagcgtgcccgtggtcctcaacttgctgagctccaggcaggtcatgaacacccacttcaactctcttcacatcgtcaacacttacggggccttcggaagcatcaccaaggagcgggcggaggtgatcctgcagggcacagccagctccaacgccagcgcccccgatgccatgtgggaggactacgagttcaagtgcaagccaggtgaccccagcagacggccctgcctcatctccccgtaccactaccgcctggactggctgatgtggttcgcggccttccagacctacgagcacaacgactggatcatccacctggctggcaagctcctggccagcgacgccgaggccttgtccctgctggcacacaaccccttcgcgggcaggcccccgcccaggtgggtccgaggagagcactacaggtacaagttcagccgtcctgggggcaggcacgccgccgagggcaagtggtgggtgcggaagaggatcggagcctacttccctccgctcagcctggaggagctgaggccctacttcagggaccgtgggtggcctctgcccgggcccctctagacgtgcaccagaaataaaggcgaagacccagcccc

SEQ ID NO: 238226 - DNA, 2636 bp, Homo sapiens
gagtgcgccctccccgcacatgcgccctgacagcccaacaatggcggcgcccgcggagtcgctgaggaggcggaagactgggtactcggatccggagcctgagtcgccgcccgcgccggggcgtggccccgcaggctctccggcccatctccacacgggcaccttctggctgacccggatcgtgctcctgaaggccctagccttcgtgtacttcgtggcattcctggtggctttccatcagaacaagcagctcatcggtgacagggggctgcttccctgcagagtgttcctgaagaacttccagcagtacttccaggacaggacgagctgggaagtcttcagctacatgcccaccatcctctggctgatggactggtcagacatgaactccaacctggacttgctggctcttctcggactgggcatctcgtctttcgtactgatcacgggctgcgccaacatgcttctcatggctgccctgtggggcctctacatgtccctggttaatgtgggccatgtctggtactctttcggatgggagtcccagcttctggagacggggttcctggggatcttcctgtgccctctgtggacgctgtcaaggctgccccagcatacccccacaccccggattgtcctgtggggcttccggtggctgatcttcaggatcatgcttggagcaggcctgatcaagatccggggggaccggtgctggcgagacctcacctgcatggacttccactatgagacccagccgatgcccaatcctgtggcgtactacctgcaccactcaccctggtggttccatcgcttcgagacgctcagcaaccacttcatcgagctcctggtgcccttcttcctcttcctcggccggcgggcgtgcatcatccacggggtgctgcagatcctgttccaggccgtcctcatcgtcagcgggaacctcagcttcctgaactggctgactatggtgcccagcctggcctgctttgatgacgccaccctgggattcttgttcccctctgggccaggcagcctgaaggaccgagttctgcagatgcagagggacatccgaggggcccggcccgagcccagattcggctccgtggtgcggcgtgcagccaacgtctcgctgggcgtcctgctggcctggctcagcgtgcccgtggtcctcaacttgctgagctccaggcaggtcatgaacacccacttcaactctcttcacatcgtcaacacttacggggccttcggaagcatcaccaaggagcgggcggaggtgatcctgcagggcacagccagctccaacgccagcgcccccgatgccatgtgggaggactacgagttcaagtgcaagccaggtgaccccagcagacggccctgcctcatctccccgtaccactaccgcctggactggctgatgtggttcgcggccttccagacctacgagcacaacgactggatcatccacctggctggcaagctcctggccagcgacgccgaggccttgtccctgctggcacacaaccccttcgcgggcaggcccccgcccaggtgggtccgaggagagcactacaggtacaagttcagccgtcctgggggcaggcacgccgccgagggcaagtggtgggtgcggaagaggatcggagcctacttccctccgctcagcctggaggagctgaggccctacttcagggaccgtgggtggcctctgcccgggcccctctagacgtgcaccagaaataaaggcgaagacccagcccctcggcggctcagcaacgtttgcccttccctgcgcccagcccaagctgggcatcgccaagagagacgtggagaggagagcggtgggacccagcccccagcacgggggtccagggtggggtctgttgtcacatactgtggcggctcccaggccctgcccacctggggccccacatccaggccaacccttgtcccaggcgccaggggctctgatctcccatccatcccaccctcctcccagaggcccagcctggggctgtgccgcccacaggagttgagacaatggccatcctgacaccttcctccactacagccctgaccatagacccagccaggtagctcttggggtctctagcgtcccagggcctggtttctgttccctcttcaatggtgtgttcccagccaggtcctgaccctcagagccaagtccctgtcacgtctggggcagccaaaccctcgccccacagggacctggacacgcccggccaggatgtggggttggatgggccattttctgtcctatccctcatctccacccccgccacagcctacacgcatcccacacatgcaggcacacacagcctgtgcacacatgtgttcttggcccggtttcatccccccatgactggtgtctgtgaggtgcagatggacacagcgcacacccagaccctccaccaggctgtgacctcgctgcctctgaggccttgacaaggcccctcaatcggaggacagccggccgtgcacactttcatcatcgtcggacaaacagcgtctactgcacatttttcttattcctattcttgagccatagctatggcatattcttctactattcctattataccacttaccagcttactcgaaaacacactgtttaaatg

SEQ ID NO: 238227 - DNA, 3585 bp, Homo sapiens
gagtgcgccctccccgcacatgcgccctgacagcccaacaatggcggcgcccgcggagtcgctgaggaggcggaagactgggtactcggatccggagcctgagtcgccgcccgcgccggggcgtggccccgcaggctctccggcccatctccacacgggcaccttctggctgacccggatcgtgctcctgaaggccctagccttcgtgtacttcgtggcattcctggtggctttccatcagaacaagcagctcatcggtgacagggggctgcttccctgcagagtgttcctgaagaacttccagcagtacttccaggacaggacgagctgggaagtcttcagctacatgcccaccatcctctggctgatggactggtcagacatgaactccaacctggacttgctggctcttctcggactgggcatctcgtctttcgtactgatcacgggctgcgccaacatgcttctcatggctgccctgtggggcctctacatgtccctggttaatgtgggccatgtctggtactctttcggatgggagtcccagcttctggagacggggttcctggggatcttcctgtgccctctgtggacgctgtcaaggctgccccagcatacccccacaccccggattgtcctgtggggcttccggtggctgatcttcaggatcatgcttggagcaggcctgatcaagatccggggggaccggtgctggcgagacctcacctgcatggacttccactatgagacccagccgatgcccaatcctgtggcgtactacctgcaccactcaccctggtggttccatcgcttcgagacgctcagcaaccacttcatcgagctcctggtgcccttcttcctcttcctcggccggcgggcgtgcatcatccacggggtgctgcagatcctgttccaggccgtcctcatcgtcagcgggaacctcagcttcctgaactggctgactatggtgcccagcctggcctgctttgatgacgccaccctgggattcttgttcccctctgggccaggcagcctgaaggaccgagttctgcagatgcagagggacatccgaggggcccggcccgagcccagattcggctccgtggtgcggcgtgcagccaacgtctcgctgggcgtcctgctggcctggctcagcgtgcccgtggtcctcaacttgctgagctccaggcaggtcatgaacacccacttcaactctcttcacatcgtcaacacttacggggccttcggaagcatcaccaaggagcgggcggaggtgatcctgcagggcacagccagctccaacgccagcgcccccgatgccatgtgggaggactacgagttcaagtgcaagccaggtgaccccagcagacggccctgcctcatctccccgtaccactaccgcctggactggctgatgtggttcgcggccttccagacctacgagcacaacgactggatcatccacctggctggcaagctcctggccagcgacgccgaggccttgtccctgctggcacacaaccccttcgcgggcaggcccccgcccaggcgcctcagggaccctcctccacccagagggtctctgtcttcccggttttcctggcgtaattcagacttggggagagaagaatcatcatccatcacacacccagacccaaagagactcaaagccaggaggagccgggtggacccagaggccctcaccctgccagcctaaggggcatggcccaaggtctccacccccagcccccagagcacagctgtgtgcaggtcaccagaagccccaaataatgacagcagcccagacagtcgctaccgggccctggtgcagtgtgaagcctctggcacctgcctgggctcattccaggggccatgagagggtcctgttatggctgcaccatcacacccaccgggcagctggggcccagctctgccatggatcccagccaggcagcagccgccctgtgggctggagaagcttccgctcctgctgcacaactgcgaaggggcctggagggccgggagcttgtgacggtgacaattccgcctggcgcctcctcctccggggcagccgagcaaccctggacatgagggggcttcgtcccacccccaggagaaaatgcccagtcctccgagagtccagtgagggcttgcagccagggaccaagacccagtatggcctaaaccaggcctggtcaccaggggtcaggcgggaccttatacagggctcagcagagagacctgcccgctaccctgctccaggggagatgggggtgggggccttcatcccactcgggcatgacagaggagagcagccagccagcatctgcacgtctcaaggcagggaaaggcctgaagccctgggaagcgaagctccgccctcaggaaacaggtcccggcctggctccctcacagcctcggactgccccgtggaccgaaacccccaggcaccttgcgccaggactggcctgatggtggagacgccacaccatgagcagtgggtccgaggagagcactacaggtacaagttcagccgtcctgggggcaggcacgccgccgagggcaagtggtgggtgcggaagaggatcggagcctacttccctccgctcagcctggaggagctgaggccctacttcagggaccgtgggtggcctctgcccgggcccctctagacgtgcaccagaaataaaggcgaagacccagcccctcggcggctcagcaacgtttgcccttccctgcgcccagcccaagctgggcatcgccaagagagacgtggagaggagagcggtgggacccagcccccagcacgggggtccagggtggggtctgttgtcacatactgtggcggctcccaggccctgcccacctggggccccacatccaggccaacccttgtcccaggcgccaggggctctgatctcccatccatcccaccctcctcccagaggcccagcctggggctgtgccgcccacaggagttgagacaatggccatcctgacaccttcctccactacagccctgaccatagacccagccaggtagctcttggggtctctagcgtcccagggcctggtttctgttccctcttcaatggtgtgttcccagccaggtcctgaccctcagagccaagtccctgtcacgtctggggcagccaaaccctcgccccacagggacctggacacgcccggccaggatgtggggttggatgggccattttctgtcctatccctcatctccacccccgccacagcctacacgcatcccacacatgcaggcacacacagcctgtgcacacatgtgttcttggcccggtttcatccccccatgactggtgtctgtgaggtgcagatggacacagcgcacacccagaccctccaccaggctgtgacctcgctgcctctgaggccttgacaaggcccctcaatcggaggacagccggccgtgcacactttcatcatcgtcggacaaacagcgtctactgcacatttttcttattcctattcttgagccatagctatggcatattcttctactattcctattataccacttaccagcttactcgaaaacacactgtttaaatg

SEQ ID NO: 238228 - DNA, 2707 bp, Homo sapiens
gagtgcgccctccccgcacatgcgccctgacagcccaacaatggcggcgcccgcggagtcgctgaggaggcggaagactgggtactcggatccggagcctgagtcgccgcccgcgccggggcgtggccccgcaggctctccggcccatctccacacgggcaccttctggctgacccggatcgtgctcctgaaggccctagccttcgtgtacttcgtggcattcctggtggctttccatcagaacaagcagctcatcggtgacagggggctgcttccctgcagagtgttcctgaagaacttccagcagtacttccaggacaggacgagctgggaagtcttcagctacatgcccaccatcctctggctgatggactggtcagacatgaactccaacctggacttgctggctcttctcggactgggcatctcgtctttcgtactgatcacgggctgcgccaacatgcttctcatggctgccctgtggggcctctacatgtccctggttaatgtgggccatgtctggtactctttcggatgggagtcccagcttctggagacggggttcctggggatcttcctgtgccctctgtggacgctgtcaaggctgccccagcatacccccacaccccggattgtcctgtggggcttccggtggctgatcttcaggatcatgcttggagcaggcctgatcaagatccggggggaccggtgctggcgagacctcacctgcatggacttccactatgagacccagccgatgcccaatcctgtggcgtactacctgcaccactcaccctggtggttccatcgcttcgagacgctcagcaaccacttcatcgagctcctggtgcccttcttcctcttcctcggccggcgggcgtgcatcatccacggggtgctgcagatcctgttccaggccgtcctcatcgtcagcgggaacctcagcttcctgaactggctgactatggtgcccagcctggcctgctttgatgacgccaccctgggattcttgttcccctctgggccaggcagcctgaaggaccgagttctgcagatgcagagggacatccgaggggcccggcccgagcccagattcggctccgtggtgcggcgtgcagccaacgtctcgctgggcgtcctgctggcctggctcagcgtgcccgtggtcctcaacttgctgagctccaggcaggtcatgaacacccacttcaactctcttcacatcgtcaacacttacggggccttcggaagcatcaccaaggagcgggcggaggtgatcctgcagggcacagccagctccaacgccagcgcccccgatgccatgtgggaggactacgagttcaagtgcaagccaggtgaccccagcagacggccctgcctcatctccccgtaccactaccgcctggactggctgatgtggttcgcggccttccagacctacgagcacaacgactggatcatccacctggctggcaagctcctggccagcgacgccgaggccttgtccctgctggcacacaaccccttcgcgggcaggcccccgcccaggcgcctcagggaccctcctccacccagagggtctctgtcttcccggttttcctggcgtaattcagacttggggagagaagaatcatcatccatcacacacccagacccaaagagactcaaagccaggaggagccgggtggacccagaggccctcaccctgccagcctaaggggcatggcccaaggtctccacccccagcccccagagcacagctgtgtgcaggtcaccagaagccccaaataatgacagcagcccagacagtcgctaccgggccctggtgcagtgtgaagcctctggcacctgcctgggctcattccaggggccatgagagggtcctgttatggctgcaccatcacacccaccgggcagctggggcccagctctgccatggatcccagccaggcagcagccgccctgtgggctggagaagcttccgctcctgctgcacaactgcgaaggggcctggagggccgggagcttgtgacggtgacaattccgcctggcgcctcctcctccggggcagccgagcaaccctggacatgagggggcttcgtcccacccccaggagaaaatgcccagtcctccgagagtccagtgagggcttgcagccagggaccaagacccagtatggcctaaaccaggcctggtcaccaggggtcaggcgggaccttatacagggctcagcagagagacctgcccgctaccctgctccaggggagatgggggtgggggccttcatcccactcgggcatgacagaggagagcagccagccagcatctgcacgtctcaaggcagggaaaggcctgaagccctgggaagcgaagctccgccctcaggaaacaggtcccggcctggctccctcacagcctcggactgccccgtggaccgaaacccccaggcaccttgcgccaggactggcctgatggtggagacgccacaccatgagcagtgggtccgaggagagcactacaggtacaagttcagccgtcctgggggcaggcacgccgccgagggcaagtggtgggtgcggaagaggatcggagcctacttccctccgctcagcctggaggagctgaggccctacttcagggaccgtgggtggcctctgcccgggcccctctagacgtgcaccagaaataaaggcgaagacccagcccc

SEQ ID NO: 238229 - DNA, 1666 bp, Homo sapiens
gagtgcgccctccccgcacatgcgccctgacagcccaacaatggcggcgcccgcggagtcgctgaggaggcggaagactgggtactcggatccggagcctgagtcgccgcccgcgccggggcgtggccccgcaggctctccggcccatctccacacgggcaccttctggctgacccggatcgtgctcctgaaggccctagccttcgtgtacttcgtggcattcctggtggctttccatcagaacaagcagctcatcggtgacagggggctgcttccctgcagagtgttcctgaagaacttccagcagtacttccaggacaggacgagctgggaagtcttcagctacatgcccaccatcctctggctgatggactggtcagacatgaactccaacctggacttgctggctcttctcggactgggcatctcgtctttcgtactgatcacgggctgcgccaacatgcttctcatggctgccctgtggggcctctacatgtccctggttaatgtgggccatgtctggtactctttcggatgggagtcccagcttctggagacggggttcctggggatcttcctgtgccctctgtggacgctgtcaaggctgccccagcatacccccacaccccggattgtcctgtggggcttccggtggctgatcttcaggatcatgcttggagcaggcctgatcaagatccggggggaccggtgctggcgagacctcacctgcatggacttccactatgagacccagccgatgcccaatcctgtggcgtactacctgcaccactcaccctggtggttccatcgcttcgagacgctcagcaaccacttcatcgagctcctggtgcccttcttcctcttcctcggccggcgggcgtgcatcatccacggggtgctgcagatcctgttccaggccgtcctcatcgtcagcgggaacctcagcttcctgaactggctgactatggtgcccagcctggcctgctttgatgacgccaccctgggattcttgttcccctctgggccaggcagcctgaaggaccgagttctgcagatgcagagggacatccgaggggcccggcccgagcccagattcggctccgtggtgcggcgtgcagccaacgtctcgctgggcgtcctgctggcctggctcagcgtgcccgtggtcctcaacttgctgagctccaggcaggtcatgaacacccacttcaactctcttcacatcgtcaacacttacggggccttcggaagcatcaccaaggagcgggcggaggtgatcctgcagggcacagccagctccaacgccagcgcccccgatgccatgtgggaggactacgagttcaagtgcaagccaggtgaccccagcagacggccctgcctcatctccccgtaccactaccgcctggactggctgatgtggttcgcggccttccagacctacgaacacaccacggtgcatgaacacgagcagggagaccaaggcggtggcgcagaacaaagcaggattgaccgggctgagtggcccgtaagtggaccacaggcgagggtgacgtggcaggtgcgcaggcgggacgggctaccagcagcaaaagacgcggtggccaaacggagggcacacccaagtccaaagaggacggagagactaggccggcatcatggcgcaggg

SEQ ID NO: 238230 - DNA, 310 bp, Homo sapiens
gagtgcgccctccccgcacatgcgccctgacagcccaacaatggcggcgcccgcggagtcgctgaggaggcggaagactgggtactcggatccggagcctgagtcgccgcccgcgccggggcgtggccccgcaggctctccggcccatctccacacgggcaccttctggctgacccggatcgtgctcctgaaggccctagccttcgtgtactgtgagtgccgggcgggcccgggacatccgccagtgtcacctccgcgcaccacgacccccgccctccctcgagactcctccgcgcggtctcgcggccgc

SEQ ID NO: 238231 - DNA, 3033 bp, Homo sapiens
  misc_feature (738)..(738): n is a, c, g, or t
  misc_feature (1337)..(1337): n is a, c, g, or t
  misc_feature (1692)..(1692): n is a, c, g, or t
  misc_feature (2062)..(2062): n is a, c, g, or t
  misc_feature (2339)..(2339): n is a, c, g, or t
  misc_feature (2386)..(2386): n is a, c, g, or t
  misc_feature (2535)..(2535): n is a, c, g, or t
  misc_feature (2543)..(2543): n is a, c, g, or t
  misc_feature (2549)..(2549): n is a, c, g, or t
aaatgtgccctgctctctcccctcttaaaaatagcagcaacccatctttgcaaagaagcttgcctatagagctggcactctgtgaatggactgtgcttttacgaccctacagggtatcaagatactgtgcagctcgccaacaaggattaattgcaaggactggtagatcgaatttactgaagacttggagctcgcttctgagaacaaacgcaaaaggacagtaaactgtggaccttgaagttagcagggtttcactcttgttgcccaagctggagtgcaatggtaaaatctcggctcaccacagcctccgcctcccgggttcaagcagttctcctgcctcagcctcctgagtagctgggattacaggcatgtgccaccacgcccagctaattttgtatttttaggagagatggtgtttctccatgttggtcacgctggtctcaaactcccgacctcaggtgattcactcaccttggtctcccaaagcgctgggattacaggcatgagccaccgctatgccgtctttgttttaagatctttgcctccctttctgcccaaatgtgtagattcaatctgctccaccccctttcctttcttctctggtgatttgtaaaatgcccatccatgagtcatggtcccctgcactctgtgaattttcaggcttcttttaaatagattctaccctactagatatatccacattttactatcactttacaccattatttagattcttgnataacagcacctgcacttacacacacacacacacacacacacacacacacacacgtgctccttcctctgatcctagacatccaccctgggaaattagatgctctattactcaaaagctcttaagaccacaaagttactcttcaaagttgcccaattaggagaggaaaagagcaaaaaatgaagaaagcaactcactgctactaatgagctatgagcttactgtctaaatgggtgtgacagacatgtaagcaaaaagagtaattacagcaataacagaaaaacagagagccaaatcatgagtgaactcccattcacaattgcttcaaagagaataaaatacctaggaatccaacttacaagggatgtgaaggacctcttcaaggagaactacaaaccgctgctcaatgaaataaaagaggatacaaacaaatggaagaacattccatgctcatgggtaggaagaatcaagatcgtgaaaatggccatactgcccaaggtaatttatagattcaatgccatccccatgaagctaccaatgactttcttcacagaattggaaacaactactttaaagttcatatggaaccaaaaaagagccngcattgccaagtcaatcctaagccaaaaggagaaagctggaggcatcacgctacccaacttcaaactatactacaaggctatagtaaccaaaacaacatggtactggtagcaaaacagagatatagaccaatggaacagaacagagccctcagaaataatgccacatatctacaactatctgatctttcacaaacctgacaaaaaacaagcaatggggaaaggattccctatttaataaatggtgctgggaaaactggctagccatatgcagaaagctgaaactggatcccttccttacaccttatacaaaaattaattcaagatggattaaagacttaaatattagacctaaanccataaaaaccctagaagaaaacataggcaataccattcaggacataggcatgggcaagtacttcatgtctaaaacaccaaaagcaatggcaacaaaagccgaaattgacaaatgggatctaattaaactaaagagcttctgcacagcaaaagaaactaccatcagagtgaataggcaacctatagaatgggagaaaatttttgcaatctactcatctgacaaagggccaatatccagaatctacaatgaactcaaacaaatgtacaagaaaaaaacaaccccatcaaaaagtgggcgaaggatatgaacagacacttctcaaaagaagacatttatgcagccaacagacacatgaaaaaatgctcatcntcactggccatcagagaaatgcaaatcaaaaccacaatgagataccatctcacaccacttagaatggcaatcattaaaaagtaaggaaacaacagatgctggagaggatgtggagaaataggaacacttttacactgttggtgggtttgtaaagcagtccaaccattgtggaagtctgtggcgattcctcagggatctaaaactagaaataccatttgacctagccatcccattactgggtatatacccaaaggattataaatcatgctgctataangacacatgcacacatatgtttattgtggcactattcacaatagcaangacttggaaccaacccaaatgtccaacaatgatagactggattaagaaaatgtggcacatatacaccatggaatactatgcagccataaaaaatgatgagttcatgtcttttgtagggacagggatgaagccggaaaccatcattctcngcaaactnacgcanggacagaaaaccaaacactgcatgttctcactcataggtgggaattgaacgatgagaacacatggacacaggaaggggaatatcacacactggggcctgttgtggggtggggggaggggggagggatagcattaagagatatacctaatgttaaatgacgagttaatgggtgcagcacaccaacatggcacatgtatacatatgtaacaaacctgcacgttgtgtacatgtaccctaaaacttaaagtataataaaaaaaaagaaaattaaacaactttaaaaaaagagtaattacagcactgtaataaatgaaccatgcacatgggagtattcatagagaatgataacttcaacctaaatcttgaagtataagtataaatttgccaggttcacctcttgattatttaagtgtgaaagaggatgcatagatcaccttcaagtagctaaggcataatgagataaggatgctgaactaagttggtt

SEQ ID NO: 238232 - DNA, 292 bp, Homo sapiens
acccgcctcgacctccccaagtgctgggattacaggtgtgagccaccacgcccagccaggacccattcatttttaaccaccttgctttatctgttcaaaagagaaacaaattcagcatgtgtaaataactctgaccaccctcaataggaagcagacagggccttgagtatttctctcatctcctgactcagaatcgcagcgtgtgtgtctctcttcaccataccgcacgggtcctgctcgctgacccagcccgcctgctgtccaggccaatggttggtgggtaccgagctcg

SEQ ID NO: 238233 - DNA, 591 bp, Homo sapiens
agtttttttttaaaaaaagcatccaagaactgtgggaaaatatcaaatgatatcatatgcatgtaataggactcccaaaagaagaagaaagaacaaatcataaaaaatgtttgaagagaaaattaccaataattttcccaaaataatgaaagacctgagctcagagcacacacaaaacttgataaatatgagcccctgcctgacacatgcagtgtattcaaactgtggaaatcagagagaaaaccatgaagatggccggagaaaaaagatacgttaaatacagtaacaaagaatcgcagcgtgtgtgtctctcttcaccataccgcacgggtcctgctcgctgacccagcccgcctgctgtccagggcttcctctgtctctgctctgggacctccccatggccacgcattccgccgcatggtctggatccctcgcggtgtctgggttcagccatgctcagcctctgtgtcggtcaccagcctagaaaccctggagcaccccgggccggaacccttccctcagatctgtcgtgagttccctttcagagatcaagcccagcctggctcagtcttgcaccccttgggatccacg

SEQ ID NO: 238234 - DNA, 482 bp, Homo sapiens
agtttttttttaaaaaaagcatccaagaactgtgggaaaatatcaaatgatatcatatgcatgtaataggactcccaaaagaagaagaaagaacaaatcataaaaaatgtttgaagagaaaattaccaataattttcccaaaataatgaaagacctgagctcagagcacacacaaaacttgataaatatgagcccctgcctgacacatgcagtgtattcaaactgtggaaatcagagagaaaaccatgaagatggccggagaaaaaagatacgttaaatacagtaacaaaggtaagaattccagcctgggcaatatggcaagacctcgtctctacaaaaaatacaaaattttttttttgtattttttgtattgcccagtgtggtgacacgagcctgtagtcctgtgggcggagaattacccaggtgccgaggcaagagaccgaaggcacaaactatttcagtataataaaatcgttacaata

SEQ ID NO: 238235 - DNA, 458 bp, Homo sapiens
gctgagattgcaaggccttcagaaaaggccccagcttttcagattagtgtgatgtaaaatgttttattaaagagatttttttcttagaacttagcattgctgggtgcagtggctccctgctgtaatcccagcactttgggaggctgagatgggagtatcccttgagcccaggagctcaaggctgcagcaagctatgatcgtaccaccgcactctagcctgtgcaacagaccgagatcctgtctcacaaaaaaaaaaaaaacaaacaaaaaaaacaaaccttagcattatgtaacatctgaatctaatagaagcaacaaaaactatgtaagagaagtttcaatagaatgtggaataggatttcatgatatggctggattgattttaagaaaatccaaaaggactttagacttcctagaagagatcttagaagtttagcagccataaaatctctttcctt

SEQ ID NO: 238236 - DNA, 1389 bp, Homo sapiens
  misc_feature (364)..(364): n is a, c, g, or t
tttatcttatgctctctcaaggagggggaatgctgcaggcctctaatagggtcatctttctatagctagagactcgtgggtataaagaagctgttcccagaattcagctagccatcttaatcccttccttctggcactagtgaagtacttttcattaggttggcatggtatgatctgagactcagttttaaactttggggcaaaaataggtgaattaggtttccttcacttcagaggttcttgtcctttgaccctgtaccccaaacctcaaaaggaggcaagaatcctctgtgtggtccagccaacatcaccatggctctgcattgaggttagggcataactctatcttatcaaaactgaggantactttccttgacttgactggccaatgtcaatccaaattctcttgtccagcactttgcaagaaggatgattgattcatagatggtttctgagttccttagctaaaacaacctcttaatacactcctagtcacaccatcatgaagaaaatgtgtttgctaagctaacgaagacaagatgagcattgattctttgagggggtaccatttatgtttttcccacactgtatcttcactgccttatacatagtaattgctcaatatttgtttactgaaataatgaatataaaactgaccagtaaaatctctaattaccctgttcccatgttggtgatgataatgtgaggctgtgacagatgctttgcagtgcctgataagtaccctacgcatttccccaaacagccacagctaccagcactgacccacttctggctggtaggaatttgaggaattggattctatagcccaaagaattaacaggacaggtgttcatatttaagcctgaatattttttaagtatttcaagaagtcttactcaatagttacttggacatctggaagaggcagcattttaaatcacttctttatatgcattatgcatattgtacatatgaagtttgaaataactgtttgtattctatatacaaatggttatatttataaaccaaagacatctcagctatatctcagttgcatattgaaataattgagtgggaacatcttaaattaacgtatttggggtttgtgtgtgtgtgtgtgtgtgtgtgtgtgtgtgtgtgtgtgacattcacatttagaattgtgtgcagtgtgctgaggagttcaaaaccagcctggccaagatggtgaaaccccgtctctactaaaaatacaaaaaaattagctgggcacggtggcaggcgcctgtaatcccagctactcaggaggctgaggcaggaaaatcacttgaacccaggctgcagaggttacagtgagccgagatcatgccactgcactccagcccaggcgacagagtgagactctgtctc

SEQ ID NO: 238237 - DNA, 355 bp, Homo sapiens
ggctggctccgcctgctctaggctgtgtctctaaaggtggccccacccctgccttgcactaagtctttactcaagaaaatgcaatgctaccaaaccacaaaatgtgcattgtcccaacccagcttgcaccaaattgttttcaggaattctctagtgaccccttctgtaatttccatttccacataaaccccaggccctttttgttcccccttcttcacttccccagcatccctttttgttctctctctgttctcccttcagaagcctcagtcccctttaattggggctgagttctgtctgacctggaatctcccccaaagcaggagtctgaataaaacctgtcttgccacctttc

SEQ ID NO: 238238 - DNA, 474 bp, Homo sapiens
ctgggttgggtacacaagctggtcttgagggacacacaggactaggacagatgaagagcagggatgctgggcctggagggtggccttccctggggtgacagggaaggtgaatgcagggaggccatttgtgcaggggagccacagcagcgccagccttgatgccacctgagggcctgagcctcagtggggttggagccctggtggcagcccagggccggggaggaaggggtgggtaagtgtggcagggcagaaccttcacaggcctgtgtccccagatgtgggagggggccaccgtgcccatccctacagaggctctgaggagcatggatggttactctgggcccaaggacctggtgtacaccattaagcagcccagcaatgggtgtgaggttgcagtgagctgagattgggccactgtactctagcctgggtgacagattgagactccaatctttagaaaaaaaatatataaaa

SEQ ID NO: 238239 - DNA, 277 bp, Homo sapiens
ctcaagatcacacagccaaacagtggcagtcccagagccacaacgcatgtggaggggatttttctcttgtctcctgaagctatagaggatccttcctggaagcagggcgtctctctggcactaggctcatccctgcctcagagcctttgcacctgctgctccctctgtctggacaccctgccagctcccccatggccagctcctctcatccttcaggttttggttcaaacaccccctcttcagaaaggctttccaggactccttcattttccagcca

SEQ ID NO: 238240 - DNA, 116 bp, Homo sapiens
caaataacgaagggaattatatactaatctttgagaagtggaaagtagtattgcccatgatggacaaaataagaaataagctaaaaattagaaagattgtaattgatagagaaacc

SEQ ID NO: 238241 - DNA, 338 bp, Homo sapiens
agcaggtaagccccggccccgcgccccacgcccgctcgccctgccttggccttacacgcccggacacgggggcggaggggagtcacctgctccgagtccctctttatcctgaaacatttggtcgggtgtgcagcttgtcaagggtgacttttccagcaccccattccctccctccctcccctcaattattcagcagacttttccagccctctctggaaaatgttaaaaagactggatggtgtgaagcttcacctatggaagggtttttagtgcacggcagtattatgtaatttgcgattatgtaaacctcagctctaattaaaatgtagtttctagta

SEQ ID NO: 238242 - DNA, 1527 bp, Homo sapiens
aagaaaagagcagatatggttgagcactaaaaccctctactgtgggtagtgaacctaggtggacacagttgctcaccgggacacttaaaccagctttgcggggctgtcggggttgggaagcacagtctggaaagatttcccaatggaggaagcaccaattgtgggtccctgaagctgaggggatgatgcccaggcaaggccgaggcagtctgcagagggctggggaggtgggaaagacgattttgctcagaggaggcagagatggggtggtggctgagagagatgcagggtcaaggaaaggatggcttcagagaggagagatttgctggggcaaaaggccacaggatggggaggctgcggggtccaagaggacagctgatggagcgagaccctgcaggcaaggaggagatggggtgactcatggcagaatcgcaccagagttcccacagccctgtgcggccactatgactagtcccatcctgtacatggagaaaacgaggctccttccagttgtccctcacgcctcccttgatttatgtactacctgatgtgtataaggacaggtggtgacaaacacatggtccctacccttcaaggacatataatccagagctaagacaagaccttaacacagggcaaagtactatgctctgagttcatttgatgagcgatgggagaacgggcttgatcctagccatgcgggagagactggaattcaagagagtcaaatgtgctgggaaagactttctgggcaaaaggaataagcaaaggtgtgcaaaggtaaggaagcaggaaacctttgcacatcttgagaactcgccggccagaggcctgtgaaggagcgcagtggtcaggcaggagaggcagtcggatgcaggctgagaccatcctggagggtcttgaggctggcttaccccaggctgtgagtagtgggctcagcctagtcccggctcctgggttagtgctcacgtgtctctctgccccctcagggcctggaggaatggccttagagcccccaccaaccacgctcaggaaggcattcctagctcagagtaccctcctggagtctacactggaaggggctcctgagtgggccgcgccacgccccgaggagcagaggcgcagtcctcccgcgtgctcccagcacactccacccctacccagcacacccacggggcccccaccttgctcacctggggggaaccacccactctgcgccctctcagggagaggtggtggccgctgctctatcccctccctctcttcctcttccaccttctctctcttctcatctgggtgctggaacccaagggtgaaactgagagtcagaaagtctcagtctcaaggcagagcggggcaactaatttaaaacggcttctactccggcccccagtgtgactaatctccttctcttcgctccacaggtctataaatgggccacagtaggcacccctttttaaatctgtaaaatccccaaatccattaaaagtgacttcagaggtcccagatagggaccaacatttgttt

SEQ ID NO: 238243 - DNA, 505 bp, Homo sapiens
ataacataaaaacataagtggattgaaggtaagggacagaaatagttatattctgaactattaaaagaaagctggggcagagatgttagtatcagataaaatagacgtccgaacaaggaatattaccagagatgaatagatacattatatgatcctgaaagtgccattctggccaggcacggtggctcacacctgtaatcccaaagtgtttggatgacaggcgtgagccaccactcctggccagaatacacacttttgtacaaatgcacatggagcattcaccaagatagaccatattccaggccataaaacagatctcaacaaattttaaaaagtgaagttatgtgaaatatgtggccacaacagaattaagccagaaattaatagtatgtctcttcaaatatttggaagttaaagaacatattttaaaatgactcatagatcaaaaaacacaaatacttctccccctcttcttctactctctctctccttcttaaaacaaaaa

SEQ ID NO: 238244 - DNA, 1684 bp, Homo sapiens
ttgtaatggatgaagaggcatgactcagtagatggttgatttgggaataaccacatccagtctagaagggagctgaccctcagaatttctagctatgggatagacagacctgcctaactaagagacagtttactgatagactgtggtaaattctgtatggagatatacagacaacagaaggagaacataattcctggttgggtggggaggggagggtgtgcttgtggttctcagccctggatgtgtttcggaatcacctggagataaacatatagaacctgggctccatgcctaagattctgattttcagttctgggagtataacagggccatcagaattctcttttttttttgagacagggtttcactgtcgcccaggctagagtgtagtggtggcaattatggctcattgcagcctcgacctcctgggctccagggatcctcccacctcagcctataactgggactacaggcatgcaccaccatatctggctgattttagtttttgtggagctcggatatctctgtgttgcccagaaggtggccatcagaattaacaagcttaccaggtgatcaggacctgaagccaagcactaaacataataataacagcacatactataaactggacatcttaggtattttctcttattctcataaccatccctaaatgcaatttatattatccccattttacaggcaggaacactgaggtttaagtaatttggccaaggtcacacagcacagcccatattttaattaagctctcagtctaaaggcctaagttattttgccatatcccatacagcaggaggtcagcctggaagaatcttcccagaaatttaaattaagataattaactcagatgtaaactgtaaaatctgtacataatgggtcagacaaagatatgcaagcggatttaaagagacacaaaggctccgagctagtgaaagttcgaccttaaccctacggcatcgattaacatatcaaaaggaagaatgtgtcctttggggtgggagggcgcttgggccagttagtctgatactttgtgagctgagggagggttcctggccctggcagcattgtgatctggtattaactctttcccgtggcttctggtttctcctgaccttcctggctgttctgtttccttccgtttctccacctaccccttaaatgtggatgttccttgcattccactctccccgtattcccaggatgactgcatccacttcggggcacagctgcctgtgctaaggacttccagaggcgtgcactcctgaggtcctgactcaaggcatcaaggcaatccaggggagtgggagaggtgttctcagacaggactggagttcacatcctagctgggcgtcttactggctatgggtcttagaagttacctattattgctgggtgtggtggctcacgcttgtaatcccagcactttgggaggccggggcaggcggatcacgaggtcaggagttcgagaccagcctgaccaacatggtgaaaccccgtctctactaaaaatacaaaaattagccaggcgtgatggtgggtgtttgtaatcccagctactcgggatgctgagacaggagaattgcttgaacccaggaggcggaagttgcagtgagctgagattgtgccactgcacgccagcctgggcaacaaagagcgaaactctgtc

SEQ ID NO: 238245 - DNA, 385 bp, Homo sapiens
gaggctagttgattgaattatgtttacacaatggagcactgagctgtctataaaagggaatatttttgtgtacttctgtggagttattttcaggatatgttgttaagtgaataaaggaacagaagaatgttaatagaatgctaccttttgtatgatacaaagaaatatgaatgatcatatttgtttatatttttaaaagagaatgatgaatggacaaagtgaaaactaatgaaaatggttaattttaggagaggggagagaaaaatgtggagaaacagatatggaaacaagatatctaggattataccttgattatacttagatttgactttggactcatcttgctgtttacatactaaatgtaaaacaaaaaacaaaaaacaga

SEQ ID NO: 238246 - DNA, 472 bp, Homo sapiens
agaggaggggtctttctcaggggtggcagaggcagaagaaaatttgtgtataagtggacttgtacattttaaacccatgttgttcaagggtcacctgtatttaaaattccacattcaaataaatttgacccttgtgtatattattaataatatacataattcttagaataataaatgaatgttagattgtaaaatcattggcctagaggagttgcctaaagattgaaataaaccagcttcttggcttctttattttttaaatgaggggcagacacaaagtaaatttccaagtcaccttgaaatcaggcactttgaagcctagctatgagtaaactcagttatactgtctaatacccattttagcttttctgtttacagcataaactttaaggccggttttagttcttttaagaagtcaaaagcagaacctctctagcagaagtgtttttcaaacattaaatcctaaaccaaa

SEQ ID NO: 238247 - DNA, 465 bp, Homo sapiens
actcttaatagctatttaaatgcttcctatatactaggcactctctgttaggtactttatatatgttatcttggttaatctacacaaagcttatgaagacagttcattttacctgtgtattagttttgtattgctgctgtaaaataaaatgaaacaaacaaacaaaaaacaaaagatctggccgggcgcggtggctaacgcctgtaatcccagcactttgggaggccaaggcgggcagatcacgaggtcaggagatggagaccagcctgaccaacatggtgaaaccctgtctcaactaaaaatacaaaaattagcagggcatggtggcgtgcacctgtaatcccagctactcaggaggctgagacaggagaatcgcttgaacctggaaggtggaggttgcagtgagctgagatcacgccactgcacttcagccagggcaacagtgtgagactctgtctccaaaaa

SEQ ID NO: 238248 - DNA, 317 bp, Homo sapiens
actattatgagaatagcacggaaaacaccagcccccgtgattcaattacctccccatgggtccctcccacaaggggaattctgggagatgcaattcaagttgagatttggatggggacactgtcaaatcacaccaggtggctttgcagggctatttcaaaatatgccaaagatatttatttttgggtaaaatattttaatgtctctcagggtctgctatttgtcatatgatgttggaccagtgtcagtttgaaatgtgatattttattgccacaaaaagtctgttttgtgatctctgtttcaacgttaaaaaaaaaa

SEQ ID NO: 238249 - DNA, 452 bp, Homo sapiens
tctcagctcactgcagcctctgcctcccaggttcaagcgattctcatgcctcagcctcccaaatatctggaattacaggtgtgtgccaccacacccaactaatttttgtgtttttagtagagacagggtttcagcatcttggccagactggtctcgaactccttgcctcaagtgatccgcccacctcagcctcccaggtacagtcgtgagccaccgtacctggccctaggttatgactcttaaagattcttcaggagcagtatttaaattacttcacacagagattttctactgaccaacataacttccaagattcacaaattgctttatttgctattcctcccctagagtaatctggttgttctggaataaatatggtagagaacaaacataaataagaatgtttccaactgaaaatttttgtttacttcccccttcaatttctagagctc

SEQ ID NO: 238250 - DNA, 355 bp, Homo sapiens
ctttgacttaaatagattacattttttaacaaattattttatggggttgaatttggtctaagaaaatgaagagtgtattcattctattaaaaaatggctaaatatgaaaatggcttgagtgataaaagtaccttgactatgctctactgtttctatatagtcagttttaagaaactgacaaattaaaaattttctcgaactctctgtaaagttaaaatattaaaagtcgagacagttttcttcattaggcctgagaggcaaaggtgtgatatattagcatttgaaaaataaataacagtgcatcaaaaattatgaaaacttttaagtatgcttaaagaataggatttatatccaa

SEQ ID NO: 238251 - DNA, 383 bp, Homo sapiens
cattctcgcttgtacctgttaactaaataccttaatggcagcaaggtcatcagaattacctgggcagattccttaaaatacacattcctggaccttacccctggatattctaattcagtgcagtataaaaagtgtgattcagcaagacttgagaacctctttgtttatggaatttttggtttgagttctttttttttttctttttttttgagatggagtctcactctgtcgcccaggctggagtgcagtggtgcaatctcagctcactgcaagctctgcctcctgggttcacgccattctcctgcctcagcctcctgagtagctgggactacaggcacccaccaccatgcccggctaattttttgtatttttagtagagatag

SEQ ID NO: 238252 - DNA, 1083 bp, Homo sapiens
attcctagaggatcccggtattgagtggccatgtgaacacacagtgagaaggcagctgcattcaagctaagaagacagtgctcactagggctcctcaccaaatttgccagcaccttgatctgggatttctagcctccagaactgtgagaaaataaatttctgttgttcaagccacccagtctatggtattttgttatggcagccctagcttactaaggaacaactactgatataatcataaactagctgcaatcgtcagttagcttcagactttgtaacgtagccagtggagtgatcttaaattccatgtaatttgtaactcaagtaaccatgtaacttgaggtcgccctgcctcagacctgggtaaacttggcttaaacctccagtttcacagcatatgaaagaccattgccttctatttaatttattcaaatttctaaacttagtttttcatgatccctgtggattcattcctgcaaccctaagtgttgtatcagttccactcatctgccagctggtacatggaatatcaggagcttcaccattgtccataagaaattaaattaaattcatgattttgtgactgttccaactttaattaagtctccaggagttgcggaaggaaattatatcccacaccgcgcagtcttctgcctcctaattggtttccctttgacactgcattggcttccaaaacttactgtgtgatcatcctcacaaccctcaaagaaactctagcatcccttccccttactaagcctaattcacttcctcagccctttacacagaaatctaaccatgtcgcttccttgtgtgaatgaaagcgataatgccatctcctaactgccaatatgcagtgacttgactctggtttagcaattccaggaccgctgaagttttcttcctctagcctccaacatatatcacccacaaatgatacccataaagcaccttccccctaatgggcatggcagctactctgtcctggacctagatgcctggcccagtgatgtcaatgctatacttttgccttcttcctcactgctctttaaggaccagcccctcccctctctcaggccaccc

SEQ ID NO: 238253 - DNA, 181 bp, Homo sapiens
ccgtcccctccaccctcattcccatttgtgtgagaatgtagactgtgccttggcatttcagggacacaaatggtccatggcagagaccagtaatgccagatatgactataaagtaaagaaaggtacctgaagccactgatttatatccacagttactttaaattaaacacagacctttgca

SEQ ID NO: 238254 - DNA, 428 bp, Homo sapiens
ctgcaacatgcttaagccaacagccaggctcattcccaccctcttatgaataatcacataagctttccataaatgagatttcctaatgtcagaggggactgtcttattctcaaggaacccagtttgacctggcttgcagagtgtcctttcgctttgcaataaatgtctttgcctgcttttactttggactcactctcaaattctttcatgtgggtcaagaacatgaagcagcccactgacagcagcaccatctacaacacagagcccttcacactttgggcagaatgcaggatttctccacctttgtatcttggcctgagacaataaatggggctcatacctgggagcaaagaaaaaaagagaagtggcaggaggcttttgggttggaagaggacaggaccctcttaaatctggaaggggcaaaacca

SEQ ID NO: 238255 - DNA, 598 bp, Homo sapiens
tgtggtcctgtctccattctattaaaacaacattgtagagattagcactgagtctttccagccatgtgcatctgttcatttccatctccagcttgagtttttctgtgtattacaaaataagaaaacaaaaatgacacaataatctattttgtctggttttgctctttattagtagaaatagacaagtgaggagttggaggaagaaattgcttctgatctgttttagatacaggtgaaactctccctccctccccgccctacccagtctttctctgtctccctccctgagcctattcttgcttcttccctttacaaataattaactgctcaggtcatgttgaaccaaaaaatagcgtctgtagcccctgtgtgcttactttaagtatatgttactgaaaaatgcggagtgagcacttaacaactcattctcctgggaaacacagtgctactataccccaaatgcttttctttatcattttaatttttatcttctttacttacatttccaacatcagttaagagggtcttgtagttttctaactgaaaggagactgtaaaatctccttgctcgtattatatctggtttatttcaaagtca

SEQ ID NO: 238256 - DNA, 477 bp, Homo sapiens
aagaaaactatcatctaagactcccttggccagtaactttcttttatgcaaagagaaaaggtcaatttacaactaaacctaaatgaaatggaattcaaatggtcagggtcaaatcctggggggaggcactgaggaaaggacagctgtctgggggtcggtggcagggactgaagctgagcagcaccaggcggtggcagggattgaagctctgcagtgccagtcaaggcagggatcgaagctctgtggcaccagttgatggcagggtctaagctttgcagcgctaggcggtggcagggatctaagctctgcagtgcagtcggcggcagagattgaagctctgtggcaccagttgatggcaggggtctaagctttgcagtgccagttaatggcagggatctaagctctgtggtgccagtcggtggcaggatctaagctctgcagtgcccatggcccattggttcatcctggccgagcctc

SEQ ID NO: 238257 - DNA, 393 bp, Homo sapiens
ttttccttaaaaacctggtgaaatgaggaagaaaaaaacaatataaataattataggctgaaaatgctaagttttgtaattgaagaacagaagtcatctgggtggagactgaaagcactaaagcattacttctgtccagggagatggggcatgtgtcgtgggaggagggattggagctaaccttggaaaaattgaggtgcatgctaaagtgtgtagacgtgaaaatagatgagtctcggatttccttaagatgtttcaaaaagggaaaagagaacaagaaaaaagttactgagccaaatgtatgacatagtccttcttgactcgaggtgagctgtacatggatgtttactttttcattccaactttcatagatgttggaaaattttcaaatta

SEQ ID NO: 238258 - DNA, 366 bp, Homo sapiens
cttagctttctccccgagccacattcttaagactagtgaaggtcattgtgagatccagcatctgtctatcttcatttcagatgaatggctgagaagacagtgggtggaggaggctggaacagcagcacagttggcctccgtccacagctgtagcctgatctccttctgggattcctatacgcagcggaccctgtctccaaatatcatggtcctctgctcccaaaatgctgttatgcagtattcacctggttcttatacagacttcagtgtaaattttaacaataatagctatgatagcatgttatttaagccaaaatattatgcagaaataaatattgaaaaaaaattgatctgaaaattaaattt

SEQ ID NO: 238259 - DNA, 379 bp, Homo sapiens
ctcagcatgtctgagggcctgtgaggggctggaaatgaccagtctgggtgaggcacatccccctcctcttctacaagccaacagtgtcctgctgacccccacagctgcttggggggaagcagctgcataatgaatatagaagcaagaagcagacgagctgtccaggggaagtcacagtggcacaggaagggacaatctgcctgcagatgctggccaggcctgctcccaggaggcactgaaccaaagtcacctggagaagccaggcaccagcacagacacctcctggccaggccaatgcaggtcccacatctgatgactccatcgagctcccttcagcaactcctgctggcaccatgccagccctagccttgggagcagg

SEQ ID NO: 238260 - DNA, 358 bp, Homo sapiens
aagctttctcagtgccaggtgctatccatttagtcaagtatctgacctctgtggattaaagtggagtgcttatatggggaaaagggtatatgtgattcttgtaactacacctatttatacctccaaccctctgctggcagcctgagttttgggacaagggaaattggtaatgtaggttttttaataacgtcaaatataacagcattggagccatctctgcaagatggagagacttgaccagccttgactagctcccaggtatgggtgcctctgtggtgaatggtattgatgactatgatgcctttgttgacaaataagctaaaataaattgaatgtgtgccaattccatggcctgtag

SEQ ID NO: 238261 - DNA, 282 bp, Homo sapiens
taaagagacagggaccccactgtcacgaggctgtagtacagtggcacaatcatagctcattgcagcctcaatctcctgggctccagtgatcctcccgcctcagcctcccaaagcactgggatttcaggcatgacccaccggacctggctacaaagttcaaaggagtaccaaaaagctcagcaatggtaggccaggtgcagtggctcacccggcactttgggaggcccaggaaggaggatcacttgaggccaggagctggagaccagcctgggcaacataggg

SEQ ID NO: 238262 - DNA, 303 bp, Homo sapiens
ctgtgcacgccctgggaagcccgggcctgtaacataaaacacgccctcagcacggctcactcaccgaccccctggcacatctgcatcagcatgcctattatgggagtgttttgaggaagtagccaaagctttagtggaaaaccacccaggaaagcttcaccagagagtccttctccactacagcaatgcccctgctcactcctcatcaaacaagggcaattttgcaagcgtttccatgacaaattattaggcactcaccttatagtcctgatatggctccttctgacttctttttgtttccta

SEQ ID NO: 238263 - DNA, 250 bp, Homo sapiens
ccgcaaaactgtgagagaataaattcctgttgtctaaagccacccagtctgtggcattttgtcatggcagccctagcgaactaatgtaccagctacgaactccttgaggacagagctgtggtgtcttcatctgtgcacccccagctgtccacagggttctggctcatactcatactcagtaagcaagggtctaattgagttgcattccacttgcaacagggagggtaatgatggaagaagcaccttgtgg

SEQ ID NO: 238264 - DNA, 335 bp, Homo sapiens
cttcaaaacagaagggcaaatggaaaagggggatataaaacaaaccaataaaaataccatctgagggtgttactgtccaaaattaaagaataagatgcatcactaagccctttgcactcgtgttgacctcgtaagtaaaaattattacttagaataataataagtggtgcacactacattccctgtccctcttctagacttttttttttgtagaagaatcagaaaacaatttactaacctccctgtttgatattaaaaactcaataggaaggtttttaatattttctgtcagtacaagttgaacttgattgtgtcaactgaaaccctagaggttt

SEQ ID NO: 238265 - DNA, 351 bp, Homo sapiens
ataaagaatgggtagaatatcagagctactaattttctcagtaattctaacttgatttttctaattttcaagtctcaattgtctctagtcaaaagtaagtataaaagagtatatacatcgaggcaggcagatcacctgaggtcaggagttcgagaccagcctggccaacatggtaaaaccctgtctctactaaaaatacaaaagttagctaggcgtcatggcacccacctgtaatcccagctacttgggaggctgaggcagagaatctcttgaacccaggaggcagaggttgcggtgagctgagatcgcaccacagcactccagcctgggtgacagggagactctgtctga

SEQ ID NO: 238266 - DNA, 680 bp, Homo sapiens
  misc_feature (628)..(628): n is a, c, g, or t
  misc_feature (660)..(660): n is a, c, g, or t
  misc_feature (680)..(680): n is a, c, g, or t
gttccaggaagataacatggaaatggtggtagactccagagacagggaagaaggaagtttcaacatagccctgccctggggctgggtgggcagagtccaggctagctcctgctcgctgcctggggaccccatccagccccttgtccaggggtgcctgcaggcagacatgagagtgaggccccactaggaggacaaaatgcaccacagcaagccagggagactgcattcttcagttgggaacatccttggggtctagtttcatggctaccaaaggtagtgggcaggtcccaggcctcctgccaagggcgggcaggcaggcatctctcctccacctagaggatcattaagccctgcccagggccacaggaaggattcattcccctgggaatcgggctgctctgtaaacccaggcctgtttctacgaggagcttcctctatggagaacccacgcaggttcataccaggccagagtctccctcctggcccactgacatggttctgctctcagattcagggcccaatgtgcctgactgactagaacagaaatcctcaatcctcctacctcccaaacaggttaagctcgctttaaagtgaggtccggataacttcgcatgtatgggggagtagntctcggtatgcctgtgtgaaaattgaactgtntctgtacgtcatgtacaccn

SEQ ID NO: 238267 - DNA, 854 bp, Homo sapiens
caagtagctgggattacaggtatgcaccaccatgcccatctaatttttgtactgttagtagagatggggtttcaccatgttggccaggttggtctcgaactcctgacctcaggtgatccacccgtctcagcctccctaagtgctgtgaggcgtgagccactgtgcccagcctgaataggtcttaaaaataatttgctaagatgctcaaagcagaacaaaggagaaaatactgcttaataacttcatggaaagaattcagtaaaatctctacaattcacagatagattagtatactaattactgacactgatttttttttttgttaggtgtgctatcgagtagtgatgcagctttgtggactttggggtcatcctgttttagcagtgagagtcttatttgaaatgaaaactgctaggataaagcctaatgctattacttatggttattataataaggtagtcttggagagcccgtggcctagcagtacccgcagtggtattttcttatggacgaaggtacggaatgtggtacgtggcttggcacagtttaggcagccgcttaaaaagactgtgcaaaggtcacaggtctcctcaatatcagctcttcaaaatgtcacaggtggaagtgatggggacacggtgagccacggtagtgtggatagttctaatgatgctaacaatggggagcacacagtcttcgtcagagatttaatcaggcttgagtccattgataatcactctagcacaggtggtcagtctgaccaaggatacgggtctaaggatgaacttataaaggatgatgcagaaattcatgtgcctgaagaacaggcagcaagagaattgataactaaaaca

SEQ ID NO: 238268 - DNA, 558 bp, Homo sapiens
agatgttatacaaatccaccacagtgggccaagtgtctgtttagtcattgttacagtttatggtttatttgtcttccggcctatgttagagtttctcatcctaaagtcagagcacttcagcaggcatatgatgtacttattaagatgaggaaaacagatgtggatcccttagatgaggtgtgctatcgagtagtgatgcagctttgtggactttggggtcatcctgttttagcagtgagagtcttatttgaaatgaaaactgctaggataaagcctaatgctattacttatggttattataataaggtagtcttggagagcccgtggcctagcagtacccgcagtggtattttcttatggacgaaggtacggaatgtggtacgtggcttggcacagtttaggcagccgcttaaaaagactgtgcaaaggtcacaggtctcctcaatatcaggtggtcagtctgaccaaggatacgggtctaaggatgaacttataaaggatgatgcagaaattcatgtgcctgaagaacaggcagcaagagaattgataactaaaaca

SEQ ID NO: 238269 - DNA, 464 bp, Homo sapiens
agatgttatacaaatccaccacagtgggccaagtgtctgtttagtcattgttacagtttatggtttatttgtcttccggcctatgttagagtttctcatcctaaagtcagagcacttcagcaggcatatgatgtacttattaagatgaggaaaacagatgtggatcccttagatgaggcaagtataacaaattgacattgtttctaaggtaaattttatttttgtacttctaataaaatttgggtgtaagttgctttaaagtgtgctcaagcattttcattaagcaggaaaggtaaaactattactgtttcatggagctggtgcatattacttgtttattttttattttaattattgatttgtttttgtgacagagtctcactctgtcacccaggctggagttcagcagtgcgtccttggctccctgcaacctctgcctcccgggttcagacagttcttgtgcc

SEQ ID NO: 238270 - DNA, 409 bp, Homo sapiens
acagactgcctttgtagtattaacaaattagccataggattagagattatggtttaggagtcatgtagctggaggccacaagattctaagcctccccagttgctcctagggatagcatcactattggaaaacctgagattggtgctgaagatatttttcagaccctgcagttgatggatcagctggcgtcacccagattgagaaactggctggctggtcctgtggcccctacccaggaatctgcttagcgcaagaggaccacttggaggctctgtgattttgtctctgaccaaaccaatcagcactccccactccctggccctctacccatcaaattatcctttaaaaacactagtctggaattttcagagagactgatttgagtaataataaaactctcttctcccga

SEQ ID NO: 238271 - DNA, 365 bp, Homo sapiens
ggagctgctgctgctgttctagtgtgagggtcatggagctggaagaccgcgggaggagctgctgctgctctcctagtttgaaggtcatggagctggagacccggaaaggagccatttgaacagcagcactggcccctccccaggtctcaggctccacgaccctcagacttaaaaagctgtagtacgggcttctccctgggtctccagctctacaaccctcagacatgaacagcaccaccggctcctccccctgtctccagttccacgaacctcaaactacaacagcagtaccagcctgggcgacagagcaagactctgtctccaaaaaaatagaaaaagaaataaaataaaataaaatgtaaaaa

SEQ ID NO: 238272 - DNA, 502 bp, Homo sapiens
ctgtgtgtttttgcagatgtgattaagtgaaggatcttgagatgaagcaattataatagattatccagatgggctctaaatgctgtcacaaatatccttttgggaaagaggcagaggaaaagtagacacagaagaagggaaggtgatagtaagatggaagcagaagtgcgataaggccacaagctcaaggaaggcaggcagccacaagcgcctggaagagaacaggagtagattctaccctggagcctcagaaggaagcatgatcctgcctacaccttgacttcagcccagtgaaactgatttcggacttcttgcttccagaattgtgagatcctacactttcgttgtttcaagccaagtttgtggtagtttgttacagcagccatagcaaactaatacacacaccttttcccctataggaaccactgacgttcctcatgctctctgttagctatattttgtctaaaaggagaaataataataatcatcctttatatggaaa

SEQ ID NO: 238273 - DNA, 2511 bp, Homo sapiens
  misc_feature (1140)..(1140): n is a, c, g, or t
agaaaagaggacagagtcattttgctcagaagaaacagcatgtgcaaatgtgccacaaccattcaaagcaagttgctgcttaagtcttgcccacaacttttcatctgaaaagtggagtagctgaagcagccaatgctggtggttataattcttgaggatgcaacagtaagaacggaaaggaaataacccccgaagcctttgcaactaaggacatgtatccttcagacaagtgtttactgggcaacttcttcgtgctgtaattgagtgtggccgattgctcacaaagatgtttgcaaaatccctcctgtcccctaactcacttctccttgcagtgtcactctgccaacttctcctgtcgattggtgaagactgtttctcctcccccttgaatatgggctgggcttgtaacttgcttgaccaatagaatgcagagaaatgaaatgcagccttcaacattcaaggctatgctcaaggagtctaaccctgtggatatgctgttgtcaaatgagggagcttcgattagcctgttgaagacacacagacgacccgacaggcaataccaacattcagatatgcaagttatgctgtcttagaccatgctgcccaggtgaacttttagacgactgcaatttgtgagtgactctaggcaagaccagaagaaacttctagctaaatctaaaccaaatgccaactcagaattgtaagcaaataaaacggttgttgtttaaagacactaacttttggggtgttttgccacacctcaatacataactgttacactaattatttttcattgtgaaatcttcagcgtcttattctgtaatcaaaccagaatgtccttgccttcttagcactttgccacagtccagtggggtgaatagacagcagctgctcatttatgctcatgctcatgttcataatttgcatttggactaaaaggagctctgttctccaggacagaactattctaaagctcttcaggaacaggaacaggagtccatcacagacagcgaaatcaaaagcgccctacatagaggcatccagactgagagctgaaagggatctgggaaatcatttagtctcactccctcattttccattcagaccacagggatgaaagaacttgctgaagttctcacngctctgtagtggcacagtcagaacaaggatcccaatctcctaactactaacataaaatgctttcagcatgcaagttgagcatacaatgggacagtttaaatttaaatggtgttttgagcaaggggagagtctaattaattacttcaaagtataattttggagtcaccagaaaggcgttaaagacaaaaaaatgctttggaacctaggtgcttcatatctgaaattggggcaggtacaggtgtattcctaccactaaagggtcattagttggttgggtagtcctttagtgttcttggtactaagcacaaaacatgggtaagatggttcaaggctggttgtggtggctcatgcctatagccccagcattttaggaggccaaggctggaggatagcttgagcccaggaattcgagacaagcctgggcaatatcgcaagaccttgtctctacaaataataatttcttaagaattggctgggcatggtggcacacacctgtaggctatttgagaggttgaggtgggaggattgctttagtgtgggaggctgaggctgcaatgaggtgatcacactatggtactacagcctgagaaacagtgtaagatcctgcctcaaaaaaaaaaagtttatgttctcaaagtgctcataatctagtggtagtacagtatttgagatattagagcagtttctcctccttttgcaactaaggacatgtatctttaaagcagaaggaatggcagagtcgtgtaataaaccctcaagtaccattacttagcttcaacaactatcgacactctactgttcttgtttcatttatgcctcacctccttcccatcccccacttgaatattctcatcctttttttttacagtttttaagataacaattacataactgaaatgcacaaatcttagctgtacagttttgacatatggatacacctgtgtaaccaatgactgtatcacaacatagagcatttcatctccccagcaagatccatgtgtcttttcctagttaatgcctctttatttctgagatggttattgctctgcttttgtttttcatgttaggctagtcttgcctgttctagaatttcatataactgagaacatacagaatgtactcactagtagtgtctgactttttcacaaaggataatgtctgtggtattcattcatgctgttgtatgcatcagtagtttattttctttttactattaagtagtgttctaaggactattttaatagcatcccacaaagggggtatgatatgttctatttacattattatttggtttgtaatattttatattttctcttgtgatttctcctttcactcatgaattattataataaattttttaaagtgtattat

SEQ ID NO: 238274 - DNA, 2955 bp, Homo sapiens
  misc_feature (1140)..(1140): n is a, c, g, or t
agaaaagaggacagagtcattttgctcagaagaaacagcatgtgcaaatgtgccacaaccattcaaagcaagttgctgcttaagtcttgcccacaacttttcatctgaaaagtggagtagctgaagcagccaatgctggtggttataattcttgaggatgcaacagtaagaacggaaaggaaataacccccgaagcctttgcaactaaggacatgtatccttcagacaagtgtttactgggcaacttcttcgtgctgtaattgagtgtggccgattgctcacaaagatgtttgcaaaatccctcctgtcccctaactcacttctccttgcagtgtcactctgccaacttctcctgtcgattggtgaagactgtttctcctcccccttgaatatgggctgggcttgtaacttgcttgaccaatagaatgcagagaaatgaaatgcagccttcaacattcaaggctatgctcaaggagtctaaccctgtggatatgctgttgtcaaatgagggagcttcgattagcctgttgaagacacacagacgacccgacaggcaataccaacattcagatatgcaagttatgctgtcttagaccatgctgcccaggtgaacttttagacgactgcaatttgtgagtgactctaggcaagaccagaagaaacttctagctaaatctaaaccaaatgccaactcagaattgtaagcaaataaaacggttgttgtttaaagacactaacttttggggtgttttgccacacctcaatacataactgttacactaattatttttcattgtgaaatcttcagcgtcttattctgtaatcaaaccagaatgtccttgccttcttagcactttgccacagtccagtggggtgaatagacagcagctgctcatttatgctcatgctcatgttcataatttgcatttggactaaaaggagctctgttctccaggacagaactattctaaagctcttcaggaacaggaacaggagtccatcacagacagcgaaatcaaaagcgccctacatagaggcatccagactgagagctgaaagggatctgggaaatcatttagtctcactccctcattttccattcagaccacagggatgaaagaacttgctgaagttctcacngctctgtagtggcacagtcagaacaaggatcccaatctcctaactactaacataaaatgctttcagcatgcaagttgagcatacaatgggacagtttaaatttaaatggtgttttgagcaaggggagagtctaattaattacttcaaagtataattttggagtcaccagaaaggcgttaaagacaaaaaaatgctttggaacctaggtgcttcatatctgaaattggggcaggtacaggtgtattcctaccactaaagggtcattagttggttgggtagtcctttagtgttcttggtactaagcacaaaacatgggtaagatggttcaaggctggttgtggtggctcatgcctatagccccagcattttaggaggccaaggctggaggatagcttgagcccaggaattcgagacaagcctgggcaatatcgcaagaccttgtctctacaaataataatttcttaagaattggctgggcatggtggcacacacctgtaggctatttgagaggttgaggtgggaggattgctttagtgtgggaggctgaggctgcaatgaggtgatcacactatggtactacagcctgagaaacagtgtaagatcctgcctcaaaaaaaaaaagtttatgttctcaaagtgctcataatctagtggtagtacagtatttgagatattagagcagtttctcctccttttgcaactaaggacatgtatctttaaagcagaaggaatggcagagtcgtgtaataaaccctcaagtaccattacttagcttcaacaactatcgacactctactgttcttgtttcatttatgcctcacctccttcccatcccccacttgaatattctcatcctttttttttacagtttttaagataacaattacataactgaaatgcacaaatcttagctgtacagttttgacatatggatacacctgtgtaaccaatgactgtatcacaacatagagcatttcatctccccagcaagatccatgtgtcttttcctagttaatgcctctttatttctgagatggttattgctctgcttttgtttttcatgttaggctagtcttgcctgttctagaatttcatataactgagaacatacagaatgtactcactagtagtgtctgactttttcacaaaggataatgtctgtggtattcattcatgctgttgtatgcatcagtagtttattttctttttactattaagtagtgttctaaggactattttaatagcatcccacaaagggggtatgatatgttctatttacattattatttggtttgtaatattttatattttctcttgtgatttctcctttcactcatgaattattataataaattttttaaagtgtattataatatatttagtgaaactgtattatttgatttactaatgtctggtgcttttgtatctggtgttgttggtttctaatttaattacatggttttcagagaatatactctgaaagattttaatcttttgaaatttatatatatactttatagcctagcatatggtatagcttggtgaatgttctatgtgttcatgaaaggaattctgaagctactgggtatagttttctacaaatgtcaattaggccaagttgcttgataatttttttcaaatattttatatctgtattgatggtttttctggatggtctttcagctactgagtgaaaaatgttaaaatctctagttttgattgtggacatgtctaatttttcctttagttttatctgtttttgttttacgtattttgaagctattattagattaataacattcataattgttatac

SEQ ID NO: 238275 - DNA, 265 bp, Homo sapiens
gataccgtacttgtctaagaactgaaaataattcacagactgatcccatgcccagtcctggccatgctttgagtggctgtattggagcagaaaagccagggtggctcacctggggtgagaatgaggggggtgaatagtaagaggggtcgtgtaggtcttcttcaggatttgcttatactctgagtgaaatgggggactattttagagaatttttttaaagtgggttagaatttacgtacaataaagttcacccatgttagtgttc

SEQ ID NO: 238276 - DNA, 1224 bp, Homo sapiens
tttcagcacttcgggaggttgaggcggaaagattgctgtgttcaagagttgaagaccatcctgacctcaggtgatctgccctcctcagcctcccaaaatgctgggattacaggtgtgagccacagcgcctggcttgaatgagccttaaatgagatccagagatatgaaaagcaggtagttagttaccatttggagagggattccggaacctagagagagatgaggctgaagaggcgggaagaaaccagatgttgtttcctttcattcatttattcatatatctggtacatatttttgaacacgtgggatatgctaagagctagagatacagtagcaagttagacacttgtgatccatgacctaagggaacttaatattttagcaaaagaggcaagcataaaacaaatacaatgtgtattttcagagcaaaattagaggacctcctttaggggacctgggaaggtcaccttgaagaggtgacattcaagaactgtgagatgagaccctatcccagagtgagccatcagtaagtactgactgaatgaatgagtccatgtgtgaatgcttgcttgaatggtcatcagccaagtagaaaggagaaaagaaagagtcgtgatttattatgcactgaggaaccagaaatgttattgaaagatgtctaaactaagagtcaatagggggacgggcatgatggctcacacctgtaatcccaacactttgggaggctgagacgggtggatcatttgaggtcaggggtttgagaccagactggccaacatgaaaccctgtctctactgaaaaatacaaagagtcaacaggcactgagtgaggtactaatagaatttatggcattaattttggctgctgtgggggctgttttattgccttacttaagatcttgagttgctagacaactgaaggatttttcattatcactgggctaacctatacgcattcagtttttacttcatcctgcaaaaagcaaaaccagccacatatggcccaagtgtctgaaggttcctccaagttgcccgtgtagttctgactccgagctcctacgcatgtgacttttctggcacagccgccagaatcaccttgaaaggttgtcacctacctgttccttaacaaagccatacagctctgttcagaaaagacagcaggcctgcctcttaggcattatggcatgttgtgaaatgccttttcatttgggtcctattattgtcc

SEQ ID NO: 238277 - DNA, 720 bp, Homo sapiens
tttcagcacttcgggaggttgaggcggaaagattgctgtgttcaagagttgaagaccatcctgacctcaggtgatctgccctcctcagcctcccaaaatgctgggattacaggtgtgagccacagcgcctggcttgaatgagccttaaatgagatccagagatatgaaaagcaggtagttagttaccatttggagagggattccggaacctagagagagatgaggctgaagaggcgggaagaaaccagatgttgtttcctttcattcatttattcatatatctggtacatatttttgaacacgtgggatatgctaagagctagagatacagtagcaagttagacacttgtgatccatgacctaagggaacttaatattttagcaaaagaggcaagcataaaacaaatacaatgtgtattttcagagcaaaattagaggacctcctttaggggacctgggaaggtcaccttgaagaggtgacattcaagaactgtgagatgagaccctatcccagagtgagccatcagtaagtactgactgaatgaatgagtccatgtgtgaatgcttgcttgaatggtcatcagccaagtagaaaggagaaaagaaagagtcgtgatttattatgcactgaggaaccagaaatgttattgaaagatgtctaaactaagagtcaatagggggacgggcatgatggctcaccgcgaattgaactgggtaccg

SEQ ID NO: 238278 - DNA, 729 bp, Homo sapiens
gaggattcattcaagttgcggtgagccatcagtaagtactgactgaatgaatgagtccatgtgtgaatgcttgcttgaatggtcatcagccaagtagaaaggagaaaagaaagagtcgtgatttattatgcactgaggaaccagaaatgttattgaaagatgtctaaactaagagtcaatagggggacgggcatgatggctcacacctgtaatcccaacactttgggaggctgagacgggtggatcatttgaggtcaggggtttgagaccagactggccaacatgaaaccctgtctctactgaaaaatacaaagagtcaacaggcactgagtgaggtactaatagaatttatggcattaattttggctgctgtgggggctgttttattgccttacttaagatcttgagttgctagacaactgaaggatttttcattatcactgggctaacctatacgcattcagtttttacttcatcctgcaaaaagcaaaaccagccacatatggcccaagtgtctgaaggttcctccaagttgcccgtgtagttctgactccgagctcctacgcatgtgacttttctggcacagccgccagaatcaccttgaaaggttgtcacctacctgttccttaacaaagccatacagctctgttcagaaaagacagcaggcctgcctcttaggcattatggcatgttgtgaaatgccttttcatttgggtcctattattgtcc

SEQ ID NO: 238279 - DNA, 431 bp, Homo sapiens
ggctggagtgcagtggcgtgatctcgggtcactgcaacctccgcctcccggttcaagcaattctcctgcctcagcctcctgaatagctgggattacaggcatgcggcaccacacccggctaattttgtatttttagtagagacagtttctccatgttggtcaggctggtcttgaactcctgacctcaggtgatctgccctcctcagcctcccaaaatgctgggattacaggtgtgagccacagcgcctggcttgaatgagccttaaatgagatccagagatatgaaaagcaggtagttagttaccatttggagagggattccggaacctagagagagatgaggctgaagaggcgggaagaaaccagatggcaaggactttgtctcatgcgcaaagcatataatttatagaaagcagagaaaaatggaagct

SEQ ID NO: 238280 - DNA, 5702 bp, Homo sapiens
tcctgggaaaggcgcatgcgctctcattgcagcctcggcgtttgtagaagaggagcatctgctccagatggaaaatgggtaaggaacaatcaaattcaattcgggaagaatatagaggtggtaataattggtaaaagtctgcagggttttttttaaccaaaggaaactggtttgagaaaattgtgaaatcagcattgaaatttgttacctactccaatcaagatttgcaaactacaaaaaaatcattctgaagctttcacctataaatatataccaagataatttcagataagaatgtccagcaaggaagtgaagactgctctaaaaagtgctagagatgcaatcagaaacaaagaatacaaagaagctttgaaacactgtaagacagtgttaaagcaagagaaaaataactataatgcctgggtttttattggcgttgctgcagctgaactagaacaacctgatcaggcccagagtgcctataaaaaagctgctgaattagagccagaccaattactagcttggcaggggttagcaaacttgtatgagaaatataatcacataaatgctaaggatgacttgcctggtgtttaccaaaagctcctggatctttatgagagtgttgacaagcagaagtggtgtgatgtctgcaagaaacttgtggatctatattaccaagaaaagaaacacctagaggtggctcgaacatggcacaagttgataaaaacacggcaggaacaaggtgcagaaaatgaagagcttcatcaactatggagaaaattgactcagttcctggctgaaagtacagaggaccagaataatgaaactcagcaattgctttttactgcttttgagaatgcactgggattatcagataagattcctagtgaagatcaccaagtactttataggcatttcattcagagtttatccaaatttcctcatgagtctgctagattgaagaaggcctgtgaaggaatgataaacatctatcctactgtacagtatccattagaagtgctttgtttgcatttaattgaatcaggaaatcttactgatgaggggcagcagtattgttgtagattagtggaaatggattcaaaaagtggtccaggcctcattggcttaggcattaaagcattacaagacaaaaagtatgaagatgctgttaggaacctaacagaagggttaaaggaaagccctgtctgcacaagtggatggtatcatctggcagaagcccaagtcaaaatgcatagacctaaagaagctgttctttcatgcagtcaagctctgaagatcgtagataatcttggtgcgtctggtaacagtctttatcagaggaatctttgtcttcatttgaaagcagaggctttgattaaactctcagattatgactcttcagaggaagcaattcgtacgcttgatcagatttctgatgcagataatatcccaggacttttggttctcaaaagcttggcctatcggaacaaaggttcatttgatgaagctgcaaagattatggaagaccttctctcttcttaccctgacctagctgaagttcatgcccttgaggctttgattcatttcaccaaaaaggactatctacaagcagaaaaatgttttcagagagctcttgagaaagataccgaagttgcagaatatcattaccaacttggattaacatactggttcatgggtgaagagacaagaaaagataaaacaaaggctcttacccactttctgaaggctgcaagactggatacatatatgggcaaagttttctgctatttaggtcattattatagagacgtagtgggagataaaaacagagctcgtggatgttataggaaagcctttgaattagatgacactgatgctgaatctggagctgcagcagttgacctaagtgtggagcttgaagatatggaaatggctttagctatcctaacaacagtaactcaaaaggcaagtgctggaacggcaaaatgggcctggcttaggcgaggactatactatttgaaagctggtcagcattctcaagcagtggctgatttacaggcagcattaagagcagacccaaaggacttcaattgttgggaatcgttaggagaagcatacttaagcagaggaggctacacaacagccttgaagtccttcacaaaagccagtgagctgaacccagaatccatatacagtgtgtttaaggttgcagcaatacagcaaatcctaggcaaatataaggaggctgtagctcaataccagatgatcattaaaaagaaagaagattatgtgcctgctttaaaaggtttgggtgaatgccatcttatgatggcaaaagcagctctagttgattatcttgatggaaaagccgtagactacatagaaaaagcactggaatattttacttgtgctctacagcatcgagctgatgtgtcctgcctctggaagctagctggggatgcttgtacctgtctgtatgctgtcgcaccatctaaagtgaatgttcatgttttaggagtccttctaggtcagaaagaaggaaaacaagtattaaagaaaaatgagctcctccaccttggaggaaggtgttatggtcgtgcattaaaactgatgtctacatctaatacatggtgtgaccttggaattaattattatcgccaagcacaacatctagcagaaacaggcagcaacatgaatgatcttaaggagttgctggagaaatctttacattgtctgaaaaaagcagtgagactcgacagtaataatcacttatactggaatgctcttggtgtggttgcatgttacagtggtattggaaattatgcccttgctcagcactgtttcatcaaatcaatccagtcagaacaaattaatgctgttgcatggaccaacttgggagtgttatacctcacaaatgaaaacattgagcaagctcatgaggctttcaaaatggctcaatcccttgatccatcttatttaatgtgctggattggacaagctcttattgctgaggcagttggaagttatgacaccatggatctcttcaggcacactacagaactaaatatgcatactgaaggagcattaggttatgcgtattgggtctgcacaacattgcaagataaaagcaacagagaaacagagctgtaccagtacaacatcctccagatgaatgctattccagcagcacaagttattttgaataaatatgtagaaagaattcagaattatgccccagctttcacaatgttgggttacttaaacgaacatctacaactgaaaaaggaagcagcaaatgcataccaaagggcaattttgttgttacagactgcagaagaccaagatacttacaatgttgcaataagaaattacggcagattgttatgttccactggtgaatatgataaagctatccaggcttttaagtcaacaccccttgaagtgttagaagacatcataggttttgcattggctttattcatgaaggggctttataaagagagcagcaaagcctatgagagagccttgtctattgttgaatcggagcaagacaaagcccatatcttgacagctctggcaataactgaatataaacaaggaaaaacggatgtagccaagacattgctatttaaatgctctatcttaaaggaaccaaccacagaaagccttcaagccctgtgtgctctagggttggcaatgcaggatgctacactgtcaaaagcagcacttaatgagttactgaagcacatcaaacacaaagacagtaattatcagaggtgccttcttacatcagcgatttatgcactccaaggccgcagtgtggctgtgcaaaaacaaatatctaaagctgttcacagcaaccctggtgaccctgctctttggtctctgttgtctcgagttgttgcacagtatgctcaacgaaatgcaaagggaggtgttgtagcaggaaatgtggctcatattctggactcaaatcatggaaagaaggcattactgtacactgcggtaaatcagttggctatgggaagcagttcagcagaagatgaaaaaaatactgcactaaagaccattcagaaggcagctctcctttctccaggtgatcctgctatctgggctgggctaatggcagcctgtcacgctgatgataaactggccttagtgaacaacactcagccaaagaggatagatttatacttggcactgttatctgctgtttctgcttcaattaaagacgaaaaattctttgaaaattacaaccagtcccttgaaaagtggtctctctcacaagctgtcactggtctaatagacacaggaagaatatctgaagctgaaactctctgcacaaagaatttaaaaagtaaccctgatcagccagccgttatcttacttttgagacaagttcagtgtaaaccactcctggagtcacaaaagccactcccagatgctgtacttgaagaactacaaaaaacagtcatgtccaactcaacctctgttccagcttggcagtggctggcacatgtgtatcaatcccaaggaatgatgagagctgcagagatgtgttacagaaagagtctacaattggcatcccaacggggcagttggagtgggaagctctcaagtctgttgagactagcactacttgcattaaaagtctgtatggctaacatttccaatgatcactggccatctttggttcaagaggctacaactgaggccttgaagctttgcttttgtccactggctgttcttttacaagctttgttacaattcaaacgcaaaatgggggcaagagagacacggcgtcttttggaaagagtggtatatcagcctgggtatcccaaatctattgcatcaactgcacgttggtacctactgagacacttatatgccaaagatgactatgagcttattgacgtgctggtaaacaatgccaaaactcatggagatacaagagcattggaactgaatcagagattgtcctcacaataacattggattattttatagtaaggaagcaaagaaaaagctgtaagaatgaagcaatgaatcaagacttctacccaaagcaacatttttttaaactatatttattccttttctaaaggaatctagagaagttgaagtttttaagttaggaatgcaattttctgttaactccaaacctgattttaatctgaaaaaaaaaaaatttaatttgggaaaaccagaatgaaaggaaaaccattattgccttggttgcttaacattatttgtaaaccattattttctgcatcttgcatggtgcacaatagaatatcttttactgtaatcccttacaataaagccttaatagccattttctatgtaatatgcaaaagtagattagcacaatgcacaattttcttttgttaaaaatcaaattcaaagatttaattcttgctatgaattctaaagttcggcaaaccaattcatcataaaatccaaataatcttgtaacctatttatctagtgattcatctccaattctgttgaaaaagcataatataaatgttgatgagactagactctaatggatatgtttatataattccaaacactcaggtgtgtgaatgcatttaaaaacattaatggaaaataatgctgataatatttaattgatcatgcaattccttcaattatgatggaaagacttgaactttctgaaataaaacaaaaatacagca

SEQ ID NO: 238281 - DNA, 5648 bp, Homo sapiens
tcctgggaaaggcgcatgcgctctcattgcagcctcggcgtttgtagaagaggagcatctgctccagatggaaaatgggtaaggaacaatcaaattcaattcgggaagaatatagaggtggtaataattggtaaaagtctgcagggttttttttaaccaaaggaaactggtttgagaaaattgtgaaatcagcattgaaatttgttacctactccaatcaagatttgcaaactacaaaaaaatcattctgaagctttcacctataaatatataccaagataatttcagataagaatgtccagcaaggaagtgaagactgctctaaaaagtgctagagatgcaatcagaaacaaagaatacaaagaagctttgaaacactgtaagacagtgttaaagcaagagaaaaataactataatgcctgggtttttattggcgttgctgcagctgaactagaacaacctgatcaggcccagagtgcctataaaaaagctgctgaattagagccagaccaattactagcttggcaggggttagcaaacttgtatgagaaatataatcacataaatgctaaggatgacttgcctggtgtttaccaaaagctcctggatctttatgagagtgttgacaagcagaagtggtgtgatgtctgcaagaaacttgtggatctatattaccaagaaaagaaacacctagaggtggctcgaacatggcacaagttgataaaaacacggcaggaacaaggtgcagaaaatgaagagcttcatcaactatggagaaaattgactcagttcctggctgaaagtacagaggaccagaataatgaaactcagcaattgctttttactgcttttgagaatgcactgggattatcagataagattcctagtgaagatcaccaagtactttataggcatttcattcagagtttatccaaatttcctcatgagtctgctagattgaagaaggcctgtgaaggaatgataaacatctatcctactgtacagtatccattagaagtgctttgtttgcatttaattgaatcaggaaatcttactgatgaggggcagcagtattgttgtagattagtggaaatggattcaaaaagtggtccaggcctcattggcttaggcattaaagcattacaagacaaaaagtatgaagatgctgttaggaacctaacagaagggttaaaggaaagccctgtctgcacaagtggatggtatcatctggcagaagcccaagtcaaaatgcatagacctaaagaagctgttctttcatgcagtcaagctctgaagatcgtagataatcttggtgcgtctggtaacagtctttatcagaggaatctttgtcttcatttgaaagcagaggctttgattaaactctcagattatgactcttcagaggaagcaattcgtacgcttgatcagatttctgatgcagataatatcccaggacttttggttctcaaaagcttggcctatcggaacaaaggttcatttgatgaagctgcaaagattatggaagaccttctctcttcttaccctgacctagctgaagttcatgcccttgaggctttgattcatttcaccaaaaaggactatctacaagcagaaaaatgttttcagagagctcttgagaaagataccgaagttgcagaatatcattaccaacttggattaacatactggttcatgggtgaagagacaagaaaagataaaacaaaggctcttacccactttctgaaggctgcaagactggatacatatatgggcaaagttttctgctatttaggtcattattatagagacgtagtgggagataaaaacagagctcgtggatgttataggaaagcctttgaattagatgacactgatgctgaatctggagctgcagcagttgacctaagtgtggagcttgaagatatggaaatggctttagctatcctaacaacagtaactcaaaaggcaagtgctggaacggcaaaatgggcctggcttaggcgaggactatactatttgaaagctggtcagcattctcaagcagtggctgatttacaggcagcattaagagcagacccaaaggacttcaattgttgggaatcgttaggagaagcatacttaagcagaggaggctacacaacagccttgaagtccttcacaaaagccagtgagctgaacccagaatccatatacagtgtgtttaaggttgcagcaatacagcaaatcctaggcaaatataaggaggctgtagctcaataccagatgatcattaaaaagaaagaagattatgtgcctgctttaaaaggtttgggtgaatgccatcttatgatggcaaaagcagctctagttgattatcttgatggaaaagccgtagactacatagaaaaagcactggaatattttacttgtgctctacagcatcgagctgatgtgtcctgcctctggaagctagctggggatgcttgtacctgtctgtatgctgtcgcaccatctaaagtgaatgttcatgttttaggagtccttctaggtcagaaagaaggaaaacaagtattaaagaaaaatgagctcctccaccttggaggaaggtgttatggtcgtgcattccaagcacaacatctagcagaaacaggcagcaacatgaatgatcttaaggagttgctggagaaatctttacattgtctgaaaaaagcagtgagactcgacagtaataatcacttatactggaatgctcttggtgtggttgcatgttacagtggtattggaaattatgcccttgctcagcactgtttcatcaaatcaatccagtcagaacaaattaatgctgttgcatggaccaacttgggagtgttatacctcacaaatgaaaacattgagcaagctcatgaggctttcaaaatggctcaatcccttgatccatcttatttaatgtgctggattggacaagctcttattgctgaggcagttggaagttatgacaccatggatctcttcaggcacactacagaactaaatatgcatactgaaggagcattaggttatgcgtattgggtctgcacaacattgcaagataaaagcaacagagaaacagagctgtaccagtacaacatcctccagatgaatgctattccagcagcacaagttattttgaataaatatgtagaaagaattcagaattatgccccagctttcacaatgttgggttacttaaacgaacatctacaactgaaaaaggaagcagcaaatgcataccaaagggcaattttgttgttacagactgcagaagaccaagatacttacaatgttgcaataagaaattacggcagattgttatgttccactggtgaatatgataaagctatccaggcttttaagtcaacaccccttgaagtgttagaagacatcataggttttgcattggctttattcatgaaggggctttataaagagagcagcaaagcctatgagagagccttgtctattgttgaatcggagcaagacaaagcccatatcttgacagctctggcaataactgaatataaacaaggaaaaacggatgtagccaagacattgctatttaaatgctctatcttaaaggaaccaaccacagaaagccttcaagccctgtgtgctctagggttggcaatgcaggatgctacactgtcaaaagcagcacttaatgagttactgaagcacatcaaacacaaagacagtaattatcagaggtgccttcttacatcagcgatttatgcactccaaggccgcagtgtggctgtgcaaaaacaaatatctaaagctgttcacagcaaccctggtgaccctgctctttggtctctgttgtctcgagttgttgcacagtatgctcaacgaaatgcaaagggaggtgttgtagcaggaaatgtggctcatattctggactcaaatcatggaaagaaggcattactgtacactgcggtaaatcagttggctatgggaagcagttcagcagaagatgaaaaaaatactgcactaaagaccattcagaaggcagctctcctttctccaggtgatcctgctatctgggctgggctaatggcagcctgtcacgctgatgataaactggccttagtgaacaacactcagccaaagaggatagatttatacttggcactgttatctgctgtttctgcttcaattaaagacgaaaaattctttgaaaattacaaccagtcccttgaaaagtggtctctctcacaagctgtcactggtctaatagacacaggaagaatatctgaagctgaaactctctgcacaaagaatttaaaaagtaaccctgatcagccagccgttatcttacttttgagacaagttcagtgtaaaccactcctggagtcacaaaagccactcccagatgctgtacttgaagaactacaaaaaacagtcatgtccaactcaacctctgttccagcttggcagtggctggcacatgtgtatcaatcccaaggaatgatgagagctgcagagatgtgttacagaaagagtctacaattggcatcccaacggggcagttggagtgggaagctctcaagtctgttgagactagcactacttgcattaaaagtctgtatggctaacatttccaatgatcactggccatctttggttcaagaggctacaactgaggccttgaagctttgcttttgtccactggctgttcttttacaagctttgttacaattcaaacgcaaaatgggggcaagagagacacggcgtcttttggaaagagtggtatatcagcctgggtatcccaaatctattgcatcaactgcacgttggtacctactgagacacttatatgccaaagatgactatgagcttattgacgtgctggtaaacaatgccaaaactcatggagatacaagagcattggaactgaatcagagattgtcctcacaataacattggattattttatagtaaggaagcaaagaaaaagctgtaagaatgaagcaatgaatcaagacttctacccaaagcaacatttttttaaactatatttattccttttctaaaggaatctagagaagttgaagtttttaagttaggaatgcaattttctgttaactccaaacctgattttaatctgaaaaaaaaaaaatttaatttgggaaaaccagaatgaaaggaaaaccattattgccttggttgcttaacattatttgtaaaccattattttctgcatcttgcatggtgcacaatagaatatcttttactgtaatcccttacaataaagccttaatagccattttctatgtaatatgcaaaagtagattagcacaatgcacaattttcttttgttaaaaatcaaattcaaagatttaattcttgctatgaattctaaagttcggcaaaccaattcatcataaaatccaaataatcttgtaacctatttatctagtgattcatctccaattctgttgaaaaagcataatataaatgttgatgagactagactctaatggatatgtttatataattccaaacactcaggtgtgtgaatgcatttaaaaacattaatggaaaataatgctgataatatttaattgatcatgcaattccttcaattatgatggaaagacttgaactttctgaaataaaacaaaaatacagca

SEQ ID NO: 238282 - DNA, 5733 bp, Homo sapiens
tcctgggaaaggcgcatgcgctctcattgcagcctcggcgtttgtagaagaggagcatctgctccagatggaaaatgggtaaggaacaatcaaattcaattcgggaagaatatagaggtggtaataattggtaaaagtctgcagggttttttttaaccaaaggaaactggtttgagaaaattgtgaaatcagcattgaaatttgttacctactccaatcaagatttgcaaactacaaaaaaatcattctgaagctttcacctataaatatataccaagataatttcagataagaatgtccagcaaggaagtgaagactgctctaaaaagtgctagagatgcaatcagaaacaaagaatacaaagaagctttgaaacactgtaagacagtgttaaagcaagagaaaaataactataatgcctgggtttttattggcgttgctgcagctgaactagaacaacctgatcaggcccagagtgcctataaaaaagctgctgaattagagccagaccaattactagcttggcaggggttagcaaacttgtatgagaaatataatcacataaatgctaaggatgacttgcctggtgtttaccaaaagctcctggatctttatgagagtgttgacaagcagaagtggtgtgatgtctgcaagaaacttgtggatctatattaccaagaaaagaaacacctagaggtggctcgaacatggcacaagttgataaaaacacggcaggaacaaggtgcagaaaatgaagagcttcatcaactatggagaaaattgactcagttcctggctgaaagtacagaggaccagaataatgaaactcagcaattgctttttactgcttttgagaatgcactgggattatcagataagattcctagtgaagatcaccaagtactttataggcatttcattcagagtttatccaaatttcctcatgagtctgctagattgaagaaggcctgtgaaggaatgataaacatctatcctactgtacagtatccattagaagtgctttgtttgcatttaattgaatcaggaaatcttactgatgaggggcagcagtattgttgtagattagtggaaatggattcaaaaagtggtccaggcctcattggcttaggcattaaagcattacaagacaaaaagtatgaagatgctgttaggaacctaacagaagggttaaaggaaagccctgtctgcacaagtggatggtatcatctggcagaagcccaagtcaaaatgcatagacctaaagaagctgttctttcatgcagtcaagctctgaagatcgtagataatcttggtgcgtctggtaacagtctttatcagaggaatctttgtcttcatttgaaagcagaggctttgattaaactctcagattatgactcttcagaggaagcaattcgtacgcttgatcagatttctgatgcagataatatcccaggacttttggttctcaaaagcttggcctatcggaacaaaggttcatttgatgaagctgcaaaggttggcttttttattcaaactgagcattttttgagttaaaagcatttttatttggctatagaattgacaggtgtctactttatagattatggaagaccttctctcttcttaccctgacctagctgaagttcatgcccttgaggctttgattcatttcaccaaaaaggactatctacaagcagaaaaatgttttcagagagctcttgagaaagataccgaagttgcagaatatcattaccaacttggattaacatactggttcatgggtgaagagacaagaaaagataaaacaaaggctcttacccactttctgaaggctgcaagactggatacatatatgggcaaagttttctgctatttaggtcattattatagagacgtagtgggagataaaaacagagctcgtggatgttataggaaagcctttgaattagatgacactgatgctgaatctggagctgcagcagttgacctaagtgtggagcttgaagatatggaaatggctttagctatcctaacaacagtaactcaaaaggcaagtgctggaacggcaaaatgggcctggcttaggcgaggactatactatttgaaagctggtcagcattctcaagcagtggctgatttacaggcagcattaagagcagacccaaaggacttcaattgttgggaatcgttaggagaagcatacttaagcagaggaggctacacaacagccttgaagtccttcacaaaagccagtgagctgaacccagaatccatatacagtgtgtttaaggttgcagcaatacagcaaatcctaggcaaatataaggaggctgtagctcaataccagatgatcattaaaaagaaagaagattatgtgcctgctttaaaaggtttgggtgaatgccatcttatgatggcaaaagcagctctagttgattatcttgatggaaaagccgtagactacatagaaaaagcactggaatattttacttgtgctctacagcatcgagctgatgtgtcctgcctctggaagctagctggggatgcttgtacctgtctgtatgctgtcgcaccatctaaagtgaatgttcatgttttaggagtccttctaggtcagaaagaaggaaaacaagtattaaagaaaaatgagctcctccaccttggaggaaggtgttatggtcgtgcattccaagcacaacatctagcagaaacaggcagcaacatgaatgatcttaaggagttgctggagaaatctttacattgtctgaaaaaagcagtgagactcgacagtaataatcacttatactggaatgctcttggtgtggttgcatgttacagtggtattggaaattatgcccttgctcagcactgtttcatcaaatcaatccagtcagaacaaattaatgctgttgcatggaccaacttgggagtgttatacctcacaaatgaaaacattgagcaagctcatgaggctttcaaaatggctcaatcccttgatccatcttatttaatgtgctggattggacaagctcttattgctgaggcagttggaagttatgacaccatggatctcttcaggcacactacagaactaaatatgcatactgaaggagcattaggttatgcgtattgggtctgcacaacattgcaagataaaagcaacagagaaacagagctgtaccagtacaacatcctccagatgaatgctattccagcagcacaagttattttgaataaatatgtagaaagaattcagaattatgccccagctttcacaatgttgggttacttaaacgaacatctacaactgaaaaaggaagcagcaaatgcataccaaagggcaattttgttgttacagactgcagaagaccaagatacttacaatgttgcaataagaaattacggcagattgttatgttccactggtgaatatgataaagctatccaggcttttaagtcaacaccccttgaagtgttagaagacatcataggttttgcattggctttattcatgaaggggctttataaagagagcagcaaagcctatgagagagccttgtctattgttgaatcggagcaagacaaagcccatatcttgacagctctggcaataactgaatataaacaaggaaaaacggatgtagccaagacattgctatttaaatgctctatcttaaaggaaccaaccacagaaagccttcaagccctgtgtgctctagggttggcaatgcaggatgctacactgtcaaaagcagcacttaatgagttactgaagcacatcaaacacaaagacagtaattatcagaggtgccttcttacatcagcgatttatgcactccaaggccgcagtgtggctgtgcaaaaacaaatatctaaagctgttcacagcaaccctggtgaccctgctctttggtctctgttgtctcgagttgttgcacagtatgctcaacgaaatgcaaagggaggtgttgtagcaggaaatgtggctcatattctggactcaaatcatggaaagaaggcattactgtacactgcggtaaatcagttggctatgggaagcagttcagcagaagatgaaaaaaatactgcactaaagaccattcagaaggcagctctcctttctccaggtgatcctgctatctgggctgggctaatggcagcctgtcacgctgatgataaactggccttagtgaacaacactcagccaaagaggatagatttatacttggcactgttatctgctgtttctgcttcaattaaagacgaaaaattctttgaaaattacaaccagtcccttgaaaagtggtctctctcacaagctgtcactggtctaatagacacaggaagaatatctgaagctgaaactctctgcacaaagaatttaaaaagtaaccctgatcagccagccgttatcttacttttgagacaagttcagtgtaaaccactcctggagtcacaaaagccactcccagatgctgtacttgaagaactacaaaaaacagtcatgtccaactcaacctctgttccagcttggcagtggctggcacatgtgtatcaatcccaaggaatgatgagagctgcagagatgtgttacagaaagagtctacaattggcatcccaacggggcagttggagtgggaagctctcaagtctgttgagactagcactacttgcattaaaagtctgtatggctaacatttccaatgatcactggccatctttggttcaagaggctacaactgaggccttgaagctttgcttttgtccactggctgttcttttacaagctttgttacaattcaaacgcaaaatgggggcaagagagacacggcgtcttttggaaagagtggtatatcagcctgggtatcccaaatctattgcatcaactgcacgttggtacctactgagacacttatatgccaaagatgactatgagcttattgacgtgctggtaaacaatgccaaaactcatggagatacaagagcattggaactgaatcagagattgtcctcacaataacattggattattttatagtaaggaagcaaagaaaaagctgtaagaatgaagcaatgaatcaagacttctacccaaagcaacatttttttaaactatatttattccttttctaaaggaatctagagaagttgaagtttttaagttaggaatgcaattttctgttaactccaaacctgattttaatctgaaaaaaaaaaaatttaatttgggaaaaccagaatgaaaggaaaaccattattgccttggttgcttaacattatttgtaaaccattattttctgcatcttgcatggtgcacaatagaatatcttttactgtaatcccttacaataaagccttaatagccattttctatgtaatatgcaaaagtagattagcacaatgcacaattttcttttgttaaaaatcaaattcaaagatttaattcttgctatgaattctaaagttcggcaaaccaattcatcataaaatccaaataatcttgtaacctatttatctagtgattcatctccaattctgttgaaaaagcataatataaatgttgatgagactagactctaatggatatgtttatataattccaaacactcaggtgtgtgaatgcatttaaaaacattaatggaaaataatgctgataatatttaattgatcatgcaattccttcaattatgatggaaagacttgaactttctgaaataaaacaaaaatacagca

SEQ ID NO: 238283 - DNA, 5611 bp, Homo sapiens
tcctgggaaaggcgcatgcgctctcattgcagcctcggcgtttgtagaagaggagcatctgctccagatggaaaatgggtaaggaacaatcaaattcaattcgggaagaatatagaggtggtaataattggtaaaagtctgcagggttttttttaaccaaaggaaactggtttgagaaaattgtgaaatcagcattgaaatttgttacctactccaatcaagatttgcaaactacaaaaaaatcattctgaagctttcacctataaatatataccaagataatttcagataagaatgtccagcaaggaagtgaagactgctctaaaaagtgctagagatgcaatcagaaacaaagaatacaaagaagctttgaaacactgtaagacagtgttaaagcaagagaaaaataactataatgcctgggtttttattggcgttgctgcagctgaactagaacaacctgatcaggcccagagtgcctataaaaaagctgctgaattagagccagaccaattactagcttggcaggggttagcaaacttgtatgagaaatataatcacataaatgctaaggatgacttgcctggtgtttaccaaaagctcctggatctttatgagagtgttgacaagcagaagtggtgtgatgtctgcaagaaacttgtggatctatattaccaagaaaagaaacacctagaggtggctcgaacatggcacaagttgataaaaacacggcaggaacaaggtgcagaaaatgaagagcttcatcaactatggagaaaattgactcagttcctggctgaaagtacagaggaccagaataatgaaactcagcaattgctttttactgcttttgagaatgcactgggattatcagataagattcctagtgaagatcaccaagtactttataggcatttcattcagagtttatccaaatttcctcatgagtctgctagattgaagaaggcctgtgaaggaatgataaacatctatcctactgtacagtatccattagaagtgctttgtttgcatttaattgaatcaggaaatcttactgatgaggggcagcagtattgttgtagattagtggaaatggattcaaaaagtggtccaggcctcattggcttaggcattaaagcattacaagacaaaaagtatgaagatgctgttaggaacctaacagaagggttaaaggaaagccctgtctgcacaagtggatggtatcatctggcagaagcccaagtcaaaatgcatagacctaaagaagctgttctttcatgcagtcaagctctgaagatcgtagataatcttggtgcgtctggtaacagtctttatcagaggaatctttgtcttcatttgaaagcagaggctttgattaaactctcagattatgactcttcagaggaagcaattcgtacgcttgatcagatttctgatgcagataatatcccaggacttttggttctcaaaagcttggcctatcggaacaaaggttcatttgatgaagctgcaaagctgaagttcatgcccttgaggctttgattcatttcaccaaaaaggactatctacaagcagaaaaatgttttcagagagctcttgagaaagataccgaagttgcagaatatcattaccaacttggattaacatactggttcatgggtgaagagacaagaaaagataaaacaaaggctcttacccactttctgaaggctgcaagactggatacatatatgggcaaagttttctgctatttaggtcattattatagagacgtagtgggagataaaaacagagctcgtggatgttataggaaagcctttgaattagatgacactgatgctgaatctggagctgcagcagttgacctaagtgtggagcttgaagatatggaaatggctttagctatcctaacaacagtaactcaaaaggcaagtgctggaacggcaaaatgggcctggcttaggcgaggactatactatttgaaagctggtcagcattctcaagcagtggctgatttacaggcagcattaagagcagacccaaaggacttcaattgttgggaatcgttaggagaagcatacttaagcagaggaggctacacaacagccttgaagtccttcacaaaagccagtgagctgaacccagaatccatatacagtgtgtttaaggttgcagcaatacagcaaatcctaggcaaatataaggaggctgtagctcaataccagatgatcattaaaaagaaagaagattatgtgcctgctttaaaaggtttgggtgaatgccatcttatgatggcaaaagcagctctagttgattatcttgatggaaaagccgtagactacatagaaaaagcactggaatattttacttgtgctctacagcatcgagctgatgtgtcctgcctctggaagctagctggggatgcttgtacctgtctgtatgctgtcgcaccatctaaagtgaatgttcatgttttaggagtccttctaggtcagaaagaaggaaaacaagtattaaagaaaaatgagctcctccaccttggaggaaggtgttatggtcgtgcattccaagcacaacatctagcagaaacaggcagcaacatgaatgatcttaaggagttgctggagaaatctttacattgtctgaaaaaagcagtgagactcgacagtaataatcacttatactggaatgctcttggtgtggttgcatgttacagtggtattggaaattatgcccttgctcagcactgtttcatcaaatcaatccagtcagaacaaattaatgctgttgcatggaccaacttgggagtgttatacctcacaaatgaaaacattgagcaagctcatgaggctttcaaaatggctcaatcccttgatccatcttatttaatgtgctggattggacaagctcttattgctgaggcagttggaagttatgacaccatggatctcttcaggcacactacagaactaaatatgcatactgaaggagcattaggttatgcgtattgggtctgcacaacattgcaagataaaagcaacagagaaacagagctgtaccagtacaacatcctccagatgaatgctattccagcagcacaagttattttgaataaatatgtagaaagaattcagaattatgccccagctttcacaatgttgggttacttaaacgaacatctacaactgaaaaaggaagcagcaaatgcataccaaagggcaattttgttgttacagactgcagaagaccaagatacttacaatgttgcaataagaaattacggcagattgttatgttccactggtgaatatgataaagctatccaggcttttaagtcaacaccccttgaagtgttagaagacatcataggttttgcattggctttattcatgaaggggctttataaagagagcagcaaagcctatgagagagccttgtctattgttgaatcggagcaagacaaagcccatatcttgacagctctggcaataactgaatataaacaaggaaaaacggatgtagccaagacattgctatttaaatgctctatcttaaaggaaccaaccacagaaagccttcaagccctgtgtgctctagggttggcaatgcaggatgctacactgtcaaaagcagcacttaatgagttactgaagcacatcaaacacaaagacagtaattatcagaggtgccttcttacatcagcgatttatgcactccaaggccgcagtgtggctgtgcaaaaacaaatatctaaagctgttcacagcaaccctggtgaccctgctctttggtctctgttgtctcgagttgttgcacagtatgctcaacgaaatgcaaagggaggtgttgtagcaggaaatgtggctcatattctggactcaaatcatggaaagaaggcattactgtacactgcggtaaatcagttggctatgggaagcagttcagcagaagatgaaaaaaatactgcactaaagaccattcagaaggcagctctcctttctccaggtgatcctgctatctgggctgggctaatggcagcctgtcacgctgatgataaactggccttagtgaacaacactcagccaaagaggatagatttatacttggcactgttatctgctgtttctgcttcaattaaagacgaaaaattctttgaaaattacaaccagtcccttgaaaagtggtctctctcacaagctgtcactggtctaatagacacaggaagaatatctgaagctgaaactctctgcacaaagaatttaaaaagtaaccctgatcagccagccgttatcttacttttgagacaagttcagtgtaaaccactcctggagtcacaaaagccactcccagatgctgtacttgaagaactacaaaaaacagtcatgtccaactcaacctctgttccagcttggcagtggctggcacatgtgtatcaatcccaaggaatgatgagagctgcagagatgtgttacagaaagagtctacaattggcatcccaacggggcagttggagtgggaagctctcaagtctgttgagactagcactacttgcattaaaagtctgtatggctaacatttccaatgatcactggccatctttggttcaagaggctacaactgaggccttgaagctttgcttttgtccactggctgttcttttacaagctttgttacaattcaaacgcaaaatgggggcaagagagacacggcgtcttttggaaagagtggtatatcagcctgggtatcccaaatctattgcatcaactgcacgttggtacctactgagacacttatatgccaaagatgactatgagcttattgacgtgctggtaaacaatgccaaaactcatggagatacaagagcattggaactgaatcagagattgtcctcacaataacattggattattttatagtaaggaagcaaagaaaaagctgtaagaatgaagcaatgaatcaagacttctacccaaagcaacatttttttaaactatatttattccttttctaaaggaatctagagaagttgaagtttttaagttaggaatgcaattttctgttaactccaaacctgattttaatctgaaaaaaaaaaaatttaatttgggaaaaccagaatgaaaggaaaaccattattgccttggttgcttaacattatttgtaaaccattattttctgcatcttgcatggtgcacaatagaatatcttttactgtaatcccttacaataaagccttaatagccattttctatgtaatatgcaaaagtagattagcacaatgcacaattttcttttgttaaaaatcaaattcaaagatttaattcttgctatgaattctaaagttcggcaaaccaattcatcataaaatccaaataatcttgtaacctatttatctagtgattcatctccaattctgttgaaaaagcataatataaatgttgatgagactagactctaatggatatgtttatataattccaaacactcaggtgtgtgaatgcatttaaaaacattaatggaaaataatgctgataatatttaattgatcatgcaattccttcaattatgatggaaagacttgaactttctgaaataaaacaaaaatacagca

SEQ ID NO: 238284 - DNA, 4772 bp, Homo sapiens
tcctgggaaaggcgcatgcgctctcattgcagcctcggcgtttgtagaagaggagcatctgctccagatggaaaatgggtaaggaacaatcaaattcaattcgggaagaatatagaggtggtaataattggtaaaagtctgcagggttttttttaaccaaaggaaactggtttgagaaaattgtgaaatcagcattgaaatttgttacctactccaatcaagatttgcaaactacaaaaaaatcattctgaagctttcacctataaatatataccaagataatttcagataagaatgtccagcaaggaagtgaagactgctctaaaaagtgctagagatgcaatcagaaacaaagaatacaaagaagctttgaaacactgtaagacagtgttaaagcaagagaaaaataactataatgcctgggtttttattggcgttgctgcagctgaactagaacaacctgatcaggcccagagtgcctataaaaaagctgctgaattagagccagaccaattactagcttggcaggggttagcaaacttgtatgagaaatataatcacataaatgctaaggatgacttgcctggtgtttaccaaaagctcctggatctttatgagagtgttgacaagcagaagtggtgtgatgtctgcaagaaacttgtggatctatattaccaagaaaagaaacacctagaggtggctcgaacatggcacaagttgataaaaacacggcaggaacaaggtgcagaaaatgaagagcttcatcaactatggagaaaattgactcagttcctggctgaaagtacagaggaccagaataatgaaactcagcaattgctttttactgcttttgagaatgcactgggattatcagataagattcctagtgaagatcaccaagtactttataggcatttcattcagagtttatccaaatttcctcatgagtctgctagattgaagaaggcctgtgaaggaatgataaacatctatcctactgtacagtatccattagaagtgctttgtttgcatttaattgaatcaggaaatgaaatggctttagctatcctaacaacagtaactcaaaaggcaagtgctggaacggcaaaatgggcctggcttaggcgaggactatactatttgaaagctggtcagcattctcaagcagtggctgatttacaggcagcattaagagcagacccaaaggacttcaattgttgggaatcgttaggagaagcatacttaagcagaggaggctacacaacagccttgaagtccttcacaaaagccagtgagctgaacccagaatccatatacagtgtgtttaaggttgcagcaatacagcaaatcctaggcaaatataaggaggctgtagctcaataccagatgatcattaaaaagaaagaagattatgtgcctgctttaaaaggtttgggtgaatgccatcttatgatggcaaaagcagctctagttgattatcttgatggaaaagccgtagactacatagaaaaagcactggaatattttacttgtgctctacagcatcgagctgatgtgtcctgcctctggaagctagctggggatgcttgtacctgtctgtatgctgtcgcaccatctaaagtgaatgttcatgttttaggagtccttctaggtcagaaagaaggaaaacaagtattaaagaaaaatgagctcctccaccttggaggaaggtgttatggtcgtgcattccaagcacaacatctagcagaaacaggcagcaacatgaatgatcttaaggagttgctggagaaatctttacattgtctgaaaaaagcagtgagactcgacagtaataatcacttatactggaatgctcttggtgtggttgcatgttacagtggtattggaaattatgcccttgctcagcactgtttcatcaaatcaatccagtcagaacaaattaatgctgttgcatggaccaacttgggagtgttatacctcacaaatgaaaacattgagcaagctcatgaggctttcaaaatggctcaatcccttgatccatcttatttaatgtgctggattggacaagctcttattgctgaggcagttggaagttatgacaccatggatctcttcaggcacactacagaactaaatatgcatactgaaggagcattaggttatgcgtattgggtctgcacaacattgcaagataaaagcaacagagaaacagagctgtaccagtacaacatcctccagatgaatgctattccagcagcacaagttattttgaataaatatgtagaaagaattcagaattatgccccagctttcacaatgttgggttacttaaacgaacatctacaactgaaaaaggaagcagcaaatgcataccaaagggcaattttgttgttacagactgcagaagaccaagatacttacaatgttgcaataagaaattacggcagattgttatgttccactggtgaatatgataaagctatccaggcttttaagtcaacaccccttgaagtgttagaagacatcataggttttgcattggctttattcatgaaggggctttataaagagagcagcaaagcctatgagagagccttgtctattgttgaatcggagcaagacaaagcccatatcttgacagctctggcaataactgaatataaacaaggaaaaacggatgtagccaagacattgctatttaaatgctctatcttaaaggaaccaaccacagaaagccttcaagccctgtgtgctctagggttggcaatgcaggatgctacactgtcaaaagcagcacttaatgagttactgaagcacatcaaacacaaagacagtaattatcagaggtgccttcttacatcagcgatttatgcactccaaggccgcagtgtggctgtgcaaaaacaaatatctaaagctgttcacagcaaccctggtgaccctgctctttggtctctgttgtctcgagttgttgcacagtatgctcaacgaaatgcaaagggaggtgttgtagcaggaaatgtggctcatattctggactcaaatcatggaaagaaggcattactgtacactgcggtaaatcagttggctatgggaagcagttcagcagaagatgaaaaaaatactgcactaaagaccattcagaaggcagctctcctttctccaggtgatcctgctatctgggctgggctaatggcagcctgtcacgctgatgataaactggccttagtgaacaacactcagccaaagaggatagatttatacttggcactgttatctgctgtttctgcttcaattaaagacgaaaaattctttgaaaattacaaccagtcccttgaaaagtggtctctctcacaagctgtcactggtctaatagacacaggaagaatatctgaagctgaaactctctgcacaaagaatttaaaaagtaaccctgatcagccagccgttatcttacttttgagacaagttcagtgtaaaccactcctggagtcacaaaagccactcccagatgctgtacttgaagaactacaaaaaacagtcatgtccaactcaacctctgttccagcttggcagtggctggcacatgtgtatcaatcccaaggaatgatgagagctgcagagatgtgttacagaaagagtctacaattggcatcccaacggggcagttggagtgggaagctctcaagtctgttgagactagcactacttgcattaaaagtctgtatggctaacatttccaatgatcactggccatctttggttcaagaggctacaactgaggccttgaagctttgcttttgtccactggctgttcttttacaagctttgttacaattcaaacgcaaaatgggggcaagagagacacggcgtcttttggaaagagtggtatatcagcctgggtatcccaaatctattgcatcaactgcacgttggtacctactgagacacttatatgccaaagatgactatgagcttattgacgtgctggtaaacaatgccaaaactcatggagatacaagagcattggaactgaatcagagattgtcctcacaataacattggattattttatagtaaggaagcaaagaaaaagctgtaagaatgaagcaatgaatcaagacttctacccaaagcaacatttttttaaactatatttattccttttctaaaggaatctagagaagttgaagtttttaagttaggaatgcaattttctgttaactccaaacctgattttaatctgaaaaaaaaaaaatttaatttgggaaaaccagaatgaaaggaaaaccattattgccttggttgcttaacattatttgtaaaccattattttctgcatcttgcatggtgcacaatagaatatcttttactgtaatcccttacaataaagccttaatagccattttctatgtaatatgcaaaagtagattagcacaatgcacaattttcttttgttaaaaatcaaattcaaagatttaattcttgctatgaattctaaagttcggcaaaccaattcatcataaaatccaaataatcttgtaacctatttatctagtgattcatctccaattctgttgaaaaagcataatataaatgttgatgagactagactctaatggatatgtttatataattccaaacactcaggtgtgtgaatgcatttaaaaacattaatggaaaataatgctgataatatttaattgatcatgcaattccttcaattatgatggaaagacttgaactttctgaaataaaacaaaaatacagca

SEQ ID NO: 238285 - DNA, 5155 bp, Homo sapiens
acagccgcggtgatagtgagtactctctgcttgtgaggaatcgtacaactctgctctcttcttacccttgactgccgggtactgcacacacacacacacacacaaaatcttattcagggaaatgcaaattaaaatccatcataccatcatactggaaaaaaacgttataaattaagcgcaggcaagaaaagaaacacctagaggtggctcgaacatggcacaagttgataaaaacacggcaggaacaaggtgcagaaaatgaagagcttcatcaactatggagaaaattgactcagttcctggctgaaagtacagaggaccagaataatgaaactcagcaattgctttttactgcttttgagaatgcactgggattatcagataagattcctagtgaagatcaccaagtactttataggcatttcattcagagtttatccaaatttcctcatgagtctgctagattgaagaaggcctgtgaaggaatgataaacatctatcctactgtacagtatccattagaagtgctttgtttgcatttaattgaatcaggaaatcttactgatgaggggcagcagtattgttgtagattagtggaaatggattcaaaaagtggtccaggcctcattggcttaggcattaaagcattacaagacaaaaagtatgaagatgctgttaggaacctaacagaagggttaaaggaaagccctgtctgcacaagtggatggtatcatctggcagaagcccaagtcaaaatgcatagacctaaagaagctgttctttcatgcagtcaagctctgaagatcgtagataatcttggtgcgtctggtaacagtctttatcagaggaatctttgtcttcatttgaaagcagaggctttgattaaactctcagattatgactcttcagaggaagcaattcgtacgcttgatcagatttctgatgcagataatatcccaggacttttggttctcaaaagcttggcctatcggaacaaaggttcatttgatgaagctgcaaagattatggaagaccttctctcttcttaccctgacctagctgaagttcatgcccttgaggctttgattcatttcaccaaaaaggactatctacaagcagaaaaatgttttcagagagctcttgagaaagataccgaagttgcagaatatcattaccaacttggattaacatactggttcatgggtgaagagacaagaaaagataaaacaaaggctcttacccactttctgaaggctgcaagactggatacatatatgggcaaagttttctgctatttaggtcattattatagagacgtagtgggagataaaaacagagctcgtggatgttataggaaagcctttgaattagatgacactgatgctgaatctggagctgcagcagttgacctaagtgtggagcttgaagatatggaaatggctttagctatcctaacaacagtaactcaaaaggcaagtgctggaacggcaaaatgggcctggcttaggcgaggactatactatttgaaagctggtcagcattctcaagcagtggctgatttacaggcagcattaagagcagacccaaaggacttcaattgttgggaatcgttaggagaagcatacttaagcagaggaggctacacaacagccttgaagtccttcacaaaagccagtgagctgaacccagaatccatatacagtgtgtttaaggttgcagcaatacagcaaatcctaggcaaatataaggaggctgtagctcaataccagatgatcattaaaaagaaagaagattatgtgcctgctttaaaaggtttgggtgaatgccatcttatgatggcaaaagcagctctagttgattatcttgatggaaaagccgtagactacatagaaaaagcactggaatattttacttgtgctctacagcatcgagctgatgtgtcctgcctctggaagctagctggggatgcttgtacctgtctgtatgctgtcgcaccatctaaagtgaatgttcatgttttaggagtccttctaggtcagaaagaaggaaaacaagtattaaagaaaaatgagctcctccaccttggaggaaggtgttatggtcgtgcattccaagcacaacatctagcagaaacaggcagcaacatgaatgatcttaaggagttgctggagaaatctttacattgtctgaaaaaagcagtgagactcgacagtaataatcacttatactggaatgctcttggtgtggttgcatgttacagtggtattggaaattatgcccttgctcagcactgtttcatcaaatcaatccagtcagaacaaattaatgctgttgcatggaccaacttgggagtgttatacctcacaaatgaaaacattgagcaagctcatgaggctttcaaaatggctcaatcccttgatccatcttatttaatgtgctggattggacaagctcttattgctgaggcagttggaagttatgacaccatggatctcttcaggcacactacagaactaaatatgcatactgaaggagcattaggttatgcgtattgggtctgcacaacattgcaagataaaagcaacagagaaacagagctgtaccagtacaacatcctccagatgaatgctattccagcagcacaagttattttgaataaatatgtagaaagaattcagaattatgccccagctttcacaatgttgggttacttaaacgaacatctacaactgaaaaaggaagcagcaaatgcataccaaagggcaattttgttgttacagactgcagaagaccaagatacttacaatgttgcaataagaaattacggcagattgttatgttccactggtgaatatgataaagctatccaggcttttaagtcaacaccccttgaagtgttagaagacatcataggttttgcattggctttattcatgaaggggctttataaagagagcagcaaagcctatgagagagccttgtctattgttgaatcggagcaagacaaagcccatatcttgacagctctggcaataactgaatataaacaaggaaaaacggatgtagccaagacattgctatttaaatgctctatcttaaaggaaccaaccacagaaagccttcaagccctgtgtgctctagggttggcaatgcaggatgctacactgtcaaaagcagcacttaatgagttactgaagcacatcaaacacaaagacagtaattatcagaggtgccttcttacatcagcgatttatgcactccaaggccgcagtgtggctgtgcaaaaacaaatatctaaagctgttcacagcaaccctggtgaccctgctctttggtctctgttgtctcgagttgttgcacagtatgctcaacgaaatgcaaagggaggtgttgtagcaggaaatgtggctcatattctggactcaaatcatggaaagaaggcattactgtacactgcggtaaatcagttggctatgggaagcagttcagcagaagatgaaaaaaatactgcactaaagaccattcagaaggcagctctcctttctccaggtgatcctgctatctgggctgggctaatggcagcctgtcacgctgatgataaactggccttagtgaacaacactcagccaaagaggatagatttatacttggcactgttatctgctgtttctgcttcaattaaagacgaaaaattctttgaaaattacaaccagtcccttgaaaagtggtctctctcacaagctgtcactggtctaatagacacaggaagaatatctgaagctgaaactctctgcacaaagaatttaaaaagtaaccctgatcagccagccgttatcttacttttgagacaagttcagtgtaaaccactcctggagtcacaaaagccactcccagatgctgtacttgaagaactacaaaaaacagtcatgtccaactcaacctctgttccagcttggcagtggctggcacatgtgtatcaatcccaaggaatgatgagagctgcagagatgtgttacagaaagagtctacaattggcatcccaacggggcagttggagtgggaagctctcaagtctgttgagactagcactacttgcattaaaagtctgtatggctaacatttccaatgatcactggccatctttggttcaagaggctacaactgaggccttgaagctttgcttttgtccactggctgttcttttacaagctttgttacaattcaaacgcaaaatgggggcaagagagacacggcgtcttttggaaagagtggtatatcagcctgggtatcccaaatctattgcatcaactgcacgttggtacctactgagacacttatatgccaaagatgactatgagcttattgacgtgctggtaaacaatgccaaaactcatggagatacaagagcattggaactgaatcagagattgtcctcacaataacattggattattttatagtaaggaagcaaagaaaaagctgtaagaatgaagcaatgaatcaagacttctacccaaagcaacatttttttaaactatatttattccttttctaaaggaatctagagaagttgaagtttttaagttaggaatgcaattttctgttaactccaaacctgattttaatctgaaaaaaaaaaaatttaatttgggaaaaccagaatgaaaggaaaaccattattgccttggttgcttaacattatttgtaaaccattattttctgcatcttgcatggtgcacaatagaatatcttttactgtaatcccttacaataaagccttaatagccattttctatgtaatatgcaaaagtagattagcacaatgcacaattttcttttgttaaaaatcaaattcaaagatttaattcttgctatgaattctaaagttcggcaaaccaattcatcataaaatccaaataatcttgtaacctatttatctagtgattcatctccaattctgttgaaaaagcataatataaatgttgatgagactagactctaatggatatgtttatataattccaaacactcaggtgtgtgaatgcatttaaaaacattaatggaaaataatgctgataatatttaattgatcatgcaattccttcaattatgatggaaagacttgaactttctgaaataaaacaaaaatacagca

SEQ ID NO: 238286 - DNA, 5890 bp, Homo sapiens
tcctgggaaaggcgcatgcgctctcattgcagcctcggcgtttgtagaagaggagcatctgctccagatggaaaatgggtaaggaacaatcaaattcaattcgggaagaatatagaggtggtaataattggtaaaagtctgcagggttttttttaaccaaaggaaactggtttgagaaaattgtgaaatcagcattgaaatttgttacctactccaatcaagatttgcaaactacaaaaaaatcattctgaagctttcacctataaatatataccaagataatttcagataagaatgtccagcaaggaagtgaagactgctctaaaaagtgctagagatgcaatcagaaacaaagaatacaaagaagctttgaaacactgtaagacagtgttaaagcaagagaaaaataactataatgcctgggtttttattggcgttgctgcagctgaactagaacaacctgatcaggcccagagtgcctataaaaaagctgctgaattagagccagaccaattactagcttggcaggggttagcaaacttgtatgagaaatataatcacataaatgctaaggatgacttgcctggtgtttaccaaaagctcctggatctttatgagagtgttgacaagcagaagtggtgtgatgtctgcaagaaacttgtggatctatattaccaagaaaagaaacacctagaggtggctcgaacatggcacaagttgataaaaacacggcaggaacaaggtgcagaaaatgaagagcttcatcaactatggagaaaattgactcagttcctggctgaaagtacagaggaccagaataatgaaactcagcaattgctttttactgcttttgagaatgcactgggattatcagataagattcctagtgaagatcaccaagtactttataggcatttcattcagagtttatccaaatttcctcatgagtctgctagattgaagaaggcctgtgaaggaatgataaacatctatcctactgtacagtatccattagaagtgctttgtttgcatttaattgaatcaggaaatcttactgatgaggggcagcagtattgttgtagattagtggaaatggattcaaaaagtggtccaggcctcattggcttaggcattaaagcattacaagacaaaaagtatgaagatgctgttaggaacctaacagaagggttaaaggaaagccctgtctgcacaagtggatggtatcatctggcagaagcccaagtcaaaatgcatagacctaaagaagctgttctttcatgcagtcaagctctgaagatcgtagataatcttggtgcgtctggtaacagtctttatcagaggaatctttgtcttcatttgaaagcagaggctttgattaaactctcagattatgactcttcagaggaagcaattcgtacgcttgatcagatttctgatgcagataatatcccaggacttttggttctcaaaagcttggcctatcggaacaaaggttcatttgatgaagctgcaaagattatggaagaccttctctcttcttaccctgacctagctgaagttcatgcccttgaggctttgattcatttcaccaaaaaggactatctacaagcagaaaaatgttttcagagagctcttgagaaagataccgaagttgcagaatatcattaccaacttggattaacatactggttcatgggtgaagagacaagaaaagataaaacaaaggctcttacccactttctgaaggctgcaagactggatacatatatgggcaaagttttctgctatttaggtcattattatagagacgtagtgggagataaaaacagagctcgtggatgttataggaaagcctttgaattagatgacactgatgctgaatctggagctgcagcagttgacctaagtgtggagcttgaagatatggaaatggctttagctatcctaacaacagtaactcaaaaggcaagtgctggaacggcaaaatgggcctggcttaggcgaggactatactatttgaaagctggtcagcattctcaagcagtggctgatttacaggcagcattaagagcagacccaaaggacttcaattgttgggaatcgttaggagaagcatacttaagcagaggaggctacacaacagccttgaagtccttcacaaaagccagtgagctgaacccagaatccatatacagtgtgtttaaggttgcagcaatacagcaaatcctaggcaaatataaggaggctgtagctcaataccagatgatcattaaaaagaaagaagattatgtgcctgctttaaaaggtttgggtgaatgccatcttatgatggcaaaagcagctctagttgattatcttgatggaaaagccgtagactacatagaaaaagcactggaatattttacttgtgctctacagcatcgagctgatgtgtcctgcctctggaagctagctggggatgcttgtacctgtctgtatgctgtcgcaccatctaaagtgaatgttcatgttttaggagtccttctaggtcagaaagaaggaaaacaagtattaaagaaaaatgagctcctccaccttggaggaaggtgttatggtcgtgcattccaagcacaacatctagcagaaacaggcagcaacatgaatgatcttaaggagttgctggagaaatctttacattgtctgaaaaaagcagtgagactcgacagtaataatcacttatactggaatgctcttggtgtggttgcatgttacagtggtattggaaattatgcccttgctcagcactgtttcatcaaatcaatccagtcagaacaaattaatgctgttgcatggaccaacttgggagtgttatacctcacaaatgaaaacattgagcaagctcatgaggctttcaaaatggctcaatcccttgatccatcttatttaatgtgctggattggacaagctcttattgctgaggcagttggaagttatgacaccatggatctcttcaggcacactacagaactaaatatgcatactgaaggagcattaggttatgcgtattgggtctgcacaacattgcaagataaaagcaacagagaaacagagctgtaccagtacaacatcctccagatgaatgctattccagcagcacaagttattttgaataaatatgtagaaagaattcagaattatgccccagctttcacaatgttgggttacttaaacgaacatctacaactgaaaaaggaagcagcaaatgcataccaaagggcaattttgttgttacagactgcagaagaccaagatacttacaatgttgcaataagaaattacggcagattgttatgttccactggtgaatatgataaagctatccaggcttttaagtcaacaccccttgaagtgttagaagacatcataggttttgcattggctttattcatgaaggggctttataaagagagcagcaaagcctatgagagagccttgtctattgttgaatcggagcaagacaaagcccatatcttgacagctctggcaataactgaatataaacaaggaaaaacggatgtagccaagacattgctatttaaatgctctatcttaaaggaaccaaccacagaaagccttcaagccctgtgtgctctagggttggcaatgcaggatgctacactgtcaaaagcagcacttaatgagttactgaagcacatcaaacacaaagacagtaattatcagaggtgccttcttacatcagcgatttatgcactccaaggccgcagtgtggctgtgcaaaaacaaatatctaaagctgttcacagcaaccctggtgaccctgctctttggtctctgttgtctcgagttgttgcacagtatgctcaacgaaatgcaaagggaggtgttgtagcaggaaatgtggctcatattctggactcaaatcatggaaagaaggcattactgtacactgcggtaaatcagttggctatgggaagcagttcagcagaagatgaaaaaaatactgcactaaagaccattcagaaggcagctctcctttctccaggtgatcctgctatctgggctgggctaatggcagcctgtcacgctgatgataaactggccttagtgaacaacactcagccaaagaggatagatttatacttggcactgttatctgctgtttctgcttcaattaaagacgaaaaattctttgaaaattacaaccagtcccttgaaaagtggtctctctcacaagctgtcactggtctaatagacacaggaagaatatctgaagctgaaactctctgcacaaagaatttaaaaagtaaccctgatcagccagccgttatcttacttttgagacaagttcagtgtaaaccactcctggagtcacaaaagccactcccagatgctgtacttgaagaactacaaaaaacagtcatgtccaactcaacctctgttccagcttggcagtggctggcacatgtgtatcaatcccaaggaatgatgagagctgcagagatgtgttacagaaagagtctacaattggcatcccaacggggcagttggagtgggaagctctcaagtctgttgagactagcactacttgcattaaaagtctgtatggctaacatttccaatgatcactggccatctttggttcaagaggctacaactgaggccttgaagctttgcttttgtccactggctgttcttttacaagctttgttacaattcaaacgcaaaatgggggcaagagagacacggcgtcttttggaaagagtggtatatcagcctgggtatcccaaatctattgcatcaactgcacgttggtacctactgagacacttatatgccaaagatgactatgagcttattgacgtgctggtaaacaatgccaaaactcatggagatacaagagcattggaactgaatcagagattgtcctcacaataacattggattattttatagtaaggaagcaaagaaaaagctgtaagaatgaagcaatgaatcaagacttctacccaaagcaacatttttttaaactatatttattccttttctaaaggaatctagagaagttgaagtttttaagttaggaatgcaattttctgttaactccaaacctgattttaatctgaaaaaaaaaaaatttaatttgggaaaaccagaatgaaaggaaaaccattattgccttggttgcttaacattatttgtaaaccattattttctgcatcttgcatggtgcacaatagaatatcttttactgtaatcccttacaataaagccttaatagccattttctatgtaatatgcaaaagtagattagcacaatgcacaattttcttttgttaaaaatcaaattcaaagatttaattcttgctatgaattctaaagttcggcaaaccaattcatcataaaatccaaataatcttgtaacctatttatctagtgattcatctccaattctgttgaaaaagcataatataaatgttgatgagactagactctaatggatatgtttatataattccaaacactcaggtgtgtgaatgcatttaaaaacattaatggaaaataatgctgataatatttaattgatcatgcaattccttcaattatgatggaaagacttgaactttctgaaataaaacaaaaatacagcaaaaaaaaaaaaaaaaaaaaaaaaaattttgtgcggcggctgggaccctgaaaaggtttttaaccattcgtggggggcgcggccaggttggtttagtgcaccttggcctaagttgtccaaaggaaccctggccagaccagggtgtggttctcccattaaaagccgcggcgaccgccgttctgaacaatcgaatggcgtcgggcatcggctatacgggccacggcgtgtcccccccgcttggag

SEQ ID NO: 238287 - DNA, 5534 bp, Homo sapiens
tcctgggaaaggcgcatgcgctctcattgcagcctcggcgtttgtagaagaggagcatctgctccagatggaaaatgggtaaggaacaatcaaattcaattcgggaagaatatagaggtggtaataattggtaaaagtctgcagggttttttttaaccaaaggaaactggtttgagaaaattgtgaaatcagcattgaaatttgttacctactccaatcaagatttgcaaactacaaaaaaatcattctgaagctttcacctataaatatataccaagataatttcagataagaatgtccagcaaggaagtgaagactgctctaaaaagtgctagagatgcaatcagaaacaaagaatacaaagaagctttgaaacactgtaagacagtgttaaagcaagagaaaaataactataatgcctgggtttttattggcgttgctgcagctgaactagaacaacctgatcaggcccagagtgcctataaaaaagctgctgaattagagccagaccaattactagcttggcaggggttagcaaacttgtatgagaaatataatcacataaatgctaaggatgacttgcctggtgtttaccaaaagctcctggatctttatgagagtgttgacaagcagaagtggtgtgatgtctgcaagaaacttgtggatctatattaccaagaaaagaaacacctagaggtggctcgaacatggcacaagttgataaaaacacggcaggaacaaggtgcagaaaatgaagagcttcatcaactatggagaaaattgactcagttcctggctgaaagtacagaggaccagaataatgaaactcagcaattgctttttactgcttttgagaatgcactgggattatcagataagattcctagtgaagatcaccaagtactttataggcatttcattcagagtttatccaaatttcctcatgagtctgctagattgaagaaggcctgtgaaggaatgataaacatctatcctactgtacagtatccattagaagtgctttgtttgcatttaattgaatcaggaaatcttactgatgaggggcagcagtattgttgtagattagtggaaatggattcaaaaagtggtccaggcctcattggcttaggcattaaagcattacaagacaaaaagtatgaagatgctgttaggaacctaacagaagggttaaaggaaagccctgtctgcacaagtggatggtatcatctggcagaagcccaagtcaaaatgcatagacctaaagaagctgttctttcatgcagtcaagctctgaagatcgtagataatcttggtgcgtctggtaacagtctttatcagaggaatctttgtcttcatttgaaagcagaggctttgattaaactctcagattatgactcttcagaggaagcaattcgtacgcttgatcagatttctgatgcagataatatcccaggacttttggttctcaaaagcttggcctatcggaacaaaggttcatttgatgaagctgcaaagattatggaagaccttctctcttcttaccctgacctagctgaagttcatgcccttgaggctttgattcatttcaccaaaaaggactatctacaagcagaaaaatgttttcagagagctcttgagaaagataccgaagttgcagaatatcattaccaacttggattaacatactggttcatgggtgaagagacaagaaaagataaaacaaaggctcttacccactttctgaaggctgcaagactggatacatatatgggcaaagttttctgctatttaggtcattattatagagacgtagtgggagataaaaacagagctcgtggatgttataggaaagcctttgaattagatgacactgatgctgaatctggagctgcagcagttgacctaagtgtggagcttgaagatatggaaatggctttagctatcctaacaacagtaactcaaaaggcaagtgctggaacggcaaaatgggcctggcttaggcgaggactatactatttgaaagctggtcagcattctcaagcagtggctgatttacaggcagcattaagagcagacccaaaggacttcaattgttgggaatcgttaggagaagcatacttaagcagaggaggctacacaacagccttgaagtccttcacaaaagccagtgagctgaacccagaatccatatacagtgtgtttaaggttgcagcaatacagcaaatcctaggcaaatataaggaggctgtagctcaataccagatgatcattaaaaagaaagaagattatgtgcctgctttaaaaggtttgggtgaatgccatcttatgatggcaaaagcagctctagttgattatcttgatggaaaagccgtagactacatagaaaaagcactggaatattttacttgtgctctacagcatcgagctgatgtgtcctgcctctggaagctagctggggatgcttgtacctgtctgtatgctgtcgcaccatctaaagtgaatgttcatgttttaggagtccttctaggtcagaaagaaggaaaacaagtattaaagaaaaatgagctcctccaccttggaggaaggtgttatggtcgtgcattccaagcacaacatctagcagaaacaggcagcaacatgaatgatcttaaggagttgctggagaaatctttacattgtctgaaaaaagcagtgagactcgacagtaataatcacttatactggaatgctcttggtgtggttgcatgttacagtggtattggaaattatgcccttgctcagcactgtttcatcaaatcaatccagtcagaacaaattaatgctgttgcatggaccaacttgggagtgttatacctcacaaatgaaaacattgagcaagctcatgaggctttcaaaatggctcaatcccttgatccatcttatttaatgtgctggattggacaagctcttattgctgaggcagttggaagttatgacaccatggatctcttcaggcacactacagaactaaatatgcatactgaaggagcattaggttatgcgtattgggtctgcacaacattgcaagataaaagcaacagagaaacagagctgtaccagtacaacatcctccagatgaatgctattccagcagcacaagttattttgaataaatatgtagaaagaattcagaattatgccccagctttcacaatgttgggttacttaaacgaacatctacaactgaaaaaggaagcagcaaatgcataccaaagggcaattttgttgttacagactgcagaagaccaagatacttacaatgttgcaataagaaattacggcagattgttatgttccactggtgaatatgataaagctatccaggcttttaagtcaacaccccttgaagtgttagaagacatcataggttttgcattggctttattcatgaaggggctttataaagagagcagcaaagcctatgagagagccttgtctattgttgaatcggagcaagacaaagcccatatcttgacagctctggcaataactgaatataaacaaggaaaaacggatgtagccaagacattgctatttaaatgctctatcttaaaggaaccaaccacagaaagccttcaagccctgtgtgctctagggttggcaatgcaggatgctacactgtcaaaagcagcacttaatgagttactgaagcacatcaaacacaaagacagtaattatcagaggtgccttcttacatcagcgatttatgcactccaaggccgcagtgtggctgtgcaaaaacaaatatctaaagctgttcacagcaaccctggtgaccctgctctttggtctctgttgtctcgagttgttgcacagtatgctcaacgaaatgcaaagggaggtgttgtagcaggaaatgtggctcatattctggactcaaatcatggaaagaaggcattactgtacactgcggtaaatcagttggctatgggaagcagttcagcagaagatgaaaaaaatactgcactaaagaccattcagaaggcagctctcctttctccaggtgatcctgctatctgggctgggctaatggcagcctgtcacgctgatgataaactggccttagtgaacaacactcagccaaagaggatagatttatacttggcactgttatctgctgtttctgcttcaattaaagacgaaaaattctttgaaaattacaaccagtcccttgaaaagtggtctctctcacaagctgtcactggtctaatagacacaggaagaatatctgaagctgaaactctctgcacaaagaatttaaaaagtaaccctgatcagccagccgttatcttacttttgagacaagttcagtgtaaaccactcctggagtcacaaaagccactcccagatgctgtacttgaagatctacaattggcatcccaacggggcagttggagtgggaagctctcaagtctgttgagactagcactacttgcattaaaagtctgtatggctaacatttccaatgatcactggccatctttggttcaagaggctacaactgaggccttgaagctttgcttttgtccactggctgttcttttacaagctttgttacaattcaaacgcaaaatgggggcaagagagacacggcgtcttttggaaagagtggtatatcagcctgggtatcccaaatctattgcatcaactgcacgttggtacctactgagacacttatatgccaaagatgactatgagcttattgacgtgctggtaaacaatgccaaaactcatggagatacaagagcattggaactgaatcagagattgtcctcacaataacattggattattttatagtaaggaagcaaagaaaaagctgtaagaatgaagcaatgaatcaagacttctacccaaagcaacatttttttaaactatatttattccttttctaaaggaatctagagaagttgaagtttttaagttaggaatgcaattttctgttaactccaaacctgattttaatctgaaaaaaaaaaaatttaatttgggaaaaccagaatgaaaggaaaaccattattgccttggttgcttaacattatttgtaaaccattattttctgcatcttgcatggtgcacaatagaatatcttttactgtaatcccttacaataaagccttaatagccattttctatgtaatatgcaaaagtagattagcacaatgcacaattttcttttgttaaaaatcaaattcaaagatttaattcttgctatgaattctaaagttcggcaaaccaattcatcataaaatccaaataatcttgtaacctatttatctagtgattcatctccaattctgttgaaaaagcataatataaatgttgatgagactagactctaatggatatgtttatataattccaaacactcaggtgtgtgaatgcatttaaaaacattaatggaaaataatgctgataatatttaattgatcatgcaattccttcaattatgatggaaagacttgaactttctgaaataaaacaaaaatacagca

SEQ ID NO: 238288 - DNA, 2183 bp, Homo sapiens
ctggagtggcatataactccaaaccacaagagaaaagaacaagagaagaaaaatgaccaacaaaaacaattcgaaaacaataaaacggatgtagccaagacattgctatttaaatgctctatcttaaaggaaccaaccacagaaagccttcaagccctgtgtgctctagggttggcaatgcaggatgctacactgtcaaaagcagcacttaatgagttactgaagcacatcaaacacaaagacagtaattatcagaggtgccttcttacatcagcgatttatgcactccaaggccgcagtgtggctgtgcaaaaacaaatatctaaagctgttcacagcaaccctggtgaccctgctctttggtctctgttgtctcgagttgttgcacagtatgctcaacgaaatgcaaagggaggtgttgtagcaggaaatgtggctcatattctggactcaaatcatggaaagaaggcattactgtacactgcggtaaatcagttggctatgggaagcagttcagcagaagatgaaaaaaatactgcactaaagaccattcagaaggcagctctcctttctccaggtgatcctgctatctgggctgggctaatggcagcctgtcacgctgatgataaactggccttagtgaacaacactcagccaaagaggatagatttatacttggcactgttatctgctgtttctgcttcaattaaagacgaaaaattctttgaaaattacaaccagtcccttgaaaagtggtctctctcacaagctgtcactggtctaatagacacaggaagaatatctgaagctgaaactctctgcacaaagaatttaaaaagtaaccctgatcagccagccgttatcttacttttgagacaagttcagtgtaaaccactcctggagtcacaaaagccactcccagatgctgtacttgaagaactacaaaaaacagtcatgtccaactcaacctctgttccagcttggcagtggctggcacatgtgtatcaatcccaaggaatgatgagagctgcagagatgtgttacagaaagagtctacaattggcatcccaacggggcagttggagtgggaagctctcaagtctgttgagactagcactacttgcattaaaagtctgtatggctaacatttccaatgatcactggccatctttggttcaagaggctacaactgaggccttgaagctttgcttttgtccactggctgttcttttacaagctttgttacaattcaaacgcaaaatgggggcaagagagacacggcgtcttttggaaagagtggtatatcagcctgggtatcccaaatctattgcatcaactgcacgttggtacctactgagacacttatatgccaaagatgactatgagcttattgacgtgctggtaaacaatgccaaaactcatggagatacaagagcattggaactgaatcagagattgtcctcacaataacattggattattttatagtaaggaagcaaagaaaaagctgtaagaatgaagcaatgaatcaagacttctacccaaagcaacatttttttaaactatatttattccttttctaaaggaatctagagaagttgaagtttttaagttaggaatgcaattttctgttaactccaaacctgattttaatctgaaaaaaaaaaaatttaatttgggaaaaccagaatgaaaggaaaaccattattgccttggttgcttaacattatttgtaaaccattattttctgcatcttgcatggtgcacaatagaatatcttttactgtaatcccttacaataaagccttaatagccattttctatgtaatatgcaaaagtagattagcacaatgcacaattttcttttgttaaaaatcaaattcaaagatttaattcttgctatgaattctaaagttcggcaaaccaattcatcataaaatccaaataatcttgtaacctatttatctagtgattcatctccaattctgttgaaaaagcataatataaatgttgatgagactagactctaatggatatgtttatataattccaaacactcaggtgtgtgaatgcatttaaaaacattaatggaaaataatgctgataatatttaattgatcatgcaattccttcaattatgatggaaagacttgaactttctgaaataaaacaaaaatacagca

SEQ ID NO: 238289 - DNA, 1984 bp, Homo sapiens
ggtcacagtagaaaagatttcctttcacaagattattagtcttttcaaacaacaataataaattgatacttttaagaagtttaggagttgtgaatgtggtaaaactgaacctttccagtgatttagtggaaaggtcttatcaatcttaattttttctttttcatgaaagtttctgcatttgtataaatcatcaatattttctgttctagggaggaggtgttgtagcaggaaatgtggctcatattctggactcaaatcatggaaagaaggcattactgtacactgcggtaaatcagttggctatgggaagcagttcagcagaagatgaaaaaaatactgcactaaagaccattcagaaggcagctctcctttctccaggtgatcctgctatctgggctgggctaatggcagcctgtcacgctgatgataaactggccttagtgaacaacactcagccaaagaggatagatttatacttggcactgttatctgctgtttctgcttcaattaaagacgaaaaattctttgaaaattacaaccagtcccttgaaaagtggtctctctcacaagctgtcactggtctaatagacacaggaagaatatctgaagctgaaactctctgcacaaagaatttaaaaagtaaccctgatcagccagccgttatcttacttttgagacaagttcagtgtaaaccactcctggagtcacaaaagccactcccagatgctgtacttgaagaactacaaaaaacagtcatgtccaactcaacctctgttccagcttggcagtggctggcacatgtgtatcaatcccaaggaatgatgagagctgcagagatgtgttacagaaagagtctacaattggcatcccaacggggcagttggagtgggaagctctcaagtctgttgagactagcactacttgcattaaaagtctgtatggctaacatttccaatgatcactggccatctttggttcaagaggctacaactgaggccttgaagctttgcttttgtccactggctgttcttttacaagctttgttacaattcaaacgcaaaatgggggcaagagagacacggcgtcttttggaaagagtggtatatcagcctgggtatcccaaatctattgcatcaactgcacgttggtacctactgagacacttatatgccaaagatgactatgagcttattgacgtgctggtaaacaatgccaaaactcatggagatacaagagcattggaactgaatcagagattgtcctcacaataacattggattattttatagtaaggaagcaaagaaaaagctgtaagaatgaagcaatgaatcaagacttctacccaaagcaacatttttttaaactatatttattccttttctaaaggaatctagagaagttgaagtttttaagttaggaatgcaattttctgttaactccaaacctgattttaatctgaaaaaaaaaaaatttaatttgggaaaaccagaatgaaaggaaaaccattattgccttggttgcttaacattatttgtaaaccattattttctgcatcttgcatggtgcacaatagaatatcttttactgtaatcccttacaataaagccttaatagccattttctatgtaatatgcaaaagtagattagcacaatgcacaattttcttttgttaaaaatcaaattcaaagatttaattcttgctatgaattctaaagttcggcaaaccaattcatcataaaatccaaataatcttgtaacctatttatctagtgattcatctccaattctgttgaaaaagcataatataaatgttgatgagactagactctaatggatatgtttatataattccaaacactcaggtgtgtgaatgcatttaaaaacattaatggaaaataatgctgataatatttaattgatcatgcaattccttcaattatgatggaaagacttgaactttctgaaataaaacaaaaatacagca

SEQ ID NO: 238290 - DNA, 1076 bp, Homo sapiens
ctttgagttaatatttgtcttatatttttataggctaacatttccaatgatcactggccatctttggttcaagaggctacaactgaggccttgaagctttgcttttgtccactggctgttcttttacaagctttgttacaattcaaacgcaaaatgggggcaagagagacacggcgtcttttggaaagagtggtatatcagcctgggtatcccaaatctattgcatcaactgcacgttggtacctactgagacacttatatgccaaagatgactatgagcttattgacgtgctggtaaacaatgccaaaactcatggagatacaagagcattggaactgaatcagagattgtcctcacaataacattggattattttatagtaaggaagcaaagaaaaagctgtaagaatgaagcaatgaatcaagacttctacccaaagcaacatttttttaaactatatttattccttttctaaaggaatctagagaagttgaagtttttaagttaggaatgcaattttctgttaactccaaacctgattttaatctgaaaaaaaaaaaatttaatttgggaaaaccagaatgaaaggaaaaccattattgccttggttgcttaacattatttgtaaaccattattttctgcatcttgcatggtgcacaatagaatatcttttactgtaatcccttacaataaagccttaatagccattttctatgtaatatgcaaaagtagattagcacaatgcacaattttcttttgttaaaaatcaaattcaaagatttaattcttgctatgaattctaaagttcggcaaaccaattcatcataaaatccaaataatcttgtaacctatttatctagtgattcatctccaattctgttgaaaaagcataatataaatgttgatgagactagactctaatggatatgtttatataattccaaacactcaggtgtgtgaatgcatttaaaaacattaatggaaaataatgctgataatatttaattgatcatgcaattccttcaattatgatggaaagacttgaactttctgaaataaaacaaaaatacagca

SEQ ID NO: 238291 - DNA, 1067 bp, Homo sapiens
cctactactactaaattcgcggccgctaacatttccaatgatcactggccatctttggttcaagaggctacaactgaggccttgaagctttgcttttgtccactggctgttcttttacaagctttgttacaattcaaacgcaaaatgggggcaagagagacacggcgtcttttggaaagagtggtatatcagcctgggtatcccaaatctattgcatcaactgcacgttggtacctactgagacacttatatgccaaagatgactatgagcttattgacgtgctggtaaacaatgccaaaactcatggagatacaagagcattggaactgaatcagagattgtcctcacaataacattggattattttatagtaaggaagcaaagaaaaagctgtaagaatgaagcaatgaatcaagacttctacccaaagcaacatttttttaaactatatttattccttttctaaaggaatctagagaagttgaagtttttaagttaggaatgcaattttctgttaactccaaacctgattttaatctgaaaaaaaaaaaatttaatttgggaaaaccagaatgaaaggaaaaccattattgccttggttgcttaacattatttgtaaaccattattttctgcatcttgcatggtgcacaatagaatatcttttactgtaatcccttacaataaagccttaatagccattttctatgtaatatgcaaaagtagattagcacaatgcacaattttcttttgttaaaaatcaaattcaaagatttaattcttgctatgaattctaaagttcggcaaaccaattcatcataaaatccaaataatcttgtaacctatttatctagtgattcatctccaattctgttgaaaaagcataatataaatgttgatgagactagactctaatggatatgtttatataattccaaacactcaggtgtgtgaatgcatttaaaaacattaatggaaaataatgctgataatatttaattgatcatgcaattccttcaattatgatggaaagacttgaactttctgaaataaaacaaaaatacagca

SEQ ID NO: 238292 - DNA, 4247 bp, Homo sapiens
tcctgggaaaggcgcatgcgctctcattgcagcctcggcgtttgtagaagaggagcatctgctccagatggaaaatgggtaaggaacaatcaaattcaattcgggaagaatatagaggtggtaataattggtaaaagtctgcagggttttttttaaccaaaggaaactggtttgagaaaattgtgaaatcagcattgaaatttgttacctactccaatcaagatttgcaaactacaaaaaaatcattctgaagctttcacctataaatatataccaagataatttcagataagaatgtccagcaaggaagtgaagactgctctaaaaagtgctagagatgcaatcagaaacaaagaatacaaagaagctttgaaacactgtaagacagtgttaaagcaagagaaaaataactataatgcctgggtttttattggcgttgctgcagctgaactagaacaacctgatcaggcccagagtgcctataaaaaagctgctgaattagagccagaccaattactagcttggcaggggttagcaaacttgtatgagaaatataatcacataaatgctaaggatgacttgcctggtgtttaccaaaagctcctggatctttatgagagtgttgacaagcagaagtggtgtgatgtctgcaagaaacttgtggatctatattaccaagaaaagaaacacctagaggtggctcgaacatggcacaagttgataaaaacacggcaggaacaaggtgcagaaaatgaagagcttcatcaactatggagaaaattgactcagttcctggctgaaagtacagaggaccagaataatgaaactcagcaattgctttttactgcttttgagaatgcactgggattatcagataagattcctagtgaagatcaccaagtactttataggcatttcattcagagtttatccaaatttcctcatgagtctgctagattgaagaaggcctgtgaaggaatgataaacatctatcctactgtacagtatccattagaagtgctttgtttgcatttaattgaatcaggaaatcttactgatgaggggcagcagtattgttgtagattagtggaaatggattcaaaaagtggtccaggcctcattggcttaggcattaaagcattacaagacaaaaagtatgaagatgctgttaggaacctaacagaagggttaaaggaaagccctgtctgcacaagtggatggtatcatctggcagaagcccaagtcaaaatgcatagacctaaagaagctgttctttcatgcagtcaagctctgaagatcgtagataatcttggtgcgtctggtaacagtctttatcagaggaatctttgtcttcatttgaaagcagaggctttgattaaactctcagattatgactcttcagaggaagcaattcgtacgcttgatcagatttctgatgcagataatatcccaggacttttggttctcaaaagcttggcctatcggaacaaaggttcatttgatgaagctgcaaagattatggaagaccttctctcttcttaccctgacctagctgaagttcatgcccttgaggctttgattcatttcaccaaaaaggactatctacaagcagaaaaatgttttcagagagctcttgagaaagataccgaagttgcagaatatcattaccaacttggattaacatactggttcatgggtgaagagacaagaaaagataaaacaaaggctcttacccactttctgaaggctgcaagactggatacatatatgggcaaagttttctgctatttaggtcattattatagagacgtagtgggagataaaaacagagctcgtggatgttataggaaagcctttgaattagatgacactgatgctgaatctggagctgcagcagttgacctaagtgtggagcttgaagatatggaaatggctttagctatcctaacaacagtaactcaaaaggcaagtgctggaacggcaaaatgggcctggcttaggcgaggactatactatttgaaagctggtcagcattctcaagcagtggctgatttacaggcagcattaagagcagacccaaaggacttcaattgttgggaatcgttaggagaagcatacttaagcagaggaggctacacaacagccttgaagtccttcacaaaagccagtgagctgaacccagaatccatatacagtgtgtttaaggttgcagcaatacagcaaatcctaggcaaatataaggaggctgtagctcaataccagatgatcattaaaaagaaagaagattatgtgcctgctttaaaaggtttgggtgaatgccatcttatgatggcaaaagcagctctagttgattatcttgatggaaaagccgtagactacatagaaaaagcactggaatattttacttgtgctctacagcatcgagctgatgtgtcctgcctctggaagctagctggggatgcttgtacctgtctgtatgctgtcgcaccatctaaagtgaatgttcatgttttaggagtccttctaggtcagaaagaaggaaaacaagtattaaagaaaaatgagctcctccaccttggaggaaggtgttatggtcgtgcattccaagcacaacatctagcagaaacaggcagcaacatgaatgatcttaaggagttgctggagaaatctttacattgtctgaaaaaagcagtgagactcgacagtaataatcacttatactggaatgctcttggtgtggttgcatgttacagtggtattggaaattatgcccttgctcagcactgtttcatcaaatcaatccagtcagaacaaattaatgctgttgcatggaccaacttgggagtgttatacctcacaaatgaaaacattgagcaagctcatgaggctttcaaaatggctcaatcccttgatccatcttatttaatgtgctggattggacaagctcttattgctgaggcagttggaagttatgacaccatggatctcttcaggcacactacagaactaaatatgcatactgaaggagcattaggttatgcgtattgggtctgcacaacattgcaagataaaagcaacagagaaacagagctgtaccagtacaacatcctccagatgaatgctattccagcagcacaagttattttgaataaatatgtagaaagaattcagaattatgccccagctttcacaatgttgggttacttaaacgaacatctacaactgaaaaaggaagcagcaaatgcataccaaagggcaattttgttgttacagactgcagaagaccaagatacttacaatgttgcaataagaaattacggcagattgttatgttccactggtgaatatgataaagctatccaggcttttaagtcaacaccccttgaagtgttagaagacatcataggttttgcattggctttattcatgaaggggctttataaagagagcagcaaagcctatgagagagccttgtctattgttgaatcggagcaagacaaagcccatatcttgacagctctggcaataactgaatataaacaaggaaaaacggatgtagccaagacattgctatttaaatgctctatcttaaaggaaccaaccacagaaagccttcaagccctgtgtgctctagggttggcaatgcaggatgctacactgtcaaaagcagcacttaatgagttactgaagcacatcaaacacaaagacagtaattatcagaggtgccttcttacatcagcgatttatgcactccaaggccgcagtgtggctgtgcaaaaacaaatatctaaagctgttcacagcaaccctggtgaccctgctctttggtctctgttgtctcgagttgttgcacagtatgctcaacgaaatgcaaagggaggtgttgtagcaggaaatgtggctcatattctggactcaaatcatggaaagaaggcattactgtacactgcggtaaatcagttggctatgggaagcagttcagcagaagatgaaaaaaatactgcactaaagaccattcagaaggcagctctcctttctccaggtgatcctgctatctgggctgggctaatggcagcctgtcacgctgatgataaactggcctgaatgttcataaagttgattctttgtacaacaagaaaccccaaaaaaagggggggggaaaataccccgggggcccaattagcggaccccgcttctggaaaagggcccaaaggggcgcataaagaaggacgggcggaaacagggag

SEQ ID NO: 238293 - DNA, 1056 bp, Homo sapiens
  misc_feature (1)..(1): n is a, c, g, or t
  misc_feature (14)..(14): n is a, c, g, or t
  misc_feature (25)..(25): n is a, c, g, or t
  misc_feature (37)..(37): n is a, c, g, or t
  misc_feature (53)..(53): n is a, c, g, or t
ntttgtttgtaganaaacgatgccnctgggggggggnacagataactttcagnaggctacaactgaggccttgaagctttgcttttgtccactggctgttcttttacaagctttgttacaattcaaacgcaaaatgggggcaagagagacacggcgtcttttggaaagagtggtatatcagcctgggtatcccaaatctattgcatcaactgcacgttggtacctactgagacacttatatgccaaagatgactatgagcttattgacgtgctggtaaacaatgccaaaactcatggagatacaagagcattggaactgaatcagagattgtcctcacaataacattggattattttatagtaaggaagcaaagaaaaagctgtaagaatgaagcaatgaatcaagacttctacccaaagcaacatttttttaaactatatttattccttttctaaaggaatctagagaagttgaagtttttaagttaggaatgcaattttctgttaactccaaacctgattttaatctgaaaaaaaaaaaatttaatttgggaaaaccagaatgaaaggaaaaccattattgccttggttgcttaacattatttgtaaaccattattttctgcatcttgcatggtgcacaatagaatatcttttactgtaatcccttacaataaagccttaatagccattttctatgtaatatgcaaaagtagattagcacaatgcacaattttcttttgttaaaaatcaaattcaaagatttaattcttgctatgaattctaaagttcggcaaaccaattcatcataaaatccaaataatcttgtaacctatttatctagtgattcatctccaattctgttgaaaaagcataatataaatgttgatgagactagactctaatggatatgtttatataattccaaacactcaggtgtgtgaatgcatttaaaaacattaatggaaaataatgctgataatatttaattgatcatgcaattccttcaattatgatggaaagacttgaactttctgaaataaaacaaaaatacagca

SEQ ID NO: 238294 - DNA, 3207 bp, Homo sapiens
tcctgggaaaggcgcatgcgctctcattgcagcctcggcgtttgtagaagaggagcatctgctccagatggaaaatgggtaaggaacaatcaaattcaattcgggaagaatatagaggtggtaataattggtaaaagtctgcagggttttttttaaccaaaggaaactggtttgagaaaattgtgaaatcagcattgaaatttgttacctactccaatcaagatttgcaaactacaaaaaaatcattctgaagctttcacctataaatatataccaagataatttcagataagaatgtccagcaaggaagtgaagactgctctaaaaagtgctagagatgcaatcagaaacaaagaatacaaagaagctttgaaacactgtaagacagtgttaaagcaagagaaaaataactataatgcctgggtttttattggcgttgctgcagctgaactagaacaacctgatcaggcccagagtgcctataaaaaagctgctgaattagagccagaccaattactagcttggcaggggttagcaaacttgtatgagaaatataatcacataaatgctaaggatgacttgcctggtgtttaccaaaagctcctggatctttatgagagtgttgacaagcagaagtggtgtgatgtctgcaagaaacttgtggatctatattaccaagaaaagaaacacctagaggtggctcgaacatggcacaagttgataaaaacacggcaggaacaaggtgcagaaaatgaagagcttcatcaactatggagaaaattgactcagttcctggctgaaagtacagaggaccagaataatgaaactcagcaattgctttttactgcttttgagaatgcactgggattatcagataagattcctagtgaagatcaccaagtactttataggcatttcattcagagtttatccaaatttcctcatgagtctgctagattgaagaaggcctgtgaaggaatgataaacatctatcctactgtacagtatccattagaagtgctttgtttgcatttaattgaatcaggaaatcttactgatgaggggcagcagtattgttgtagattagtggaaatggattcaaaaagtggtccaggcctcattggcttaggcattaaagcattacaagacaaaaagtatgaagatgctgttaggaacctaacagaagggttaaaggaaagccctgtctgcacaagtggatggtatcatctggcagaagcccaagtcaaaatgcatagacctaaagaagctgttctttcatgcagtcaagctctgaagatcgtagataatcttggtgcgtctggtaacagtctttatcagaggaatctttgtcttcatttgaaagcagaggctttgattaaactctcagattatgactcttcagaggaagcaattcgtacgcttgatcagatttctgatgcagataatatcccaggacttttggttctcaaaagcttggcctatcggaacaaaggttcatttgatgaagctgcaaagattatggaagaccttctctcttcttaccctgacctagctgaagttcatgcccttgaggctttgattcatttcaccaaaaaggactatctacaagcagaaaaatgttttcagagagctcttgagaaagataccgaagttgcagaatatcattaccaacttggattaacatactggttcatgggtgaagagacaagaaaagataaaacaaaggctcttacccactttctgaaggctgcaagactggatacatatatgggcaaagttttctgctatttaggtcattattatagagacgtagtgggagataaaaacagagctcgtggatgttataggaaagcctttgaattagatgacactgatgctgaatctggagctgcagcagttgacctaagtgtggagcttgaagatatggaaatggctttagctatcctaacaacagtaactcaaaaggcaagtgctggaacggcaaaatgggcctggcttaggcgaggactatactatttgaaagctggtcagcattctcaagcagtggctgatttacaggcagcattaagagcagacccaaaggacttcaattgttgggaatcgttaggagaagcatacttaagcagaggaggctacacaacagccttgaagtccttcacaaaagccagtgagctgaacccagaatccatatacagtgtgtttaaggttgcagcaatacagcaaatcctaggcaaatataaggaggctgtagctcaataccagatgatcattaaaaagaaagaagattatgtgcctgctttaaaaggtttgggtgaatgccatcttatgatggcaaaagcagctctagttgattatcttgatggaaaagccgtagactacatagaaaaagcactggaatattttacttgtgctctacagcatcgagctgatgtgtcctgcctctggaagctagctggggatgcttgtacctgtctgtatgctgtcgcaccatctaaagtgaatgttcatgttttaggagtccttctaggtcagaaagaaggaaaacaagtattaaagaaaaatgagctcctccaccttggaggaaggtgttatggtcgtgcattccaagcacaacatctagcagaaacaggcagcaacatgaatgatcttaaggagttgctggagaaatctttacattgtctgaaaaaagcagtgagactcgacagtaataatcacttatactggaatgctcttggtgtggttgcatgttacagtggtattggaaattatgcccttgctcagcactgtttcatcaaatcaatccagtcagaacaaattaatgctgttgcatggaccaacttgggagtgttatacctcacaaatgaaaacattgagcaagctcatgaggctttcaaaatggctcaatcccttgatccatcttatttaatgtgctggattggacaagctcttattgctgaggcagttggaagttatgacaccatggatctcttcaggcacactacagaactaaatatgcatgtaagaatctgaacattcttcttgaggattcattaatgagaaaagtgttatccttgttaagggaatgaatagatattgggctaggcatagtggcttatgcctgtaatcccagtgatttgggatgccaaggcaggaggattgcttgaggccagcctggacaatatagcaagaccctgtctcttaaaaaaa

SEQ ID NO: 238295 - DNA, 1932 bp, Homo sapiens
tcctgggaaaggcgcatgcgctctcattgcagcctcggcgtttgtagaagaggagcatctgctccagatggaaaatgggtaaggaacaatcaaattcaattcgggaagaatatagaggtggtaataattggtaaaagtctgcagggttttttttaaccaaaggaaactggtttgagaaaattgtgaaatcagcattgaaatttgttacctactccaatcaagatttgcaaactacaaaaaaatcattctgaagctttcacctataaatatataccaagataatttcagataagaatgtccagcaaggaagtgaagactgctctaaaaagtgctagagatgcaatcagaaacaaagaatacaaagaagctttgaaacactgtaagacagtgttaaagcaagagaaaaataactataatgcctgggtttttattggcgttgctgcagctgaactagaacaacctgatcaggcccagagtgcctataaaaaagctgctgaattagagccagaccaattactagcttggcaggggttagcaaacttgtatgagaaatataatcacataaatgctaaggatgacttgcctggtgtttaccaaaagctcctggatctttatgagagtgttgacaagcagaagtggtgtgatgtctgcaagaaacttgtggatctatattaccaagaaaagaaacacctagaggtggctcgaacatggcacaagttgataaaaacacggcaggaacaaggtgcagaaaatgaagagcttcatcaactatggagaaaattgactcagttcctggctgaaagtacagaggaccagaataatgaaactcagcaattgctttttactgcttttgagaatgcactgggattatcagataagattcctagtgaagatcaccaagtactttataggcatttcattcagagtttatccaaatttcctcatgagtctgctagattgaagaaggcctgtgaaggaatgataaacatctatcctactgtacagtatccattagaagtgctttgtttgcatttaattgaatcaggaaatcttactgatgaggggcagcagtattgttgtagattagtggaaatggattcaaaaagtggtccaggcctcattggcttaggcattaaagcattacaagacaaaaagtatgaagatgctgttaggaacctaacagaagggttaaaggaaagccctgtctgcacaagtggatggtatcatctggcagaagcccaagtcaaaatgcatagacctaaagaagctgttctttcatgcagtcaagctctgaagatcgtagataatcttggtgcgtctggtaacagtctttatcagaggaatctttgtcttcatttgaaagcagaggctttgattaaactctcagattatgactcttcagaggaagcaattcgtacgcttgatcagatttctgatgcagataatatcccaggacttttggttctcaaaagcttggcctatcggaacaaaggttcatttgatgaagctgcaaagattatggaagaccttctctcttcttaccctgacctagctgaagttcatgcccttgaggctttgattcatttcaccaaaaaggactatctacaagcagaaaaatgggaggtgttgtagcaggaaatgtggctcatattctggactcaaatcatggaaagaaggcattactgtacactgcggtaaatcagttggctatgggaagcagttcagcagaagatgaaaaaaatactgcactaaagaccattcagaaggcagctctcctttctccaggtgatcctgctatctgggctgggctaatggcagcctgtcacgctgatgataaactggccttagtgaacaacactcagccaaagaggatagatttatacttggcactgttatctgctgtttctgcttcaagtaagtttttaaaagcat

SEQ ID NO: 238296 - DNA, 1455 bp, Homo sapiens
tcctgggaaaggcgcatgcgctctcattgcagcctcggcgtttgtagaagaggagcatctgctccagatggaaaatgggtaaggaacaatcaaattcaattcgggaagaatatagaggtggtaataattggtaaaagtctgcagggttttttttaaccaaaggaaactggtttgagaaaattgtgaaatcagcattgaaatttgttacctactccaatcaagatttgcaaactacaaaaaaatcattctgaagctttcacctataaatatataccaagataatttcagataagaatgtccagcaaggaagtgaagactgctctaaaaagtgctagagatgcaatcagaaacaaagaatacaaagaagctttgaaacactgtaagacagtgttaaagcaagagaaaaataactataatgcctgggtttttattggcgttgctgcagctgaactagaacaacctgatcaggcccagagtgcctataaaaaagctgctgaattagagccagaccaattactagcttggcaggggttagcaaacttgtatgagaaatataatcacataaatgctaaggatgacttgcctggtgtttaccaaaagctcctggatctttatgagagtgttgacaagcagaagtggtgtgatgtctgcaagaaacttgtggatctatattaccaagaaaagaaacacctagaggtggctcgaacatggcacaagttgataaaaacacggcaggaacaaggtgcagaaaatgaagagcttcatcaactatggagaaaattgactcagttcctggctgaaagtacagaggaccagaataatgaaactcagcaattgctttttactgcttttgagaatgcactgggattatcagataagattcctagtgaagatcaccaagtactttataggcatttcattcagagtttatccaaatttcctcatgagtctgctagattgaagaaggcctgtgaaggaatgataaacatctatcctactgtacagtatccattagaagtgctttgtttgcatttaattgaatcaggaaatcttactgatgaggggcagcagtattgttgtagattagtggaaatggattcaaaaagtggtccaggcctcattggcttaggcattaaagcattacaagacaaaaagtatgaagatgctgttaggaacctaacagaagggttaaaggaaagccctgtctgcacaagtggatggtatcatctggcagaagcccaagtcaaaatgcatagacctaaagaagctgttctttcatgcagtcaagagtatttttgatactttttgggttgacatataagggtgaccaaccctatttgtttttatcttaaaggacaaagatagtgatttttaaaaaccaaaatgctatattttgtattttaaattgctaattttaatttcaataagtttaaataaaagtctgcatgcatgtgt

SEQ ID NO: 238297 - DNA, 236 bp, Homo sapiens
ggcgtttgtagaagaggagcatctgctccaggtgggttcggatttctgtcggttttgcacaagggatcctaaaggcgattgaaatggtacttagagaaagaaaggatcggggccggggctgttcattttgggccgcgcaagcgtggctgagtgttcggcgagagcgtgaactgggcggcgatgaggtggcggcgcggctgtcacttaagttgaatagggcggtgccttgtggggcc

SEQ ID NO: 238298 - DNA, 4322 bp, Homo sapiens
  misc_feature (4180)..(4180): n is a, c, g, or t
  misc_feature (4190)..(4190): n is a, c, g, or t
  misc_feature (4199)..(4199): n is a, c, g, or t
  misc_feature (4275)..(4275): n is a, c, g, or t
  misc_feature (4306)..(4306): n is a, c, g, or t
tcctgggaaaggcgcatgcgctctcattgcagcctcggcgtttgtagaagaggagcatctgctccagatggaaaatgggtaaggaacaatcaaattcaattcgggaagaatatagaggtggtaataattggtaaaagtctgcagggttttttttaaccaaaggaaactggtttgagaaaattgtgaaatcagcattgaaatttgttacctactccaatcaagatttgcaaactacaaaaaaatcattctgaagctttcacctataaatatataccaagataatttcagataagaatgtccagcaaggaagtgaagactgctctaaaaagtgctagagatgcaatcagaaacaaagaatacaaagaagctttgaaacactgtaagacagtgttaaagcaagagaaaaataactataatgcctgggtttttattggcgttgctgcagctgaactagaacaacctgatcaggcccagagtgcctataaaaaagctgctgaattagagccagaccaattactagcttggcaggggttagcaaacttgtatgagaaatataatcacataaatgctaaggatgacttgcctggtgtttaccaaaagctcctggatctttatgagagtgttgacaagcagaagtggtgtgatgtctgcaagaaacttgtggatctatattaccaagaaaagaaacacctagaggtggctcgaacatggcacaagttgataaaaacacggcaggaacaaggtgcagaaaatgaagagcttcatcaactatggagaaaattgactcagttcctggctgaaagtacagaggaccagaataatgaaactcagcaattgctttttactgcttttgagaatgcactgggattatcagataagattcctagtgaagatcaccaagtactttataggcatttcattcagagtttatccaaatttcctcatgagtctgctagattgaagaaggcctgtgaaggaatgataaacatctatcctactgtacagtatccattagaagtgctttgtttgcatttaattgaatcaggaaatcttactgatgaggggcagcagtattgttgtagattagtggaaatggattcaaaaagtggtccaggcctcattggcttaggcattaaagcattacaagacaaaaagtatgaagatgctgttaggaacctaacagaagggttaaaggaaagccctgtctgcacaagtggatggtatcatctggcagaagcccaagtcaaaatgcatagacctaaagaagctgttctttcatgcagtcaagctctgaagatcgtagataatcttggtgcgtctggtaacagtctttatcagaggaatctttgtcttcatttgaaagcagaggctttgattaaactctcagattatgactcttcagaggaagcaattcgtacgcttgatcagatttctgatgcagataatatcccaggacttttggttctcaaaagcttggcctatcggaacaaaggttcatttgatgaagctgcaaagattatggaagaccttctctcttcttaccctgacctagctgaagttcatgcccttgaggctttgattcatttcaccaaaaaggactatctacaagcagaaaaatgttttcagagagctcttgagaaagataccgaagttgcagaatatcattaccaacttggattaacatactggttcatgggtgaagagacaagaaaagataaaacaaaggctcttacccactttctgaaggctgcaagactggatacatatatgggcaaagttttctgctatttaggtcattattatagagacgtagtgggagataaaaacagagctcgtggatgttataggaaagcctttgaattagatgacactgatgctgaatctggagctgcagcagttgacctaagtgtggagcttgaagatatggaaatggctttagctatcctaacaacagtaactcaaaaggcaagtgctggaacggcaaaatgggcctggcttaggcgaggactatactatttgaaagctggtcagcattctcaagcagtggctgatttacaggcagcattaagagcagacccaaaggacttcaattgttgggaatcgttaggagaagcatacttaagcagaggaggctacacaacagccttgaagtccttcacaaaagccagtgagctgaacccagaatccatatacagtgtgtttaaggttgcagcaatacagcaaatcctaggcaaatataaggaggctgtagctcaataccagatgatcattaaaaagaaagaagattatgtgcctgctttaaaaggtttgggtgaatgccatcttatgatggcaaaagcagctctagttgattatcttgatggaaaagccgtagactacatagaaaaagcactggaatattttacttgtgctctacagcatcgagctgatgtgtcctgcctctggaagctagctggggatgcttgtacctgtctgtatgctgtcgcaccatctaaagtgaatgttcatgttttaggagtccttctaggtcagaaagaaggaaaacaagtattaaagaaaaatgagctcctccaccttggaggaaggtgttatggtcgtgcattccaagcacaacatctagcagaaacaggcagcaacatgaatgatcttaaggagttgctggagaaatctttacattgtctgaaaaaagcagtgagactcgacagtaataatcacttatactggaatgctcttggtgtggttgcatgttacagtggtattggaaattatgcccttgctcagcactgtttcatcaaatcaatccagtcagaacaaattaatgctgttgcatggaccaacttgggagtgttatacctcacaaatgaaaacattgagcaagctcatgaggctttcaaaatggctcaatcccttgatccatcttatttaatgtgctggattggacaagctcttattgctgaggcagttggaagttatgacaccatggatctcttcaggcacactacagaactaaatatgcatactgaaggagcattaggttatgcgtattgggtctgcacaacattgcaagataaaagcaacagagaaacagagctgtaccagtacaacatcctccagatgaatgctattccagcagcacaagttattttgaataaatatgtagaaagaattcagaattatgccccagctttcacaatgttgggttacttaaacgaacatctacaactgaaaaaggaagcagcaaatgcataccaaagggcaattttgttgttacagactgcagaagaccaagatacttacaatgttgcaataagaaattacggcagattgttatgttccactggtgaatatgataaagctatccaggcttttaagtcaacaccccttgaagtgttagaagacatcataggttttgcattggctttattcatgaaggggctttataaagagagcagcaaagcctatgagagagccttgtctattgttgaatcggagcaagacaaagcccatatcttgacagctctggcaataactgaatataaacaaggaaaaacggatgtagccaagacattgctatttaaatgctctatcttaaaggaaccaaccacagaaagccttcaagccctgtgtgctctagggttggcaatgcaggatgctacactgtcaaaagcagcacttaatgagttactgaagcacatcaaacacaaagacagtaattatcagaggtgccttcttacatcagcgatttatgcactccaaggccgcagtgtggctgtgcaaaaacaaatatctaaagctgttcacagcaaccctggtgaccctgctctttggtctctgttgtctcgagttgttgcacagtatgctcaacgaaatgcaaagggaggtgttgtagcaggaaatgtggctcatattctggactcaaatcatggaaagaaggcattactgtacactgcggtaaatcagttggctatgggaagcagttcagcagaagatgaaaaaaatactgcactaaagaccattcagaaggcagctctcctttctccaggtgatcctgctatctgggctgggctaatggcagcctgtcacgctgatgataaactggccttagtgaacaacactcagccaaagaggatagatttatacttggcactgttatctgctgtttctgcttcaattaaagacnaaaaaattcnttgaaaaanttacaaccaagtcccctttgaaaaagtgggtcctcctctcaacaaagcctgtcaactgggtcctaaattagaccancaagggaaggaaataatctgaaaagccctgnaaaacctcctcctggc

SEQ ID NO: 238299 - DNA, 4331 bp, Homo sapiens
tcctgggaaaggcgcatgcgctctcattgcagcctcggcgtttgtagaagaggagcatctgctccagatggaaaatgggtaaggaacaatcaaattcaattcgggaagaatatagaggtggtaataattggtaaaagtctgcagggttttttttaaccaaaggaaactggtttgagaaaattgtgaaatcagcattgaaatttgttacctactccaatcaagatttgcaaactacaaaaaaatcattctgaagctttcacctataaatatataccaagataatttcagataagaatgtccagcaaggaagtgaagactgctctaaaaagtgctagagatgcaatcagaaacaaagaatacaaagaagctttgaaacactgtaagacagtgttaaagcaagagaaaaataactataatgcctgggtttttattggcgttgctgcagctgaactagaacaacctgatcaggcccagagtgcctataaaaaagctgctgaattagagccagaccaattactagcttggcaggggttagcaaacttgtatgagaaatataatcacataaatgctaaggatgacttgcctggtgtttaccaaaagctcctggatctttatgagagtgttgacaagcagaagtggtgtgatgtctgcaagaaacttgtggatctatattaccaagaaaagaaacacctagaggtggctcgaacatggcacaagttgataaaaacacggcaggaacaaggtgcagaaaatgaagagcttcatcaactatggagaaaattgactcagttcctggctgaaagtacagaggaccagaataatgaaactcagcaattgctttttactgcttttgagaatgcactgggattatcagataagattcctagtgaagatcaccaagtactttataggcatttcattcagagtttatccaaatttcctcatgagtctgctagattgaagaaggcctgtgaaggaatgataaacatctatcctactgtacagtatccattagaagtgctttgtttgcatttaattgaatcaggaaatcttactgatgaggggcagcagtattgttgtagattagtggaaatggattcaaaaagtggtccaggcctcattggcttaggcattaaagcattacaagacaaaaagtatgaagatgctgttaggaacctaacagaagggttaaaggaaagccctgtctgcacaagtggatggtatcatctggcagaagcccaagtcaaaatgcatagacctaaagaagctgttctttcatgcagtcaagctctgaagatcgtagataatcttggtgcgtctggtaacagtctttatcagaggaatctttgtcttcatttgaaagcagaggctttgattaaactctcagattatgactcttcagaggaagcaattcgtacgcttgatcagatttctgatgcagataatatcccaggacttttggttctcaaaagcttggcctatcggaacaaaggttcatttgatgaagctgcaaagattatggaagaccttctctcttcttaccctgacctagctgaagttcatgcccttgaggctttgattcatttcaccaaaaaggactatctacaagcagaaaaatgttttcagagagctcttgagaaagataccgaagttgcagaatatcattaccaacttggattaacatactggttcatgggtgaagagacaagaaaagataaaacaaaggctcttacccactttctgaaggctgcaagactggatacatatatgggcaaagttttctgctatttaggtcattattatagagacgtagtgggagataaaaacagagctcgtggatgttataggaaagcctttgaattagatgacactgatgctgaatctggagctgcagcagttgacctaagtgtggagcttgaagatatggaaatggctttagctatcctaacaacagtaactcaaaaggcaagtgctggaacggcaaaatgggcctggcttaggcgaggactatactatttgaaagctggtcagcattctcaagcagtggctgatttacaggcagcattaagagcagacccaaaggacttcaattgttgggaatcgttaggagaagcatacttaagcagaggaggctacacaacagccttgaagtccttcacaaaagccagtgagctgaacccagaatccatatacagtgtgtttaaggttgcagcaatacagcaaatcctaggcaaatataaggaggctgtagctcaataccagatgatcattaaaaagaaagaagattatgtgcctgctttaaaaggtttgggtgaatgccatcttatgatggcaaaagcagctctagttgattatcttgatggaaaagccgtagactacatagaaaaagcactggaatattttacttgtgctctacagcatcgagctgatgtgtcctgcctctggaagctagctggggatgcttgtacctgtctgtatgctgtcgcaccatctaaagtgaatgttcatgttttaggagtccttctaggtcagaaagaaggaaaacaagtattaaagaaaaatgagctcctccaccttggaggaaggtgttatggtcgtgcattccaagcacaacatctagcagaaacaggcagcaacatgaatgatcttaaggagttgctggagaaatctttacattgtctgaaaaaagcagtgagactcgacagtaataatcacttatactggaatgctcttggtgtggttgcatgttacagtggtattggaaattatgcccttgctcagcactgtttcatcaaatcaatccagtcagaacaaattaatgctgttgcatggaccaacttgggagtgttatacctcacaaatgaaaacattgagcaagctcatgaggctttcaaaatggctcaatcccttgatccatcttatttaatgtgctggattggacaagctcttattgctgaggcagttggaagttatgacaccatggatctcttcaggcacactacagaactaaatatgcatactgaaggagcattaggttatgcgtattgggtctgcacaacattgcaagataaaagcaacagagaaacagagctgtaccagtacaacatcctccagatgaatgctattccagcagcacaagttattttgaataaatatgtagaaagaattcagaattatgccccagctttcacaatgttgggttacttaaacgaacatctacaactgaaaaaggaagcagcaaatgcataccaaagggcaattttgttgttacagactgcagaagaccaagatacttacaatgttgcaataagaaattacggcagattgttatgttccactggtgaatatgataaagctatccaggcttttaagtcaacaccccttgaagtgttagaagacatcataggttttgcattggctttattcatgaaggggctttataaagagagcagcaaagcctatgagagagccttgtctattgttgaatcggagcaagacaaagcccatatcttgacagctctggcaataactgaatataaacaaggaaaaacggatgtagccaagacattgctatttaaatgctctatcttaaaggaaccaaccacagaaagccttcaagccctgtgtgctctagggttggcaatgcaggatgctacactgtcaaaagcagcacttaatgagttactgaagcacatcaaacacaaagacagtaattatcagaggtgccttcttacatcagcgatttatgcactccaaggccgcagtgtggctgtgcaaaaacaaatatctaaagctgttcacagcaaccctggtgaccctgctctttggtctctgttgtctcgagttgttgcacagtatgctcaacgaaatgcaaaggtaaagtaacgtttcaaattctagcaaagagataaaataacttgtgatatggtaaatatgataattttaaactatggcattattcttctgcaagataatttgtacaatgaagaaagttctgttattaactaaattttccattagtcattcaacgaatactagactgagttttctccatatacggttgtgctgttctagatgttgtgggagctacaaagacgtacaaagaagtgggagctacaaagaagtatgaagatctctttgaacacatgcagattatgttaatgatatgtgataaagtaatgtaacactgccacatagtaatcattagctatgtgtttttgaatcccaaaatataattttatttaaaatcagcttaaagataaggcagtaagaactagaacactgctaatatacaaaaatgtaattataaatatgaagtcactgacactcta

SEQ ID NO: 238300 - DNA, 2042 bp, Homo sapiens
tcctgggaaaggcgcatgcgctctcattgcagcctcggcgtttgtagaagaggagcatctgctccagatggaaaatgggtaaggaacaatcaaattcaattcgggaagaatatagaggtggtaataattggtaaaagtctgcagggttttttttaaccaaaggaaactggtttgagaaaattgtgaaatcagcattgaaatttgttacctactccaatcaagatttgcaaactacaaaaaaatcattctgaagctttcacctataaatatataccaagataatttcagataagaatgtccagcaaggaagtgaagactgctctaaaaagtgctagagatgcaatcagaaacaaagaatacaaagaagctttgaaacactgtaagacagtgttaaagcaagagaaaaataactataatgcctgggtttttattggcgttgctgcagctgaactagaacaacctgatcaggcccagagtgcctataaaaaagctgctgaattagagccagaccaattactagcttggcaggggttagcaaacttgtatgagaaatataatcacataaatgctaaggatgacttgcctggtgtttaccaaaagctcctggatctttatgagagtgttgacaagcagaagtggtgtgatgtctgcaagaaacttgtggatctatattaccaagaaaagaaacacctagaggtggctcgaacatggcacaagttgataaaaacacggcaggaacaaggtgcagaaaatgaagagcttcatcaactatggagaaaattgactcagttcctggctgaaagtacagaggaccagaataatgaaactcagcaattgctttttactgcttttgagaatgcactgggattatcagataagattcctagtgaagatcaccaagtactttataggcatttcattcagagtttatccaaatttcctcatgagtctgctagattgaagaaggcctgtgaaggaatgataaacatctatcctactgtacagtatccattagaagtgctttgtttgcatttaattgaatcaggaaatcttactgatgaggggcagcagtattgttgtagattagtggaaatggattcaaaaagtggtccaggcctcattggcttaggcattaaagcattacaagacaaaaagtatgaagatgctgttaggaacctaacagaagggttaaaggaaagccctgtctgcacaagtggatggtatcatctggcagaagcccaagtcaaaatgcatagacctaaagaagctgttctttcatgcagtcaagctctgaagatcgtagataatcttggtgcgtctggtaacagtctttatcagaggaatctttgtcttcatttgaaagcagaggctttgattaaactctcagattatgactcttcagaggaagcaattcgtacgcttgatcagatttctgatgcagataatatcccaggacttttggttctcaaaagcttggcctatcggaacaaaggttcatttgatgaagctgcaaaggttggcttttttattcaaactgagcattttttgagttaaaagcatttttatttggctatagaattgacaggtgtctactttatagattatggaagaccttctctcttcttaccctgacctagctgaagttcatgcccttgaggctttgattcatttcaccaaaaaggactatctacaagcagaaaaatgttttcagagagctcttgagaaagataccgaagttgcagaatatcattaccaacttggattaacatactggttcatgggtgaagagacaagaaaagataaaacaaaggctcttacccactttctgaaggtttttttgaatcccgtgtccttcaagcgctttctaactttgagaggaagaaattgaccacctggactatggaactgtgcgtaacagctttgaaagtgtatttaaaaattaaatctatatgcctttaaatcagtgaattggaaacatattacatgtattttaatgattttcctcaaatataataaattgtttcctttccaataaaaaaaaa

SEQ ID NO: 238301 - DNA, 532 bp, Homo sapiens
cactccaaagccaagacaagcagtttcctggaaaaagaaggctgcgcggagcccagagtggcctggatcctgcctcatttcctggaccagctccttaggtggttactggattgccaataaagcagagcttattaaagtcaacgagctcaggcttcatcgccgccatggtatccaagcaccagtctgtctgggatttcatttgccagatggacaaaggagaggttgttccaatacatatcctgagtggtgggggtggggagagaaggggaagaatgctctctagagaattctctttgtcctctgaagtaaatagagatcatgtcttccccagccacactcagtgatctgaatctcttggactgtggatttttcctttacctgctgtgaagccttgaaaagtatgaattagcttgataatgatcctctaaagatgttcaagagttaaagacgtgtttaagttcttcaggcaatccaatatgactacgggtttccaaaaatttgaaggaaactgaaaatcatagttcccaaacca

SEQ ID NO: 238302 - DNA, 608 bp, Homo sapiens
tggagaggaagtagaatttattggttagtattaagaggggaagcacagtgaaagccctcatgagtgcagggcccggcacttgtccacagggccacaactggggatgtacttgaccccacagccatatgagccacttctcagccaccatgtcttcaaattcatcgacattgaacttggtgaagccccatttctttgagaagtggatcgtctggcagccagagaacttgaacttggccctgtgcagggcctcaatcacatgctccttgttctgcagcttggtgcggacggacatggtaacttggccaatgtgacccctgaccacagtgccctggggttttccaaaggcacctcgcatgcctgtttgaagcctacattggggtaatgcaaggtcagagacatgaacatacatctgaaaggcctattatcaaggtcccttagagcaacctatagaggaaacaggctgcatacaccaccaaggaagctgctgtttgcagccattgcacactgggcccccataaggaaaggaactcagtacacttaattgactgcagaggtaatgacttccattgtggaaccttggtcctaaatgtttctgtgtacaggataat

SEQ ID NO: 238303 - DNA, 436 bp, Homo sapiens
gaagggggccgccaggcagggaggacagcggttcccgaggaaggtttcggagagtgaaagagaccggaggggaggcggctgatgtccacgcccgagccaagactctcaaatcccacatcaatttcccgaggcgactctcgcaatcgccagaacggcacccatgaccgacgctccgcgaaagccccacgcgcggaggcgcgggttcagccccggccgcgcggccctcccgccgcggcgagcaggtgccggacgcttacccagggcccaggtgcagctctccttgatggctttgtacttgctcccggacgcctccttctgcagcttcctcaggatttcttccatcttgaccttccaggcgccgggccgccgcccacagggagagaagcgcgggcgagccgggccggggaagccgccgctgcctggccctgggcgccta

SEQ ID NO: 238304 - DNA, 323 bp, Homo sapiens
tgactcaatgcaacctcgacctcctgggctcaaatgatcctcccacctcaatacctcaagtagctgggaccacgggtggatgtcaccacgcccagctagcagttttaattattttttgttgcccagcctggtcttgaactcctgggcttaggtgattctcccaccttggcctccaaaaatattgagattacaggcatgagccatggcactcagcccctaattctcctttttaaaattttcaaagtacttctttctcctcctcatgccatttatatagcaggtgctttgtttatactcatcatctaatctatttgataatgtgg

SEQ ID NO: 238305 - DNA, 482 bp, Homo sapiens
attggtattttaataataaatatctctgctctttgaaagaggtactaattgtgcgtctctgtaatgaaaaaccgagaggaattaaactggttcaatagtaactgattcctgagtaccactgccaggtcttaccctggccaaaattagtaaaagactgatgtctatatgtggttcaaaactgcttttgtattatcgttggtgaatgaccactgaaaatattaaagcagtggtaagataatacagttgactcttgaacaccatgggcgttagggacattgattactcatgcagttgaagatctgtgtgtaacttttgactcctccaaaactttactcatagcctgcagttgtctgaaggccttaacaaataacatagtcagcacatattttgcatgttgtctgtattatatactgactgtattcttaccataatctagagaaaagaaaatgttattaaaatcataatgaaaatatatttactct

SEQ ID NO: 238306 - DNA, 459 bp, Homo sapiens
agattatattgccaccatggaagaggaggagctggaaggagattctgaagccttgggacaaagctggtgctgcggcagtcagagcagagagacagaatgatgccactgattgctgtgcttttggagactgttctacttctgaatttccaattcagtgaaataatgcctgtcctcatttattagccttttagagctctgctgctgtcctgtccataaggttatttgttggtaaaatattaaactacaggaaacataacagcctcagaaaagcatgactcaacatgagcctgggacaactcagggtctctctactgtgcacagcatttgttctgctttcaaggctccccacagcatctgaagctttacatccctggaggcaactgcccatatgtttacctttattaccaactgcagtttccaggcatctgctaaattacaattttgagtgcttaatggtga

SEQ ID NO: 238307 - DNA, 578 bp, Homo sapiens
cattttgtctttctttttgtagctgcaatttggtttgcttatactttctctttgtctctttgaaaactgagtcagtttcactttctcaggacaggatttaataaccataatataatttagtataattccttgatttaggcaaattatgcaatttgtgtttagtatgaaatgtacctaaaaataagtaactcctctttaacaccaccatcctcaaactaatataacaaataacagttatcctaaaataaattgtctacttccaccatgcagcactcaaattttaaggttgctatgactgcagacagtattttaaaattcctctctggaaatggctttgtttccaagatgatttaggaaccaaagaggtgaccatctcttgtttaatgaactctcaaatcataaacctgggaagtgttttagtttcctactgctgctgttacaaattatcacaaatgtgttagctaaaacaaacacaaaattattattttacagttctagagatcagaagtcaaaaatgggtccacaaggtttcattccttttggaaactctaaggggcaatctgtttccttgtcttttc

SEQ ID NO: 238308 - DNA, 553 bp, Homo sapiens
gtggcctcagagcccaccccacacagcaagaggcccagaccctgcccctcctggcctcgtcgccttctggctgcatggtgagtcatctgctttataggccgtggtcccgttgtcacccgtcttggatgagagctccctgacctgtgtcctaggctggcccctgcacacccctggctccatcctgagcccactgtggcagcatcctcttcaggtctcccctctgccccgacctcctgcttacctcctttacccaagacggagcaggtgaccctggcaggatcccaaaggctggcttaatacaaattagcatctccactgtaccctgcaggcaattcataactgccctaccccaggtgggggcaagatggagcccttgtcagtgctcagcccaggagaggtgagggatggccacagagatgccctgcacagagaggccgcttaccagctcctcatcccctgcccctgggattccttccctcctgtgcctctgtaccctccccaagccatgcaaatccattccagactgagtttcccaagatgaggagaccccaga

SEQ ID NO: 238309 - DNA, 268 bp, Homo sapiens
tttcttccccccaaattactatttcccccagtttactatttccttctcagtagcttaggaaagtgcttttagcctgagggattctgtgatcccacacttttgcagccctaggaacttggcatctatcctccttagacttttatgagtaggtcccaccatataacatgcatctgcacctgaaactccatttatgtaataatgctacaagagtgcccatgctgtttcagatgctcttctagctcctggagatacatcagtatccaaagca

SEQ ID NO: 238310 - DNA, 247 bp, Homo sapiens
actttgggagactgaggagagaggatcacttgaggccaggagtttgaaaccagcctgggcaacataggaagaccctgtctctataaaaaatttaaaaattagcccggcatggtggcgcacacctgtagtcccagctactcaggaggctaaggtgggaggatcacttgagcctggaagactgaggctgcagtgagccgtgaccagtgccattgcattccaaactgcaacagagtaagacccaatctcc

SEQ ID NO: 238311 - DNA, 414 bp, Homo sapiens
tttttttttttttttttttttttttgtagagatggggtctctctgttacccaggctcctaacaccattttaaaaagataacaatatttgacaatatatcattaactgccacatgaaaggccttgataaatgctatggtcagaaggaaaagacacattttagctagaatgatcagaaaatcagagccaagatgggcatggggatagagtgggaatgttagctatgccagtaataagaaagaatacctgcataaactggaaataggaaagggaggagaaaggggcaggataaaaggctggcaagcaaaggtaaattccaaggatagtgattaggctaatctcagaaaaacataagaagagaattgcaatccatcttttccaacaaaactttaaaaaccttacagaaatgtatcctt

SEQ ID NO: 238312 - DNA, 858 bp, Homo sapiens
aagattgtttcttaggttgtccatcagttttatttaaatattttctaatacacggtaaaacagctttattattgccatattgttacatttccattttaatacactataccaccagtacatcctgataacacttaatcagtcctttctgaaatgtaaaattgtctctacttcttacatttctgccagtaataatgatgatgttattaacatactctacaattcacaaagaaaaacataagaaataactacattacttattcacctcccatcactctgctgtggtaatggattactatttggtgaacaatgtttcaccttttgtgtataatgctgacatctatggtaccaaagacaaccaaaaacctttaaattaaatagccagatatctttggtagccctcagataaaagtaaaaacatgatttttctaataagtacagatttgtttcctgtaacaatagcaaaagactgctatccactaaccacactaaccacagaatacactgaaattttcataatcatattctattaatatgtctattctcaatacagggtagctactatggttaagacatgaaaattcaataaataaggttttaattgaaagacttaaaaaatgattcttcattttacaataaaccacagaaaatcctagaaggagaaatttataaacttcaggtaacaactttacccatcgttaagccaataaaccaataaaaggaccaaaagaacaaattatctgtatagtagttcaatatgtccaaaaggcacatgtatgactacagaaatgcagaaactcttattaccacacaacctcattagtaggcaatgaatgttgcaagggcaacttagccttcatc

SEQ ID NO: 238313 - DNA, 392 bp, Homo sapiens
gctccagggttggagtggtggtgggaggtgcttgtgggggtttggaggtttgcaaggtgcgtacccatggctgctatataaagttctagaactgtcttactagaccgcagataggtgtgaatcttcacctcagtaggtgctaactgtgaagtgaaaccaattatattcacatggaaaaaaaaagtatctctctagtagacgtgacctcaaaggaaggaagcaaaagcagcaggagggccttcaccattagactccatctttaccgcgcttcattcttcgcagcctcctcctaagacactaactagcaattccaaatatttcatcttcactcacaggttatactcctttatatgacctccgaaggctagctgatgtatttttcccttgaggat

SEQ ID NO: 238314 - DNA, 354 bp, Homo sapiens
gaagtccaaagatatggcagttctcctgagttggcaaaattctcttttgtcatttttacggaaaaagacagtagcaacccttccaaatagcacattctcatacacctttatttagagcagtgaaagggaacttctttgtgtctctttttgggagcttcaaaatccttctcaatcctcctccagaggcccttaaatgtcccttcccagaattgcatcacatgccaacatttaaaccacgcactgaaaacagcaacaacaacaacactgggactgcagtgattccttggttaatctacattatatttaccattccatcccatcccacaagtcacaaggggaagcacatgacctcag

SEQ ID NO: 238315 - DNA, 287 bp, Homo sapiens
ctggattgctcaaactctattgtcagtgacaaaacccagtgtaagctggcctaatatattaatagtaatatgcgagtcctcccggggtggcgggcactgacgtaagtgctttacttgggtcttctcatttcatcctcccagcaacccaaagagctggcggcgtcattcccattttacaaatgcgaacacgggctcagagatggagcgactcacgttgtaagcgatggaactgggatttgaaaacactgtatcccgcctggcagaaaactggcaaggttaggatggag

SEQ ID NO: 238316 - DNA, 385 bp, Homo sapiens
tcatgaactataccagcaaaacaggaaaataatggagtaagaggccatgtatttccatacactgtagacagaaagtcactttgccaatagaccaagctgccatacatgtaccaactgagcaggtggcagctatgcaggagctacgtaagagttatcgattaatgcccaagtgtggtggctcacgcctgtaatcccagcactttgggaggccgaggcaggcagatcacctgaggtcgggagttcgagagcagcctgaccaacatggagaaaccccgtctctactaaaaatacaaaattagccgggtgtggtggtacatgcctgtaatcccagctacttgggaggctgaggcaggagaaccgcttgaacccgggaggcggaggttgc

SEQ ID NO: 238317 - DNA, 934 bp, Homo sapiens
ttgagatggagtcccactctgtcgtccaggctggagtgcaatggtgtgatatcagctcactgcaacctccgcctcccgggttcaagtgattctcctgcctcagattccagagtagctgggattacaggtgcccaccaccaagcctggctaattttgtatttttagtagagatgcgatttcaccaggttggccaggctggtcttgaactcctgacctcaggtgatccacctgcctcagcctcccaaaatgctagtataacaggcgtgataacaggcgtgagccaccatgcccggccaagaaatacattttctaaagtcagagcctctctcccctaaaataattgagatgttattttatgataaatgttgcttacctgacaatctaaatagtacactttcgatcagcattcttaattttgtgtttttaaacccctagagcagagcctctcaaacagtgtcctctaaggataggttatgggtgtgccaatgtattgcttcctcttagtttcttgggtgatagagtgcagcatggggaagttctgaggaaatgggcagggattctggctgtaaactttgttcatttagtatagcattcaaatgttaccattttctgtggggaaaatgacccttgaacagcgttgctcttaatttgaggtcctcacaccctcaagaaacctgaagatagaataggggtagggtagtcggtgaacttggattggaaaaaattatgtctttattttcactaacttccaactggcatttctttcaatcatgaatatgtctacaaaccacagtagaatcataagtatctgcagctttgtcattcatagaaatcacaaatatttctaaattattaatatattacagatgtactgatatcctcccaaatttttatactaatttcttcttcaaaattcctggctggccacaatggc

SEQ ID NO: 238318 - DNA, 2101 bp, Homo sapiens
  misc_feature (147)..(147): n is a, c, g, or t
  misc_feature (164)..(164): n is a, c, g, or t
  misc_feature (744)..(744): n is a, c, g, or t
  misc_feature (1299)..(1299): n is a, c, g, or t
  misc_feature (1837)..(1837): n is a, c, g, or t
  misc_feature (1905)..(1905): n is a, c, g, or t
  misc_feature (2051)..(2051): n is a, c, g, or t
aaaataaaaaataaaaaagcaccattgactttgactgtagttagttcctgaaatactcagaggtctagtcagataaaaaggtcaggtgtctcagagattcgcccttccaggtactccacatggggcagcagagtcacatctgaatgnatgggatgtaatggaangcagttaaagactaagatacagtgtgtagaccaggcctgtatgcgtgggtggccaggtaagtgcctcagaaaaaagacctgctaccattcctaaagaaggcagaaggctgggaagcatgaaactcaacagactctcattatttcagatctcacggtcacttagttctatgtcccatcaggtaacactccacaacagggctttgttgctgagcttactataaattctgttcgataaaaacccttgcagagcacagggcagctctagtttccatgcctgtggacatttaaaacaccaaaataactattgattttttaaatcccgaggaattaattgtgttttaatgtaatataaggtgtcttaaagtataatggattggcaaaaggctctattgatatttaagggcctaggaaagaaactgatgggaaaaaaaatgtttccttggaaaagactgttatatattacaaggtttaagacacagaggtggagaagtaaagatgggcaaagtctcagctagaattcacagaccagaatagcaaaaaaacaagtgtttgaaatgcaaattagtttcttactttttanactgtaggaaaagaaactatcttaataaaatagaggtctatcataataacagtttgaaaatagaatgattgataaaacaagctcatgttttaaaaaaaagtgtttcttaaaactaaagaaaaccacccacccataggctaatattcttgaaaaggggtaggtattttgcttttcattttaaccttttttaaacgttgggggacaattttctctctcaaatatttcttgacatagtagataaaaattcaaataaaggggaataatctctctttttgaatacaaatatttatagccgctttattcacaaattcaaaaaactggaaacaattcaaatgtccatcaatggttaaataaatggaggcatatccacacagtggaagtctacacatatcagggaactcacatgtggaacgacatagatgagcctcaaacacactatcctgagtaaaagaagtcagatggaaagagttgtacactgtatgattccacttacaggaatcgtgaaaaaatctaacctggaaccacaaaacggaccagtcaaatgcaacactatanctagaaagaatgcattttgttgtatgtaaattgttcctcaataaacctgataccttgaaacttctggcagattggcttttttatagaaagagagaacaaaaaaagagagagagaggagaaacatgcaagagaaaagaaggaaaagaaaagagactgatatcatggaaaagggagagagatttttgttaagattctttggtaaagcaatgtaatttctagttgattataatagaaggatggtgcttaagatacatgtcaaggatatattagagaaacaagagtgtccataaacttggagaatttcccccaaataagggtaaataaaatatatttaaaataaaagttatgtcactggagagtaacaaaaaaatgatgcctattgcatttgtctatgacacagctctgttatgaacacctccaggccagaaggcttgtgttatctgcacagctaagaataaaacaggtatattcaggacattggtcccttccccacaccaccccagggaaaaatctctttaaaagaggcatccaggccggncgcggtggctcacgcctgtaatcccagcactttgggaggccgaggcgggcggatcatgaggtcagganatcgagaccacggtgagaccccgtctctactaaaaaatacaaaaaaattagccgggcgcggtggcaggcgcctgtagtcccagctactccggaggctgaggcaggagaacggcgtgaacccgggaggcggagcttgcagtgggccnagatagcaccactgcactccagcctgggcgacagagcaagactccgtctc

SEQ ID NO: 238319 - DNA, 418 bp, Homo sapiens
tagatcattctcaaggaattccagcccctctttctagtgcactgtgttcctttatgctgcaggaaactcggatcaagagtccggactaagcagggagcagtggcaagtgcctgtagtcccagctattcgggaggctgaggcgggaggaatgcttgcgtctaggagttcaaatccagcctgtgcaacagagtgagacccgatctctttaaaaaagagaaagattccaggctgctacatccccttctgcttttcccttcttgtcctgcctctcttctatttgaccacaaggggaggagtgagagagaagtagaggaaagaccacagttcaattagcagagctcttggtgcataaagggttgttgagaaaggtgaactggtttccatctttccactagggaagggtcttccactgaactta

SEQ ID NO: 238320 - DNA, 455 bp, Homo sapiens
tgaaacagagtcttgctctgtcacccaggctagagtgcagtagcatggtctcggctcactgcaagctccgcctcccaggttcaagcaattctcccacctcagcctccgaagtagctgggattacaggtgtgcaccaccatgcctggctaatttttgtatttttagtagagatggggtttccccatgttgttttcccatgttggccaggctggtctcaaactcctgacctcaggtgatccacccacctcggcctcctaaagtgctgggattacaggtctgagccaccacacccagcccctgctttggtttttttatggactccacttaattatttactgaaataagccattcaatcaatgggcaataatccttggatataaatgcccaggctttgccacccactagggtgactctaagccaagtcacttcatctatgaatgcctcaattttcttat

SEQ ID NO: 238321 - DNA, 755 bp, Homo sapiens
cataagtttctctctgactttctcccactttcctgtctctagcccctcattctcccctgaggctagccaaagaaactagaattcctctttttttttttttgagagggagcttcgctcttgttgcccaggctggagtgctgtggcgtgatcgccggctcaccgcaagctccgcctcccaggttcaagccattctcctgcctcagcctcccgagtagctgggattacaggcatgtgccaccacacccggctacttttgtaaggtcataagaccccgattccagagaaagtcctgccctgtacctagaaggaaggaatgttgcacagaaaggccaagaggaatctagacaggcagaccctgctgtctccccactcagtctgttattgttatcagaaaggggccccaatctagaccccaaaagagggttcttggatctcgcccaagaaggaattcaggcaaaatgtgaaaagaaagagatcatctaaaggaaggacttaaaaaaaaatccggaacttgcaagttttgaaaattcccagcttccccagatggcaaatgatgctactgtgaaaaaatggcttccaggcaaggaaaaactccaggacattcccagcaaaacatcatcaaatgatgaagaatggtgcttcaattcatgtttcaaaagcagacacagaaataatttccagagaaatgagctgggggaaaacagaaatgtgtatggaattggaacaaaataaacctgatttttttcaacattgta

SEQ ID NO: 238322 - DNA, 296 bp, Homo sapiens
ttttagatgtaatgctatttcagacataatgtagactacagtatagtgtaaacgtaacttttacatgcaccgggaaaccaaaaaatttgtgtgactctccttaaagatagttcctttattgtgatactcactttattatgatgatctggaactggactcacaatatatccaaggtatgcctctatatataatatgttaggtatatataagctattatgtattatgtaggaataaaactattttaagagaagtatatacagatatattaaaactggtatacattatttcagaacata

SEQ ID NO: 238323 - DNA, 347 bp, Homo sapiens
tgcactttgttgaatatgagtggtaaagagatattcttgctttattcttgatcataggggaaaagcattcagtctttcaccatttaatgttagcttacaggagttctgtatttttatcatgaatgggtggtgaaatgtatcaaatgcttttattccactgattaatataatcgtgggattttttttctttaattaatgtggtggattacacttattgatcttcaaatagtgaattgactttgctaccttgaaataaacttctattgtttggggtatataattctttttatatactgcaaaattctgatattttgttaaggacatttgggtttatcccacaaagtata

SEQ ID NO: 238324 - DNA, 387 bp, Homo sapiens
tatgaacagatttgttctataagcattattttactattttaacattatttcctagaatattttttcactgttattattttcacacacctcagattaaattttaaatttccattaaaacacctagaagaatgattgaaatcaaaacataatactttctttttatgataattacttttatccttgcagttaaaaagacttgaacataaggaagtgcttaaaatgtacactaatgtgaatatacatgcacactcacagttacattgtcactgaggtaaataagaaggtagagccatggaccaggcacttggcctcccataatcccagtgctttgggaggccaaggcaggaggattgcttgagcccaggggtttgagagactctgtcttaa

SEQ ID NO: 238325 - DNA, 908 bp, Homo sapiens
aggaaacagagaaggtggctgtctgcaagccaggaagagagccctcaccagaaactgaatctgctgacaccttgatcttggacttccccagctccagaacttgagaaataagttcctgttgtttaagccatccaatctgtagtattttgttatggcagcccaaggtgactaacacaagaaggaaattttaatttcccctttcatttggtttatatatttatgtgactaaacactacactccaagctgatggctatgactggcctttgaaaaacatcagcttgtctaatcacgttatgtacatatatgcatagtatggaatgtccaaattgaaattatgcctcttatttagagagtcatagattctcacaggtgaaagagactttggagaatctctggactaactcatttcccagatgagaaaactggagccagagaagggaagtgacttgtttaaggccacaccatgagaaaaggcagagctgaggcttgggctgggtctacacacactttgatcagtgtccttctctaacctccatccctcacctccctgtcaatccaccccagcttcatttcccagagcccagtgtccactgggcatggtggccctggaggcccaagtgctttcactacctctgttgaccaaccttcaacagaaatgagcatggaaggaacattcactctgcagctgtgggtactgcccagctagttagtagctcattccagttaacatctgagtttggctctgatgagccaacgcttctggggagataatttgcaaaagttcctcagttccttcccgttgtttataagcagcttagtaaataaggatgttactagcttacactggcttaaaaaaacataagaaaacaaataataaagacttcctttttcttttgccattgtctga

SEQ ID NO: 238326 - DNA, 3568 bp, Homo sapiens
  misc_feature (1660)..(1660): n is a, c, g, or t
  misc_feature (2159)..(2159): n is a, c, g, or t
  misc_feature (2933)..(2933): n is a, c, g, or t
  misc_feature (2943)..(2943): n is a, c, g, or t
ttgacactgttaactcctccctgtttcttgaaatcctctcttctcttgttttctctgtggcaccctttgctcctgtgttcctcctttttctatgcatccttaggggttcccgggggttttgttcatggtcctcttctttctcaatctgttttcgagaaacttgcaaaagtacaactcagcctaacatgcctgtccaagttccagacctgaagagctccagcctcctcgtggatccctttatctcaacacgtctggaacagaactcatgtgggtctctttctgggcttcttatctcagtaaatttcaccaccaaatatccagttctgaagcaagaaacactgggcttcacttttgattcctccctccctctcaatgcccaaatctcatgggtctaaagtcccatcaatgttatcacttgcatatttttgaaatccacaccattgcaacccatttccaaagtagactactgattgccaggggctgggggctaggcggggcaggggaaatagggaaatgcttccattttcattctcaccaatgctgtcctggaccactgcaaagccttctgactggtcttcatgctctcctcacctcctctttctaaagcatcctgcttaacattgctaaaataatttgtctaaatggaaatttgaccgtattactccctagcttaaaatactccgggggttccgcattgtctcctccatagcatggccataaagtcctgcaagaatcacatgctttggcctttgtcctcctccagcgtgtcattccttgcaggtgaccccttctggtccagtgggtctccatcctggtgtgtctcaacctgtggatgatgcttgagccctcctctcagagattctggtctggaaagggccctaaacgttgttgttgttgttgttgttttaagttcccagagctgctaatatgcctccaggggtaggcacaactgtgaacctagccctacatgtgaagggtttgcaagtgccaggtcccgaacctattgagtagaaggaaccaaagtaagcagcattgcctccgtcatttcccaccctcttatgatattttaaggaaagggtttttcactcagctatgcagcaaatattcctggaaatcttgcctgggtcataaggaaatgagggctcttgtattgcctagctcccttccttttgcctgctagagaggagatagggtagaggctttcactgcgtaagttgagcagatagttgtatgctccttatgagcaattgggtgagggtggcagcgggtggaagatgaccatcaagaatggtctgtctcccttccattgcttgaattcctatctacctgatggtttgctacagctgcagtaacagtaacaaagaccacaaactgagtggcttcaacaacaaacacttagtgtcttacaggtctggaggctggaagcctgagatcaagggctgattccttctgagggctgtgagaaagaatctgttctctgtgtctttcctagtttctggtggtttgctggcacagtcttggtgttcctgagcttctagatgcatgaccacgatctctgcctttgtgttcacaaggtgttttccctgtgtgtgttggtatccaaattccccctttttaaaaggataccaatcttactggattggggcccaacctattccantatgacctcatcttaactaattccatttgcaatgccctgatttccaggtactggaaattaagacttcaacataggaattctggggggaaacagttcagctcataaccctaacaagagagtggcaggccagagacttgccagactgatacctaaaaagggcagctacacattcaaaacagggagtgagtcatccctcttctcttgtctgtccaaaacaattcaaacccaagaggagaaacgagaaagagaccacctttgcagataaaccccaaatccctaaccccatacattctgaagtcatcttaatttccttttaatcccccaaatcctgttgacatctcagatcccagttgctaattagccatgcttctattcaatgtgttatatgcctagttattgggcagatgcatactctcatttgataataactagctaaacccaaaatgccttttatggatgtgatatttcatcattcaaatctgattaataagaccagctngaagaaattgcgggaactgatgttttagttgaagggttaaaaagaaaataacatttggaatagtgacactgaaattaagtgacattaagaacaaatatctaagtttctctctccacaccgtggtagccagcccctctttcttttctctcattttcatggggtatgaagaacttttacttacatcatcctggtgcagcgtttttcccccttgaactactgacatttcaggctgaatgactgtttgtcgtggagtctgtcctgtgcattggaggatgtttagcagcatcctggcctccacccactagatgccaagagtgtctccagacattgccagatgtttcctggagggtaaaatcaccactgtcttagaatatacaaaagcaactttgtcactctaaaatactatgcagatgtgtggaattatctcatttattacttccaatagccgagtggtttgtgtagatgggaagatggggagagttgtttaaatgacctgcttcagatcccactgcagatctgtcttagtcctatgctcatgagattacactgcaatcaccacaagcttctattctaaagggttttaatcattctttcagataggaaagggtgttgtccccaattcaccaccagaggacatctctgagagttagccgtgatattcctgggcttgataggacatggagcccatgctagcttttcatctaaatgctgctagcactgctcacatatttgcatacagttcttataggacaatgcagccatgcgcttgcttgnagaggagacntgtagatctttcctaatgtttattttgggttaagttctctttgcaggggtatccataactactgagaattagatccttatgtttaaatggcataaaatgcaatgtgtgaatgaggtatctccccgccctccaaaaacaaaaaaaaaatacatagcttttcatggtcacgagggctaatctgattctggctgccactgtggaaggcttagttaatctaattaaatgaagctagtgcctcctgatttcctagtcctgctctcccttctccatcaaggaatggctttaatggcccaacaaagggctcagcctggtgcaccatgaatttgaaataatgtcccgcactgggttaactgaactcttctgccagcagagctgatgccatctgcccatttattgacagccttgtcagcaaaaatctggagtctgagggttggcaggcagccaacttgctttccactgtctctccagtgtctcagtaacagatgttgtgcctcatgcctggagctgctgttggcaatcgctgcatgctcatgttatttatcagggcgtggagggagggcaggaagggatacatgttttccaggaaggaatttgtattcctttccaggttcttggtttgcagatt

SEQ ID NO: 238327 - DNA, 437 bp, Homo sapiens
gtggtatgaaaatgttcacaatattaagttgtacatatatatgctgtagacatttttactttcagtttctgttttcgtcagttaagtttttacatagctactcttttttaaagtcagggaaggcagacattttctttgtactgagtggtatgagatgctgcatttcctgtcaagtatatgctgatcctgtcgaagttttaccacctgcagttaccactttttcatcttttttactgactcgtagaagatgtgtgtgaagttttgacatatttccccactgtcctataaagtgactttgttggtcgatatttaacttccagaacattgaagagaatcatcttcgggtgacataattttgagttagggtgtgtatgatagaaattgttatgcttatcagaaggcatttattaaattttgtggccatttacttaacatat

SEQ ID NO: 238328 - DNA, 451 bp, Homo sapiens
tttctcctgcagatgtgtggagtttcccagcagcctggggtacctgggaagctcacctactcctactccagttcttttgttttcagggttgtctcattaagttttaggctgttttgccatttgcctgtgtggtaggcagaatcatggccctccaaagacatccacatcctaatcccccaaaacttgtaaatatgttagattacacagcaaggggaagttaaagttgcagatggagttgagattgctcatcagctaaccttaaggtaggaaaattattttggattatctcggtgggcccattgtaatcacaggtgtccttagaagtgtaagagaggctggacacagtggctcacgcctgtaatctcagcactttgggaggccgaggtggaaggatcacttgagcacgggagtttgagaccagcctgggcaacatagggagaatcccatctct

SEQ ID NO: 238329 - DNA, 464 bp, Homo sapiens
ctataacttactttttcatacatggcaaaactatatttttctcattacaaatgccctagctctccccacaaagttattgtgaagtctccaaatattgctaatttgtcccttaaagcaaaaatataaaacactttgtgacatatgaaaaatgttcaccatgtcctttagttgcttcaagatatagcatataaatctttgagtttctaaacagaaccatactatctagatatttttgtctaaaagatttaaagcttaaatgtgctacctttttttctctcttgcagctttcaagtcacttagcctgctccagtctccaagatatacattatttttccaataaatcaataaataaaattggtatttttgactacttcttagtataaatcttgtctttgtatcaacaaatgttcgagtgcattttcattgtatgactaaatttctattaaaaatgtaaataatttctg

SEQ ID NO: 238330 - DNA, 392 bp, Homo sapiens
gtgacctttaggaaggcatccatctggacatttgcaaagtggattctcatctttcagtctgtatcatttcaatatcatctgctacagagaggcaattagataaggaaacaggagtttccgatcacccccaccccccgatggccgtgacttccacggaagcatcctactctccggagagcctggtttgaatcgcacctttgcagagttccagaaacctgtttaggagtctctgagaagctcccctcactggagccacaaaatcccatctccacatgcagttttctcctggcttgtttgatgcggctgaagcgctggccacagccttgcaggaagcctcctggagtggagacagttgttaaagggcctgaataaatctgttcttggacaactat

SEQ ID NO: 238331 - DNA, 951 bp, Homo sapiens
gtcatgtccttattgggatgggagggtgctgagtgctggggctgtgatcagcagtggcaacctgcaacagtattggttagttttaaagaatgtctaaaaatgaaagcctgagtgttctgatgctagctgtccaaagagccaccagataattttaatagtgacctgcatactgtagcttctgcctttatcaaagtttctcttcactcccttcttcagtaaagaatagaggacataagtcaattctgtgtgccatctgttgtcgtttttacaatttctcaaattaaagagacaggccaaaaatttaatgtcgtgttggatcctagaagctcctctagaagagagaaaattgcaactgaatttactttgtctctcttgagggggaaaaattgcatattgctatgtcataaccttttacttgtagtcccaatttggtgttttgaattggattatgagggcttctgcatggaaagactgatgtgtttgggattcagcagcctttgttcacatggttctgagtgacattgtggtaaagttgccagtacagtggtggtgcaatggcttttcatgggggtaatgaaatgcatagtctcctcaatgcaaaaacattttaagacgtttcaagatatttcaaattacatcagacaatcctgtttaaaaagaggttcacctcagatagactgagaaacttacctcccagattatgagctactaactggcagatacattttaaaaataggtaattgataggcagaacacagagtttttagggcagccaaactgctctggatgatactacaatggtggatacgtgtcattatacatttgtccaaacccatagaatgtacaacaccaagagtgatccctaatggaaagtatggactctgggtgattatgatgtgtcaatgtaggttcatcagttgtgacaaatgtgctactccggtagggggtgtt

SEQ ID NO: 238332 - DNA, 2195 bp, Homo sapiens
  misc_feature (737)..(737): n is a, c, g, or t
  misc_feature (2058)..(2058): n is a, c, g, or t
tggtctcgaactcccagcctcaaacaatcctcccaccttggcctcctaaagcactgggattattataggcatgagccaccatgcccgaccctctaaatccctttgaaagtgggttcatgaagcatctgcacaaagggcggctgcctccttggtggcaggggctggattcactgtcttcaggtggctgggacaggcatgccaccaccttggcttctggctctccagagcttgggagcctctctgccgcttgtcccctgttcatgctgcacttgaacccacagcatggaagagccgctcactgccacttcaaagtcaagggccagtttcattcagatcaaggtgatgatttcccaaattgaatgtctccaagctgacttgctcctctctgagaacttctcattatggccaccggtagaagccactgtgtttgacctgggtttgggttttgtttcagcagcaatgtttgagagatgaatattttacactctagctggtgagagctgcaaggaaatgtgggggcattcttattgagctcccccccaccactttatggaggaggaaactgagtctcagaatggggacaggactagggggctaactagctgcagagacagacctgggttttggcccctgatggcaagtttccccccagatgcctgtgctgaactggggaccctccttaggagggggatggggatcttcctttcaccaatgccagccaccccaattctgcttcnaggcttttgagaaaagaccatatgattctgaggtctagggtgtgacaagcacaggcctcaagagttgacagggctcaggttctagctctgtgatcctggggccatcgccttgcggggcatttgactcacccgtaaaatggagcaaatagtactcccttacagcgctgttaaaattaaatgagccactttattgagagcacctgccacaagtgctctgtataagttcctttcatttattccccactctgggccaatgtacttccacactgcagcatcgtggttctttctcacctcaacctgtaggtgggtgctgtttgtgtaccccttttccagatgaggaaatggaggctcccaatggtgacatggcttggtcaaggtcacaaagctaataagagttggaactagaactagaacctcaaggcttttcagacatcagatctacgttcagaacgctgatcattctcttactagccaggtggagtcctggggaggcgccctgttccctacagcaacgctgtccaccgacggttcttcagtggtgggaatgtcctgtgtctccactctccaatacagtcgctgctggccacaggctgctagcgagcacttgaaatgaggctggtgccactaaggaaccaaattgttaattttgtttaatttcaactaattgaaatttatagtgaaatacccacatggggctgtggcttccacacaggacaacccaactggaagccactgtgtctttgcattacgtcagaggctaatccttgccatcagagccagtgggtgtggtgaggctctgtgtgtgaggccctggacatttctcaagcacctgctggtgctcggtgagtattaggcgccccttcctcccgctggctggctctgtaagtggggagaccaagtggttgtgtctctagaatggaggctgaggtgtgttcgtggcacatctgcccagtaatgcggatcagcaggaggtgtctttcctgcacccaaggaggcctcccattgcacctgggggcttggcttcacctatgtgacctcacatccaggcctgcgcacccgtatctgagctggcattgtaagaagccctggatggccccatgaactggctcctgacagcagcgcttgtggcaaaccctccctgcccacaaaccccccagtggccacacctacaagagtgccccttaccggccaggcgcggtggctcacgcctataatcccagcactttgggaggccgaggctggtggatcatctgaggtcaggagctcaagaccagcctgaccaacatggtaaaaccctgtctctactaaaaatacaaaattngctgggcagggtggtgcatgcctataatcccagctacacaggaggctgaggtgggagaatcacctgaacccaggaggcagaggttgcagtgaactgagatcgcgccattgcactccagcctgggcgacagagcaaaa

SEQ ID NO: 238333 - DNA, 644 bp, Homo sapiens
ttggtatgaggcttaagatgataagacatgaactctaagaactggtggaagatgttgagttggtgcaaaggggattgcagttttgccattgcgtttaatgcttttaatgccagtggcaaaaacagttccctttgcaccaacctaataaatgatctcacttgatttatagttagcttcctccaaatgtcttccctctttgtagcggatatagattatggaggaaccagtctgggcctgggctgaaactgtagctgggtcagccctccctcccatcaggcctgcattcccctacctctgcaggtgctgctctcttcccagggcacaggccacctgaacacacttggttgaccaaaacattttaatgcaactatgacttagtaataatacagagggttggtaccatccaaaaacatacctaaatgtacattgtctaataaactctacccttaaaagcacaatctgatgggtgaattcactgtggaaatagtgaaacttaagttgaagcatctccacacatacctacaaacacatttaaaatttgttgtcatagaatgtaattgtgaaaaagtcctaaagtgtacattagtagattgttttataaattgtactactaagtcccaaaagaatgtcactgaagtggtgcg

SEQ ID NO: 238334 - DNA, 619 bp, Homo sapiens
ttcatcttctcaccccgtcctcaccacttccttgtcttcttttggactggcttgtgtttacaacattggattagcagttgtaaggtcagcaatgaattcccaaatagcattcagcacctattttcagcccttcttaatttttctgtgacatttgtacctttttaaagctcttttcttggttctgatgacctgagatatcttgattttcctacctcattggttcttcaactttcttcctctggctttgccattttctcctttctcctcgtcttcattgggggtcccatctgccctctgggaaggttcagcagagggtatctatacctactccgcgttttcaagggcctgcttaatgaatataaatgctccaagggcaccaaatcacaatttctttttacattgcaatccagccccttctcctgactttccttggcaattttactaacctagctcttgtttggcttcaaattctgttttaaaatggaatctacctgctacccaatgagctaccagttcttatcagttttccttcatttcacattgaatgtttttgccttatttttggcctatttctcaacaatagtgttgctattcattctatataactctttcctccccc

SEQ ID NO: 238335 - DNA, 834 bp, Homo sapiens
  misc_feature (310)..(310): n is a, c, g, or t
aaaaaaagaaaaaaaaaaagggagaagcaaaatttacatggggatcttttggtaaatgtttttccagtttgtctttttaaaatggtctctaccagaaaaaaaaaaaaaacaaaaaatctccgctcttttgcccaggctggatttctttgttcctattctttttcttatttactctttctgttttcttgtttttatccatctacttcttttcctctataatctttcttatatttctttttcataatatgtacattatcttatttcaatttcatttttcctcttattcttatatcattttcccctccacatntaatctctcctctctttccttaatctagatttattattctcatctttcttcttcatttatttcctctatactactctctttctctacatactatgatattcattacttgcccgtcctactatctcattatcccgacgtctcgttagtctacatcactctcgatctctctctttctcctcttatacatgactctattatctttctactattacattccattatactactactctactctctattctactgtagtctgtatattctcagctccttctcctatgctatctctatgctcctccgtgttcttattattacattcgtctcttcatttactttatatctttccatttcctttctgtactctactcgtcttatcatcttctatactttagtctatgttactctcattatctatacttcctcctaatctacttttgtctcctctgttctcttatactttactattctttactatactatctctatactcgtcttctactctctctatctctgtatcatatccg

SEQ ID NO: 238336 - DNA, 381 bp, Homo sapiens
ctaattctcaaagcatcctcttcaaacctcaactttttttacctcaggaaattgatgtcatgaaaatattttccatatcccgcaagaaaaggttcccccccaagaaatttttcaaggtattcatatgcttaatataaataaatttaaacttttatatgcaaataaatataagaatgttatgaaaaatttgaatgaagggaagagcgattgatagaactcaaggaagatacagttcaaatcaggaagataaacgaaacatgtattacaatgatcccaatcagaagaaatctatggaatcatgggcctcctataggaaaagaaataaccaaatttcatttttatacaaataataacctgaataaattgaaaaatacaccaaaa

SEQ ID NO: 238337 - DNA, 1479 bp, Homo sapiens
  misc_feature (127)..(127): n is a, c, g, or t
  misc_feature (449)..(449): n is a, c, g, or t
  misc_feature (453)..(453): n is a, c, g, or t
  misc_feature (538)..(538): n is a, c, g, or t
  misc_feature (562)..(562): n is a, c, g, or t
  misc_feature (1101)..(1101): n is a, c, g, or t
  misc_feature (1242)..(1242): n is a, c, g, or t
  misc_feature (1316)..(1316): n is a, c, g, or t
  misc_feature (1457)..(1457): n is a, c, g, or t
  misc_feature (1474)..(1474): n is a, c, g, or t
gcagagggagaggagacaggaaggaaagatgaaccctgagtttgagcctgagcacctgggggctgatgcattggacaggcccttcacaagaggctggcatggagtggcctgttaataatggaagagncatctttctaaagtctttgtaaaacgcaaatccaaccaagtcctcccctgctttgaagcctccgtgagtcccctttgccctgctgagaaaggctgctcaatttccctagcctgacccatcaaagcatcctcctgattccctgggattccttcttcccactcctccaaccctatggaatgactccagagcacccagcaattcctctctttctcaaatctacatctttgccgggccgctaccctggtcttctccttgccacttttcaggactcagtagaaaggtcacttcctctagtgccagggtctctgttccatctcaccanttcntatggggcttttatcttcgcttggacctgtgagttcccagaggccagctttgtgtctcctgctcactgctgtacagctaagtccngggatggggtagccactccgcaangctttgaaacatccaatcaacacagtaaatcctggagatggggaagacacaggggtactagaggagaagggtgagggattggggtcagggtgtggagacacctaatgtaacaaagtcgttcggcttctgcaggaggccattagctctgcacagctcctagtctgctttcagttccaaaaactcaaaagttgcaggttcttcagatgacgctgggtgatgttaggtttctggatgcaccaatctgactgggctcgacttggaagttaagagtacataatgttcccatttctatgaacagctcagaaggaatccaaaaagcagaagtcaaaaacagggattgggaagtaagcacccatacttggtagaaacagaactcaagctgttcacttttaccatccctttaaaagcaacaagaaaatccttagggaaaaagatacacatggtgccttcagcggcttcttccagcaatgggacagaaaggccatgtgggcacacgggctttggagtcagacttgctggctataattttccactttagncctcaacgtcctcatctgtcaaatgggagcagtgttggctcgggatgaaatgaggtgtgtgctcagagcctggggtgacgcacctgccttgacgcgtttgaatgcaacatgagctgcccttattgtgtggttctcacagtntccagtgacatcagagcaaccacagtgacaacagtttcatttttctgtgcacccaccagtaccctgccatgggncaatagtgcgtgagtaaatgcagccagtttacaggcatgctggctcatgcctgtaatcccagcactttgggaggccgaggtgggaagatcatttcaacccaggagttcaagacctgccagagcaacagagtgagacccctntctctacaaaaaaaaanaaaaa

SEQ ID NO: 238338 - DNA, 1394 bp, Homo sapiens
  misc_feature (803)..(803): n is a, c, g, or t
  misc_feature (847)..(847): n is a, c, g, or t
ggtagtggctgctgtgaccgtctcccagcatatcctaagaatggaactttctcaggattcttcatggctcatggaagaaaacatataagagcatgcagatcctgtgtatctacggcagggaacattagctccctgctcagcctccatggaaccacaggattgtattgtatattcctaggagtgaaactgctgggtcatatggtatctgtgtcatctgtttgaggaaccaccagacggtttttctaaatgcagcatttttctgttcctaacaacagcatatgggggttctgatttctccacatcctcaccaatgcttgttattgtttgactttttgattctagccaccccagtggatgtgaactgatatctcactgtggttttgatgtacatttctgtattagtcagctagggctatcataataaaataccataggctgggtagtttaaacaacagaaattctcatgattctggaggctgggagtccaaaatgaaagtactaataagttggtttctggtgaagcgtctcttcctggcttgaagacagccactttcttgctgtgtgtccatgtggcctttcctctgtgcacatgcagtgggagagagagaatactctggtgtttcttccgcttcttataaagatatcagtactactggattagggtcctttcctgtgacctcatttttaccctttttgcctccttgaaggccttgtctgcaaatacagttacactgggggttagggcttcaagataagaatttgggaaggacacaaataagtctataacaatttccctggtcacnaatgatatcaggcatctttttatatgcctattaggctttgtacnaataaatgattccagaaatcttaaaaagttatagttttcaatgtcatttttagaataaaaaggtaaaatcatcttattagaagtgaagcacaattaaggtttttgtttgaagccataccaacaaatagcatcacataaagagtgacataatttagatcaagtatgttgctgagtcactaaatgtaaattattggatcatattgattgtctaaaaaggatatccctaaataagtaacatagaaagatcattataaaagatcagtaaagttgggccaggcgtggtggctcatgcctgtaatcccagcactttgggaggccaaggcagacggatcacgaggtcaggagatggagaccatcctggctaacacggtgaaaccctgtctctactaaaaatacagaaaattagccaggcgcctgtagtctcagctacttgggaggctgaggcaggagaatggtgtgaacccaggaggcagagcttgcagtgagccgagatagcaccactgcactccggcctgggcaaaagagcgagactcagtcccaaaaaatt

SEQ ID NO: 238339 - DNA, 741 bp, Homo sapiens
  misc_feature (734)..(734): n is a, c, g, or t
ggtagtggctgctgtgaccgtctcccagcatatcctaagaatggaactttctcaggattcttcatggctcatggaagaaaacatataagagcatgcagatcctgtgtatctacggcagggaacattagctccctgctcagcctccatggaaccacaggattgtattgtatattcctaggagtgaaactgctgggtcatatggtatctgtgtcatctgtttgaggaaccaccagacggtttttctaaatgcagcatttttctgttcctaacaacagcatatgggggttctgatttctccacatcctcaccaatgcttgttattgtttgactttttgattctagccaccccagtggatgtgaactgatatctcactgtggttttgatgtacatttctgtattagtcagctagggctatcataataaaataccataggctgggtagtttaaacaacagaaattctcatgattctggaggctgggagtccaaaatgaaagtactaataagttggtttctggtgaagcgtctcttcctggcttgaagacagccactttcttgctgtgtgtccatgtggcctttcctctgtgcacatgcagtgggagagagagaatactctggtgtttcttccgcttcttataaagatatcagtactactggattagggtcctttcctgtgacctcatttttaccctttttgcctccttgaaggccttgtctgcaaaaaaaattttttanccccccc

SEQ ID NO: 238340 - DNA, 954 bp, Homo sapiens
attttaagtacctggaaaaaaacggaccagatttttaaaggcaattaataacagcttgtacgagcgcttgtttcatttgacttggcatcaagtaaaggaagagtaaatacgccgtgaaagacgccatcgggcttttcctccacttctcccagaccacacagcacatcagcagccacccttgctgcccactcaggaatcactgtagattccaatttttaaatggctgcttagacgacgccaatagagttctttctccttacagtaaggcggcagtgaatgctaacaggtatcgagttctctgatcaggaacaaagaactccttcaggaaactcactcactttcctggtccttgttaacctgtcacgtaaattctttttattggcacacctgtttactaattatgattgattgctatttatgccaagggagcatttcccaggcgtgcctcatctgtttactcatgacacagtgagcctactttatttacacagtgccgtgggtttcctcttttttcttttctgtttttggtggtgggggtggcactatcacttgttatttatcagggtagatcatacatttggatcgaaaagagaaaccggcaactagatcctaaaacacatttatcaacctgagtcacatcgggaaacatatagactttaattccattttgttgaaaattcattcaactttggtgcttgtccaaggacttatgatgtcaatttctgacataaatcataaccccgagtatatatgtattttcaaaagaaacaagtcatcttaaagtaatatttttctatatgctaattgatacatttttatagcaaattgaaaattctgagcaaactgaaagtatgcttaacaacaaaataaatacagcatatatggttagcacatacatttcttactgtaaaggcagaagtgaatttgtgtcttacaataaatctgtaaatccag

SEQ ID NO: 238341 - DNA, 402 bp, Homo sapiens
cagagtttgcagtgagctgagattgtgccactgcactccagcctgggcaacagagtgagactccatctccaatttagaatatgtaaattctaatcataatacacttcatgagaagtgtattatgtaggtaaatgctgcaggataaaaaaatgctacgggataaaaattccaggtgaacatctatagtcttttgcctgaagtaaagagactgtcatcttggttaactttcccaagtaacaaatataatttatactgtacattgagcctcactttgatgtctcaaacttccctactgcatttgtccttccacatagaccttttgtgttcctagacacagagttaccttcggaaaccctttaactctcatggcgatggaacaaattactgtttcttcagttgatc

SEQ ID NO: 238342 - DNA, 420 bp, Homo sapiens
tgctttgaccattactgattttgaaggccgaggaatgatcacatagaaaaggcaacagagcctggaccagaagggctcccagatgaaatgcattttggctgatggctttcattggaacactgacatgaaggagctgtcagggctctgggcggtttccctagggtgtgaaggccaggcaggtcatgtggttacttttcatcctctgcactacttcctgagagctggacagtgtcattgagtttgggcccatggacaacgcatacaagggaaatcttggaactgcctgaccgttgttcagggcctctggtgctgaaatcctgcaaatctccaggacagaagtcaagatgttttctgagaagtctccaaagtctctccaatgaataagaaaataaagtcaagctagtggcttctccttcgaat

SEQ ID NO: 238343 - DNA, 404 bp, Homo sapiens
tcactcaagtttaatgaccttcactaccagaagcccagaagcccagagttctagagttaactgcatcctacttgaccctggtgtggtattggccaacaaagaggcagcaggacaaagaacacacaatggagcttggggctcaacaacctgggatctggggccagactccactttgaaactttgggcaagttatttcacctctttcggcttttattccttcctctgtaaaattatcctctctccccaaaaataactgtttggtgaatcttaacctcttttatgattccgttacattttacaattcttccttcaagagagagctctgcacaagactctgagtaacaattgaagagatggatccaagcctcagttgggctgatgagagaacttccttggcctcccta

SEQ ID NO: 238344 - DNA, 286 bp, Homo sapiens
attgtgaacctgagattggccttttgagatgtcttttcaggtttttccatttctgacaagtggttggcctcacctggacctgccaaccagttctgtggcactcacccaggaactgactcagcataagaggatagcttcgactgcctatgagttcatcctcaagccaaccaatcggtgctcctggctcactggacccctacccaccaaattattcttaaaaaccctgatccctgagttttcttttcttttcttttctttttttaattatactttaagttctggcaaa

SEQ ID NO: 238345 - DNA, 505 bp, Homo sapiens
ttttttaagattatccaattccaagagaggagggggctggattggcaggacaatttgagatggtttggaggagggggaatacctaccttgacctccttctctcttttctgtccatgaatttgccttcctccaatcctgtgaccacttacgcctaaggccactcattccaaacaactagcttggtcagattccatgctgaccaacacaatggtgatcatctgggtggacagggggactacaacccaccctataaaggtctttgcctcctgtgaatctgagatttccctctcctagattacacatgtggaaggtagaagcttaggaaggaagaaaaaactgccttacttgagcatgcactaatgccaggcactgccctaggccttttacacttgccgactcatttacctttcatgaggacctttggaagaaggtgctattacctccattgaacaagtaggaaaactgaagttcagagatgataataaatttgaacttgcctgtaaaa

SEQ ID NO: 238346 - DNA, 443 bp, Homo sapiens
attttggcacatttttaaaggtaaagaaactcgaaaaatagcaggtgcatgaagagcactttgccctttgtgctgtttcttaggagagaagatgaaattccagtatgaaaggcactctgtactagaaggaaaggcaacatcctaagcttcaaagacaagaagtagaatactgtacagaacttgctaaaatttattatttaagtctccccacataatttagtcacacaatgtcaatttaattcttggacccagcagagaccctaacagaatggaggtgtaatttttctacccctagagtagagcatggtaccatgtatactatgtaatgttaatataatatatagttcatactctgtattgtgtctactaaatatagtatgttaatttggatgtatactatttatgtagtatatagttgattcaaataaatactgtttaatgat

SEQ ID NO: 238347 - DNA, 728 bp, Homo sapiens
tcagttagtttttttttttttatagatcctcaattgttgttagtgatcactgtcttccctggagaagttcagcctctttgcagaaggatcttccagtccacttaagcttggctgctgtctgctcttttggagttagatagaatgaagaaacactcagggcactcacacaaaccaaacataatcacacacatatgtctgatgactctggatttttggtttattttcttgagaagataaatgtctggacttccaaaatgaatgtgtcataaaggaattgcttgactgcctggcttggagtagagacttggggatttaattgcttattatacagactttgagataatattcctattttcagaccataacacacttcatcttctatggaacctactacttctaatagctgatggtgtctggattctactaagctaaaatagcttatttttattttcgagacagggtcttgctctgtcatccaggctggagtgcagtgggcatgattacaacttactgcagcctcaacctcctgggattacaggcatgagctaatgcatccagcctcactttctgttttgctggtagaatagtcattttgaggccaggtgcagtggctcatgcctgtaatcccagcactttgggaggccgagacaggtggattacttgaggtcaggagttcgagactagcctggccaacatggtgaaacctatctctactaaaaatacaaaat

SEQ ID NO: 238348 - DNA, 632 bp, Homo sapiens
tcagttagtttttttttttttatagatcctcaattgttgttagtgatcactgtcttccctggagaagttcagcctctttgcagaaggatcttccagtccacttaagcttggctgctgtctgctcttttggagttagatagaatgaagaaacactcagggcactcacacaaaccaaacataatcacacacatatgtctgatgactctggatttttggtttattttcttgagaagataaatgtctggacttccaaaatgaatgtgtcataaaggaattgcttgactgcctggcttggagtagagacttggggatttaattgcttattatacagactttgagataatattcctattttcagaccataacacacttcatcttctatggaacctactacttctaatagctgatggtgtctggattctactaagctaaaatagcttatttttattttcaagactccatctcaaaaagaaaaaaataacctagctgggcatggtggcgtgcacctgtaatcccagctactctggaggctgaggcaggagaatcacttgaacccagagggcggaggttgcagtgagctgagatcgcaccactgcattcacagccttggtgacacagcaagactccacttc

SEQ ID NO: 238349 - DNA, 564 bp, Homo sapiens
ataatttccataaattcctgagtgctcttggtttttatgtattctttacgttcttcttccttgaatcttatgacgtctctaaagagagctcgttggatgacaagtgatgaaaacaggaggtccttattcccattggcactgttagtttggctttcagtatccaccgtcttagtttttctggcagccattctgataatacctctatgtgtatagagaactatttcagacagttttcaaaacaatgataagctctataaccatgtcagtgtcccaaagtatctaaacatcgattacatttttcatgagcctagatttttctatagacaaagaaaagtttgccctctagtctttttttaatcaagctccagagctaacttatagtgagttgcttagaagtggaagaccctagtcattgcctgactctggggcccaagtagatcatgtgtgcatttgactgcaagccacttggggtcttaaacaactccaggtgtggactttctgtgtatagtcaagacattcttcccaaaatcttaaataaaattgcttgttgcccattaaatttta

SEQ ID NO: 238350 - DNA, 611 bp, Homo sapiens
ttctcctgcgtgctttccccgtgttcttctgcactgttatctttcctcttcatctgaggccatgtctttaccttatgtggtgctgatgtgggccggggaagctgtggcaggggcccgggaaccaccccagggggatgcagagggagtggaccctgtggggctcggccatggcagaattctgctctgattggctttagatcgtcgcctgtgacagcgtttcctccgaggagtgtgttaggaagagcagaaatgcctcctgcatctttattagatccctccaaatggaaatccagcagaaagccgatgttcttgtaaatatcacgacctccctccccatgaggtgtttgtagaacagttatttactcgttttgttttccccacctgcagtttacagaagaaaatcaagaaagcgtgtttttcctccatgcataatcccatccccgactgtaacaacaacaaaaccgtcctcctgttaggaagcagcagtgacttctttaggcaggaaaaaaaaaaaagcgtgctatgccagaaagcaggagcagctgggaagggagagggagggggccacacctggcctacccccagtcaccttttacccagggatcccctga

SEQ ID NO: 238351 - DNA, 479 bp, Homo sapiens
tcttatctaatgtaggttcattcatttatctgttcatttaacaaagatctgagagctactacactcacaacttcctgcatgatctagttaccctgggaagtacagagtcgtaaatttggacatatttcagagtgaaagggatgctattaagaattactaagggacaacaggcgaaatcaggacatatggtcactatgctagggaaaatgtctgggataaggaaaaaaagtaaatagtcaccctttaaagctttttctgtgcccccactcatgtccacactcattcccccctattccagagtgtcagtctatgatgaaataagaagagtattatattccgtcaagaattaggaccaatcacattttggagaaggcattgtactgaagtaaatgtttttattgtctcatattaccatagtgggttaattttgtcagacacatgtggttgaaagtgaaaaagccccacaacaatcaaattga

SEQ ID NO: 238352 - DNA, 510 bp, Homo sapiens
agtcacggtgcagctgggaacactcacgtctctagaatcaggataacttgttccaaaccgcctttcccaggacagcatgaaaggacttgatgtctttttgcctcagacaataggatgtttttccttagccaaggtctaggggttgagcaatctcctcggaggaaggataaaggggtgggcagtgtttgaccatgcttctccctggtgtgcacatcctctgtgcacatctgctctgagaagtgtggaagacacagaccatttttccaagtctcccaaggggcttgggagcagtgagactattgcagaataagtaagaaaagcatttctgaggatttggccttagttggctaaagaaaattttcttggggacccaaaatattaacttcttattctaactagcattccccatttatttaagatggctttgtaagattgatttcaggtgattacatcaattcaacgagaatgtagaaaaaaatttcatttaaagggctctggaaaaaaagttac

SEQ ID NO: 238353 - DNA, 173 bp, Homo sapiens
atattagacctttgtcagcagcacagtttgaaaatattttctcccagtctggagagaactcccagttgcagttgcttgtgaggacttcgccaaaaattctttgccaaggccaatgtcaagaagggtatttcccaggttttcttctaggatttttaatagtttgaggtcttaca

SEQ ID NO: 238354 - DNA, 527 bp, Homo sapiens
caaaagaactggttcaaaaacaagataaagaattccacacgccagaaacacagcaaaagcgcaaaacgtgggacgagaatgaagctgtgggcttgttgcatgtggggcctggcaatcgggctgagagttcagctgctgtgggctgaaggggtctgaataaactccagcatagaggggacagggccagctcactgcttcctcccgtttcatgcaaaccagcaaacagagacaaaggcaaactgccgctgctgtgcacctgggctatggcttcgagaacaaacgactaaggagatggaaactcaccaagccaaacccacttcatgggttctgaacagggtctgtgtgatcttcctaggttacccaggccagagtcccaaactgccattcgaagatcagaccgtagaagtgtggatgccccgatggacaggagcgggtagctgcagaagcattaggcaggaaagagcaaaggagcacagtgaatttgtgaattgatcatgtctctgctccaaataaagaaacaaactaca

SEQ ID NO: 238355 - DNA, 971 bp, Homo sapiens
caaaagaactggttcaaaaacaagataaagaattccacacgccagaaacacagcaaaagcgcaaaacgtgggacgagaatgaagctgtgggcttgttgcatgtggggcctggcaatcgggctgagagttcagctgctgtgggctgaaggggtctgaataaactccagcatagaggggacagggccagctcactgcttcctcccgtttcatgcaaaccagcaaacagagacaaaggcaaactgccgctgctgtgcacctgggctatggcttcgagaacaaacgactaaggagatggaaactcaccaagccaaacccacttcatgggttctgaacagggtctgtgtgatcttcctaggttacccaggccagagtcccaaactgccattcgaagatcagaccgtagaagtgtggatgccccgatggacaggagcgggtagctgcagaagcattaggcaggaaagagcaaaggagcacaggagagccggtgaaagagcagctccttaggcaacatgtttgcctcctcctgtttccatggaagacatcacaggggtgggtctctcacctgctggcctttgctgtaaagggatcgggtggcaagtgagcctcttcactgaggccccagatgttactgttcggggctgtctattccagggtgactggtttctctagagatgactcctccggtctcctgcctggggaggaggacgtgcctgagccagggtacgcctgcatgtagatttcctggggacagacagcaggaaggaaccgagctttcagagcccaggcccccagccttaccttttctcctgctttcctcccctgctccttctcccagcctgcagctttgactcaggtcctcagtcttggagcttgactccatctctcgtctcctgcagctgggagcgggcaggtagccaggctgtgtggggcttggagaggacctgggtgtcccacccttttgtagagaaact

SEQ ID NO: 238356 - DNA, 522 bp, Homo sapiens
ccacctccttaagccagaattattgaatgttctctatgtgccagaattattattatctcatttgattctcacaacaatgccatgaagtctatacagacataccttggaaatacagcgggtttggttccagaccaccgcaataaagctaataccgcaataaaatgggtcacacgaattttttggattaggcttcggcttaagggaatgttgtggctggtttgatgttttatccagaccgctaacactttctccctatcagcaatgaggctgttttgctttcttatcattcctgtgttcactggagtagcacttttaatttccttcaagaacttttcctttgcattcataacttggctaactgtttggcacaagaggcctgcctagcttttggcctatctaagcttttgacttgccttcctcactgagcttaatcatctctagccttggatttaacgtggaaaattggcctaattcaatattattgtgtctcagggaacagggaggcccagagagagagagacg

SEQ ID NO: 238357 - DNA, 667 bp, Homo sapiens
  misc_feature (638)..(638): n is a, c, g, or t
acaaatataagctgcagtttgggagaaaaacagtggaaatcaccaatatgacaaagggcatgtgtgatagttacttgtacttgtcactgtgaccgagcaccagggtgccaggacatttggccaaacatgattctggttgtgttccagagagtctttcagatacgattaacattgggatgggcagactaagtgaagcagattgccctccttaataggggtgggcctcatgcaatcaatcaagggccaggagagaattaagaggcctaatgggaaacaaatgctttcctgggtatccagctttccttccatcttgggaatttcagcctccataatctcagaagcaaattcatgttacaagttcagccatgagattggtgaagccagccaatgaataagggtgtgttctattatacgattcagtcttcttttgtaaacgattgaagttctgcatttgaagtaggaggataggagggagcaagtccacctaggatgataacagctgaatttctcaacatacacttcagagccgtaggggtcaacttagagactcaaaaatctcacccataatcctgcccctaaacaccagggctagggaacactgtggccctcaggtgattttctaccaccaacaccccccntccaccccccccccgcacccgccctgcct

SEQ ID NO: 238358 - DNA, 295 bp, Homo sapiens
ttacaagttcagccatgagattggtgaagccagccaatgaataagggtgtgttctattatacgattcagtcttcttttgtaaacgattgaagttctgcatttgaagtaggaggataggagggagcaagtccacctaggatgataacagctgaatttctcaacatacacttcagagccgtaggggtcaacttagagactcaaaaatctcacccataatcctgcccctaaacaccagggctagggaacactgtggccctcaggtgattttctttagccaggtctgggagccacacga

SEQ ID NO: 238359 - DNA, 359 bp, Homo sapiens
aaaatggaagggtaccactatttgcagatgaaatcgtatttctggaaagtcaaggtaacagggtgaaatagctctgggattactgagaagtcttaataaagtgtctggatataagataaatatactttttttggacaaaataaatagtacatccttaatagcagtacaaaatattaaaacaaaaatatgaaatttgtatgatcaatctttacaaaatatgcacagacctgtataaatttaatactgggataaaaggaagacaaataaatgggaaactacatttctgggtgaagagacaaagcactaaaaatatgttctttataaattacttcctagttttaatgaaattccaataaaat

SEQ ID NO: 238360 - DNA, 353 bp, Homo sapiens
tgatattactggcagtaataacagtttcaccaaagtgaagggatgtaactttgataatttaggagtgttctcaatcaggcctcaacaccctcctagatggaattgtctttaaaactggtgctggaagttgataaaatcaaggctttatttttactgtaaaggttctgatgggccttgttctaaactctttgtaaactataaatcactattagaattttgtttagagtctgaaactgcctttatcgttttgaatttttagagccgggggctgaatttcctgttcgtgtacaacatgtagctcttattctaggaaaaactccagtgacattcttgttcagtaaagtgaagtaggc

SEQ ID NO: 238361 - DNA, 366 bp, Homo sapiens
caaatcaacatttcccattccagccaagatgcgcacacaccaaaacacaggcactagtcactctgctcactgccgaagtttgacgtggtgaggctgacacttgttcctgttggtctctagcaccactgatgcactcaaggcggggaggaatgagctccactggaagttcagtaggtggtccccaggaaggatggaagagcagatggtcactctgagttaggctagtggagcttccagtagcaattccttcagggctcaccaaatgttactagccatacaaaaaaagatagttccctgaattaggcctgctgagcttctgctagtaattccttcaggggatttcctccatggccgtaagtatgcata

SEQ ID NO: 238362 - DNA, 507 bp, Homo sapiens
ttcaatcttgtatattgttataatatatgattttaccacactttattgggtattctcctgtggatgggctttgaggttgtttctcttttttgctgttacaaacaatgtggctatgaacatttttgtatctacttgtgcacatgggcaatagtttctttaggattaaactaaggagtagcattgttaggtcaaaggatatgcatgtcttttactttacttttcaccagatgtcaaattatttagaaaattttaaaaccatcaattttatagttggtatatagctctgggcctcatccaccttcaaaattataatcttcaaaatagcaagattgttaatatttgtaattttatattatattgttagtatatatggcaataaataaaacataccttaatttcttgaatattatggtagagaaaaacgtttgaatcagagcccttgatttttcacttctaaattgaattggtccaaataaatttattcagcattcatttttttttcactta

SEQ ID NO: 238363 - DNA, 353 bp, Homo sapiens
catggcacccagccggtttatgattgctaagagaagccagaaatgtgtatatttatttgaaacctctttgttgttaggtttaagtaactattttaatcacaaaaaacatctgccagcatccagtgtgttcgtgcccctcgcagtcacaggccttccccgcactgtcctggcttctgatacgacatgttagctttacctgtttttgttttgctttttcttttttgagacggagtctcgccctgttgccaggctggagttcagtggtgcgatctccactcactgcaacctccgtctcccgggttcaagtgattatcctgcctcagccacctgagtagctgggattacaggcacgc

SEQ ID NO: 238364 - DNA, 671 bp, Homo sapiens
  misc_feature (520)..(520): n is a, c, g, or t
attaaacattttttaatcaaaaaaataaagtttcaaagactcttaaaacatactaaccaatcacaaagtgtagattttacttagatcctaattcaaacaaactaaaagcaaattaggctatttatgaaaccactggaatctggacattgaatgtttgataacaccaaggaaatttttaaagtttagttttgacaatagtattgtggttgtagtaaaaagaaaagtctttatcttttaagaaaaaaacatatgtcagtcctattcaaactgttctgaaaaatagaggaggagggaatacttccaaactcattttacaaagccaggaatatcctgatacaaaaaccaggcaaagacacatcataaaaaagaaaactacaggcctatatccctgatgaacaccgatgcaaaaatcgtcaaggaaatactagcaaaccacattcaacaatacattaaaaaagatcattctttatgagcaagtggaatgtattccaggtatgcaaggatgatttaacatacacanatcaatcaatgtagtacgtcatatcaacagaataaaggacaaaagccagtatcattcaattgatactgaaaaagcatttgataaattcaacatcccttcatgataaaaactctcaaaaactaagtataaaagggacagacctcaatataat

SEQ ID NO: 238365 - DNA, 359 bp, Homo sapiens
tttgagacagaatattgttgtttctcccagtttggtttacaacggcgccatctcagctcactgcaacctccgcctcctgagttcaaggaattatcctgcctcagcctccctagtagctgggattacaggcacatgccaccacgcccagctaatttttgtattgttggtagggacagggtttcaccatgttggccaggctggtctcaaactcctgacgtcaagtgatccgcctgcctcggcctcccaaagtgctgggattacaggcacgagccactgtgcccagccactgcagcaattttaaagtggaattgagcgtcttttttgtcttgtagaaaaaggacaactagctgaagagatta

SEQ ID NO: 238366 - DNA, 676 bp, Homo sapiens
ggcaaactaaggaaatcagcccaaccaatccagtctttgcctgctgacatgagaactgacaaggcaacatggccctggagatgacagcatgcaagaaaagaaagctggtttgagggactgattaagagcatgtgttgtttgggggtgtgcgaaatcggttctctattgtatagcattttaggatgattgtgtgactacagagcaggtttaaatcttaggcaagaggtacagtgttgaggcactatccactagagaggggagcatgaggatgcaaaatagtgcaatagtatgtgcattgtgcagaaaaaaataataattctttaaattttatgctagtttccaaattatagaaatttggaaacacttcagatgctttctgcttttaacaagatggaaacagtttcgtaagtgttttaagtgtaataatatttgctccactgaagggtaaccctccaagggttttcatcgtgagcaccttcccataggctgagaattagagcacagattttcatggtgtctgtttagaataattttgataaagctaagaccttacagaggcaataagatttgcctctttagtagaacaatggaaatggaactttaatacagcatgtagatccgattgctgcttttatacatgtagacaatctgactatggtacatggtgtgctttggg

SEQ ID NO: 238367 - DNA, 404 bp, Homo sapiens
aatatatgctgcacaaccgacttttatcattaggagctcaacagcctcatacatagaaacaaagaagagccttgaaagcaggtgacagggagaagccagagcctgagtggtcctttccaaatggcaagcatcctgttaatgagaaggcccctgatgactatcactatgagaaaagttcaagaagacgaacaggcagtactgagatgtgtagaatggaatgtaaataccagttctttctctctccatccctttcatggaaaaatgcttcctggatagaagcatgctcatttgccattagacagttccaaaaacagactttcttactcctgctgcttacctgctggatttttcaagcactaaatttgtaactttttgaaataaagcagtgcatagatttcctattt

SEQ ID NO: 238368 - DNA, 209 bp, Homo sapiens
gataatatctcattttttaaagtgagaaaacggagacagtttcagtactgtcctgagatcacataatcagaaagtggtagagtcagtacttaactctgggtgtctgattttcagtattgtgttctgtctactatatcatgctgtctgtaggcaaaattcctaatttgtgtaatttttataatgtaataaagttataattttataactat

SEQ ID NO: 238369 - DNA, 456 bp, Homo sapiens
gtagacagagctatcacataataatgaaattaacaggtaccatgtattaaaatagggcgtcatttatgtatgaagacaacctgcctggtcgtctcagtcatccttttttaagaaaattgttttgttttaccttttccctagtgttcccccttgccccacaagaatgtatgaaaaacagtacatatttacagaagagaagattataatggtgttacaatagatgatcactgaagaaatcaaagctaactggctcatccaggatctatgacctatattttgttcaacagaatattttcttttgatacctccattgtcatttttacaaaattaactaggaataacttgggaggctgaggcaggagattcgcttgagcccaggaagtcaagactacagagagccgtgattataccgttgtcctccagcttgggtgacagagcaaggctctgtctcaaaaa

SEQ ID NO: 238370 - DNA, 344 bp, Homo sapiens
ctctttttgcttgcatggtttctgaagagaaagtttgatctaattctttatttctctgtggataagatgttttctgtgtgtgttgatttttttctttacctcttgcttctttcgagatatcttattggtcttaaagttaataaggaaaaaactaaagttttgcttttgatttagttttctctttgtcttattttctgcagcttcactatcatttgcctatgtaaatattttggtatttatcttgcttggtgttctctgaacttccaggtttggtgtttcttactaaagacattctttcctgttacagtgttattgatttgtacactccccttcctcgcctcccc

SEQ ID NO: 238371 - DNA, 483 bp, Homo sapiens
agccacgccatgtccctaaccagtgggctttaggggtaagcctgtggctgcatgtttgaaggagccccacagtgggcctgggggacagaggctgcatgtctctccggagtgggctctttctggccatgactgtggctcacacactcatgatgtaggcagcccctgctctgggcgagtagggtctgtggggcccagcgaccaccaaagctcacaccagagctcacccacagctgggaggaccaactcctgcctcagcagtgccgccagaatctctgcgtgggtgcgagggtgctgggcactgggccaacctggcgaagactggcattctgactgaggttaaaggcgatttgaagaaagaggagctgaggggatgaaagaaccatcagaaaacccctgtgtgtctcattctgctttggagtggggtcccctgcagagccccgggtgctgcatgggccgggcggactccagggaagtccaggcgag

SEQ ID NO: 238372 - DNA, 499 bp, Homo sapiens
agaactcaggaaagtgccctacttacaattacagctttattatagaggctgcaactcagaaacagccaagtggaagagaggcatacagaaggtatgggggtgcatcacggggcatggagctttcatgccctctgtggatacaccagcctcccagcacttcagtgcgtttaccaactgggaaacacctcaaccccatcatttagacgtttctatggaggctccattatataggccatcactggccactggtgactgaactcagcctgcagcccctctcccttccttagaggctggaagatggagctgaaggttccaaccctccaagcatggccagcgctgccttgaaaccatctaatgacccacctgagtcaccacattaggggttcattataaatgacaaaagccactcttgttactccagaaatcccaaggcttttaagaaatctgggccaaaaactagggacaaaaatcaaatatatatatattgcaattttatata

SEQ ID NO: 238373 - DNA, 195 bp, Homo sapiens
gtattcctcttttgagggggcagaggaatggagtggcatgctgtatatttagttatcttacagttgttcttaaaatgtgacagccagatctttgaccaaaaagagaaaacagattcttggctctcctcatttttgaagacacatttttccctcttcattgttatgtatagagacttaaaacaagtttatttaggc

SEQ ID NO: 238374 - DNA, 648 bp, Homo sapiens
gccctctactactaacttgaccaaaaatgaatttaaaattgcctgtgaaataacatcctctcaaatgtttgctgatgaaattcaagttgaaatgtattcattgcaaaagtctataaacctgtggattatatattcaaaataagacaaaggcaaataaaaagcagctgtcttcatgaatagacaaaagttgctttcaggaagtataaattatattctgcactgaccaaagaatagaagttattgcatctgtggaacatatatctggagttactatactaaagagcagggcatgaatttagactaaaatccatccagattacactcattctttaggccactgctggatacttcatttacatttgattcttggctgggcacggtggctcatgcctgtagtcccagcactttgggaggctgaggtgggtggatcacctgaggtcaggagttcgagaccagcctggccaacatggtgaaaccccgtctctactaaaaatacaaaaattagccgggcatggtggtgggctcctgtaatcccagctacttgggacctgaggcagaagaatcacctgaacctgggaggcggagactgcagtgagccaagatcatgccattacactgcagcctgggtgcagagcgagactccgtttc

SEQ ID NO: 238375 - DNA, 865 bp, Homo sapiens
aaaatacaaaacaaaattagccaggcgtggtggcgagtgcctgtagtcccagctactcaggaggctgagggaggagaatggcgtgaacccgggaggcggagcttgcagtgagccgagattgcgccactgcactccagcctgggcaagagcaagactccgtctcaaaataaataaataaataaatacatacatacataaaaatgtctcctcagacaattctcaagggcagacaggtttgggaaccaccataaccactagtaagaagatagaggggattaagataaaaaatgtcagaaaagactgaaagagcagtgagtatttagcttatataataatttcattaatatttgaaagtctgtgtttcgtaaagcctgttctatggggtcctcagaggtaagaactaagattaattggaattagctccaggaagaaagatttcaattcaacaaaagaggaaatttccaatgaaaacaataaaaatcacgtatttatgcagtgtctgtgatgtcgagacactacactaagtaccttacacattttaatcctcacagagaagaaatgcttttcaaaagaagacatacacatggacaacaagcatatgaaaaaatgctcaacatcaggaatcattagagaaatgcaaatcaaaaccacaatgaaatgccatctcacatcagtcagaatggctattattaaaaagtcaaaaaacaacagatgctggggaggttgtggagaaaagaacattcatacactgctggtgggagtgtaaagtagttcaaccattgtggaaagcagtttggcgatttctcaaagaactcaaaacagaaaggaatatatatcacactatattcatactatattcacacta

SEQ ID NO: 238376 - DNA, 486 bp, Homo sapiens
  misc_feature (116)..(116): n is a, c, g, or t
gtcgaccggctgcgagaagtcgacagagggggagtttactttgttttcatgtagacataagttttcaatatctttgggtaaatgccgaggaatgtgattgctggattgtatgatanagagtatgcttagttttgggagaaactgcccagctgtctttcaaagtggctgttccattttacattcccacgagcaatgaatgagagctcctgttgctccacatcttcaatatttggtattgtcagtgttctggatttgggtcattctaatagggtgggccctaatccaatctgtcattataagaagaggaaatttggacacaaaaagagacaccaggggcgtatgtacacagagaaaagatcacgtgaggacacagagaggtctgcaaaccaagaagagaagcctcagaagaaacaaaaccagccaaccccttgatcttggacttgtagcttccagaattgtgaggaaataaatttctgttttaaagcc

SEQ ID NO: 238377 - DNA, 1527 bp, Homo sapiens
  misc_feature (724)..(724): n is a, c, g, or t
aattaaatggccacaagtgcctggtggtccctttgttggtccacacagatctgcctgccttgggagaggtatctggggctgactggtgggtgttccattgcagaaagcttctgagacacacagaagtcgccacagttgggagacgtgatacccgcagtgctgcagtcctgcttgccttgttgttgttctctcaacttctacattagagacttagttatgatgagtgtggccgcccttaggaaggcatgttatatactcacttaaatgcctcagcccccttttttaaaatactttgttcagtggttaatggcatagactagagctagactgcaagagtttgagccttaactctatcccatgttagctgtgaccttgggcaggtcgcctaatctctctgtgccttagtgtcctcaccttcaaattaagataatacaggcttgttatgaggattaaatgagttaatatttataatgcacttaacacttaaaatgttcttgttctttgtaattgtttttcaagatgaagtgtgtaactaataaagtgaggggggattaacagcgaggactggcttgccaccaacagagcaaatctttagattcatattcaactcaagcctcccagtttcaaccctgtatacaactgtccagagtctgtacatggaggcacgcagccacgtggccgagaggagccgctgggcaggacaagcacgtgggcggctgccgtntgtccctgagccctcagagctgcccctagcagtgctgttggacagcaggaatgttgagttaaagactcacatgcactttaaaatttgagcagatagaaatgtcagtggggactgcctctgtctgtgcttaggttctccactgtacgaggagcagagctgtgcgcctaggaggtcctcagtagtcctggcagtctggctgactgcgcacagcgaggggtggggactgaggaagcacaggctgctttcctgagtgcagggtcctccgtctgttaaggctccagttgtcctttgtcttcaggtgcctcaacataatttagtatttcttgactctccagtggtgtttcctgccaaaagcaaatttggtgtttctgcttcacctgtgtgttctttggctctaaataggttttcttttcctggtgaacaatatgggctagaaggagcagctgtggctgatgctctggactgaactttctcatgaaaagcagcttgaaagaaggttggttggttcagggagcactaaatcaaagctgagagcttcttctagcccgcgtgctgtgggcaccgcagccccaggcatcatgctgttggcttatgattggagatcgcagactgccgaggtataaggacagcagaggggccacatggtggtcttcattcagggacattttactcttcatcacactgttttgcctagaaacagattatttaaattggaagagaccaaaaaaattataataccagaatttaaaaactcctctggccttttggaaaaattgccgtaaaaactctgatctatatagtgc

SEQ ID NO: 238378 - DNA, 461 bp, Homo sapiens
tgacagacatgcatgtttagaaaaatttgataaaattaagcctctgaccaggggttctttaactctgtaaggcatagaattctggagttttggcaagcaaaaaagaggtttcgaccctttgaaacctgggaactcacatttcctgctttgaaagggagcatacagctctcactactactttatgcaaaagctttagaaattctaactgtgtgcacacctgttctgttagcagtttagtttcttcacatttatttttattccaaattctaagacatgctctccatttcagattttatttgctgttagttcttccatcggtccatgcagatttagcccacaacatagctgtaggttagtcaggggaatggtctaagttgcctaaccaaagtcagggaagatttattctgcttttacctttaaatggaagagttcatgttaaatgagaatgatgtctagttggg

SEQ ID NO: 238379 - DNA, 161 bp, Homo sapiens
aaaaatctatggagcaaatggaaaacagaaagaagcaggagctgccattgtagtttcagaaggaaaaaaaacaaacaaactttaaaacacaatgatcaagaaggataaagaagggctttacgtaatggtaaaaggttcgactcaacaagaaaatctaacta

SEQ ID NO: 238380 - DNA, 446 bp, Homo sapiens
gagatttgcatctgagaaactaagccctggtcatcatggggaagtggaagggtatgtgctcatgctggggccctcactttggggcttaaggatctgggaagctggctagactctcagggctggtctttgtcacccttaagtcccccaaagaagggttgtccctttcaggccctctactatacagccataactccttagatgccccccagggcagagccagctcttatccctcacactggatcttttacttggcccagctccctctcccctccaccccagggcactcacctcttgtgcagccccctgggtccatagccctgcaaccttggtgacattaccctgcccacacccccctacccagagagcctacagaatgcagaccacttgcctcccataactgctgttacgtctcatccacctcttctgcgccgtcctcgctggaggaa

SEQ ID NO: 238381 - DNA, 590 bp, Homo sapiens
aaggacctgggttacctgcagcagtggctgaaggcctttgtaggtgccttcaagaagagcatctcactgtcctctctggagccacgaaggccagaggaggcaggtgcagaggtcccgctgctaccactggatgagctgcatgtgctggccgaacagctgcaccaggctgacctggagcaagccctcctgctgctcaagctcttcatcattctctgcaggaacctggagaacatagaggcaggccggggccaagtgctagtgccccgagtgctggcactgttgaccaagttggtggcggagctgaaaggatgcccaccaccccagggccgaggcacgcagttggagaatgtggccctacatgctctgcttctctgcgagggcctctttgacccttaccaaacctggcggcgccagcgcagtggggaagtcatcagctccaaggagaagagcaaatacaagttccctcctgctgctttgccccaggaattcagcgccttcttccaagagagcctacagaatgcagaccacttgcctcccataactgctgttacgtctcatccacctcttctgcgccgtcctcgctggaggaa

SEQ ID NO: 238382 - DNA, 587 bp, Homo sapiens
tcatcttgtccctggttcggatttgggctctgttcccccaaggccctttttcctaaggcccttttcccgaagccccattttccaaaggcccattttccaaagccatctctacaaaaaattaaaaaaaaaaaaaaaaaaaaaaagccaggtatgatggtgcccacctgtagtcagagctacttgggaagctgaggtgggaggatcgattgagcccaggaggtcgaggctgcaacaagctatgatcatgccattctactccaactggggcgacagagcaagattctgtctcaaaaaataaaactttcatcctcctcactgctggtggtctcttactggtcctttggaaccagccagatgtatatgtcttcctaattagattattagcttctcaagggcaatatattaatctatatattggcttctgatactggcacatggtacttagtatttttgaatgaatgagagtgatgaaatttggattgtcatactttccctgataagtataagcttttaaatcaagattttatcgaagtattttgagatctgttcttatattaagaaatgaatcttctacccaccatcctgta

SEQ ID NO: 238383 - DNA, 878 bp, Homo sapiens
aagtcaagacttttgggctttatcagtagataaacatgagccataggttttctagcaatagaatattttaacctatatgaatatatgctttataggtgagactgctatttaatgagagttttaaagtaactaaaccttgttgacagaattcaggatggaaagttttaccctaaataaaacttcaggatattgaatatgatagcaaagttccagggtatgttttatatttatgaacaattttcatttgaatatttggagcttgggggttttggtgagacatgttcatgtatgttatatacaaactttcaggcctggcatggtggctcacacctgtaatcccaacacttcaggaggctgaggcaggaggatcgcttaagcccaagagttcaagacccatctctacaaaaaattaaaaaaaaaaaaaaaaaaaaaaagccaggtatgatggtgcccacctgtagtcagagctacttgggaagctgaggtgggaggatcgattgagcccaggaggtcgaggctgcaacaagctatgatcatgccattctactccaactggggcgacagagcaagattctgtctcaaaaaataaaactttcatcctcctcactgctggtggtctcttactggtcctttggaaccagccagatgtatatgtcttcctaattagattattagcttctcaagggcaatatattaatctatatattggcttctgatactggcacatggtacttagtatttttgaatgaatgagagtgatgaaatttggattgtcatactttccctgataagtataagcttttaaatcaagattttatcgaagtattttgagatctgttcttatattaagaaatgaatcttctacccaccatcctgta

SEQ ID NO: 238384 - DNA, 743 bp, Homo sapiens
tatgtgttcaaaatcattcgttataaggtagatgcaaattaaaaccacaatcaagaaccagtccacatgcaatataagggctaaaatttagaaaaagaacaagataatactaaatattggcaagattgtgaagcaagtgccatacttttctggagggaatgtaaaatgtttcaatgactttgaagaacattttggtaatttctgtaaagttaaatgtatagttaccatatgactcagcaaatctactgcttaatatttacccaagaggaaaaaaaaaacaaaacacctatgtttacaaaacggttcaccgaaacttcattcatcactgcccaaaactggaaataacccaaacgtatacagataggtgaacgaataaacaaactgcatattcatacagtgaaattctactcagcaataaaaggaataaactattcatatatacaacaacatggatgaatctcaaaaatattatgcttacctaaagaagccagacacaagggagtatgtactgtatgactccttttatatgacatttgtgaactaatctccagtgatagacttcaggtcacttgttaccctaagtgagagacagttagactgactagttaaaggcacaagataacttccttgggagatagaaatactttgtatctttttgggatcatggttatttcaaaagactttggattttacatgtatcatggatactttttatttcatgaaaattatacttacaatgttga

SEQ ID NO: 238385 - DNA, 441 bp, Homo sapiens
tacctcggaaatttctcagttgactggatcctttctcttcctcttctccaacccctgctgactgtatgctccactactatgacaccaattctgtccactttcttccttattgatatgaatatactaactttaagccctctgcctccaatgggttcagtttttgagaaattcagaaaccccaaaagcaaccacgtgtggccaaagccattttctccatcaaattatatgttagaacaaaatattatattaagagtcctccataatattagaggaaagttttcaccctcatttaagcagataaccttaatatgtccaatcttccagagaaagaattctaataaaaatgtaaagtgggaacagatgagaaccaacttttatacaaattagtaagttttatgcttttgtatttgtacctaactcattactaaaatttttaagtga

SEQ ID NO: 238386 - DNA, 807 bp, Homo sapiens
gaggatcacgatgtccgtcctcaggagggcttctctgaggacgtgacattgagtgacagggagaggcgtccaggcagcaggaaccccctaagaggtggctgcagcttgggagctagaaccaaggccagcttgagcggagtatcctgaggctgtcatcaccccacctctctcattcccactctgggccctggccctgagcatgagggtctagcagtggagaaaagcagggagaagctcctctacaggctagagatttcaggtttctctgcagagggtgaagccaggcagcccagagccgccctctgcaggtctggggcctcaacccagcccttcatctgaggctgcaggctcccagactgcgttttctgttgggggtgcctggggagagttcaggccatgttgcccacttttttctatacgtgtggttttatcaaggctgttcttttttcattgaataaaatctcagggacatcattttgtgtcaatagatgggcataacctttatttaaaattgagatataattcacattccacaaaagctaccttttttgttttttttctttgagacagggtctcacccaggctggagtgcagtggtacaatcacggcttacgcattcttgacctcccaggctcaggcgaccctctcagctcagcctcccaagtagtgggaattacaggcacgtgccaccatacctggcttatttttatagagatggggttttgctgtgttgcctagactagactggtctcgaattcctggactcaagcagttaacccgcctcagcctcccaaagtgctgggatta

SEQ ID NO: 238387 - DNA, 963 bp, Homo sapiens
tgcacttcggtcctctgtggttcttgactgtcccggtttggggagataaagtgagaaaagtgagcggggaaaggatggctgtgatcagaagcaatgtgtggggcctcgtcctgcaggaggagctcagggactggttcctggaaagttggaggacagcaagagaggggaaacttggtccccaaatgtgtacccttatgagctggaaccctgtacacgtcctgagatctgcagtgacacatgctgaaatctgggagggcagatgacggggcctgaatgagactggggtcagggagggcttctctgaggacgtgacattgagtgacagggagaggcgtccaggcagcaggaaccccctaagaggtggctgcagcttgggagctagaaccaaggccagcttgagcggagtatcctgaggctgtcatcaccccacctctctcattcccactctgggccctggccctgagcatgagggtctagcagtggagaaaagcagggagaagctcctctacaggctagagatttcaggtttctctgcagagggtgaagccaggcagcccagagccgccctctgcaggtctggggcctcaacccagcccttcatctgaggctgcaggctcccagactgcgttttctgttgggggtgcctggggagagttcaggccatgttgcccacttttttctatacgtgtggttttatcaaggctgttcttttttcattgaataaaatctcagggacatcattttgtgtcaatagatgggcataacctttatttaaaattgagatataattcacattccacaaaagctacaaaaatcagccaggtgtggtggcgggcacctgtactcccagctactcaggaggctcaggcaggagaatcacttgaacctgggaggtggaggttgcagagagccaagatcgagccacttcactccagcctgggcgacagagtgagactccatctc

SEQ ID NO: 238388 - DNA, 1073 bp, Homo sapiens
tgcacttcggtcctctgtggttcttgactgtcccggtttggggagataaagtgagaaaagtgagcggggaaaggatggctgtgatcagaagcaatgtgtggggcctcgtcctgcaggaggagctcagggactggttcctggaaagttggaggacagcaagagaggggaaacttggtccccaaatgtgtacccttatgagctggaaccctgtacacgtcctgagatctgcagtgacacatgctgaaatctgggagggcagatgacggggcctgaatgagactggggtcagggagggcttctctgaggacgtgacattgagtgacagggagaggcgtccaggcagcaggaaccccctaagaggtggctgcagcttgggagctagaaccaaggccagcttgagcggagtatcctgaggctgtcatcaccccacctctctcattcccactctgggccctggccctgagcatgagggtctagcagtggagaaaagcagggagaagctcctctacaggctagagatttcaggtttctctgcagagggtgaagccaggcagcccagagccgccctctgcaggtctggggcctcaacccagcccttcatctgaggctgcaggctcccagactgcgttttctgttgggggtgcctggggagagttcaggccatgttgcccacttttttctatacgtgtggttttatcaaggctgttcttttttcattgaataaaatctcagggacatcattttgtgtcaatagatgggcataacctttatttaaaattgagatataattcacattccacaaaagctaccttttttgttttttttctttgagacagggtctcacccaggctggagtgcagtggtacaatcacggcttacgcattcttgacctcccaggctcaggcgaccctctcagctcagcctcccaagtagtgggaattacaggcacgtgccaccatacctggcttatttttatagagatggggttttgctgtgttgcctagactagactggtctcgaattcctggactcaagcagttaacccgcctcagcctcccaaagtgctgggatta

SEQ ID NO: 238389 - DNA, 378 bp, Homo sapiens
gtagtcccagctacttgggaggctgaggcaggagaatcacttgaacccacgagacagaggtttcagtgagccgagatgatgccatttactccagcccgggtgacggagcaagactctgtctgaaaaacaaacgaacaaacaaaaactaaaccatcagatcttgtgagaattcactcactatcatgagaaagcatgggagtaaccacccccaagattcaatcacctcccactgggtccctcccacgacaaatggggattatgggaactacaattcgagatgagatttgggtggggacacagccaaaccatatcaagcatgatcacaaatatttatctgatttccttccccaaaccccaatggaatgatagtaaagaaca

SEQ ID NO: 238390 - DNA, 440 bp, Homo sapiens
gccctctgcactcagccaacagaatttgacagaagtctgagctttctggtgccaggtcacaaaaaaacctcccacctatgctcctggaacactagcccttcagatgccccctcacagaagccagcctctgtgtcatgggaagcccaggccagactgaggagccacatgtggacccttcagcccaccaacagcaactgctgttcacacgggtggccgtgttgaacatcagcacagttccacctccagacggctctatgcagtctgcaggaaaatgaaggaacacaggaattctcagcagatgcaggtcaagaacaccttcttccatgttcagtcccaccttggcagaaatctgcaacatcctggaaaggacagatgttgcattccattaaaagtgggagcgaaacccactttatttttttttattttttttatttttattt

SEQ ID NO: 238391 - DNA, 2783 bp, Homo sapiens
  misc_feature (780)..(780): n is a, c, g, or t
  misc_feature (1366)..(1367): n is a, c, g, or t
  misc_feature (1384)..(1384): n is a, c, g, or t
  misc_feature (1387)..(1388): n is a, c, g, or t
  misc_feature (1401)..(1401): n is a, c, g, or t
  misc_feature (1407)..(1407): n is a, c, g, or t
  misc_feature (1436)..(1436): n is a, c, g, or t
  misc_feature (1459)..(1459): n is a, c, g, or t
  misc_feature (1461)..(1461): n is a, c, g, or t
  misc_feature (1471)..(1471): n is a, c, g, or t
  misc_feature (1508)..(1509): n is a, c, g, or t
  misc_feature (1512)..(1512): n is a, c, g, or t
  misc_feature (1921)..(1921): n is a, c, g, or t
  misc_feature (1923)..(1923): n is a, c, g, or t
  misc_feature (1932)..(1932): n is a, c, g, or t
  misc_feature (1937)..(1938): n is a, c, g, or t
  misc_feature (1941)..(1941): n is a, c, g, or t
  misc_feature (1952)..(1953): n is a, c, g, or t
  misc_feature (1957)..(1957): n is a, c, g, or t
  misc_feature (1965)..(1965): n is a, c, g, or t
  misc_feature (1968)..(1968): n is a, c, g, or t
  misc_feature (1976)..(1976): n is a, c, g, or t
  misc_feature (1980)..(1980): n is a, c, g, or t
  misc_feature (1986)..(1986): n is a, c, g, or t
  misc_feature (1989)..(1990): n is a, c, g, or t
  misc_feature (1995)..(1995): n is a, c, g, or t
  misc_feature (1997)..(1997): n is a, c, g, or t
  misc_feature (2013)..(2013): n is a, c, g, or t
  misc_feature (2018)..(2018): n is a, c, g, or t
  misc_feature (2020)..(2021): n is a, c, g, or t
  misc_feature (2031)..(2031): n is a, c, g, or t
  misc_feature (2039)..(2039): n is a, c, g, or t
  misc_feature (2057)..(2057): n is a, c, g, or t
  misc_feature (2073)..(2075): n is a, c, g, or t
  misc_feature (2083)..(2083): n is a, c, g, or t
  misc_feature (2085)..(2085): n is a, c, g, or t
  misc_feature (2088)..(2088): n is a, c, g, or t
  misc_feature (2100)..(2100): n is a, c, g, or t
  misc_feature (2102)..(2102): n is a, c, g, or t
  misc_feature (2112)..(2112): n is a, c, g, or t
  misc_feature (2115)..(2115): n is a, c, g, or t
  misc_feature (2123)..(2123): n is a, c, g, or t
  misc_feature (2133)..(2133): n is a, c, g, or t
  misc_feature (2137)..(2137): n is a, c, g, or t
  misc_feature (2140)..(2140): n is a, c, g, or t
  misc_feature (2145)..(2145): n is a, c, g, or t
  misc_feature (2153)..(2153): n is a, c, g, or t
  misc_feature (2171)..(2171): n is a, c, g, or t
  misc_feature (2177)..(2177): n is a, c, g, or t
  misc_feature (2180)..(2180): n is a, c, g, or t
  misc_feature (2201)..(2201): n is a, c, g, or t
  misc_feature (2204)..(2204): n is a, c, g, or t
  misc_feature (2206)..(2206): n is a, c, g, or t
aaatataccttggaattttccaactctgtgctttgctcctttggccccaccctgaccactttctccaaaagcaaaagtagagtgacgtacctttcaaagtccaccaagtttactttgtttataaagccactgtgcccagcctaggaaaaaagttttttaaaattaagactctatatgtacacatttcactgtttcagaaaagtgaaatgcagtttataaggaattttctgttgccattcagaataacaaaatattcttagatcttttcaacctaaaatgagtagtccattttaataattattctacctaccaatatcactttccatgtaatagaaataaattgaaattcataggtagaagctttacgtttagactttattttcatttgaattgacttgaatgtaaggccagagatttttgcaagttggattctttgactaaggattcaaaatattgatagcttttagcagtttgagtggcagtagggattggaaatgtcatctaactcttttgccattccaccagaagagggcagcaaagcaaaccaagaggaaatttatgggtcaaaaaatttagaaaagtcactcgaaattcagagagcttagtacaaaagcttgtttgggtggcttcagtgtttgggagtgtatatgaagtccctactgccagaggccccatagaccattttgcaagaggcttgagcaaatcttaaagcttaaatatatgttcctgcagactgaggcctgtcaaataaaaatcattgaccttgttgaatgctttccntgtgctagacactgctaatctctgtatacatatttattcaaacttcacaaaaacctcatgaggtagactgtcttatgaatgaatctgaaaaatacagactttagataatgtttataaagtcacacaaagtagtacaaagccacaatttaaatctagctcctattctaaaatcctcactcttaactactgaccctattatatgcttctacatttcagagaagataggaatacaggctttaatggataagaaacatatgtgctagttaactcagttgaaaaaggggctagttaagtcaagggtcactgataagctttattttattttatgatttatttatttatttgaaacagtcttgctctggcgcccatgctggagtgcagcggcatgatctgtggtcactgtaacctctgcctcccaggttcaagtgattctcctgtctcagcctcccaagtagctgggagtacagacgcctgacaccatacccggctaatttttgtatttttagtagagacagggtttcaccatgttggccaggctggtctccaactcctcacctcaagtgatatacccgcttcatcctcccannagctgggattacaggcntgnnccaccacgcccgnctaatntttgtatttttagtagagacggggtttcnccatgttggtcaggctggtctcnanctcctgaccncaggtgatccgcccacctcagcctcccaaagtgctgnnatnacaggtgtgagcaactgcgcccagcctgaatcatttcttataccttctgacagcccaactttccagaggacagctctggggtactcgttggatgtctgtgagtacctggtcatacgggtcagtagggataagaattgtctctgggctgaggaattcttctgttctctggtttcaccagcgttgggtttgctcatgtaatgtggtcaccatactcaaatggtgtcatggctgaagttggccaccttgcttgagggacaagttgtttatgtatcagctctctgctgggtctccctttccatggcaaatgggcagctccatcctcttgactcttctaaatgcccaaaagaggtgtcatgctttgggggtacgatgtttatactccgtaaagaacatacaaggacattcactntnatttttttnttttnnttntttgagacagnntctnactctgtngcncaggctgnagtncagtgntgnnatctngnctcactgcaacctccncctcncnngttcaagtgnttctcctncctcagcctcccaagtanctgggattacaggcannnaccaccangnccngctaattttgtntntttagtaganacngggtttcnccatgttggncagnctnttctngaactccngacctcaggtgatctgcncgcctnggnctcccaaagtgctgggattanagncntgagccactgcacctgacctgctgaattgtttataatggcaagaaataggaaaccccccaatgtctgttgaacagctatcacgttgaaccacgtgaaactgctgttttctaggccaaaaatggtgagcgatcatttatttcatgattcaacctgatacatttacatagtgcaaaactgtgtcacagtttcaggcttttatgaggaaagcgtttctgtgtagaaactggaagctgttcagggcatcggcagctgaaccctgctccgttggtcagcgttactatcatctcggatcatatggagctcatgtcagccgtgtgggtggcgggtgcacagagacggtctggaaggaaacacgcggatctgaacagcagtaatcctgggggatacgggggttgggctagattacagagggctcattttctacgtcatgtattttatgatacttgaattttttgaaatgggcatttattttataacatgttaaaatgtactttttaaattaagtcattttgtaatatttgaatttttacatttgttgtacaatcaggaaaagcaataaagatttttcaaaaatag

SEQ ID NO: 238392 - DNA, 750 bp, Homo sapiens
gctcggtacccctccttccctggaggccagacggggaaagggctcagagaggtaaagggctcggagtcgctggggggaggggttcccactggaggtaactgagaggtgcaggggggctcggagaataccggctgcagggaacgaagccgaaggttctgaacggtcaagcgaaaaggccaggtgcagggaggcgaaaggaggccagaggtgaggcccggggcgcggagctgcccagggcgcggcgcaggcggaggacgaactgctgagggagggacctgccaaccgcagccaggaggtggcgggggcaactgcagatccccggaaaagcagctcctgagccaacacaactttcagtgcaaacagcaggagaaatcctgcccgcccccccttctccgggccggagcccgggtgcacgctcgtcccaaacccgccgcgctgcccaccttccggagaggaaccccgcgcgcggcagagccggacgccaggggctggacgcccaaccacctagtcactccccaggacgcagttatcgcgcgcaaagcagctgggggaccccgcaaggaaactcaggcacaatggagcccgcttctttttctgtcaactctgaatgctatgtctggtttggtcctggctgctagttcgaagctggaacatcctccagagctggggcccatttccttttatttgccttgggccccaaatgaaaagcatctatccgcatgcctaataaaaattttcttaaatcggaca

SEQ ID NO: 238393 - DNA, 619 bp, Homo sapiens
tgtagaagtacctctataggattaattcctagaagtggaattgctgggtcaaaggacacccacatattaaatttagacagtgatcaccatactgtcatccaaaaatgttatattaatttatacttaatgctaccaacccactgtgggacttttgatggatgatgtcatctttgtgctacattttctctacttgtaaaatgagaattcttatgccttagtaataattctaaatgaggtcattgttttgataggaccatggctccttcagaagaaatatatctgtaaatctaaggtgtcattttcattttcatttttttctttcatagttcctcaaaacttagttccttctccattttaacctgaaaaataaataatttgattaagagacatctagtgacttcatgccttggcactgccttcaccaattctatttttaggactcaccagtgtctggggatgtttggatgacatcaacttttacacatatcttttcatttaaaatttgcaaaagtctgcacagctatgacatgacagaagcctcccactgcaatgcctgaagatccctactgttctgagattaaaaaataaaagatgatttcctttcttaatgatttgccct

SEQ ID NO: 238394 - DNA, 415 bp, Homo sapiens
caactttgtctggctccaaggggtctctgtcccttacactggaaagagctctgcctaaaatgactgctccagtttcacaaggaagaatccaaggccctgccactgacacaaaagaaaggactggcagagtcaaaggtcaaacccacatctgtgactctgaagcctggacagtccccaccttcctgggtgtaccccacttatcttcccgcccttcgcccactttgtgcccccatcatggttcagcagccccttgcagagaaaaataaatgaagctcacacgctcagcctggcttctgcccagcaagcagctcaggcaggatggaagctgcagcctccagcttctcaaatgccagtgccccgcggcctctagcttccctacccagggaaacggaaacttcacaaatgcctgagttct

SEQ ID NO: 238395 - DNA, 420 bp, Homo sapiens
atatgcttcatataaaagtactgagttcaaagcagtattatacttgctaatcattaccaaaattctgattttgctatacttttcatcaggatttctgggacacctcccaactaaacatattaagattctagaaaaataggccgggcgcggtggctcatgcctataatcctagcactttgggaggctgaggcaggcagatcacctgaggtcgggagttcgagaccagcctgaccgacatggagaaactccatctttactaaaaaatagaaacttagccaggcatggtggcgcatgcctgtaatctcagctactcaggaggctgaggcaggagaatcacttgaacccgggaggtggaggttgcagtgagccgagatcgtgccattgcactccatcctgtgcaacaagagtgaaactccgtct

SEQ ID NO: 238396 - DNA, 347 bp, Homo sapiens
tcctattttaattagctaggtggtggttttttcatcctacagataaggaaactgagacaccacgatgttgggtaacttggcagtatcacagctctaagtagtggcactaatacaaaaatcatgctaatcttgtgccagaaccgtttctttctatcacatttcactgtatgtgctatactgcctttcatagaaaagttatgaaatagaaatgctttatgaaggaaggagatgtgagttggtgggaattacacgtaaataacacttgtaggtagtcttagataaagggtaggaaagaaatacctgaaaacccattttagtcctgattctaccaaaactacaaaaaaaaa

SEQ ID NO: 238397 - DNA, 508 bp, Homo sapiens
gctatgaaatctactttggtattaatacagccacacctgctcagctgcctttgccaactgttagcatgtatctttttccatccttacaaccaatttgtgtctttacatttaaagtgcatttcttataggcagcctgtagttgggtcttgctttcttgctgagcctgacagtctgtattatagttgaggttcttagacaagtgtcatttgtaatgtgattactgatatagttatgtttgtctggtagctgtgtgattgctattagtcccaactgttctctgttccccttcttttcctgctttcctttagattagtcaactgttttttatgattcaattttatatatatttttgggtttattagcgataactgttttgctatcttagtgtttaggatttttagtatataattttaacttatcacagttcaccttcagtaatattatacatcctagatggtataaaaaatgacaatgatacattttcatttttttctgtcccagacacttc

SEQ ID NO: 238398 - DNA, 461 bp, Homo sapiens
ttttttttttttgagttggagtctcaccctatcgcccagactgaaacacagtggcgagatcttggctcactgcaacctccgcctcctgggttcaagtgattctcctgcctcggcctcccaagtagctgggattccaggagtgcaccaccacacccagctaatttttgtatttttagtagagacaggatttcaccacattggccaggctggtctcaaactcctgacctcaggtgatctgcccacgttggcctcctaaagtgctgggattacaggtgtgagccactgcgcccagcttatctcatcctttttaacagccataaaactgtaagcacaaacccttatctgcccaataacttactgatggacacagattgttttcaattttcttatattaccacaacattgttgcaatcaacacccttatacatatttgtgcatttgtgttgttgtcttccacagta

SEQ ID NO: 238399 - DNA, 337 bp, Homo sapiens
ccgaaaaagtttatgattagaggggaaactcagaggtaaagagtaagtggaggccaggcgtgctggcttacacctgaaaacccagcactttaggaggccgaggcaggcagatcatctgaggtcaggagttcaagaccagcctggccaacatggtgaaaccctgttcctactaaaaatgcaaaaattagccgggcatggtggcagtcacctgtaattccagctactcgggaggatgaggcaggagaattgcttgaacctgggaggtggaggttgcagtgagcagagatcacgccactgcactccagcctgggtgacagagtgagactctgtctcaaaa

SEQ ID NO: 238400 - DNA, 258 bp, Homo sapiens
gtactaaaagctgaaagcttcttgtggttaggaatagtatttgagattttggtggcatctaattattttgaacttttaaagccttaaagagtgaaatataaggccacaatacatttttctgatagctttcatagtctgttagtctgtgttgcttattttagggggacgatgtctaaattgaaatgtttatccactatagttgtaatgatctttttcagcctctttagaaagcagttcattgagcgaagaagagaaaat

SEQ ID NO: 238401 - DNA, 435 bp, Homo sapiens
tactaatgatctccctcttataaatctgagcttggcttacgtgtatcaactgaatgtggcatgactatccttgtatcagttttgggctacgcctttaaaagaactcgaagcttcactttgttctcaggaagaagtcagttgctatgtacaaagtcctactactctaagactgccataccatgagaagcccaacctatgccatgtggagaggtcatgtgaaggagaactgagtcttccagccagcaaccccagctgagcttccagccaacaaacagcactaacttgcatgggagaagctgtccaggaagtgaatccttgagctccaattgagctgcctcaagctggtgtcacgtggagcagagatgagctgtccctgacataccttgcacaaatttcagaaacataagtaaataaaagaaatatttgtattttaag

SEQ ID NO: 238402 - DNA, 534 bp, Homo sapiens
gtatgcaattcgaggtgaaatttccaagagccaaatgaaataattgcaacaggccttcatggggctttgaattcagcctcaaacattgtgataatccgatcctgacacttgccctcccctcattcactcttttaacaatcccaagagagtgcaggactgagatccgaaaatgttattatggaggggaaataaaggttattttgaatgcttcaaggtcacgtgacttgaagaagtcagttgctatgtacaaagtcctactactctaagactgccataccatgagaagcccaacctatgccatgtggagaggtcatgtgaaggagaactgagtcttccagccagcaaccccagctgagcttccagccaacaaacagcactaacttgcatgggagaagctgtccaggaagtgaatccttgagctccaattgagctgcctcaagctggtgtcacgtggagcagagatgagctgtccctgacataccttgcacaaatttcagaaacataagtaaataaaagaaatatttgtattttaag

SEQ ID NO: 238403 - DNA, 1848 bp, Homo sapiens
  misc_feature (916)..(916): n is a, c, g, or t
tgtggtttcacccagggtaaagtccagtggtacagttacagcctttttctgctgagttcaagggattttcccaacgcagcatcccaaagcgttgggattacaggcataaaccaccacacccagcttcatgttttgaattttataactcccttttcagtgagcctttccctttttctgatgagcaagccaaaattatcagtataaaaaatttaaaagagaagtttttctcccttcctgctgctttttctctgtctttctctgaaggtgtgtggaggtgggtgtgtatgtgtgtgtgtgtgtgtgagtgtgataggatctcactttgttgcctaggctggagtgcagtggcatgaacttggctcactgccaagcaatcctgcctcagcttcccaagtacctggaaccttaggcacaagtcaccacacctagattattttttaaaaatttttgtagagatggggtctcactgtattgcccaggctggtttcaaattcctgagcacaagcagtcctctcatcttgacctctcaaagtgttgggattacaggagtgagccactacacccagcccctgctgctttcttgatcttgccgttcagtttgcacccaatgctgacttgtggtttcaacgctgtatatgcggagtctgacttccagagcacttttgtaatccaaatgccacgtatttcttagccctcttccaattgtgatataagaggattccgagacccttgtgatgagatgtcttttgctgaagaattctgtttttcagaatctgggaatggagaaggtgtcattcattttgtcctcctgaacaaggctgtgtatgcacacatcaagagtggtggtgatatggtttggctgtgtccccacccaaatctcatcttgaattgtagctcctgtaatccccacatgtcnctggagggacctggtgggaggtaattgaatcatgggggtggatttttcctgtgctgttcccatgatagtgaataagtctcacgagatctgatggttttataaagggcagttcccctgcacacgtttgctcttcctttgccttccaccatgattgtgaggcctccccagccatgtgtaactgtgagtccattaaacctctttcctttataaattacccagtctcgggtatttctttattagtagtatgagaatgaactaatacaactgggctgtccatttttggaatcagagctttgaattgtggagttagctagatgtggattatactcctgactgtgtcactccctgggaaagttgtttaacttcacccttggcattggaataatgaataaataactccttgatttcttatgggaggatttcagccccaagcctacgatcaggcatagatgtcagctgggccagcacattgaggcctctgttctggtcctacttagagtcacaagtacctgtaactaatattggtaatgatgatctgaaattgtcaaaacagtctgttctttgtaataagctctacacacaaggttgtttagatatttattacattagcacttatttttaaaaggtacaaatttaggccgggtgcaatggctcatgcctgtaatcccagcactttgggaggccgaggcggacggatcacgaggtcaggagatcgagaccatcctggctaacacggtgaaaccccgtctctactaaaaatacagaaaattagccgggtgtggtggtgggcgcctgtagtcccagctactcgggaggttgaggcagaagaatggcatgaacctgggaggcggagcttgcagtgagtgagtcgagatcgagatcgcaccactgcactccagcctgggcgacagagcgagactccactcagtctc

SEQ ID NO: 238404 - DNA, 446 bp, Homo sapiens
tgagggcaggaggtaagactagagatgcaaacaggggcctacttacacaagcccctgcaggctgctggcttttactcttgagtgaaaacagggagctaccagaaagatctaacggaaatatataatctgacttgtattcaagagaatcactctggttactacaaggaagatagtgaaccctaggtgacaagggtggaggcagatggaaagatggggcccaatgcatcctccaggagaggcaggatggtggcacaggggtggcagcagggcgggactacaagtgctctggatatattttgtcaatgaagttgacaacatgcctgctgactggctgtggtgagagagaagaggagattccacgcaactgcaataatcctggctaataaaacgttggaagaccacaagagaagcaactgtggtctgtgtgcatgtgcgtgttgtggggg

SEQ ID NO: 238405 - DNA, 522 bp, Homo sapiens
ggcgccctggggccagcagacctgctcgcaggcctgacctcggcgagctgggcgctgccgcctctgtgcggggggagctctggctcaggctccccagtggtcccgagggatttgggggtgctcccctagcgtgagcagaaactctttgtgaccttgttaaagtggtccagcctcctcaggcctcgtcttcctcgttactgatgcttgtcctgcccaccccgcgagatggggaatcctaaagctccctctcgtgtctcgttagcgccctggggttgcgctgtggcccgacagacaatgctgctcgctgctggaggcttgcaagcccaagttatggagtcagactgtccgggttcgaattttcgtctctgccttgtagtagggtgaccttgggcgagtcacttaatgcctctgagccatgacttctttacctgtaaagtgggcagaacaatagcttctatgctgtgggcttaaatgacaagcagaacgcgttgtcagacttagaataaatgctcaaaaaaaggg

SEQ ID NO: 238406 - DNA, 721 bp, Homo sapiens
  misc_feature (705)..(705): n is a, c, g, or t
aggccccagggaccctggcatccctggttcgagcccagggtgcgcctcgggccgctgggggtaccccaaggcggacagaaagcccatgacgggaaggtgaggcacctgtggcaggaaaaaaaaaaaaccgcgccgcagtgaagctgggcctgtgtcccccactgacgaaagtgccttcccatcaggccttgcgctggacctcgcggacactggcgaccctggttcgagcccagggtgcgccttgggcccgctaggggtacccagaagcgggcagaaggcccatgaggggtaggtgaggcacctgaggcagagaaaaaaaaaaactgtgctgcggagaagcggggcctgggtcccccacggaagaaagtgtcttcccatcagcccctgagctgggcccaggggaccctggcatccctggttcaagaccagggtgcgcttcgggcctcttggggtaccccatggcgggcagaaagcctatgaggggaaggtgaggtttgagggaggagaggtatggcacctgtggcataaaagaaaaaaaaaaaaacctcgtgccgaattcggcacgagggccagcttatctacttccaattatgttgttgataaaatctcaagccatctgtcattagatcaaaaagcagcatacagagggtcagtcacaggatgttctgacacaacattgtaacttttggtagagatgatcccatntagaaaaagactggag

SEQ ID NO: 238407 - DNA, 2363 bp, Homo sapiens
  misc_feature (1160)..(1160): n is a, c, g, or t
  misc_feature (1472)..(1472): n is a, c, g, or t
aaaaaaatgaaaaaaaatttcttatgagagtgaatgttctcacctctaatatgtgtgggtttcaggataagagtataaatggagcctgaatactctatctaaatatctcaaaattatgaattcccccaacaagttgctgaataaactgtgcgttgtctgcctgccttgacaaacataccttcaacatttaaaggtctgggtttaaatgtagaattctgaggctcctcagtgtcccatgctggaatgtggtggccttgggaaaatggaccttagctttaggcctggccctcctctcttcccaagctcttcttcacactgcaagggcctcccagatgatgcatgaagatcctggcccatatattcagctacatccacatccctagcaaaagggaggctaaggccattcctcaggcctagggcactgcccctggagggaagaccagtggaagatgcctggaaaggccctggaagtagcttcaaggccatttcgatagagaattctgggggcctgaaaacctagagccaaggggtggacctgggctcaggataggcaagtccccttgatccaaggtatcactgtaggaggaagggcagtcagaggagggccagagctgagccttctaatgcacagggcccagagtggagtgaggaacaatgctgggattagacacccaaatctactgaattagcgaagtccaagcaaagtactgcaaacaaggtctggcatatcacaagcaactaataagtgttacttttattattaagcacctactggatgtcaccttttagcactgaggatgtaacaatgaatagaaagtgatcactgctctgggatctgtccctctaatattaggcttctgcaccaacagtttgggctacctgctgtgacagggatatggaagtttgttaggtggagaataaatggaaacccctacctccctggaaggtcaagggaaggtcttacagaggaagccatggctgagctgagatgtgaagggtgaatatgagtttagccatcagatgactggtaaaggtggacagtccagtcaaagacaacaacttactggatacatggaggtcagaaagagcatggcatttagaataactagaaaaaaaaatgtttgttttgtgcagaggcagggtacttaggaggatggcangtaatgaggttggagaaatgggcaaggaagaacaagatcgtgaatggtgagagtcatttccttagggagctacggatgtcacagtgaccttccacataattcagcatatctgctgcagaggtagccaagaaaccaagattaggacttcagctggacaatgttggcctgctggctcacagggcatggggagcaagttcacataaggcagtagggaagaggaggaaaactgcacacatccagggagattttagtgccagaattccggaaggctttcttccagaaggccctcaacctaactgccacgcctcctcncccacttttttatttagctacctcttatagactcatccttcagaacttagatgaagcattacacttcctccaggaatcccttcctaaattctcattctaattcagaagacattcttttgtatttctgcagtgtctcaaaaagtagattgcacgagacttattaattcattggtcagttttcctagaagagtggtttttaaactttatcatgaattctccaatgacttggagggcttgttgaaacacagatttctgaggcctatccacagactttctgattcagaaggacttagaattttcatatctaacaacttttccgatgaggctgatactgctagtttagggaccacactttgaggaccactgaggaaagagtttcacaagtcagagatttacagtggaggtaccaagcttttctcaagttagtttatcagaagcacaaaccatcaccctctaccaatcattataatgaagaccacttcatttcagtttatgtacaaaaactcatctccacagttatgccaagtgtatgaagacaaagaaacaatatcaggaaaagaggtttatttgattttgaatccttagccccttacacagtgcctgaaacatataagaggcagtgaataaatgcttattgagtgattacataaagagatgaatgggaggctgaggtgagcagattacgaggtcaggatatccagaccatcctggccaacatagtgaaatcccaactctactaaaaatacaaaaattagctgggtgtgatggtgcctgcctgtaaacccagctacccaggaggctgaggcacgagagttgcttgaacccaggaggcggaggttgcagtgagcaccactgcactccagcctggtgacagagcaagactccgtctcc

SEQ ID NO: 238408 - DNA, 2217 bp, Homo sapiens
gaggccaataaacactagatgttttggtgttttattttttcttttctacagacctgttaggttggtgtttcagtccctgctcaccactcccaagctcaagcccagctgcatttcaaaaaactgtaactgctaaactttcgcagcatatataacaggctcagcaaatgtggtccttgggttcaaatttctgtacttcataactttttcttccagcccctagcccagttgttttatactgtgctcttagttgaggcttttttttttttttttttgagacagagttttgctcttgttaccaagctggagtacggtggcacaatctcggctcactgcagcctccacctcccaggttcaagcgattcttctgcctcagcctcccaagtagctgggattacaggcacatgccaccacgcccggctaattttttgtatttctagtagaaatgggggtttcaccatgttagccgggctggtcttgaactcctgaccttaggtgatccacccgccttggcctcccaaagcgctgggattacaggtgttagccaccgcgcccagcctgcaagaactgtttatgtcttctgggcttctgttactgcttgaatcaaagcacttgtattgttgatcttttttcagtattgggttttgcttgagagtacattgcttcagagctcttcacaaattactgctctaatccacatgactaggcaataaggtgctccacctttgaatccttaaacatcagtgtggtattggagttgaatagctcatactggatggtctgcctttcctgacagcttttacttctggcggataaaatttatagccatctgaggaaaggaggcccatgagcagcatttaaaatctttattctccccttttttcttcacaccttgacttaggttggaagttgtggttgtattggctttagaacattcctcaagttctcattggaattgacttgactgttgtgagttaagagaatgcagtatgtagttataggagataagatcgataaaagtgacctagttatttaactatcagcatagcagacctagaatatactgaactttcgtcttaggcaccactatagtagcccagctttttatcaattttatatatgcttcctaataaaactgtctcaatagagagactaaaaatgtgtgactaagaattatattaaaaaattcaaactaatggaagtaagtcaaaaaaaaaaaaaaaaaaaagaaagaataataattagctttatgtattgagttgagactcttggcttgcagtacctgtcatttgatatgtgcctcctgttccaggttttattttagttcccactttcgcatctgaaaaatcactgccagttactcagtgagtgaagtaaagagatggcacttgacctccccaaaaatatatcattatatggattttaaacatagggaagaaaacataaggaagaaaaaatttcacaagctgagaagacctgttaagcatgcatacacaaatcatttttataaaaatgataaaacctgtacattgttaaatctccttgtccctattgtcttctttcccaggtggtttcctaattgttttggtttcttcctctcccaaacccaggctggctacagcaaacatcattcaagatgtccagcaaagggagcagcacagatggcagaacagacttagctaatggtaaggggccaaaatgaaggtgaagctatttttactatcaactgaggttgtcctcctccctgcaagatagagtggaggcctggattttagtggagagagggaaactttcctgtgttgttctgagtttaggaaactacacaggaaacaccttggactatattatgcttttgcttcttctgattttatctgatcattttcaaaatatcaataacagagctgtacttctaagaggtcaagtggtttggagttctataaagctataaggatgggcagaacctaggaaatgctgttagtaaaggagaaaaataaaatctaatggctagtaggaacaagggaattttagggaagatgagcttcccagttatattgagaggtccctttccacagtaagtagtagtttgatagagcgattacatggctgggcatggtggctcatgcctataatctcagcactttgggaggctgagacaggcagatcgcttgagcccaggagcttgagaccagcctgggcaacatagcgagaccccgtcttttt

SEQ ID NO: 238409 - DNA, 1957 bp, Homo sapiens
  misc_feature (1)..(1): n is a, c, g, or t
  misc_feature (18)..(18): n is a, c, g, or t
  misc_feature (1362)..(1362): n is a, c, g, or t
  misc_feature (1794)..(1794): n is a, c, g, or t
  misc_feature (1831)..(1831): n is a, c, g, or t
nttattatctatttttgngctattattatgttatctaaatgctaatgactctaaaattacgtcaccagctctttcttgctttgaacacaacctgtatctttcagcttgtttcttaacatctcttcttagatgtctgaagaggatctcatatttagtgtgtcctctctggaaatttttgttgttatcctgaaaccctctcttccagtgttaccacctctggtatattgccactgtatattgttcaggcttaaaaagatggagtctttcttgatttcacattttcacattttacattttatacattcacattttagacattcacatttcacattttcacattttagacatccagcccactggagggctttacctacccagtatatcctggattcaattactttgacccctccactgctattattccagaacttcacactaccattccactggactgctgcaatagcttcctaactggtctttttccttttcattccattctactcttgtcccacacatagtagccagagtgatccttccaaattcaaagtgagagccttttacttccctctgtcaaccatccaaagactccagtgatatttagaataaaattcaaagttcatgcagtaccattgttttcaggctccattgatctgactttggctacttgtataaccgtatcttatgttcccttgttcactgggctccatccttactggcctcctggcttttccaggagcccaccaaacatactcctttctcaggcatttgcactttttgtcttctttgcttggaaaaattttttctcagatattcatacagcttattcccttacttcagtcaagtctctactcagttacagttttcccagagacctttcctgacaaacttgtctaaaaagtaacacttgtcactttgtcttctcctgctttatttttctcctagtacgtaacagataggacatttaatttcatattggcttattgtatgctttccacactagaatgtaagctttatgaagtcaggggatttgtcttgttaccttatttatccccagtgccaagaatacttctagggatataggaggaattggattcactaagtgaagcagtattgtgttcttgaattttctttatgttttctaagctacctaccattcttggaacattacaacattacaacaaaactaaattcctggcatttttttttccttactggagagtagtaagccccacgaatggactgtcttctcatgctgtctcctatgagaggtcaaggcaaatacagtttagataaatgttttaataggagcagaaaactattttttttaacctggctttactaaagttaataaagccaagtgtntattagtctttgttttgtctttgtccttggaaagtccattgtccacttcttttagggaacatagtgaacatagggcaaggagaacagtgaaagaaagaataactgttataaccactaaacctgcaaatccagacagagtttgttccataaatttctagttcatttaaaagcacattcaagtttgctgcaaggttttaacatatgtatgtctcaagaccccagggtttatttgaaggttctcttgttcctgtaaatcctgtgccttgacatgcttacttaatgttttgtagtaatataagggtattacgctgggcgtggtggctcacacctataaccctagacctttgggaggcctaggtgggtggattgcttgagctcaggagttggagaccagcctgggcaacatggcaaaaacccgtctctacaaaaaantacaaaaattagttgggtgtgatggtgtgcacctgtngtcctagctactcaggaggctgaggtgggaggatcgcttgagcccgggagacaccagttgcagtgacctgtaatcagtcgcaccactgttcaccagtctgggtaacagagtgagatcctgtctcag

SEQ ID NO: 238410 - DNA, 286 bp, Homo sapiens
cagggcacttgcccctttggagtcagccaccatgttatgaggaagtctgggacacatgaagaggccacatgcacttattctgtctaaaagccctagctaattgcaaggctgacagccagcagcaactatcatttttgtgaataaataagtcttcagatgattccaaatcccagcctttgagtcaccccagctgatgtcaagtagagcaaagatgagctatcctcaccgaactccatctaaattgctgattcctgagcaaaataaatgtcattgttctaagtctcta

SEQ ID NO: 238411 - DNA, 495 bp, Homo sapiens
tctgagaatcgacagatcacagcatctggtcaatgagatgagagacacctcacccttcatgattgcccagctggccacctgctcccattgaccagctcttccttaccctccctaattcccattttctcacacacagatgcatttcttccctgctaaaaacccctaattttaggtggttgaggtcatggggtgactctgagtaacagtcagaggaacctccaaatgggtttccgaggtggctgctctttacatccccatgagcagtacagggggcgcggtttccccacagccttgccgtcgcttacctcccattttcagtgattttatttgagaaacatacattcacccgtccaaacccaaggaatagactcggagacttgaggaacaggcggagctcgcagtgagccgagatcgcacctcagccctccaggaggctgaggcaggagaatggcgtgagcccgggaggcggagcttgcagtgagtcaagatcccacc

SEQ ID NO: 238412 - DNA, 499 bp, Homo sapiens
agagaggaggagaatagggctggaggaaaaaggcagtcatggaagcaaggggtagaggaattttcttcagggatatgagaagtctcattggaggaactatgaacagagaagaaactgggaatttaggctgggcacggtggctcatgcatgtaatgccagcactttgggacgatgaggcaggaggattgcttgagcccaggagttcaagaccagcctgggcaacaaagtgagatccctgtctctacaacaaaataattagctgagtgtggtcgtgcacacttgtggtcccaggtacatgggaggctgaggcaggaggattgcttgagccaggaggtcgaggctgcagtgaactataatcatactactgcactctagcctgggtgacagagtgagatcctgttgaaagaaaagaaagaaagaaagagagaaagaaagaaagaaagaaagaaagaaagaaagaaagaaagaaagaaagaaagaaagaaagaaggaaggaagg

SEQ ID NO: 238413 - DNA, 1042 bp, Homo sapiens
cagccagcagtagggggcagtggctggagcactggccctgcatccagactgcctggctttgaatcccagctttgctagctgtggagttgctccacctctctgtgcctccgtgtccttgactaatcatgtctaccagacttctagtgagaataaggggacttgatatccataaagcatttagagcagggtgtggcacatctcaactctaaatgaatgttacctgctcctgctgctactgctgtcaccatcatctaatcctcagggaacttcctcctcctttatcccatgtcactcacgtcttcaaactcttcctttctattgtgatcttgccccagtatttaaaaattgttttggctcatgcctgtaatctcaacactgggaggtcgaggtaggtggatcacttgaggtcaagagtttgagaccagcctggccaacatggtgaaaccccatgtctatcaaaaatacaaaaattagctgggcatggtgatacacacctgtaatcccagctactcgggaggctgaggcaggagaatcacttgaacctgggaggcggaggttgcagtgagcagaaattatgccactgcactccagcctgggcaacagagtgagaccctgctccccaaaccccaccaaaaaaaaaaacaaaaaacaattgttttaaaactgtaaaatacatgcccgtaaagagttcacaattctgagccattggagaacaaaaagtgaaaagggagtctacttatgatgctttgatacagtgctccagatcctgatcaaaatgcattagcaaacacacacatgtaaatgcacggtttttggttagctttacataactgatagacactagtaatactgttctgtgacttcatttcactcaccgtatgttggcaattttactgctcactacaagcttcaaatggctacaaaattccttggtttgaatgtgccatgatttgtttaaccattaatctatttatcagaatgcaattctttcccatttctcattcctacaaagaagactgaaaataaaaatttttgagtaaat

SEQ ID NO: 238414 - DNA, 492 bp, Homo sapiens
ctgcacagtgtcatttatgcaaattaaaacatacacaagtgatatattaagagcacacctatgtaaaaataaacatagaggtgaatggtaagtttcagtgggccctcactggtcagctctgtttgggcatttccaggctttgtgcctggccatgaacaggctaatgcagtggagctgtgggcagcatggcaaggggtgctgttggcagagtgagaaattgtgcctggaacctgaaccttagatccaggatctgctgaaggcagtttggtaattatcgtgtaaggtaatcatgcaagagtttcaggatgataatcttgggaatatgaaaaactttttgcaacctggcaggactttaccctggacaggcagaattccatgctacatagaatggactgagatgagaaccttaccccaccaccaaattgtctgttatccattatcgctaatgtgtcctttcagtttatcatagtaaaatattgcttttctaagacg

SEQ ID NO: 238415 - DNA, 742 bp, Homo sapiens
agtgaggctattgcgtgaattagccttcgacccagactgcaggagcttgggggttctgaggacagcacggctctactttccactttggagtggaacctacctggcgggggtcacacagcagatagtttgtgcagctgggaagatgagccctggacccgaacggtatgaggatatgtatcctaaggccagctttggtcccagttcactgggtgccggctgccccagccagctatggtctgcagagcccgaaggcaggcaggaggatcgcagatcgaagatctgcaaggactgaggatcgttcctagtgtctgtttggaagcccgtgggtcttgcaatgcgagggcagacaaactacgaagcgggttccggattccgatgagccacacgacctctccggcccctgatctgagcacccctcaccttggtccatctgctgaccatctaaaatgtgtaagcccagcgtcagggctcagtgtgtgaccaagaacagttttcctgtttgaggagttacctgataatgctcaaacacaggcgagttaatttgtccccaactctggagatctttttcctgtctggctccttctttccttccttaaatatttagtgagcacctactgtgtgctgggcattgtcctggaggtacaagcagtgaacttctgcctggcatcattacaagcaatctaacttggtagttgagaaaacaaagaaagatataacgatcgactatcaccatatttgaagt

SEQ ID NO: 238416 - DNA, 2653 bp, Homo sapiens
  misc_feature (806)..(806): n is a, c, g, or t
  misc_feature (818)..(818): n is a, c, g, or t
  misc_feature (836)..(836): n is a, c, g, or t
  misc_feature (843)..(843): n is a, c, g, or t
  misc_feature (846)..(846): n is a, c, g, or t
  misc_feature (976)..(976): n is a, c, g, or t
  misc_feature (1054)..(1054): n is a, c, g, or t
  misc_feature (1306)..(1306): n is a, c, g, or t
  misc_feature (1376)..(1376): n is a, c, g, or t
  misc_feature (1434)..(1434): n is a, c, g, or t
  misc_feature (1620)..(1620): n is a, c, g, or t
  misc_feature (1730)..(1730): n is a, c, g, or t
tctaatatgctggtgctatggtttggatatttgtcccctctaaacctcatgttgaaatttgatccccatgttggaggtgggcctcatggaaggtatttgggtcatgggggtagatacctcatgaatagattaatgccttcccttagtggtgagggagtttttcttctattaattcccacaagagctggttgttaagcagagcctggcactttcccctttttcactgtttcttcttctctcaccatgagagaagccttttgccttccaccatggatggaagcaacctgaagctttcaccagaagtcaagcagatgccagtgccatgcttcttgtacagcctgcagaaccatgagttaaataaacctcttttctttataaactacccagtctcagttattcttttatagcaatacaaaacagactaagacagctgggtttctatagaagtagtcaactgtagatttgtagcaacagcctttacaagcaaagcaaggtgcagaaattagtagttaactaggtcatttccagaaatatatctggcactattacataaggattaatagtactgcctctggaactagttctgggtttgcattccagctttgcctctcactagcagtgtgaacttctgggtaagtttcctctttgtgcctcaattttctcacctgtaaaaagggaatgacagtaatagtcccaacctcatagaattattacacaaattaatatttggaatatgcctggcatggccaggcaaggtggctcacgcctgtaatcccagcactttgggaggctgaggtgggaggaanacttgaggccangaggtcaagaccagtctnggcaacntantgagaccctgtctccacaaaaataatttttaaaaatcagctcagtgggggtagcgcacacttgtagtcccagctgctcaggaggccaaggtgagcatattgcttgagcccaggagttcaaggctgcagtnagcttgattgcactactgcactccagcctaggtaacagagtgagaccctgtctctgaataatatgcctggcatatagnaggtgctaaataaattaaacactatgtaccaggcattgatttagcctctgggaatatagtggaaggaaaaaggaaaggtcctacacttggagcttagaagttatattgacaacttccatttcaccttttcccaaaagttttcccccatggttaagtgcaagtgagcaaataattgattttattttattttatttgtattacttatttatttttgagatggagttttgctcctgttgcccaggctagagtgcnatggtgtgatctcggctcgctgcaacctccgcctcctgggttcaagcgattctcctgccgcagcctcccnggtagctgggattacaggagcccgccaccacatccagctaattttttgtatttttagnagagatggggtttcaccatgttggtcaggctgatcttggaactcctgacctcaggtgatccacccacctcagcctcccaaagtgctgggattacaggcgtgagccactgtgcccggccattttttttttattatttttcagagatggagtctcacagtgtcacccccaagctggagtgcagtggcntgatcatacctcactgcagcctcaaacttctggcctcaagcaatcctcctgtctcagccttctgagtacctgggactacagggatgtgccaccgtgtttggctaatactnttaatttttgtagagaaagggtcttgctttgttgcataatctagcaaataaattttaaaaataatttctgtcacaccagaaggctacgctataatatccattcattggcaaacatttttgagctcctactatgtgccaggtactacataaaagaaatagaggccaggcacagtggctcacaactgtaatcccagcactatgggaggccaaggcagacggatcacttcaggtcaggaatttgagatcagcctagccaacatggcgaaaccatctactaaaaatagaaaaattagccaaacatggtggtgcatgcctgtattcccagctactctggaggctgcggcagaagaattgcttgaacctgggaggtggaggttgcagtgagttaagatcacaccactgtactccagcctgggagacaggctcaaaaaaaaaagaaaaagaaaaaaaagaaatagagtctttgtcctcaaggaattcctaagagggatattcagctgtaaaactcttattgaataatgcaatactatgcgtgcatttccatgtatttatacatataattttattgataatatatataaggtaacgccttgtttatcaggaaataacttttacccaacaacctagccaagaattagggattattaaggaaaagaggcgcctgtaatcacagcactttgggaggctgagacaggcagatcacctaaggttgggagttcgagaccagcctggccagcatggtgaacacctttctctactaaaaatataaaaaattagccaggcatggtggcatgtgcctttaatccctgctactcgggaggctgaggcaggaaaatcgcttgaacccaggaggcagagatttcagtgagccaagatcgcgccattgcaatctagcctgggcaacaagagcaagactccatctc

SEQ ID NO: 238417 - DNA, 923 bp, Homo sapiens
cagctactcaggaggctgaagcaggagaattgcttgaccccggaggcggaggttgcagtgagccaagatcatgccattcattgcactccagcctgggcaacaagagcgaaactccgtctcaaacaaaaaaacaaacaaaagaaaaaaacaaaggatactagccagtaagggtagaaggaatgacaatattttaaaaattcaccattttgtaatccctagtatgatatgggaaattaaatttagttaaggatcatcatggaggctaatatcctggtgagaagaagctgttgggctgttcacatggtgccatagattacttactcatcaaacataaagggaaaaacatgtctttacactagagaaatcctgcggttaccaccttaaccagatcgtcaaagtcagcatcactagtgcaggaaatcatgatgttaatgtgttattttgttggatgcagtaagaagtacccaattcacttatgaagcattctttccaaaaatgtttaaattaaatctaagcaaccttcatgtttatctgcaggattatcttctttagctagaactgtaaatgattttactatatgaccttaggtaggttacgttagtgacttgtctgagtctcagagcccttgtttgtaaaaacagtgacattgaatcagaaaaaatgcatgaaagtaacctagcatgtagtttgttatatcataagaatgtaaaatactagttcatctctgctatcagaatccattcatagccaccaagtatatagctgaatgaaaactacatttctctttttcacatcttatttccttatctaattctatgtaatctgatggcatgttttatgaattccctatacttgcttagatccataagctgtgcagccccaagtatggcataaaccctctaatccaaaatgttcaagggaca

SEQ ID NO: 238418 - DNA, 869 bp, Homo sapiens
cagctactcaggaggctgaagcaggagaattgcttgaccccggaggcggaggttgcagtgagccaagatcatgccattcattgcactccagcctgggcaacaagagcgaaactccgtctcaaacaaaaaaacaaacaaaagaaaaaaacaaaggatactagccagtaagggtagaaggaatgacaatattttaaaaattcaccattttgtaatccctagtatgatatgggaaattaaatttagttaaggatcatcatggaggctaatatcctggtgagaagaagctgttgggctgttcacatggtgccatagattacttactcatcaaacataaagggacaaagtcagcatcactagtgcaggaaatcatgatgttaatgtgttattttgttggatgcagtaagaagtacccaattcacttatgaagcattctttccaaaaatgtttaaattaaatctaagcaaccttcatgtttatctgcaggattatcttctttagctagaactgtaaatgattttactatatgaccttaggtaggttacgttagtgacttgtctgagtctcagagcccttgtttgtaaaaacagtgacattgaatcagaaaaaatgcatgaaagtaacctagcatgtagtttgttatatcataagaatgtaaaatactagttcatctctgctatcagaatccattcatagccaccaagtatatagctgaatgaaaactacatttctctttttcacatcttatttccttatctaattctatgtaatctgatggcatgttttatgaattccctatacttgcttagatccataagctgtgcagccccaagtatggcataaaccctctaatccaaaatgttcaagggaca

SEQ ID NO: 238419 - DNA, 705 bp, Homo sapiens
tgggggaggaggcccctcgtttccctcatctgggctcaggccggtgggagcaagaggaccgggccctctcccctgtcatccccctcattcctcgggccagcatcccagtcttcccagataccaaaccttatggggcccttggcctggaggtccctggaaagctgcctgtcacaacttgggaaaagggcaaaggaagtgaggtgtcagtcatgctcacagtctctgctgctgcagccaagaacctgaatggcgtgatggtggcagtggcggagctgctgagcatgaagatccccaactcctatgaggtgctgttcccagagagccccgcccgggcaggcactgagccaaagaagggggaagctgagggtcctggtgagtgtggcagggaagccctttgggacttgaggggagtgattctggtgggaggctctgatccactcctttctgcaggtgggaaggaaaagggtctggaaggcaagagcccagacactggccctgattggctgaagcagtttgatgcagtgttgcctggctataccctgaagagccaactagacatcttgagcctcctgaaacaggagagccccgccccagagccacccactcagcacagctatacctacaatgtctccaatctggatgtgcgacagctctcggccccacctcctgaagaaccctccccgcccccttcccccttggcacctt

SEQ ID NO: 238420 - DNA, 627 bp, Homo sapiens
tgggggaggaggcccctcgtttccctcatctgggctcaggccggtgggagcaagaggaccgggccctctcccctgtcatccccctcattcctcgggccagcatcccagtcttcccagataccaaaccttatggggcccttggcctggaggtccctggaaagctgcctgtcacaacttgggaaaagggcaaaggaagtgaggtgtcagtcatgctcacagtctctgctgctgcagccaagaacctgaatggcgtgatggtggcagtggcggagctgctgagcatgaagatccccaactcctatgaggtgctgttcccagagagccccgcccgggcaggcactgagccaaagaagggggaagctgagggtcctggtgggaaggaaaagggtctggaaggcaagagcccagacactggccctgattggctgaagcagtttgatgcagtgttgcctggctataccctgaagagccaactagacatcttgagcctcctgaaacaggagagccccgccccagagccacccactcagcacagctatacctacaatgtctccaatctggatgtgcgacagctctcggccccacctcctgaagaaccctccccgcccccttcccccttggcacctt

SEQ ID NO: 238421 - DNA, 1107 bp, Homo sapiens
tgggggaggaggcccctcgtttccctcatctgggctcaggccggtgggagcaagaggaccgggccctctcccctgtcatccccctcattcctcgggccagcatcccagtcttcccagataccaaaccttatggggcccttggcctggaggtccctggaaagctgcctgtcacaacttgggaaaagggcaaaggaagtgaggtgtcagtcatgctcacagtctctgctgctgcagccaagaacctgaatggcgtgatggtggcagtggcggagctgctgagcatgaagatccccaactcctatgaggtgctgttcccagagagccccgcccgggcaggcactgagccaaagaagggggaagctgagggtcctggtgggaaggaaaagggtctggaaggcaagagcccagacactggccctgattggctgaagcagtttgatgcagtgttgcctggctataccctgaagagccaactagacatcttgagcctcctgaaacaggtaggtctgggggagaaaaaggggtgggtgttagaaaaaaggggctgccggccaggcgcggtggctcacatctgtaatcccagtgctttgggaggcaaggcgagtgaatcactttaggccaggagtttgagaccagcctggccaacatggcgaaaccccgtctctactaaaaacaaaaacaaaacagtagccaggcgtgatggtgcgtgcctgtaatcccagctactcgaaaggctgaggcatgagaatcccttgaacccaggaggcagaggttgcagtgagccaagattgtgccactggatccagcctgggcaacagagcaagactgtgtctcaaaaaaaaaagaaaagaaaagaaaaaagaggctgtctagggcaaagaatgtggaggccttttgggagggtgggatatgggtgaggggaaggagggagctagttagatgaggagctggcactaatgatacagggcaccctcctacaggagagccccgccccagagccacccactcagcacagctatacctacaatgtctccaatctggatgtgcgacagctctcggccccacctcctgaagaaccctccccgcccccttcccccttggcacctt

SEQ ID NO: 238422 - DNA, 615 bp, Homo sapiens
cctttttttctctttttttccttttcttttttaggattctaaatcacatacaaaacatttgttctgctccagctctttgtgaactaattggctctcctggagggataggtaattgtacctgactacacaagctgtcccgaagctcccttggaaagctccagtaagcttctagtgttagcagccatcaaggatttcacaggtcaggcatcggatcgatacagctaaaagcagcagggactgtaatgtcgacagcaggtttcagaaagcgctgcaagtgccagtttgttcctcttcatgcagaagctcaagacagcttaattaacccttggaaaatacaatttatccagaggctcggcaggtccctaccaggccttattggtgaactgataggagagatactgtagctggcagcgctgaattcggtggatgtgttcctcatgtcctgaagagcaggcaataggaggtagccttagaggggggtttgttagaactcacttgtgacttcagcaggagcaaggctgagactgagcattgatcatccgagccctggggtgagaaattgggatgtgtgtgcatgggtgtgtgtgtgtgtgaattagatgtgtgagagagagg

SEQ ID NO: 238423 - DNA, 669 bp, Homo sapiens
cctttttttctctttttttccttttcttttttaggattctaaatcacatacaaaacatttgttctgctccagctctttgtgaactaattggctctcctggagggataggtaattgtacctgactacacaagctgtcccgaagctcccttggaaagctccagtaagcttctagtgttagcagccatcaaggatttcacaggtcaggcatcggatcgatacagctaaaagcagcagggactgtaatgtcgacagcaggtttcagaaagcgctgcaagtgccagtttgttcctcttcatgcagaagctcaagacagcttaattaacccttggaaaatacaatttatccagaggctcggcaggtccctaccaggccttattggtgaactgataggagagatactgtagctggcagcgctgaattcccatttccccctttaatgctgtttcagttaggatgcaaagaaaacatagttttcggtggatgtgttcctcatgtcctgaagagcaggcaataggaggtagccttagaggggggtttgttagaactcacttgtgacttcagcaggagcaaggctgagactgagcattgatcatccgagccctggggtgagaaattgggatgtgtgtgcatgggtgtgtgtgtgtgtgaattagatgtgtgagagagagg

SEQ ID NO: 238424 - DNA, 2060 bp, Homo sapiens
  misc_feature (948)..(948): n is a, c, g, or t
  misc_feature (1032)..(1032): n is a, c, g, or t
gttaccatgctaaatgtaatgcgtttatttattattcagcaaaatctatggcagaggcattccaaatagtagctcgtggagaattaaaagtatcagggacttgtagaaatcttggtttctttatttttttaaagcatcagaaggtacttgaaagatgtgaacagataaattaaggctaaaaagaaaacagaaatggctacattttaaactgcctttctaccctcagtatttaattagatcaattgtatagaggaatgaacagaggtgacattcctcattgggattccttccaggactcttatagactttgcattcagaatgttcccattttcattgtgttgtactgatgataatttaagtattaggggaaaatccatttataaattaaacaaaatgacttgatatccatcagtcccctagttcatcaagctgttcaaacacggggaagattggctggtcggcctgggtcttccgagagcgctggtaattagatctgcgaaggatttattctttgctgattggggctttaaattaattgaagttccacatttgtggttttgtcctttttgtacttttttagaggagatatttcatattcttgtgtggtggagtgcttggccaagcagcagtggtttaaatgttaatttttctcatgagaagtttaagattttttgatgaatcaaggcctgatttgaagtgcaaagttgtatttgcttacttggaaaattattttttcactcttcaaagatgcttgtactttacttgatctgttgttttaaaatagattcgtaatacaaaagcattttattaacaagaaaaatagaaaaacctatgttaagattaacattaaaataactcaacatacttcgaagacaataatttggcctgcctagaagtaatcacgatatgttttctcacacagaaggaaaaaaaaaacaacacacattngactcttggaagtattttaagaaccaatccattttcctcactgaagttaactgtagtttctagggcattcattattcttagcantggtgatcatccttcttcagtgagccccacacatgagaaaagagaatatttaagattattctttaccttttaaaaatgaaaatacttttgttcaggtgggcaagtgatatattcttataccatagctcactgactttactgagcagctatgtcagcgagataactggaactgttttttagtcaatagaatgttcatatctgggcatatttgagaaacagcacatgcaaacggttttctactctttcatcctgatgttggagaacctcttcctcatgactcaaacacgcagcatgaaagaatttaagtttctaagcctttgtatgagggaaggtcttagaaaagtttgtttccttgaatcacaaatgctcaagtttgaaaggatcttcatgatccttttatccaacctccaacatacgcagccaaatctctacagcaaaaccagcaggcagcctttccagtctctgctagattctgccctgataggaagctcatgaacttgcgaggctgcccactcccttgttgagtagttctcgtagatagttatgcctgatatggagcccaaatctgcttcgctgcaacttcccactgatccaaggtctgccctctgggacatttctgatttactccttcttccctatcctagcttctcacacatgtgaagtcaattacatcagatcctcctttcctcctgtcatccttctcctttccaggtcaaacagtgctaattcacaacccttattcaatggcgtgttcctaaaagcctcaccatcctagtcatcctgccctggctgtgcttcagtttgcagagaaccctctaaaaatacagtgaagagaatagcacagccctctagatatattctgattagtgcaaagcagaggaactgtcacctttctcagggtaggctactatacttctcttaatgcagcctgaggttaaatttggtcttcttggaagctagatcatcctgtcaattcatactgagtttgatgtctccccaaatacatgttgacagtgagactttgggag

SEQ ID NO: 238425 - DNA, 1620 bp, Homo sapiens
  misc_feature (701)..(701): n is a, c, g, or t
  misc_feature (789)..(789): n is a, c, g, or t
  misc_feature (971)..(971): n is a, c, g, or t
tcttcttagtcactacttcccacagagttaaccattgccaagattagctttaatctttaaaaataacctgagattagctttgcctgttctgaaaatttacatgcatttaattagacgatatgcattatttggagtttgggagtcttcagttattgtgtatagcaggggcgggtttgttctcattgctgtatattttactgtacaaccgtgccactcagttattcattttactgatgacagagacttaattggttccagtttgggactcttaggaatagtgctgctgtgaacatttggcgatgtgtcccttgatgtacatatttgtgtatttctggtgggtatatactgaggaatggtatgtgtatggtcatagggcatatgtaccatcagctttagtaccagtagatactgccaaacgattgtccatattgagcatcttcttaatgctttttttgtgggggtgaagggggcagagtttcactcttattgcacaggctggagtgcaatggcacgatttctgctcactgcaacctccgcctcctgggttcaagcaattctcctgcctcagcctcctgagtagctgggattacaggcatgtgccaccacacctggctaattttatatttttagtagagacagggtttctccatgttgatcaggctggtcttgaactcccgacttcaggtgatccgcctgccttngcctcccaaagtgctgggattatagatgtgagccaccatacctggcccctaatgctttttaagtcatcttacctatttcacatttccntgagaatagtgagtcacttaatatatttttgacaggttgaacaaggaagtttgttcctgggagataaaaaagcttgaggtcggccttgcgtggtggctcacacctataatcccaccactttgggaggtggaggtgggaggatcatttgaggacaagagttcaagactggcctggacaccatngtgagatcctgtctgtattaaaaaaaaaaaaagtacggggccatttactttttctttcttcaaatgatgagtatcttgggagacctgtttgcttctcttgagccaggtcatcttggaaccatgtccacagagacaggtggacgtagcagccttagctcttactctgaaatgccccttctcatgggcgtcttgctagtccctgccaccacctccttgtcagccccagggacagcccttccattgcctgcagtgcagcccagctaagccaaactgatcacaaaagcaagattttactgaagaatcaggagagccaaagggcagcccacccagacagcgccagtcacagtttaccatgtaacacctggttcaggtcgagtgcagtggctcatgcctgtaatcacagccctttgggaggccgaggcaggaggatcacttggggccagaagttcaagaccagcctggacaacatactgagaccccatctctacaaaaaatttaaaaattagctgggcttggtgtcatacgcttgtagtcctagctactgggaggctgaggtggaggattgcttgagcccaggaggtaaaggctgctgcaagccatgattgcaccactgcactccagccagggtgacagagtgagaccatgtctt

SEQ ID NO: 238426 - DNA, 610 bp, Homo sapiens
cacgtggaaactgtttaccttgccacctctctgtagtcattaaaactcttgaaaatgaattttcttatcctaagagtgtaaaactgatgttgtggagcattttgcacatgccagacacagatgaattcaagacgcagtccctacactccgggtttctacagtttagctggacagagatgaacaaaattgcaatggagtgtgtaaggggccatagtgtgcaaggcccaacacctccctgagcgaaggacgtcagcactggttggctggatcctggccaagcttgctgtggggaagtggtcgatgtagtgtggggaaggccatttgcactgatggcccctgtggagcggaacattctcatggctgtgtctgttacccaaataactagaggatgctctgtgtgcaaatcttgttttctttaatcagcataaaatctggaatgaggagaaatagcttctgaaatgcgctttctcaaagaaggatgagcagaatgagccacaccatctataccaggagtgtccagttttttggcttccctgggccacattggaagaagaagaattgtcttgggccacacataaaataaactaacactaacaatagctgatgagct

SEQ ID NO: 238427 - DNA, 410 bp, Homo sapiens
caaaaggctcagatgtttagcctagtctactgcagacagaaatttaaatccagtgagggctaatgaatcacatacgtgtttccacattttattttgttttcgttttttaggcatatgggaagtagttgcaatttttcagggaagaatatgttttgaatctcacactgtattctccttgaatctcacactgtattcttgaatgagacaagattttgagatcattcttttcctttttgtgtcaacgttagtttgttgttcattggttataaaaaggaaaatgtggccaggcgcaatggcttacgcctgtaatcccagcactttgggagacagaggcaggcagatcacaaggtcaggagttcaagaccagcctggccaatatggtgaaacctcgtctctactaaaaatacaaa

SEQ ID NO: 238428 - DNA, 428 bp, Homo sapiens
gagacagagtttcactcttgttgcccaggctggagtgcaatggcgggatctcagctcactgcaacctccacctcccgggttcaagtgattctcctacctcagcctcctgagtagctgggattacaggcatgcgtcaccgtgcctggctaattttttgtatttttagtagagatggggtttcaccatgttggccatggttggccaggcaggtctggaactcctgacctcctgaactcctggccaggcaggtctggaactcctgatccacccgccacagcctcccaaagtgctaggattacagacgtgagccactgtacccggcctaattgggtttttaaacaactattgttgttttttatatgttctgaatataaggtccttattagatatatgatttgaaagtatgttctccccttctgtcttttcac

SEQ ID NO: 238429 - DNA, 450 bp, Homo sapiens
ccctctactttctcctacccaccacctctctctccaggattaggaatgctcaagcaaagaaaaggacgccagaagaggaggctcaggatcctaaagtttgcatttattttaaaattttgcatggcacagttgaaatgttaatgtttgctgaccatttaaaaagtaagatgtttgccgggcgtggtggctcacgcctgtaatcccagcactttgggaggccaaggcgggtggatcacctgaggtcaggagttcaagactagcctgaccaatatggcgaaaccctgtctctactaaaattacagaaattagctgggcgtggtggcatgcgcctgtagtcccagatactcaggaggctgaggcaggagaatggcttgaaactgggaggcggaggttgcagtgaagccgcgattgcaccactgcactctagcctgctgacagtgagactgtctc

SEQ ID NO: 238430 - DNA, 423 bp, Homo sapiens
gcattctcttctggggtttgccttacaagtcatgggcagataaacaataaacagcaaatatataaataattttgaaaagtaatgagggtgacatgctaatatgctagtgagtaaagtggtggagatacccgtctccttcttgaggacgtaacatttgagttgagattcgaatgacaagaggcctgttacacctatgatatggtggaggtataacaggcatgttgcaggtagaagaatagcaagtgcaaagtcctagagacaggaacagcttagcttgcttgaagaacataaagaaggccactgggggcaagacacagtggcttatgcctgtaatcccagcactttgggaggccgaagtgggaggatcccttaagggtaagagttccagacctgactggacaataaagtgagactgtctctaca

SEQ ID NO: 238431 - DNA, 291 bp, Homo sapiens
cagtttacttaggtgtggtgattaaggaaacctggtcgatttatttatacactattccattccatattcaaggtgtcttttaaaaggcaaagtaagggaacttgcctttttaaatttaaccatgactttcttatagtgatctacccaatgtatggaaagaagtagaactggctgggtgcagtgactgacacctgtaatcccagcaagttgggaggctgagacaggaagatcacttgagcccaggagttcgaaaccagcctgggcaacatagtgagacccagtctctaccaa

SEQ ID NO: 238432 - DNA, 662 bp, Homo sapiens
taaagtacaaaggttttagttttgatgaagtgaaatcacattctttcatttcttctgcttttcgtgtcatctctaagaaatcattgccaaatctaaggtaagatctactcatgtatcttcttttaatagttctatagttttcttatatttaggtctttaattttgagttaagtttttgtatatagtgtaaggtaggggtccagctttattcttttgcattcagttacctagcattatttgttgaaaagactactcatttcccagttgaattgttttggccctctacatgaaaatcaaatgaccataaacatgagggtttatttatggactctcaatttgattccactgatctatatatctgttgttatgccagcaccacattgtagcgttgtagtaagttttgaaataagaaaatgaaagtcctctagctttgctcttctttttttaggactgttttggctattctaggtcccatgaagcttgcaaggcttttgaaggaccagctatctttggtgcctggttccagagtctatctgcaggctgagcatctgagggtggcttgcacgtgtgccgaggctgccccacgggctagtccccctgtgccactgaattattcagtctgcctgaatggactttttctaggtcctagagctggatcttgt

SEQ ID NO: 238433 - DNA, 257 bp, Homo sapiens
aattttgaattagaattataactattcaatgtcaatgaatagttaacatatattaactgagttaatatatgttaaaataaagtacgttactattatattttggtaattcttaaaatatacgttatgtataatagttatttgtatattaataacttttatccaggagtatttctcaaattttatgcctttaaagaactacatctcaattccagtcattaaagacagagatctgtgtgttccctgcaaaaaaggaagtc

SEQ ID NO: 238434 - DNA, 344 bp, Homo sapiens
caggggtggaaatttaggagcttttaggctatgaatgaataacacaggtggaaataaaatgacactacaggtgggattgtatctcagagttaaggcagaggactttaagtctctactgttagtggttggtcctgttaaaaataaaatgccttcagagcagttgagaccatggcaacctgacctcattattgtagggaagttgtaacaatacaacttccttattgcagttgaggaagggaagtaaaatggagacagaattatcagctcaggtagaaaggataaaaagaagagctcctgtctgttcagcaaagacaagacagccatgaaagtatcataggacaagc

SEQ ID NO: 238435 - DNA, 487 bp, Homo sapiens
tgagtttccaccagtttctcacatgagagaaagctgaaggaaaaggtatgaaggcggatttcactgttgacaggttgtctttcaagtgtgggtcctggcgtttatgaggcaatgatgagacacctagaaagaagcacatctctgagacatgacagttcagtcccaaaggccattaatagagggccagctcatcaacacagctgcagaaacagagcacagccagcctcgcagccccacacgctgaagcccccgctgcagcattccatctactctagcgcccatgcaaattgaaaacctaaaatagttcactccccatagccactggctttgaagaatctcttttgtctccatgaaatagctccaggagacagaacccagagaaaaactttttgaagtgaactttttccttataattttatttaaatttgaatatttttgtagaaataataaagttatccactaattatctgtgtgacacaaaacaatc

SEQ ID NO: 238436 - DNA, 284 bp, Homo sapiens
tctccaccccgcccccagccctagtggagctgtgccctggctccccctggctttttttgtgtgtctgcctcagcctgtcttacttagcaactttcgtgcaccagcattttcatggcaacacacctggacaacaggtgcaccctcctgagcccctagcacctttgagtccaatttacttggcctgtaagtgtgtattcctcaatctccgggccacctctgggtcccctgaacgctgtaccctgtacctctgattcctaaatacacaccgactctcaaatacacca

SEQ ID NO: 238437 - DNA, 179 bp, Homo sapiens
ataaattgaaatcgtagaatgaacttttccttatttgtattgtatttatttttaaaatataggtacttttgttttcattcagcttctcaaatacactggcacagtatttaaacaccgttagcctactttttgaaatctgactcatatgtttccattaaaatatttaaaaacaaggaaac

SEQ ID NO: 238438 - DNA, 225 bp, Homo sapiens
cagtgaaagatcatcgctttcatcaaaggtattttgagcatcaaattggaaatcctgggaaactcctgggcgtggaggacctcagatgtcaccctgcagctttctctgtctctgagaacagatctagagccttagtgccatcgccactacagatgggctaaattcaaggactgatgactactcaaggctgctatggagttaaaataaatagcataagaacatgaa

SEQ ID NO: 238439 - DNA, 511 bp, Homo sapiens
caattatatgcttagcatttattccatgctccaaggttagatattcatctttgaagcccccaatgccagttatatggtaggtactctaaatgtctgatgaatgaacatcttcccaagggaatgacaacatcccacatttactgaatgcttaccgtgtgccaggcagggtcctgaaagctttgcatgtgttaactcactgaagcctcacaaaaactataaagtaggacctcttgttattttcattttatagatgaggccaactggggcaaaaaagttaagtggcttgcccaagggcacaaagctgctaagtcgaggagccaggattcaaacccaggcaggctggccccacagctcctgctctagaatggccttctgcctaactgccctaagagtagaaactatccagacagtatcaactgctgagtgcacagggttctcaataaatgctaactggcttgtgtcactagcagaatatagtgggcatgaccagtatcctagtagagctgaccca

SEQ ID NO: 238440 - DNA, 487 bp, Homo sapiens
gtgatgaaggaagaaggaggggatggatgccaggcaatctgtcctggttgtagaggtagtgctggaggtagctgatgttcattgcgttcattgtttgttgccaggaagtgcattctgtacctgacatgtattagaggtggtgtgtagtgaccagctggagcccacgtctctagcaccagtgaggatttggctgatgagcagagtttttcagtggtcagaaccctctttgctgggtcgtatgtagcctactggaccgtgaactccttgaggacaggagtatttacttttgtctcccaaagcacctggctcagtaccaaggaaatgtcaccaaatgttggcttatttaaaccaaagctatttctattgaaaactacaattaaaaaatattttttggcagggcatggtggctcactcctgtaatcccagcgctttgggagtccaaagctggagaatcacttgaggcaaggagtgagaccctgtttctaca

SEQ ID NO: 238441 - DNA, 532 bp, Homo sapiens
ttttatatatacatacacatgcatcttatctatatttttatatatgtaaattgagaccatccttcaaattagagtaactggatttttattttttaaagagacaagattttgccatgttgcacaggcttgtctcgaactcctgagctcaagcaatccacctgcctcagccttccaaagtgccgggactataggcgtgagccaccgtgcctggcctggagttttttttgaatgacaattttgtgtcttgacttttcatacatagctcttatgaacagctgctttcacatagtaaagctgactagaagcttcacttttaatttcaaaacctttaaaagtagacagtataacatagtaattaagaagacagacagacacggtggctcacgtctgtaaccccagcaagtttggatgctgaagcaggaagatcacttgagtccaggaatgagaggctgcagtgagctatgatcatgccattgtcctctagcctgagcaacagagagcaaggtcctgtcttgttgagaaggaggaggga

SEQ ID NO: 238442 - DNA, 552 bp, Homo sapiens
gatgcagtagtttgtcttcgtctctttaatggctctgggatgagcagccagatgaggtactaataggtgctgcctcagttccagttttgtgaaacttgtagttctcaatactgcctttataggctagtgatttgaagagaataggttatgtggttctctataaaccttattaatttctggtgttagcagttttggccctcccttggcctgcctcccagatggctgctggctgaagggtggggccgcctggcaccttcctggatccctcctggcgcgttggctgtggcaagcgttcagtaaagaacttcatatgagggagagggtacacctcagctgggagatccgcagcctctattgtttgtattcagacatgccctccgggagtgcttatttctttaatttcacaaaatggcccaatcacagctaagttccacagctctcctctgtggctgcacacttgtggacctgggtactgggtgttgtttcctgttagaatatcccaaggtcaagtcacctgtggatggaatcttaaaattctgctttatcaatgcc

SEQ ID NO: 238443 - DNA, 85 bp, Homo sapiens
gcggccgcagaagcctcgagccgggctggggcgcggttccctcccgcacgccccgcggcgcgcccccgccccctccgccgcgcgc

SEQ ID NO: 238444 - DNA, 426 bp, Homo sapiens
ttcaaaaagccagtttctactgacttataaagagagcaaaatctgctgaaatttttggttaaacttttattgccaaccttgaaaaggaacatattaaccagttaccttgtgataagaggatgacttgccatttttcttagaatctagtaggcagtcctgtggccctgaaacatgtgggagtggctgtttttaacttgaatctattcctttcaatgggagggagctactgaaatgaacgtgtagtttatcaaccacattaggacctcaaattaagttgttgagccacgagggcgataacctttaacaaagtaagtactgatcttataaatctttctacactgcctcacaccatctcatctaggtcaccagaaaaatatttttaaatgtgtccttagtacaataaaaaaaaactgcttaatactcaca

SEQ ID NO: 238445 - DNA, 491 bp, Homo sapiens
ttctgtctcagagaggtaaggcgagtctgtgagagaaaggactggggtgcttgcagtcctggaggttgaggcaccagagctagggggtgggcagggcagcagcgggcagggccatgggggtctcacagtggtgcatgaacaacatacgggaactaagggcaggaagcttggatgcggggccctcccatgtgcagaacagagacctaacctggtggccttacgcccctgtgtgtgcacatgtgttggcctgtgcactctgtacaagatgccacgtccttgctgagccacatgcttatgggcctgtccatgcagagggctgccctttctgattagatggagggcccctcagcctcgtctgcggatctggttggagtgtgggaggaaaagcgcaggcaaggctgggcacggtggctcatgcctgtcatcctagcccaggactttgagaccagcctgagcaacatggcaaaaccccgtctctacaaaaaatacaa

SEQ ID NO: 238446 - DNA, 367 bp, Homo sapiens
ttggtctgtctgtgtctaatgtaatgagtattaattaccaagtgtgacggtgacacctctgggagtggctgtgtagctgggatgctgtctgagttttgtgtgcttgtgttataacatacacacagtgctgtgactgtctgtgatgccgtctgtgacttccatgtgattgtgtggttgtgcatgaatctggcacttcgcgtgtatgatgggatgccataggtgtgactgtagagtcattcttccttcctttcaatcagcaagcatttccctagagcatgctttgtgccaggccctgggccggatgccggggacagatccgtggtgtcctattagggatgtctatgcttggcagtgatgaaatcagcca

SEQ ID NO: 238447 - DNA, 438 bp, Homo sapiens
aaactagattcttccaaatgcctaaggctgtgcctatagaaaactggcatcacattcccataaaacaacaactacttcaaatgcagtgaaactggccatttgcagtacagaaagcataatgtttattggactgactgctccaattttataaacagtttgtaaatctagattaggcaggcagcttcagtcaaccttttccctcaccccttagtaaattacaggtctgttaaggtacacaaaagctttcaggccatcagggttctatttctatctttttatgttttaaaatttctttctatatttttagtagaatcatatcttagagatctgctaaagagtacaccagctgcctgaatgccttactgtattcagcatgttggcaaagataatttattaagagtgtaacttgtacataataaataacatcctttattgcag

SEQ ID NO: 238448 - DNA, 431 bp, Homo sapiens
ctgaacttcttgaagtcaaagtttggttcccaatcctaccacctgctagctgtaggaccttggttctcaaatgtcaattgggagcaataatcccaccccagcttacttcatagaactgataagaagcaaatgagatattggctatgagcatgaggcccatgggacaaaaacattcatcaaactctatcaagagactttttattttatttttttgagaaagagtcttgctctgtcacccaggctggagtgcagtggtgccatcttggctcactgcaacctctgcctctcaggttcaagcaattcttgttcctcagctacttgggaggctgaagcaggagaattgcttgaacccgggagacggaggttgtgacgagctgagatcacgccactgcactccagcctaggcaacagagtgagactctgtcttaaag

SEQ ID NO: 238449 - DNA, 449 bp, Homo sapiens
ctgtccagtctagaactcaaagagtgatggtacaggctttagagccagacaacctgagtgtgaatccagcttcaccacttcattcattcactcacccattcattcaacaacatatttgaagcacatactttgtaccagggacttttccaggcaccggactacagctatgaacaagacaaacagtccctagcctcccaagagccgtcacttcagaagggcagacatgacacgcaaacaaaatgatgccaggtggtaccaagtgccttggggaaacagtgccacctttctgagaccgtttctccatccgtccatggagctgataacaccagtccctcagggtggaggtgaagactaagaggttgctttgagagggggaacttggtggctttttttcaccacctagaacctggcacatactaagctctcaataaaagtatattgaaccaaca

SEQ ID NO: 238450 - DNA, 205 bp, Homo sapiens
actttctttcccaatacaaattttgttttcatggttttatattctttattactatgcccagtgccattttgatgtgtttaaagagtaaaactttaatttcttcgtgatagaaagcaaacatatgtcacctcacatctgaactaaagtaacatttgattgtctacacatttgatatctataccattaaagagaaatgtatgcaaca

SEQ ID NO: 238451 - DNA, 418 bp, Homo sapiens
atcatttggccttcacttgactcaaacttaatataaaacccattgtaagctctggccaggcacagtggctcatgcctgtaatcccaacactttgggagatccaggcaggaggatcgcttgaggccagtagttcgagactagcctgggcaatatagtaagaccctctctctataaaaaatttgaaaattagctttgcatgctggtacatgcctgtagtcccagctactcaggaggctgaggcaggaggatcccttgagcccagaattttgagcagtaattgtgctactgtaccccaacctggttaacaaagtgagacccccatctctaaaataaaataaaaataaacccaatgtaaattctgaaatcatgagactgcatgttggttgcaaggtggatacacagctgactaccactgaaa

SEQ ID NO: 238452 - DNA, 2224 bp, Homo sapiens
  misc_feature (880)..(880): n is a, c, g, or t
  misc_feature (1376)..(1376): n is a, c, g, or t
  misc_feature (1527)..(1527): n is a, c, g, or t
  misc_feature (1595)..(1595): n is a, c, g, or t
  misc_feature (1676)..(1676): n is a, c, g, or t
tggaagcccagcgagactcagcccattgggaaacccagcttcctggcattcacgccttgtctccagagaggctgggaggagagggaagaatagctttgctgtaagagcttgtttaaactcttgggcagctttcagaggatgtccagccacttggcacctctctgccgctgagccaacactgtctcaagagcacccacttgaaaacccttttaaaaataagtgcagatgaaagagaaactgctcaggagccaggagcagggaggtggttaccctcaggagtttgttccccagatgggaaggggattaagaaacccagaggtgctggtctctggaagaacatgccagaaacaggctctatggtgggagcatggcacctggtgcctgaggcctaggatgcagggagtactcactctgcactgtctgcttatctgcacttttaaaattgtgtattgggaacaggcattaccaatttaaaaatatatattctgcatgtatacttatatgtatattcatgtgtatttttaaaagtggtaacagagagagagaagcagagtggctaatggacttgctggtacttctcttgctctttgttacctccatgtcccttttgtgtctccttttcttaccttgccctcctggtccccagggaaattctggaaccaggccagcatgtctgagatatacccattcccaacatgcctgtgttagtaaggccctttgaagttgtggaaaagagcaagggtgcagaccagtatgaatccacacatcgtctgagccaggcacaatatctgtctcatgtattctttataataaacttattttgtacagaagggaaactagaggctccgagttagccagtttgaccaaggtagctcagcgnactcaggtctgcattgccaccaaagttcatgcgaggctttgaaaagcacacatcttctccttgggctacaagtgagcaccgtggtggaggactgtttccgggtagtctttgcttccaggttctggaatccaggggacagcacacctccagcccagcagagctgctcctatgctttccctgtccttccagctggtcagcaagagcttagccagcactgtggtgtgagtgtgatccagcaaggccccaacgcccagcccttcctccagcatccacctgccattgcccactctgcactttttcaagaacccaaggtaaaattagttatagaagctagtggagaggaaagctggtgtgaactaaggaactttttttatttttatttatttttatttttagttgtcaaatgattctttattgaaatatcgtcctttgtgcttctaagtagctgggcactccaccgcaccactgttgatgtcatctgtgatgtcatgagggnggcggccaccaacttggcagcccacagactgggcagtccccagaatccctttaatggttccagagagttgtctggttaaaggtcggtgctgtatctgtagagcaatgttgacaatctcatcaaaggtggtatttccggctgggcacagtcncacgcctgtgagcccacccagcactttgggaggccgaggcggggggatcacttgaggtgaggagttanagactagtctggccaacatggtgaaaccccgtctccactaaaaatacaaaaattagcctggcttggtgacacatgcctgtngtcccatctacttgggaggctgaggcaggagaattgcttgaacccaggagttggagactgcagtgagccgagatcacaccattgcactccagcctgggcaacagagcgagactctgtctccaaaaaaaaaagtggtatttccgctgtgtttaacatttttctgtttctttctgtctcacggcagttccttgagggctttgatgatcagggcagaggcagaaggtaccatgtcaatctgggcctatcttttctgaatagtcactttcactgtaagcctcagacccttccagtcaccaattgctttggcaatgtcatcaccaaccttttttggggacagacccatgcggcgggtgcaatcttgggggcccacacaggatggcactgacttcactcctggtgttcctcagctatacaactttgatctcattgaggtcgaacttcagcagcatggtagaggcagctggtgttggatgaacccagatttgggacaaccgaagaaggttgcaccttagctgcctccgagctgaaagccaagagctttttttttt

SEQ ID NO: 238453 - DNA, 477 bp, Homo sapiens
aatagactttaaccccaagattgtcagggatggaataaggggtggggcttaggggtggaaattcagaattacgtaattatcctctttattcataagcccaggggtgacctttgcttcccagatttgtgcaaacctactctctaagatgtagaaggcttgcaggtttagaaaatattactagaatttatcaaagctagtttacacaccatgtctttatggttgataataaactgtatatgtatacatatgtgtgtatgtgtatgtgtattcatttgtggcctaagataaaaaactgaagaatagattgtcatgatttttttttaaatgtcaatttcttctttgattagcatacactatggtatgtatctttaccaaatggacttcagtatttgataaactgttgaacattccatgtgaaattcaggtctgtctgccacaacatggaggcatttaataaaatattaacgctgtgtaaat

SEQ ID NO: 238454 - DNA, 423 bp, Homo sapiens
atttgggtaatggatactgtagaaacactgacgtcaccactatgcaatttatgcatgtaccaaaactacacttgtaccttatgcatttacacaaatgaaaaaagacaaaaagaaatgaaaacaaacaaaatgatgatacataccacaaaacttgtgaacttcaataatgttaactaagtgaaggaaattggatacaaaagattacatgttgtatgatttcatttacttgaaatatctagaaaaggtaaatttatgtacacaaaaggcagatcattgggtgcctagggtttggggtctcagtgggacttaaatataaatagagaaatttgggacatgacagaaatgttctaaaactggattgttgtgataattgctcaaatctattaatttactcaaatcattaaattttacatatacagtgag

SEQ ID NO: 238455 - DNA, 598 bp, Homo sapiens
ggaaccaggcgtcgacttcagagctgacctttgtgcatttgtgcattgtttgtgttgtgataaaatacacgtaacgtaaaattgacctttttaacccatgtttcatggtcttcggtttactcgcagtgctaggcgtccgacacgtctttctaattcctgaacatttccatcatccgcaagaggaaattagcagtcacccctttcccccatgcccccagctcctgacaaccacaagcccactttctgcccctggatttagctattctggatgtttcatgtgcctgaaatcatggccacggaggtgtcagcgtttcactcccagcacgtcacgccacgtccctttcctctgctttgttcctcctcagctgtgaactgtctgggactgggccaggagacagtcctgggatagggaaagaaatggactgggaggtgtggacagggaaccctggcggggccggccaatggtggcgtgatgcagcctggcttgggaaatgcccatggaggtgacaagtgacagccgggaacagacccactgccagggctgcctctctctttagatatgtcctggcatctgactttggtttcctggtgtttaaag

SEQ ID NO: 238456 - DNA, 193 bp, Homo sapiens
tacttaacttttttaaaaaattgtcattcttatatactttgtaaagccttttttaatcctgttctttgtttccatatctattctctttcttttaaccaatcatcttaattttcttcctttaatttctcatgtttactttcataatcagttgtgcctcttgcttctctgccagccccttctatcagcacgtatg

SEQ ID NO: 238457 - DNA, 506 bp, Homo sapiens
agaggccctgacctctggggtagggtggcagcgtccccttgaagatgcggtcccgcctcccatccccaggcgcccggcctctcacaccctcagcaccctgctcacctccagctgaagatgccagggcacctctgcttcctccctgctctctgcagtaccgcagagtgagcataaaagggcttaatacaggcttcgccgggcgcagggctcccgcctgtaattccagtactttgggagaccaaggcgggagggtcacttgagaacaggagttcaaaaccagcctgggcaacaaagtgaggcccgtctctaacaaagacaatgagaaataaatctaaaaattggatagactgaaacaggcaatgaggaaaggattccctatttaataaatggcattgggaaaactggctagccatatgcagaaaactgaaactggaccccttccttacaccttatacaaaaattaactcaaggtggattaaaaacttaaacataagatctaaaaccat

SEQ ID NO: 238458 - DNA, 385 bp, Homo sapiens
gccactgctgtcaagcataatgtcatcttcactaaaattaaaggctggcatgaaattggaggttatctccaatgatctgcctggtcaaactatttgcaaagaaagttggtctaaatcaacaaagtgaaaacaagctctggctgctttttggtcttccagtttcctccagttgggttgggtggaggaagagatgaagactctccaatcaagatgcttctccctctcctgctgtcaggcttaactcctccctccaagccaagactatggcctgaggccaggacagatccactcctgcagacccagaaaaggcagggctggcaaaaccacagcctgcagccctgcagtgggacctcatctagatcagaggcttttatctgtattgcca

SEQ ID NO: 238459 - DNA, 411 bp, Homo sapiens
cctaaagatactatatagatggaaggatgaggaggaggaatctaagcagaaaatggcattcacactgagttaagaagatagagatcggtttggggagcctgaggaaactaaggtttctaagagttcctccaaggaggaaagtaggcagagatattaatagaactccataaagctgcatggagtctcaaagagtctttagacaaataagctgtacatgtttagtgtgagattccattgaggccaggcaaagaacaactactaggaagctgtaagtgatgcaattcccagagcttgcatagggctgggagacatgggagttctaagcagcttcactgaacatccagagctttcagtagagagctcagaaaaaaaaatgccttagtaggagggttaaattagccccaaagtaag

SEQ ID NO: 238460 - DNA, 2284 bp, Homo sapiens
  misc_feature (268)..(268): n is a, c, g, or t
  misc_feature (444)..(444): n is a, c, g, or t
  misc_feature (618)..(618): n is a, c, g, or t
tttgtctcaatgatctattaatgcactcaaaccacactaaattagctttgtcatctggtccaggttaggctgggcaattctgctggtttcatttaggctcacccaggcagctgaagacaccttggtgcagcatggtctaagttggccttgcctggcctggggtagctgccgttggctgagccgtacatctccagcaggctagcctgggctcctccattggatgcagccttcccagagcaagccacatgtgcaaccgcttcccaagccnctgcttacattgcatttgctgctgtcccattggctaaagcgggtcatgtgaccaagccggcggccaatgtaggagaggattacacaagaggggtgtggctcctgggcactcatggctgtaccaacctacgaccaattcccctgagcgccaggctgtttcctgcctctgcaccatcncccaagctttccccttcgcttgttatgccctgctgggcgatctcctactcgggcaagtcacaagcttctctgtgtctcagcctcctcctctgtaaaatggggatcacatgagtttaagttattctgaggattaaacaagttaacacacaaacatttaaaacagtgtctagcacncagtaggtcctccagagatgccagccatcaccatcacagtggtgattcttggtatgacgacccctgccctcttcaaagccccgtttaaggaatctcctctctgaagctgtctctggttctctccaggcaagcatcctcccccaggcctggccctataattatcttttcctcatccacctactccatctacagtaggatccagagggaagggaatcccagggcccagcccagggagtgcgaactatctgatttcctctgcaattagggaggcaagacagtcctcggtggccccatttgacagaggtgaaaactgccgctgtaggagatgtgctgatttgcccggggttgcgcagctggtaggtgggtgagctgggagtggagccaggttgggctgtagcagctgtgtttgccctgcctcactgtccagctcccacctgggccgggtgtcggggtctcaaagagaaggcagataccggctctgccgcacagagctcacagtttggtggaggaggaaggctcaagcagagagcaggaggtgtgagtagctctgtgggctgtgggggccagatgggtcctcgaccctgcggggtcagagctggctgcccagaagacatgaaatggaataagcagagtgacatgctctgggccacaaacagggtgtgtggccgccctgaacacatcactgcagccacctccacagccacagccctagccctgtgggtcatggggatgtgaccctccccactacctcccatcactgaggacacacctcctgggcctccagtaactacccaggcctccacacctgctacaccatgatggtgcagcccgcctccccaacgccttcagccctgtggaaattttctctggagattctaataccccggcctccttgaggtcagtgtctgcccagagcctcccggcaggagagaagaaaccccacagctcttaagggaatgcctgcctgtccaaatggacaaagacaagctgtgcagaaacctcccctgggaggactgagccatcacctgaggaatgggagtctgtggaaacgtgagtcacgtctgtgggaataaagcctttcatctggacatcgaaatggccaccagctccctgagtgactttgggcaagtcatgccccactccaagcctcagaaagccgacctgtgagatgaggatgaaagtaaccccctcatgggcctgccatcccaccaccatggcgcactccacctgaatgaccttgaggactgtgaccgttgctgtgtgcatctgtgctgcttcccgtttcattgctgagtggtgttcctgtaaatggatatgccactgtctgcttcttcactcaccagccccaggcaccccgccattctaccgactgtctctatgaatgtgactaccaggatcaaggaacttcataccagttgaaccatacagtatttgtccttttgtgactggcttatttcactgaacataatagcctgaaggtttatccatgttgtatgatgtgtcagaatttccttcctttttaaggctaaataatattctattgtgtgcagagatcaattgtctttatccattcatctgttaatgaacacttgggttggttccaccttttggttattatgaatagtactgtgatgaacatgagtgcaaatatatctgtttgaattcc

SEQ ID NO: 238461 - DNA, 529 bp, Homo sapiens
cagcatttacagacgctcttgaagccgagcgcccacacagtgtgaatttgaatgaagctgcgttggcacaaacccctgttaagagtaaactaacgaaaggcttaaacaattgttgtcttaaatatatctttttagctaataatcaccttcttgccactgttttggataaatcacgctgttggctttcttcataaaagaatttggcttgtcaattctgacttctttttaaaaggatggagaagtgacaaagtcggagggtgggggttggggggagaacaaagttggtttatgtgaaagaaagcttggaccggaaaggtgtgtgggtggtagaggtggggaggcgaatgcagagggcctttggaggggaaaagaatgggggtggtggggggcgggcaggattatgaactcctttcctggcaggttattttatttgagtcttagatattattaattgactttcatgaatatttgtacagctcatttgtatcttaagcacattttgaaaataaacaacaacataattccatga

SEQ ID NO: 238462 - DNA, 330 bp, Homo sapiens
ggccacacattataaaatatactaacgctagctgatgagcaaaaaaaaaaaaaagaaagaaaaagaaatccaaagaaaatctcataatgttttaaggaagtttatgaatttgtgttgggctgcattcaaagctgtcctgggctgcatgtggcccacgggctgcgggttggacaaacttgcagtctaatcagtgtattttgaaaacaatactgctgctaaaatgtgattctctcctcagaactccccagtggcctctggtgttctcttggagtaaaagccaatgtctttggaactgcttatcaagccccacatgaccccacccaccaccca

SEQ ID NO: 238463 - DNA, 439 bp, Homo sapiens
tctatattagttaaaacgtattcttcattatgtttaaatctttccagagctatggcaggagttggattggagtatacagaatggattaacttattctaattgttatctaaagtagaggcattgagcactgatatggtttggctgtgtcctcaaccaaatctcatcttgaatcagttcccataatccccacgtgtcaagggcgggaccaggtggaggtaactgaatcatgggaacggtttccctcatgctgttctcatgatagtgagtgagttctcacaacatatgatggttttataagcgtctgtcatttccgctgctgttactcattgtctctcctgatggcctctggagaggtgactttgccatgattgtaagtttcctgaggcttcctagccatgtggaactgtgagtcaattaaacgtcttttctgtataaatta

SEQ ID NO: 238464 - DNA, 341 bp, Homo sapiens
ccactgtgcccagtcacattttttatctgttaaaaaaaaacaaaaaccaagtttggatgttatgatgttagtagtgtgtctggttctgaagttacaggataggagatagagaaaaattgtgacctgcccaaagtctcaaagctaattctaaataactaaagttgtagaatcttttgtttggaggaccatcttaaaggtgtgatctatactcagccatttgtctgatgtgtaaatcctcagtctgtagcttcccggccacgtggtcaccaaggctgtgcttgaacatccctgagacgcctttcaaggagcaccgttctgtctttgggcagctctaattgtta

SEQ ID NO: 238465 - DNA, 1585 bp, Homo sapiens
aattctgaaagagatctaagaaatttgatagggattttagttagccaaagttactaaaacttagaaatgataaacagtttacctgaagtcattccagaagtagttttgccatcatctgagcttattggcttattgttactataatgttgtcatctgccccagttattcttacacatttattcagcaagcatttactatccacagcatggtgcttgaggcttagaaaagttgaagggtatagcatagtttagaaggttcttacaacctggagagaaaatgtgaatgtgagaaacatatagttaaaaatgtatgaagaagtattagagaatcaaatgatgtatgtaatcatcttaattactttaagaatgatgcatgtaaaacattcttaaagtaattatcaaacaaattcaaggcatctaccagagttgtaaatgtattctacgcacttcttgagaaccatataatgtagaagatgttgcaggaacgatatagatgagtaggattccattctgtcctcaatacaaaaaatagtaaaataataataagttagaggaataaagaactataagaatttagcagggagtttccagagaaggtttcatgtaagaggtggcatttgtgctatgactgcaagtacgtttataactgggcccacaaagactgagtctcagaaaagcccaaggagcatgtagggaacacagcagttgaatttgaatgaaatgctataggttaagaggacccatagggaatgattagaaaaataggttgagctagctgatagaggactgaagaatattcgaaagtatatgggggaactactgaagcttttgaagcaaaggtagtaatagtcaaacttaagatggggacaattaccttgcaggattgctgtgaagttagatgagataatttacctaaagtacttagcccggtgcctaccacatagtaaatacttaaatagtagctgccatcattcacctgactaaagacagggagaccagtcaggatattaggtgggccagaaaagtggtgtgaagacctgatatttggcataatcaggtatctagtaatgctagagatgagacagaaactgttgagattgagaaggataaagaaaggtattttttaagggaaaacttttatttttgactgtataaaatttagaaacatttaaatagcaaataatatcatgaacaaagtgttacctcccctaaatctattaatttagtgctaaactaataaaaatactaataaatttagttgggggttattgttgttttgttcttttgtttgttgggcttggcggggttctctttattaaacctaaatttattgaggtacatattgttattcacattttttgtaacagttcatagcatatataaatggcctttattgatttgtgtctctccatgatcgtacaaaattcaattatggtttacataatagtgaaccatttaattcagcctaaatacagtacttaaatggatctaattctgggagtctcatggaatgatctaaaaaatagtcaagaattttattaaaaccatctagatttggccaggcacagtggctcacacctgtaatc

SEQ ID NO: 238466 - DNA, 1030 bp, Homo sapiens
cagggtattcactgctaggccacactcaagaccagcaatttaaagcagtgacgttgaatttcaaatcttagcactccatcttctccctccctccattctgaaaatttagaaacacccagttcacatgagttggaaacaccaggactgtctaggacaatggtttgcaaccttggttgcttattagccttaaactaaaaactattagaagtcctgatgtctaggtcactaaaattaggatttcacccagacatcaggtataaatgattaaagctctccatttgagtgcagtatgcagctgagggtgagaaccactcatctaggagaagcatgaggaatggttaagccattaagcaagagggtatatccctgaattttttacttagcagtattatagtgtttttatcctctctggcttttgaatatcgttcattcagacaccattctttaatagcaggaaagaaaaaaaaaatggtctcaaaaatcgaaagtggaagtgaagactaacagaatccaaggttttctctccactttagactgtggagaggtagcctaggatcacctgaaattatatggaaaattttgtgcgtgtgtccattttcctagggtgtttgtagctttcatcgatttccagatgattgtgacctcccaaaataaagaatcacaatttaatttacttgcagactaaggctaagcagccttattttaaaattttcaagaagttagtcgctctttttctgtctcttcctggtggttgagagtatttgaacaaattttgaaaatgcagttgcttttttacaagatatctgagccaagagtcttttcagtaatgttcccacttgcataactagtttaataaagcattttcaatttgacatggtgtaagtcaaaattattactaattctgaataattagatatagttaatgagattgttgtatacgtttatcacgaagattaaaagtccaattttctgaactgaaactgaggcgatttagggaaaaaaaaatgcataggaattttacatctggatt

SEQ ID NO: 238467 - DNA, 512 bp, Homo sapiens
tgatcctggtccaccaccatcagcatcccttgggaacgtgttagcactgcaaattctcattcctccctaattttctgaatcagaaattacggaggtggagcccagcaatctgttttaaccaaacttccacataattctaattaatttatgctttgagaaccgctgatctagtttgtccctctcattttgcaggcaaagaattgaattctagagaggttaattgacttgtccagtcatacagctaggttctgttttctattatttatttatttatttatttttattttattcactttaccccccagtattcatagttttctttctaatactccatatttgacttgactttttacaagttgtaattacaaataagtctaagatgggaaagttgtggaaaactttatagagaacatgagatttgactgaacagtaaacattaagtagagagaaaagaaaggggtgttctaagcagtagggaccacagtgaataaaggtagagataggtaggttta

SEQ ID NO: 238468 - DNA, 561 bp, Homo sapiens
agtttccggtcccccactttagataatcagatacccccgttataagactcaggggtgcatttctagcaggaatacatggaagcgatattgtgacctcagggcctgacatcaggaggcagcaagtgctgtctcctgacatcatgggatgttaactttgacacacagggttatgtgctttgtgctgggttttcccactcaattgcctttgtaattaataagcacttatggggagataaatctatttctcatgcaatttaatctattagttttagtatccatgaatgattcttgcttgaatccattattattatttatttatttatttatttttattttattcactttaccccccagtattcatagttttctttctaatactccatatttgacttgactttttacaagttgtaattacaaataagtctaagatgggaaagttgtggaaaactttatagagaacatgagatttgactgaacagtaaacattaagtagagagaaaagaaaggggtgttctaagcagtagggaccacagtgaataaaggtagagataggtaggttta

SEQ ID NO: 238469 - DNA, 478 bp, Homo sapiens
gacttctcttggctgtcttccttgtgtaacccctcccctttgaatgtgagtggaatttgtcaatataatgacgtattactcctgtgactgttatgtgcccaaaggtgattatctagatgggctcaatctaaccacggaatcagaaagaggaaaatacaagaaggataccacagatctttgctggctttgaagatacagggggctatatcttcagcctctaggatctgagcacagtctggggctggtaagctagccagaaaatggggacctcaatctcacattcacaagatacagaattctgccaacaaccagaatgagcttggaagtgaattcttcccgaaagccttcaaataagtgttcatcccagccgacattttctttttgatcttgtgagattccgatcagagaatccaatggagtgcaacataaataatgacttacagatttgtgagccaataaatgggtattgtcttatatt

SEQ ID NO: 238470 - DNA, 563 bp, Homo sapiens
tgctacacatcacagattggggtcttagtcttatgtcttctaactttataatggtatactatttttttcatgtttttattaaaatgttttcttaaatccttagccaaagatttttgtttgataagtcaaaaataaggtcttgtttactttgtttacttttttgtattcaagatttaactcagagtaagaccaaattatcattgtagttttattgatataaaatgtcaacataatttaatttttttttttacttttttgtatttttaaaattttttattaaaaataaaagtagacagccaggtgcggtggctcacgcactttgggaagccgaggcaggcggatcaccaggtcaggagatcaagaccatcctggctaacacggtgaaaccccatctctattaaaaatacaaaaaaaatagccaggcgtggtggcgggcgcctgtagtcccagctactcgggaggctgaggcaggagaatggcatgaacctgggaggcggagcttccagtgagctgagatcgcaccactgcactccagcctgggtgacagagggagactctgtctc

SEQ ID NO: 238471 - DNA, 373 bp, Homo sapiens
gggtatacaaaaaaggcagaccatggagaacttttgaataagagttcagactgtaagcacccagctcagattacataactctggccttgcgtgagctgcccagctatctgtccagtgttcctgcctttatgtcctagcacagccattggccctactagatggacagtgagtgagccttgacaaacacgtctgcacctgtgctccctgccatgtgctccctgccctgtgctccctgccctgtttccaatattccctctgtcctcagagcacttgccgttgcttctcttatcctttgagattcagtcacatacagacttttaacatccctttttttttttgaaatgggctcctactctgtcacccaggctggaat

SEQ ID NO: 238472 - DNA, 611 bp, Homo sapiens
cacaagtgttaaataggggtcagattcaggccacccattcctcagtgctcagtggtcccagctgccactcaggaagctcagttcccagggagcagatctgagaagcagtggtggagtcccctgagatattgtcattgtgtagccagcaacagctgcacatgactagaacacagccagcaaatggtgagcagcagggctatcaggggaggtgtctagggattttcttttttttctttttttttttttttgagacagagtgagactccatctcaaaaaaaaaaaaaaaaagaaaagaaaagaaaagaaagtaagtattggggcggggcatgatggctcatgcctgtaatctcagcactttgagaggctgaggcgggcagatcaactgaggtcgggagttcaagaccagcctgaccaacatggagaaaccccatctctacgaatacaaaattagccaggcatggtggcacatgcctgtaatcccaactactcaggaagctgaggcagcagaatcacttgaacccaggaggcggaggttgtgatgagctgagatcgcgccattgcactccagcctgggcaacaagagtgaaagtccatctcaaaaaaaaaaaaaa

SEQ ID NO: 238473 - DNA, 501 bp, Homo sapiens
gcagaaagggggagggaagggactgagcgagtactgcacgctcactggagcatctgcagggcttccactagcaggtctcccttcacctcacacaagccctagagccagacactggtctccacactaaagataagagactgagacacagaaactctgtagttgtcaaagttacagacaaggcggggctttcatccacatttataagaccacaaaacaaccctgtctgcatgacagctcacaccctcccatgcctccctgagggctccttcttcccccaaacacttcttaatcctatattgctgccatttctcctctttctttttttaataaaaatgttaagaagggaacatatttataatgttttataaatggaagaatccattcataaaatattaacaaatggttaaactttgggaagtgagactctgtcttgggtttttgataataaatgtgggcccctttaatgaggtggataagactacttaacccaataagaaaaaa

SEQ ID NO: 238474 - DNA, 689 bp, Homo sapiens
tctgtcacccaggctggagtgcaatggcgcgatctcagctcactgcaacctctgcctcccgggttcaagcaattgtcctgcctcagcctcctgagtagctgggactacaggggtccgccaccatacccagctaatttttgtatttttagtagagacggggtttcaccatgttggccagggtggtctcgaactcctgacctcaggtgatccacctgcctcggcctcccaaagtgctgggattacagacgtgagccaccactcccagccaattttttttttttaaacatacagattttttgactccatgttagaaatctgttgacctaaagctagaggcaaatatggccaagggtccagaatccttggaggaaaaatgggctaaatttggaccctggagacctgtggtgacagagagatggggagagagtgggtgaggcagacagagtcagccagggaagacccgccccaaccccagcagcagcatctgagggtgatggaaaaaaaacccacccattccttcaatgcctgaccacgtggcaccatggaataggtccagagtggcagaggagtgcacaggcaggcaggtggaagaggctggaagaggcagttgccatcttctggggcccaggaggtttttttgttttttttgagatggagtttttcgctcttgtcgcccaggctggagtgcg

SEQ ID NO: 238475 - DNA, 635 bp, Homo sapiens
tctgtcacccaggctggagtgcaatggcgcgatctcagctcactgcaacctctgcctcccgggttcaagcaattgtcctgcttttgtatttttagtagagacggggtttcaccatgttggccagggtggtctcgaactcctgacctcaggtgatccacctgcctcggcctcccaaagtgctgggattacagacgtgagccaccactcccagccaattttttttttttaaacatacagattttttgactccatgttagaaatctgttgacctaaagctagaggcaaatatggccaagggtccagaatccttggaggaaaaatgggctaaatttggaccctggagacctgtggtgacagagagatggggagagagtgggtgaggcagacagagtcagccagggaagacccgccccaaccccagcagcagcatctgagggtgatggaaaaaaaacccacccattccttcaatgcctgaccacgtggcaccatggaataggtccagagtggcagaggagtgcacaggcaggcaggtggaagaggctggaagaggcagttgccatcttctggggcccaggaggtttttttgttttttttgagatggagtttttcgctcttgtcgcccaggctggagtgcg

SEQ ID NO: 238476 - DNA, 621 bp, Homo sapiens
atcacgtctcgttgccgtgcttattttccagcctgaagtgtgtttcatctttgttcgtgttggctgggaaaattgtctgtatatttgtgatcccctcctcccactttctctctaccttacttgctctaccactacccaaaaataaataaatgaattaattgaaacacctcagttgaaaggaagaatatgtctgagaaagcttacagactcaaaggaccagaaatattgtgtgaaaagctgcattaatagtaggagaggctgagaactcctggaagaaacagccaacaggatctagtgctggttttttaagcatagactccttttttaaaataaaaatcttgcatagagcctcaatatatgaaacagatcaaagcagtatttttattggtataaatctgcttttaaagtacaaatttatagagtacttattatactgtcagtcaatgagaacaatgaggctgtttttatgaactaaaaatattgagatcaggattatgaatcagttatagttttatattcatttcagcatctggttttggtttaggtagtccaatatcaagaaaattctgattagcatagataagttattgtaatcttgagctttaaattgatttagatgga

SEQ ID NO: 238477 - DNA, 441 bp, Homo sapiens
cgcctgcttcgctttcttctctcgctctccccagagacaatctcgtggcctgtgtttccccgcaggcaggccccagcgccctcaagcccagatgtctgctgtccacgctcttctgacttccggaaagctaacatctcagattccctctccctgaaggacctttgggaagtcccaacccccaccccaggctcttcactccccccgggtctgcttctcattctctcagatagatttataacttatgtaaataaatgtacatgattagccaagtgattatgtaaatggcgccttccttttctcgtcccaattctggtgacaataatgattaaaagatggaaaatagagtcaacatgtaaaaggtaaagaagctggaatttaatctgaaaaagcaagtgtaatgcctatttcacggcaaggttccatttgcacaaaggataaaat

SEQ ID NO: 238478 - DNA, 475 bp, Homo sapiens
gttgagaagcagtctcatgactttattccttatatttcacattggcagcaggcctgcaatgaaatatggctcattttttttggtcttgggctttgaggctaaagagagggtttagcagaggatatcataattcctttttgtggatacagaagaaccctaagcagttgccaaaatcaggtagaataagacaagtattggtccactctcagtaactccaaggcctcagagtttttccttagcttctggggaactggtatctacaaggaaatcaagaggcctagtcccctaactgctttcggagcacgttgtgggaggtgcagaccaaaggtgagtttacacatcagtgactaaagtttcctgccactaagcataagaagtcactcatgagcagcgtccctaaaccacagctacaggatgtgggcacaagcccttgtataattgttggccaagagccaatgagcattcatccctgtgc

SEQ ID NO: 238479 - DNA, 398 bp, Homo sapiens
ctgagattatttggtatcttcaaaattcctctaacataagagattgagatcacatccaacgaagacaaattagaactgcttcgtcaagaagagcaagacttcaaataagtaattttcaataaatgcccttagaggaatatgaaaagacttcgcaattatgaagaaaaagaacttagaaggaaaataaatattcataggacaagagaacattttaaaattatgcgtgtaaagaactttataattggatgcctactgaatgcagaaattgccagaaaataaaactctaaaaatgacatgggtaacaataaagatacaaaaactagagaaacagtccagaaattataatatgtgcctaagacatgtttcataataatcgagaagagaattggcaaaaaaaa

SEQ ID NO: 238480 - DNA, 325 bp, Homo sapiens
agctctctgaccagaccagaaacccgcaggaagagctggcgtgagcccagggccccatgcagcccgccctgccccgatcctgtgcctgtaaagaccccagacttagttggtagagactgagacggcctgacttcagggaagagacgacttgacttcagagagagacaccctgacttcggggaagagacagcctgactctggaacagagacaagctgacttcggggaagacaacctgcctttcccatcccctctccagctcccctctccgctgagagctgattctgtcactcagtaaaattctttgctctcatcacccttcaactg

SEQ ID NO: 238481 - DNA, 426 bp, Homo sapiens
cctaagaaaatttaaattaattcaggtcacttcatctaagttcaaattcaaatacaattgcccctctgtaaacgtgggggattggttccaggacccccacctcgtgtataccaaaatttgggcacactcaagtccttaaggggaaaccgcgtataagaaaagtcagccctccctatgggtgggtttcacatcctgcaaataactgtgttttccatctgcatttggctgaaaaaaaatctgcatataagtggacccatgcagttcaaatctgttgttcaagagtcaactgtattcccagttgtctcaaaaatgattttttatagcttttttgttttggaacgagggtaaaatcaaggttaatgctttgtatttgattgtctcctttggtcttgaagtccccttcctgcaccaccacctgcccctcaa

SEQ ID NO: 238482 - DNA, 459 bp, Homo sapiens
ctcttgcactctatagtcccacgttactcagagcttccccgtgccccataaatatgaaggactagattgaatgggcaccaggggggcaggctggcagtgccacccaggaaagcggggaagaggctatgtgggctacctggcccactcagggaggagggcaggactgggtattgtcttgacagcagccctgtcccacaacactgaactgggcagggaaggggtcaggcgtccccctgacatggggctggattccagagcattggacctggccaccagaattggccgtctccatccaaggcactggggccatgggtgccagagccacatgtggctgagctggcagagcctgccccccagggagcgctgagtcccggaggtggtcatttctggggaggggtctgtggggctcatcccacctgcccccttctttccagcacttgcatggcgcttccctctatt

SEQ ID NO: 238483 - DNA, 1809 bp, Homo sapiens
  misc_feature (5)..(8): n is a, c, g, or t
  misc_feature (899)..(899): n is a, c, g, or t
ggcannnngcttaacagcaaacgtaggtgccatccacccagcctttatccccagtccaagcacttcagcgtggaggtctagcaagccctggacaggaccagccagctagagacaggtgagcggaggaggcaccctctctggcccatggagtcagggttcattcggcgcatagacttggaggcctggaggtgggccaccttggccacttgctggggatgaggccttgagtgcaccatttgccctctagcccatttccacaactataaactggcaagaatagtgcttgcctcttggcatcattgtgaggactccacaaagtaatgaatgcagcgcatatttatgaaacacctgctatgtatcagacattgaaattgcaaagataagcaaacctctgcccacatggaggtcacctgccagtgggtaataccagctagcgctgccagctactgtgctgagaatcttacatatatctacctatattacctcattccatctcctcagcagttccatgaggcaggtattattactgtgcccatttaacagatgataaaactgaggcacaggggtgtataccttccccaaggccacattgctgatgagtagaatgcatgtggacggcttagcccagtgcctggctcagtcgatgactgtgctgctgatgtacttgcccggccctgcttccccttccttcttgcctctgccaaaggatctcagtccaggggcgatggggcgcggtgtcctctccccaggtctctcacttagggcaggcacagggcactctccccaggtgccctgagaagggggcggggacctatggctgccagggttcccaaatccttggtgcctgtgtgacctctcctccagggcctcaaaaggacaacaaaataccccaggcaagnatcacttgggtccagcctaagggcacaggtgttggcctgcagatggggtgactgataggcaggttacgcagtccttgtcccttcctctctctctctccacctgactgacccgctcatccctggagagccaccaaattccagagtcagcgtcccctcaggcaaggcagtatttgtcccagcatcacctggccatctctctgtcttctcagagacagagggagggaggaagaaaggttctggaggcagaggaagagcccaagggttctgggggagcaggcagaagtgccaaccccctggcacctgcccagcctcacccctgagcttctccatgtgactccccgccccctgccgtccccctggctatttttggagccacccactcagctgtcttaaggtagcagtgcctggccccagtgtcaccaggcccacagaggccagccttccttaatgaaaagctgcagctacttccccatcagatcctccctgcccaattcaagggagccagggactgtcccacaagccagaaagtccccagaaacccttctcaggcccctcagccatcagaggaccttcccactcagagctgtctggattgcaacctgctgcttgtaacacacagcaccttctgtctattgggcctaggggtgggaagggaggtcacagggtctttaaacttcttagtttgaaaaatttgcagcatactataataagcccccgtgtatctgtcacctggcttcaacaattatcaactcatggccagtctagtttcatctgtacccctcctgattaatttcatccatcaatatttcagtgtgtatctttaaatgataatgactctttttaacataatcacataacacgttcagctattaacatcatcaataaaattccttaatatcaaacttctagt

SEQ ID NO: 238484 - DNA, 1082 bp, Homo sapiens
cacccgccaccacgcctggctaatttttgtatttttagtagagacgggctttcaccatgttggccaggctggtcttgaactcctgaccttaagtgatccaccggtctcagcctcccaaagtgctgagattacacgcatgaggcactgtgcccggccgttatcccggttttatacataggtaggcgatatgaggcatccagaggttcgaggagctcaggagcttgcccgaggtcacagagtgggtaatggtgacagctaacatgtgctgagcacttagtgtacaccaggttctcagtgctcttcagaaccctgaaataatcctgtggagcagatgtgttatagacccgtatttcaaatgaggggattttggctcagggtggttacgggacttgcctgaggttaactgaggtaacaagcagcagagccaggatttgaacctaggccatcggggtcacaggcacacactaagccccttcctctgctgcctctgagaagttaaactgggtgcagcatggctgtgctcttttcaccaagggaccctggggtggggcagtatggcctctagaccgtcctcagtttctcaatggcaaggtgggggtgggcgacatcaccccccagcctccagcgttcacccccgaccctgctcacctcctccccgcagatgaagttctcgctggagaagctgcaccaaggcatcacagtctcagaccctccctttgacacccagccccggcccgatgacagcttttcctgaggaccccggccacgcagctgttcccccacatggacagatggacacacagagcctcggcggccactgctggcacggtgtgagcgccaggcatctcccacccgcccctcccgacggcccaaccaggggctgtgcagacgtggggaccacggaaccgagatgcactttagaccagggagctggcccggcctctggcaggccccccactaacttattttgcccggctgaggttgtggggggcgcctcctggggtgcacgattccctcagctctgggtttaatgtattatatttatttggggccgacagtgccccaataaagggtcagaagtg

SEQ ID NO: 238485 - DNA, 1130 bp, Homo sapiens
gtgtgtacgtgtgtctggggctgctagcctgcagcagctttgggcctctgatagagttcctgcgtgtaacttaaccactaattctgaccgcggctctgtgtgtcactgtaagttacctgtgtgtgtctggggctccaaatctgtggctgtgagcagctggttgtgtgcgtgttgtgtctcattccatctgtagctccctgtgcaaatataaattacccctgtgtgtctgagtgtgacgttggagtgtttgtacatgtgtctggagttaccgtgtgtagcagctctgatccttcttgggctgtgtgtgttttaccattaattctatctgtagctccaagcgttgctgtaagttaccagtgtgcgtcccattgtgacttagtggtgtgtgtacaagtgtgcctggggctctgggttctaccatgaccctctgtgcctgcatatgcctgtaatttagctctgaaacgctcttctttttttttttttcttttgaaatagagtctggctctgtcgcccaggctagagtgcagtggcacgatctcggcccactgcaacctcctcctgctgggttcaagcaattctcctgcctcagcctcctgagtagctgggattacaggcgtgtgccaccacgcctggctaagttttgtatttttagtagagatggggtttcaccatgttggccaggctgatctcgaactcctgacctcaggtgatccacccacctcggcctcccaaagtgctgggattacaggcttaagccatcgcgcctggcttgaaactctcatttagctctgtgtgccaatgtaagttacatttgtgacattgttgtgtgtctggggctctgtgagtgtggctgtaacttaatttgattccatctttgtgtgaacattcccttgtgtattcctttgtgacagtattgagtggtgcctaggcctctctgtgtacagctgagaccctctgtggttttgtgtgttgctattttaagtaagatgatctcagaagaccctcttaagtcctaccaccctcacctctgcctgccttttccttcaattactaccctagttcttttttttccttcacagtcagacactactcctgaccctctttccaacacaccaggaagtccggaccga

SEQ ID NO: 238486 - DNA, 663 bp, Homo sapiens
gtgtgtacgtgtgtctggggctgctagcctgcagcagctttgggcctctgatagagttcctgcgtgtaacttaaccactaattctgaccgcggctctgtgtgtcactgtaagttacctgtgtgtgtctggggctccaaatctgtggctgtgagcagctggttgtgtgcgtgttgtgtctcattccatctgtagctccctgtgcaaatataaattacccctgtgtgtctgagtgtgacgttggagtgtttgtacatgtgtctggagttaccgtgtgtagcagctctgatccttcttgggctgtgtgtgttttaccattaattctatctgtagctccaagcgttgctgtaagttaccagtgtgcgtcccattgtgacttagtggtgtgtgtacaagtgtgcctggggctctgggttctaccatgaccctctgtgcctgcatatgcctgtaatttagctctgaaacgctcttctttttttttttttcttttgaaatagagtctggctctgtcgcccaggctagagtgcagtggcacgatctcggcccactgcaacctcctcctgctgagacaggaggatggcttgagcccaggaggttgaggctgcagtgagccgtgatcatgccactgcactccagcctgggtgacaaagccagaccctgtctca

SEQ ID NO: 238487 - DNA, 3367 bp, Homo sapiens
  misc_feature (3233)..(3233): n is a, c, g, or t
gtccaggagcttctggccagggcatagtagttgctagggacccttttctaggtactaggggagggggctccccaacctgcgggcaggcagctgcctccacgatgtttggttttaataaagtctctttgtttccttctctgtctctctgcccctctgctttcccttctctgtccagtccctctctccccggcttctccctccttctaggcctctgcggcccctccccgccttccctcccgggctgggggcggcgccgtgacgcggcggggcgggggaaggaagggggtgtcgctgacgccgcggcggcctccggcggctccggccttttgtgcgggcggttgggtcgggtgggggcggcggccgcggaaggccaggccggtgccctgcggggacgcccagcgcagcccagccccgcgcagcccagccctgccctgccctgccctgccctgccctgcgcccggggcgcgcccaccgcgccgcatccatgttcgatgttacatgagtgcctaccctgcatcctgtcccgcattgtgctggggacagagcagtgacccacagacccgtgaaggacttggacctgtcatcagacagtgacggcccagagtagtccaggatgggagctgcccaggggactgtggggtcacgcatgagccaaagtcctgaaggacaaataaggatttgctaggcaaagaagaactacgatctggacagacagaatggcatatgttaaggcttggagcaccacaccccactctggccggagcacgccaagcagctccccatcgctccggaaacggctgcagctcctgcccccaagccggcccccacctgagccagaaccaggcaccatggtggagaagggatcagatagctcctcagagaagggtggggtgcctgggacccccagcacccagagcctaggcagccggaacttcatccgcaacagcaagaagatgcagagctggtacagtatgctgagccccacttataagcagcgtaatgaggacttccggaaactgttcagcaaactccccgaagcagaacgcctcattgtggattactcctgcgccctgcagcgtgagatcctgctccagggccgcctctacctctctgagaactggatctgcttctacagcaacatcttccgctgggagaccacgatctccatccagctgaaggaagtgacatgtctgaagaaggaaaagacggccaagctgatccccaacgccatccagatctgcacggagagcgagaagcatttcttcacttcctttggggcccgtgaccgctgcttcctcctcatcttccgcctctggcagaatgcactgcttgaaaagacgctgagtccccgcgagctctggcacctggtgcatcagtgctacggctcagagctgggcctcaccagtgaggatgaggactatgtctcccccttgcagctgaacggtctggggacccccaaggaagtgggagatgtgatcgccctgagcgacatcacctcctcgggggcagctgaccgcagccaggagccaagcccagtgggttcgcgccgtggccatgtcacgcccaacctttcccgagccagcagcgacgcagaccatggggcagaggaggacaaggaggagcaggtagacagccagccagacgcctcctccagccagacagtgaccccggtggctgaacccccgagcacagagcccacccagcctgacgggcccaccaccctgggccccttggatctgctgcccagtgaggagctattgacagacacaagtaactcctcttcatccactggggaggaagacttggctgccctgcttcccgacctctccggccgcctcctcatcaactctgtcttccatgtgggcgctgagcggctccagcagatgctcttctcggactcgcccttcctccagggcttcctacagcagtgcaagttcacagacgtgaccctgagcccctggagtggggacagcaagtgccaccagcgccgggtgctgacgtacaccatccccatcagcaacccactgggccccaagagcgcctccgtggtggagacacagacgctgttccggcgcggcccccaggccggcgggtgtgtggtggactccgaggtgctgacgcagggcatcccctaccaggactacttctacactgcccaccgctactgcatcctgggtctggcccggaacaaggcgcggctccgagtgtcttctgagatccgctaccgaaagcagccgtggagcctggtgaagtcgctcattgagaagaactcgtggagcggcattgaagactatttccaccatctggagcgagagctcgccaaggctgagaagctgtctctggaggaaggcgggaaggatgcccggggcttgctatccggcctgcggcggcggaagcggcccctgagctggcgggctcacggggacgggccccagcacccagatcctgacccctgtgcccgggccggcattcacacctcgggctccctcagctcccgcttctccgaaccatctgtggaccagggccccggggcaggcatccccagtgccctggttctcatcagcattgtccttatcatcctcatcgccctcaacgtcctgctcttctaccgcctctggtccctggaaaggacagcccacacctttgagtcctggcacagcctggccctggccaagggcaagttcccccagacggccacagagtgggccgagatcctggcgctgcagaagcaattccacagcgtggaggtgcacaagtggaggcagatcctgcgggcctccgtggagctcctggatgagatgaagttctcgctggagaagctgcaccaaggcatcacagtctcagaccctccctttgacacccagccccggcccgatgacagcttttcctgaggaccccggccacgcagctgttcccccacatggacagatggacacacagagcctcggcggccactgctggcacggtgtgagcgccaggcatctcccacccgcccctcccgacggcccaaccaggggctgtgcagacgtggggaccacggaaccgagatgcactttagaccagggagctggcccggcctctggcaggccccccactaacttattttgcccggctgaggttgtggggggcgcctcctggggtgcacgattccctcagctctgggtttaatgtattatatttatttggggccgacagtgccccaataaagggtcagaagtgaaaaaaaaaaaaanaaaattcagggattttatgtacggtgcgggaaaaacagttctgaattggcctggactatgactttccggccccgtttctgtgacacgtgggaatctcccgtcccctaatggagccttatgccaaaccgtacctt

SEQ ID NO: 238488 - DNA, 2867 bp, Homo sapiens
gtccaggagcttctggccagggcatagtagttgctagggacccttttctaggtactaggggagggggctccccaacctgcgggcaggcagctgcctccacgatgtttggttttaataaagtctctttgtttccttctctgtctctctgcccctctgctttcccttctctgtccagtccctctctccccggcttctccctccttctaggcctctgcggcccctccccgccttccctcccgggctgggggcggcgccgtgacgcggcggggcgggggaaggaagggggtgtcgctgacgccgcggcggcctccggcggctccggccttttgtgcgggcggttgggtcgggtgggggcggcggccgcggaaggccaggccggtgccctgcggggacgcccagcgcagcccagccccgcgcagcccagccctgccctgccctgccctgccctgccctgcgcccggggcgcgcccaccgcgccgcatccatgttcgacaccacaccccactctggccggagcacgccaagcagctccccatcgctccggaaacggctgcagctcctgcccccaagccggcccccacctgagccagaaccaggcaccatggtggagaagggatcagatagctcctcagagaagggtggggtgcctgggacccccagcacccagagcctaggcagccggaacttcatccgcaacagcaagaagatgcagagctggtacagtatgctgagccccacttataagcagcgtaatgaggacttccggaaactgttcagcaaactccccgaagcagaacgcctcattgtggattactcctgcgccctgcagcgtgagatcctgctccagggccgcctctacctctctgagaactggatctgcttctacagcaacatcttccgctgggagaccacgatctccatccagctgaaggaagtgacatgtctgaagaaggaaaagacggccaagctgatccccaacgccatccagatctgcacggagagcgagaagcatttcttcacttcctttggggcccgtgaccgctgcttcctcctcatcttccgcctctggcagaatgcactgcttgaaaagacgctgagtccccgcgagctctggcacctggtgcatcagtgctacggctcagagctgggcctcaccagtgaggatgaggactatgtctcccccttgcagctgaacggtctggggacccccaaggaagtgggagatgtgatcgccctgagcgacatcacctcctcgggggcagctgaccgcagccaggagccaagcccagtgggttcgcgccgtggccatgtcacgcccaacctttcccgagccagcagcgacgcagaccatggggcagaggaggacaaggaggagcaggtagacagccagccagacgcctcctccagccagacagtgaccccggtggctgaacccccgagcacagagcccacccagcctgacgggcccaccaccctgggccccttggatctgctgcccagtgaggagctattgacagacacaagtaactcctcttcatccactggggaggaagacttggctgccctgcttcccgacctctccggccgcctcctcatcaactctgtcttccatgtgggcgctgagcggctccagcagatgctcttctcggactcgcccttcctccagggcttcctacagcagtgcaagttcacagacgtgaccctgagcccctggagtggggacagcaagtgccaccagcgccgggtgctgacgtacaccatccccatcagcaacccactgggccccaagagcgcctccgtggtggagacacagacgctgttccggcgcggcccccaggccggcgggtgtgtggtggactccgaggtgctgacgcagggcatcccctaccaggactacttctacactgcccaccgctactgcatcctgggtctggcccggaacaaggcgcggctccgagtgtcttctgagatccgctaccgaaagcagccgtggagcctggtgaagtcgctcattgagaagaactcgtggagcggcattgaagactatttccaccatctggagcgagagctcgccaaggctgagaagctgtctctggaggaaggcgggaaggatgcccggggcttgctatccggcctgcggcggcggaagcggcccctgagctggcgggctcacggggacgggccccagcacccagatcctgacccctgtgcccgggccggcattcacacctcgggctccctcagctcccgcttctccgaaccatctgtggaccagggccccggggcaggcatccccagtgccctggttctcatcagcattgtccttatcatcctcatcgccctcaacgtcctgctcttctaccgcctctggtccctggaaaggacagcccacacctttgagtcctggcacagcctggccctggccaagggcaagttcccccagacggccacagagtgggccgagatcctggcgctgcagaagcaattccacagcgtggaggtgcacaagtggaggcagatcctgcgggcctccgtggagctcctggatgagatgaagttctcgctggagaagctgcaccaaggcatcacagtctcagaccctccctttgacacccagccccggcccgatgacagcttttcctgaggaccccggcccaaccaggggctgtgcagacgtggggaccacggaaccgagatgcactttagaccagggagctggcccggcctctggcaggccccccactaacttattttgcccggctgaggttgtggggggcgcctcctggggtgcacgattccctcagctctgggtttaatgtattatatttatttggggccgacagtgccccaataaagggtcagaagtg

SEQ ID NO: 238489 - DNA, 3007 bp, Homo sapiens
  misc_feature (2873)..(2873): n is a, c, g, or t
gtccaggagcttctggccagggcatagtagttgctagggacccttttctaggtactaggggagggggctccccaacctgcgggcaggcagctgcctccacgatgtttggttttaataaagtctctttgtttccttctctgtctctctgcccctctgctttcccttctctgtccagtccctctctccccggcttctccctccttctaggcctctgcggcccctccccgccttccctcccgggctgggggcggcgccgtgacgcggcggggcgggggaaggaagggggtgtcgctgacgccgcggcggcctccggcggctccggccttttgtgcgggcggttgggtcgggtgggggcggcggccgcggaaggccaggccggtgccctgcggggacgcccagcgcagcccagccccgcgcagcccagccctgccctgccctgccctgccctgccctgcgcccggggcgcgcccaccgcgccgcatccatgttcgacaccacaccccactctggccggagcacgccaagcagctccccatcgctccggaaacggctgcagctcctgcccccaagccggcccccacctgagccagaaccaggcaccatggtggagaagggatcagatagctcctcagagaagggtggggtgcctgggacccccagcacccagagcctaggcagccggaacttcatccgcaacagcaagaagatgcagagctggtacagtatgctgagccccacttataagcagcgtaatgaggacttccggaaactgttcagcaaactccccgaagcagaacgcctcattgtggattactcctgcgccctgcagcgtgagatcctgctccagggccgcctctacctctctgagaactggatctgcttctacagcaacatcttccgctgggagaccacgatctccatccagctgaaggaagtgacatgtctgaagaaggaaaagacggccaagctgatccccaacgccatccagatctgcacggagagcgagaagcatttcttcacttcctttggggcccgtgaccgctgcttcctcctcatcttccgcctctggcagaatgcactgcttgaaaaggacccccaaggaagtgggagatgtgatcgccctgagcgacatcacctcctcgggggcagctgaccgcagccaggagccaagcccagtgggttcgcgccgtggccatgtcacgcccaacctttcccgagccagcagcgacgcagaccatggggcagaggaggacaaggaggagcaggtagacagccagccagacgcctcctccagccagacagtgaccccggtggctgaacccccgagcacagagcccacccagcctgacgggcccaccaccctgggccccttggatctgctgcccagtgaggagctattgacagacacaagtaactcctcttcatccactggggaggaagacttggctgccctgcttcccgacctctccggccgcctcctcatcaactctgtcttccatgtgggcgctgagcggctccagcagatgctcttctcggactcgcccttcctccagggcttcctacagcagtgcaagttcacagacgtgaccctgagcccctggagtggggacagcaagtgccaccagcgccgggtgctgacgtacaccatccccatcagcaacccactgggccccaagagcgcctccgtggtggagacacagacgctgttccggcgcggcccccaggccggcgggtgtgtggtggactccgaggtgctgacgcagggcatcccctaccaggactacttctacactgcccaccgctactgcatcctgggtctggcccggaacaaggcgcggctccgagtgtcttctgagatccgctaccgaaagcagccgtggagcctggtgaagtcgctcattgagaagaactcgtggagcggcattgaagactatttccaccatctggagcgagagctcgccaaggctgagaagctgtctctggaggaaggcgggaaggatgcccggggcttgctatccggcctgcggcggcggaagcggcccctgagctggcgggctcacggggacgggccccagcacccagatcctgacccctgtgcccgggccggcattcacacctcgggctccctcagctcccgcttctccgaaccatctgtggaccagggccccggggcaggcatccccagtgccctggttctcatcagcattgtccttatcatcctcatcgccctcaacgtcctgctcttctaccgcctctggtccctggaaaggacagcccacacctttgagtcctggcacagcctggccctggccaagggcaagttcccccagacggccacagagtgggccgagatcctggcgctgcagaagcaattccacagcgtggaggtgcacaagtggaggcagatcctgcgggcctccgtggagctcctggatgagatgaagttctcgctggagaagctgcaccaaggcatcacagtctcagaccctccctttgacacccagccccggcccgatgacagcttttcctgaggaccccggccacgcagctgttcccccacatggacagatggacacacagagcctcggcggccactgctggcacggtgtgagcgccaggcatctcccacccgcccctcccgacggcccaaccaggggctgtgcagacgtggggaccacggaaccgagatgcactttagaccagggagctggcccggcctctggcaggccccccactaacttattttgcccggctgaggttgtggggggcgcctcctggggtgcacgattccctcagctctgggtttaatgtattatatttatttggggccgacagtgccccaataaagggtcagaagtgaaaaaaaaaaaaanaaaattcagggattttatgtacggtgcgggaaaaacagttctgaattggcctggactatgactttccggccccgtttctgtgacacgtgggaatctcccgtcccctaatggagccttatgccaaaccgtacctt

SEQ ID NO: 238490 - DNA, 2738 bp, Homo sapiens
gtccaggagcttctggccagggcatagtagttgctagggacccttttctaggtactaggggagggggctccccaacctgcgggcaggcagctgcctccacgatgtttggttttaataaagtctctttgtttccttctctgtctctctgcccctctgctttcccttctctgtccagtccctctctccccggcttctccctccttctaggcctctgcggcccctccccgccttccctcccgggctgggggcggcgccgtgacgcggcggggcgggggaaggaagggggtgtcgctgacgccgcggcggcctccggcggctccggccttttgtgcgggcggttgggtcgggtgggggcggcggccgcggaaggccaggccggtgccctgcggggacgcccagcgcagcccagccccgcgcagcccagccctgccctgccctgccctgccctgccctgcgcccggggcgcgcccaccgcgccgcatccatgttcgacaccacaccccactctggccggagcacgccaagcagctccccatcgctccggaaacggctgcagctcctgcccccaagccggcccccacctgagccagaaccaggcaccatggtggagaagggatcagatagctcctcagagaagggtggggtgcctgggacccccagcacccagagcctaggcagccggaacttcatccgcaacagcaagaagatgcagagctggtacagtatgctgagccccacttataagcagcgtaatgaggacttccggaaactgttcagcaaactccccgaagcagaacgcctcattgtggattactcctgcgccctgcagcgtgagatcctgctccagggccgcctctacctctctgagaactggatctgcttctacagcaacatcttccgctgggagaccacgatctccatccagctgaaggaagtgacatgtctgaagaaggaaaagacggccaagctgatccccaacgccatccagatctgcacggagagcgagaagcatttcttcacttcctttggggcccgtgaccgctgcttcctcctcatcttccgcctctggcagaatgcactgcttgaaaagacgctgagtccccgcgagctctggcacctggtgcatcagtgctacggctcagagctgggcctcaccagtgaggatgaggactatgtctcccccttgcagctgaacggtctggggacccccaaggaagtgggagatgtgatcgccctgagcgacatcacctcctcgggggcagctgaccgcagccaggagccaagcccagtgggttcgcgccgtggccatgtcacgcccaacctttcccgagccagcagcgacgcagaccatggggcagaggaggacaaggaggagcaggtagacagccagccagacgcctcctccagccagacagtgaccccggtggctgaacccccgagcacagagcccacccagcctgacgggcccaccaccctgggccccttggatctgctgcccagtgaggagctattgacagacacaagtaactcctcttcatccactggggaggaagacttggctgccctgcttcccgacctctccggccgcctcctcatcaactctgtcttccatgtgggcgctgagcggctccagcagatgctcttctcggactcgcccttcctccagggcttcctacagcagtgcaagttcacagacgtgaccctgagcccctggagtggggacagcaagtgccaccagcgccgggtgctgacgtacaccatccccatcagcaacccactgggccccaagagcgcctccgtggtggagacacagacgctgttccggcgcggcccccaggccggcgggtgtgtggtggactccgaggtgctgacgcagggcatcccctaccaggactacttctacactgcccaccgctactgcatcctgggtctggcccggaacaaggcgcggctccgagtgtcttctgagatccgctaccgaaagcagccgtggagcctggtgaagtcgctcattgagaagaactcgtggagcggcattgaagactatttccaccatctggagcgagagctcgccaaggctgagaagctgtctctggaggaaggcgggaaggatgcccggggcttgctatccggcctgcggcggcggaagcggcccctgagctggcgggctcacggggacgggccccagcacccagatcctgacccctgtgcccgggccggcattcacacctcgggctccctcagctcccgcttctccgaaccatctgtggaccagggccccggggcaggcatccccagtgccctggttctcatcagcattgtccttatcatcctcatcgccctcaacgtcctgctcttctaccgccctccctttgacacccagccccggcccgatgacagcttttcctgaggaccccggccacgcagctgttcccccacatggacagatggacacacagagcctcggcggccactgctggcacggtgtgagcgccaggcatctcccacccgcccctcccgacggcccaaccaggggctgtgcagacgtggggaccacggaaccgagatgcactttagaccagggagctggcccggcctctggcaggccccccactaacttattttgcccggctgaggttgtggggggcgcctcctggggtgcacgattccctcagctctgggtttaatgtattatatttatttggggccgacagtgccccaataaagggtcagaagtg

SEQ ID NO: 238491 - DNA, 2577 bp, Homo sapiens
gtccaggagcttctggccagggcatagtagttgctagggacccttttctaggtactaggggagggggctccccaacctgcgggcaggcagctgcctccacgatgtttggttttaataaagtctctttgtttccttctctgtctctctgcccctctgctttcccttctctgtccagtccctctctccccggcttctccctccttctaggcctctgcggcccctccccgccttccctcccgggctgggggcggcgccgtgacgcggcggggcgggggaaggaagggggtgtcgctgacgccgcggcggcctccggcggctccggccttttgtgcgggcggttgggtcgggtgggggcggcggccgcggaaggccaggccggtgccctgcggggacgcccagcgcagcccagccccgcgcagcccagccctgccctgccctgccctgccctgccctgcgcccggggcgcgcccaccgcgccgcatccatgttcgacaccacaccccactctggccggagcacgccaagcagctccccatcgctccggaaacggctgcagctcctgcccccaagccggcccccacctgagccagaaccaggcaccatggtggagaagggatcagatagctcctcagagaagggtggggtgcctgggacccccagcacccagagcctaggcagccggaacttcatccgcaacagcaagaagatgcagagctggtacagtatgctgagccccacttataagcagcgtaatgaggacttccggaaactgttcagcaaactccccgaagcagaacgcctcattgtggattactcctgcgccctgcagcgtgagatcctgctccagggccgcctctacctctctgagaactggatctgcttctacagcaacatcttccgctgggagaccacgatctccatccagctgaaggaagtgacatgtctgaagaaggaaaagacggccaagctgatccccaacgccatccagatctgcacggagagcgagaagcatttcttcacttcctttggggcccgtgaccgctgcttcctcctcatcttccgcctctggcagaatgcactgcttgaaaagacgctgagtccccgcgagctctggcacctggtgcatcagtgctacggctcagagctgggcctcaccagtgaggatgaggactatgtctcccccttgcagctgaacggtctggggacccccaaggaagtgggagatgtgatcgccctgagcgacatcacctcctcgggggcagctgaccgcagccaggagccaagcccagtgggttcgcgccgtggccatgtcacgcccaacctttcccgagccagcagcgacgcagaccatggggcagaggaggacaaggaggagcaggtagacagccagccagacgcctcctccagccagacagtgaccccggtggctgaacccccgagcacagagcccacccagcctgacgggcccaccaccctgggccccttggatctgctgcccagtgaggagctattgacagacacaagtaactcctcttcatccactggggaggaagacttggctgccctgcttcccgacctctccggccgcctcctcatcaactctgtcttccatgtgggcgctgagcggctccagcagatgctcttctcggactcgcccttcctccagggcttcctacagcagtgcaagttcacagacgtgaccctgagcccctggagtggggacagcaagtgccaccagcgccgggtgctgacgtacaccatccccatcagcaacccactgggccccaagagcgcctccgtggtggagacacagacgctgttccggcgcggcccccaggccggcgggtgtgtggtggactccgaggtgctgacgcagggcatcccctaccaggactacttctacactgcccaccgctactgcatcctgggtctggcccggaacaaggcgcggctccgagtgtcttctgagatccgctaccgaaagcagccgtggagcctggtgaagtcgctcattgagaagaactcgtggagcggcattgaagactatttccaccatctggagcgagagctcgccaaggctgagaagctgtctctggaggaaggcgggaaggatgcccggggcttgctatccggcctgcggcggcggaagcggcccctgagctggcgggctcacggggacgggccccagcacccagatcctgacccctgtgcccgggccggcattcacacctcgggctccctcagctcccgcttctccgaaccatctgtggaccagggccccggggcaggcatccccagtgccctggttctcatcagcattgtccttatcatcctcatcgccctcaacgtcctgctcttctaccgcctctggtccctggaaaggacagcccacacctttgagtcctggcacagcctggccctggccaagggccggcctctggcaggccccccactaacttattttgcccggctgaggttgtggggggcgcctcctggggtgcacgattccctcagctctgggtttaatgtattatatttatttggggccgacagtgccccaataaagggtcagaagtg

SEQ ID NO: 238492 - DNA, 2280 bp, Homo sapiens
gtccaggagcttctggccagggcatagtagttgctagggacccttttctaggtactaggggagggggctccccaacctgcgggcaggcagctgcctccacgatgtttggttttaataaagtctctttgtttccttctctgtctctctgcccctctgctttcccttctctgtccagtccctctctccccggcttctccctccttctaggcctctgcggcccctccccgccttccctcccgggctgggggcggcgccgtgacgcggcggggcgggggaaggaagggggtgtcgctgacgccgcggcggcctccggcggctccggccttttgtgcgggcggttgggtcgggtgggggcggcggccgcggaaggccaggccggtgccctgcggggacgcccagcgcagcccagccccgcgcagcccagccctgccctgccctgccctgccctgccctgcgcccggggcgcgcccaccgcgccgcatccatgttcgacaccacaccccactctggccggagcacgccaagcagctccccatcgctccggaaacggctgcagctcctgcccccaagccggcccccacctgagccagaaccaggcaccatggtggagaagggatcagatagctcctcagagaagggtggggtgcctgggacccccagcacccagagcctaggcagccggaacttcatccgcaacagcaagaagatgcagagctggtacagtatgctgagccccacttataagcagcgtaatgaggacttccggaaactgttcagcaaactccccgaagcagaacgcctcattgtggattactcctgcgccctgcagcgtgagatcctgctccagggccgcctctacctctctgagaactggatctgcttctacagcaacatcttccgctgggagaccacgatctccatccagctgaaggaagtgacatgtctgaagaaggaaaagacggccaagctgatccccaacgccatccagatctgcacggagagcgagaagcatttcttcacttcctttggggcccgtgaccgctgcttcctcctcatcttccgcctctggcagaatgcactgcttgaaaagacgctgagtccccgcgagctctggcacctggtgcatcagtgctacggctcagagctgggcctcaccagtgaggatgaggactatgtctcccccttgcagctgaacggtctggggacccccaaggaagtgggagatgtgatcgccctgagcgacatcacctcctcgggggcagctgaccgcagccaggagccaagcccagtgggttcgcgccgtggccatgtcacgcccaacctttcccgagccagcagcgacgcagaccatggggcagaggaggacaaggaggagcaggtagacagccagccagacgcctcctccagccagacagtgaccccggtggctgaacccccgagcacagagcccacccagcctgacgggcccaccaccctgggccccttggatctgctgcccagtgaggagctattgacagacacaagtaactcctcttcatccactggggaggaagacttggctgccctgcttcccgacctctccggccgcctcctcatcaactctgtcttccatgtgggcgctgagcggctccagcagatgctcttctcggactcgcccttcctccagggcttcctacagcagtgcaagttcacagacgtgaccctgagcccctggagtggggacagcaagtgccaccagcgccgggtgctgacgtacaccatccccatcagcaacccactgggccccaagagcgcctccgtggtggagacacagacgctgttccggcgcggcccccaggccggcgggtgtgtggtggactccgaggtgctgacgcagggcatcccctaccaggactacttctacactgcccaccgctactgcatcctgggtctggcccggaacaaggcgcggctccgagtgtcttctgagatccgctaccgaaagcagccgtggagcctggtgaagtcgctcattgagaagaactcgtggagcggcattgaagactatttccaccatctggagcgagagctcgccaaggctgagaagctgtctctggaggaaggcgggaaggatgcccggggcttgctatccggcctgcggcggcggaagcggcccctgagctggcgggctcacggggacgggccccagcatctccgctttggtttccaaagcggagatgctgacccctatagttaagttttgtaagcggaccctcagagccagcatctccgctttggaaa

SEQ ID NO: 238493 - DNA, 914 bp, Homo sapiens
  misc_feature (780)..(780): n is a, c, g, or t
catctgactccaagctgctctcctgcaggctccctcagctcccgcttctccgaaccatctgtggaccagggccccggggcaggcatccccagtgccctggttctcatcagcattgtccttatcatcctcatcgccctcaacgtcctgctcttctaccgcctctggtccctggaaaggacagcccacacctttgagtcctggcacagcctggccctggccaagggcaagttcccccagacggccacagagtgggccgagatcctggcgctgcagaagcaattccacagcgtggaggtgcacaagtggaggcagatcctgcgggcctccgtggagctcctggatgagatgaagttctcgctggagaagctgcaccaaggcatcacagtctcagaccctccctttgacacccagccccggcccgatgacagcttttcctgaggaccccggccacgcagctgttcccccacatggacagatggacacacagagcctcggcggccactgctggcacggtgtgagcgccaggcatctcccacccgcccctcccgacggcccaaccaggggctgtgcagacgtggggaccacggaaccgagatgcactttagaccagggagctggcccggcctctggcaggccccccactaacttattttgcccggctgaggttgtggggggcgcctcctggggtgcacgattccctcagctctgggtttaatgtattatatttatttggggccgacagtgccccaataaagggtcagaagtgaaaaaaaaaaaaanaaaattcagggattttatgtacggtgcgggaaaaacagttctgaattggcctggactatgactttccggccccgtttctgtgacacgtgggaatctcccgtcccctaatggagccttatgccaaaccgtacctt

SEQ ID NO: 238494 - DNA, 863 bp, Homo sapiens
  misc_feature (729)..(729): n is a, c, g, or t
agttgtttgggggtgttcagagcatctagaccccaggaatcctgacctctgacccctgtccccagccttatcatcctcatcgccctcaacgtcctgctcttctaccgcctctggtccctggaaaggacagcccacacctttgagtcctggcacagcctggccctggccaagggcaagttcccccagacggccacagagtgggccgagatcctggcgctgcagaagcaattccacagcgtggaggtgcacaagtggaggcagatcctgcgggcctccgtggagctcctggatgagatgaagttctcgctggagaagctgcaccaaggcatcacagtctcagaccctccctttgacacccagccccggcccgatgacagcttttcctgaggaccccggccacgcagctgttcccccacatggacagatggacacacagagcctcggcggccactgctggcacggtgtgagcgccaggcatctcccacccgcccctcccgacggcccaaccaggggctgtgcagacgtggggaccacggaaccgagatgcactttagaccagggagctggcccggcctctggcaggccccccactaacttattttgcccggctgaggttgtggggggcgcctcctggggtgcacgattccctcagctctgggtttaatgtattatatttatttggggccgacagtgccccaataaagggtcagaagtgaaaaaaaaaaaaanaaaattcagggattttatgtacggtgcgggaaaaacagttctgaattggcctggactatgactttccggccccgtttctgtgacacgtgggaatctcccgtcccctaatggagccttatgccaaaccgtacctt

SEQ ID NO: 238495 - DNA, 1230 bp, Homo sapiens
  misc_feature (1096)..(1096): n is a, c, g, or t
cacccgccaccacgcctggctaatttttgtatttttagtagagacgggctttcaccatgttggccaggctggtcttgaactcctgaccttaagtgatccaccggtctcagcctcccaaagtgctgagattacacgcatgaggcactgtgcccggccgttatcccggttttatacataggtaggcgatatgaggcatccagaggttcgaggagctcaggagcttgcccgaggtcacagagtgggtaatggtgacagctaacatgtgctgagcacttagtgtacaccaggttctcagtgctcttcagaaccctgaaataatcctgtggagcagatgtgttatagacccgtatttcaaatgaggggattttggctcagggtggttacgggacttgcctgaggttaactgaggtaacaagcagcagagccaggatttgaacctaggccatcggggtcacaggcacacactaagccccttcctctgctgcctctgagaagttaaactgggtgcagcatggctgtgctcttttcaccaagggaccctggggtggggcagtatggcctctagaccgtcctcagtttctcaatggcaaggtgggggtgggcgacatcaccccccagcctccagcgttcacccccgaccctgctcacctcctccccgcagatgaagttctcgctggagaagctgcaccaaggcatcacagtctcagaccctccctttgacacccagccccggcccgatgacagcttttcctgaggaccccggccacgcagctgttcccccacatggacagatggacacacagagcctcggcggccactgctggcacggtgtgagcgccaggcatctcccacccgcccctcccgacggcccaaccaggggctgtgcagacgtggggaccacggaaccgagatgcactttagaccagggagctggcccggcctctggcaggccccccactaacttattttgcccggctgaggttgtggggggcgcctcctggggtgcacgattccctcagctctgggtttaatgtattatatttatttggggccgacagtgccccaataaagggtcagaagtgaaaaaaaaaaaaanaaaattcagggattttatgtacggtgcgggaaaaacagttctgaattggcctggactatgactttccggccccgtttctgtgacacgtgggaatctcccgtcccctaatggagccttatgccaaaccgtacctt

SEQ ID NO: 238496 - DNA, 1094 bp, Homo sapiens
  misc_feature (960)..(960): n is a, c, g, or t
gtccaggagcttctggccagggcatagtagttgctagggacccttttctaggtactaggggagggggctccccaacctgcgggcaggcagctgcctccacgatgtttggttttaataaagtctctttgtttccttctctgtctctctgcccctctgctttcccttctctgtccagtccctctctccccggcttctccctccttctaggcctctgcggcccctccccgccttccctcccgggctgggggcggcgccgtgacgcggcggggcgggggaaggaagggggtgtcgctgacgccgcggcggcctccggcggctccggccttttgtgcgggcggttgggtcgggtgggggcggcggccgcggaaggccaggccggtgccctgcggggacgcccagcgcagcccagccccgcgcagcccagccctgccctgccctgccctgccctgccctgcgcccggggcgcgcccaccgcgccgcatccatgttcgacaccacaccccactctggccggagcacgccaagcagctccccatcgctccggaaacggctgcagctcctgcccccaagccggcccccacctgagccagaaccaggcaccatggtggagaagggatcagatagctcctcagagaagggtggggtgcctgggacccccagcacacagagcctcggcggccactgctggcacggtgtgagcgccaggcatctcccacccgcccctcccgacggcccaaccaggggctgtgcagacgtggggaccacggaaccgagatgcactttagaccagggagctggcccggcctctggcaggccccccactaacttattttgcccggctgaggttgtggggggcgcctcctggggtgcacgattccctcagctctgggtttaatgtattatatttatttggggccgacagtgccccaataaagggtcagaagtgaaaaaaaaaaaaanaaaattcagggattttatgtacggtgcgggaaaaacagttctgaattggcctggactatgactttccggccccgtttctgtgacacgtgggaatctcccgtcccctaatggagccttatgccaaaccgtacctt

SEQ ID NO: 238497 - DNA, 267 bp, Homo sapiens
gtgtgaacagtgtgagaccccttgtggctctctgtaggcttggaaccctcccttctaagaccctgggagtacccaggggcactttggaggcaataatgataactgacgttgtccacctgttacagttagtatagcatgtgccacgcattattccactacctggccactgtgtcctcgagatccacgccctgctcggctgcattattcccaagtcctgcttgactgtgagcatcagggctctccaccagctacagccactgacacctc

SEQ ID NO: 238498 - DNA, 2972 bp, Homo sapiens
gtccaggagcttctggccagggcatagtagttgctagggacccttttctaggtactaggggagggggctccccaacctgcgggcaggcagctgcctccacgatgtttggttttaataaagtctctttgtttccttctctgtctctctgcccctctgctttcccttctctgtccagtccctctctccccggcttctccctccttctaggcctctgcggcccctccccgccttccctcccgggctgggggcggcgccgtgacgcggcggggcgggggaaggaagggggtgtcgctgacgccgcggcggcctccggcggctccggccttttgtgcgggcggttgggtcgggtgggggcggcggccgcggaaggccaggccggtgccctgcggggacgcccagcgcagcccagccccgcgcagcccagccctgccctgccctgccctgccctgccctgcgcccggggcgcgcccaccgcgccgcatccatgttcgacaccacaccccactctggccggagcacgccaagcagctccccatcgctccggaaacggctgcagctcctgcccccaagccggcccccacctgagccagaaccaggcaccatggtggagaagggatcagatagctcctcagagaagggtggggtgcctgggacccccagcacccagagcctaggcagccggaacttcatccgcaacagcaagaagatgcagagctggtacagtatgctgagccccacttataagcagcgtaatgaggacttccggaaactgttcagcaaactccccgaagcagaacgcctcattgtggattactcctgcgccctgcagcgtgagatcctgctccagggccgcctctacctctctgagaactggatctgcttctacagcaacatcttccgctgggagaccacgatctccatccagctgaaggaagtgacatgtctgaagaaggaaaagacggccaagctgatccccaacgccatccagatctgcacggagagcgagaagcatttcttcacttcctttggggcccgtgaccgctgcttcctcctcatcttccgcctctggcagaatgcactgcttgaaaagacgctgagtccccgcgagctctggcacctggtgcatcagtgctacggctcagagctgggcctcaccagtgaggatgaggactatgtctcccccttgcagctgaacggtctggggacccccaaggaagtgggagatgtgatcgccctgagcgacatcacctcctcgggggcagctgaccgcagccaggagccaagcccagtgggttcgcgccgtggccatgtcacgcccaacctttcccgagccagcagcgacgcagaccatggggcagaggaggacaaggaggagcaggtagacagccagccagacgcctcctccagccagacagtgaccccggtggctgaacccccgagcacagagcccacccagcctgacgggcccaccaccctgggccccttggatctgctgcccagtgaggagctattgacagacacaagtaactcctcttcatccactggggaggaagacttggctgccctgcttcccgacctctccggccgcctcctcatcaactctgtcttccatgtgggcgctgagcggctccagcagatgctcttctcggactcgcccttcctccagggcttcctacagcagtgcaagttcacagacgtgaccctgagcccctggagtggggacagcaagtgccaccagcgccgggtgctgacgtacaccatccccatcagcaacccactgggccccaagagcgcctccgtggtggagacacagacgctgttccggcgcggcccccaggccggcgggtgtgtggtggactccgaggtgctgacgcagggcatcccctaccaggactacttctacactgcccaccgctactgcatcctgggtctggcccggaacaaggcgcggctccgagtgtcttctgagatccgctaccgaaagcagccgtggagcctggtgaagtcgctcattgagaagaactcgtggagcggcattgaagactatttccaccatctggagcgagagctcgccaaggctgagaagctgtctctggaggaaggcgggaaggatgcccggggcttgctatccggcctgcggcggcggaagcggcccctgagctggcgggctcacggggacgggccccagcacccagatcctgacccctgtgcccgggccggcattcacacctcgggctccctcagctcccgcttctccgaaccatctgtggaccagggccccggggcaggcatccccagtgccctggttctcatcagcattgtccttatcatcctcatcgccctcaacgtcctgctcttctaccgcctctggtccctggaaaggacagcccacacctttgagtcctggcacagcctggccctggccaagggcaagttcccccagacggccacagagtgggccgagatcctggcgctgcagaagcaattccacagcgtggaggtgcacaagtggaggcagatcctgcgggcctccgtggagctcctggatgagatgaagttctcgctggagaagctgcaccaaggcatcacagtctcagaccctccctttgacacccagccccggcccgatgacagcttttcctgaggaccccggccacgcagctgttcccccacatggacagatggacacacagagcctcggcggccactgctggcacggtgtgagcgccaggcatctcccacccgcccctcccgacggcccaaccaggggctgtgcagacgtggggaccacggaaccgagatgcactttagaccagggagctggcccggcctctggcaggccccccactaacttattttgcccggctgaggttgtggggggcgcctcctggggtgcacgattccctcagctctgggtttaatgtattatatttatttggggccgacagtgccccaataaagggtcagaagtg

SEQ ID NO: 238499 - DNA, 3120 bp, Homo sapiens
  misc_feature (2986)..(2986): n is a, c, g, or t
gtccaggagcttctggccagggcatagtagttgctagggacccttttctaggtactaggggagggggctccccaacctgcgggcaggcagctgcctccacgatgtttggttttaataaagtctctttgtttccttctctgtctctctgcccctctgctttcccttctctgtccagtccctctctccccggcttctccctccttctaggcctctgcggcccctccccgccttccctcccgggctgggggcggcgccgtgacgcggcggggcgggggaaggaagggggtgtcgctgacgccgcggcggcctccggcggctccggccttttgtgcgggcggttgggtcgggtgggggcggcggccgcggaaggccaggccggtgccctgcggggacgcccagcgcagcccagccccgcgcagcccagccctgccctgccctgccctgccctgccctgcgcccggggcgcgcccaccgcgccgcatccatgttcgacaccacaccccactctggccggagcacgccaagcagctccccatcgctccggaaacggctgcagctcctgcccccaagccggcccccacctgagccagaaccaggcaccatggtggagaagggatcagatagctcctcagagaagggtggggtgcctgggacccccagcacccagagcctaggcagccggaacttcatccgcaacagcaagaagatgcagagctggtacagtatgctgagccccacttataagcagcgtaatgaggacttccggaaactgttcagcaaactccccgaagcagaacgcctcattgtggattactcctgcgccctgcagcgtgagatcctgctccagggccgcctctacctctctgagaactggatctgcttctacagcaacatcttccgctgggagaccacgatctccatccagctgaaggaagtgacatgtctgaagaaggaaaagacggccaagctgatccccaacgccatccagatctgcacggagagcgagaagcatttcttcacttcctttggggcccgtgaccgctgcttcctcctcatcttccgcctctggcagaatgcactgcttgaaaagacgctgagtccccgcgagctctggcacctggtgcatcagtgctacggctcagagctgggcctcaccagtgaggatgaggactatgtctcccccttgcagctgaacggtctggggacccccaaggaagtgggagatgtgatcgccctgagcgacatcacctcctcgggggcagctgaccgcagccaggagccaagcccagtgggttcgcgccgtggccatgtcacgcccaacctttcccgagccagcagcgacgcagaccatggggcagaggaggacaaggaggagcaggtagacagccagccagacgcctcctccagccagacagtgaccccggtggctgaacccccgagcacagagcccacccagcctgacgggcccaccaccctgggccccttggatctgctgcccagtgaggagctattgacagacacaagtaactcctcttcatccactggggaggaagacttggctgccctgcttcccgacctctccggccgcctcctcatcaactctgtcttccatgtgggcgctgagcggctccagcagatgctcttctcggactcgcccttcctccagggcttcctacagcagtgcaagttcacagacgtgaccctgagcccctggagtggggacagcaagtgccaccagcgccgggtgctgacgtacaccatccccatcagcaacccactgggccccaagagcgcctccgtggtggagacacagacgctgttccggcgcggcccccaggccggcgggtgtgtggtggactccgaggtgctgacgcagggcatcccctaccaggactacttctacactgcccaccgctactgcatcctgggtctggcccggaacaaggcgcggctccgagtgtcttctgagatccgctaccgaaagcagccgtggagcctggtgaagtcgctcattgagaagaactcgtggagcggcattgaagactatttccaccatctggagcgagagctcgccaaggctgagaagctgtctctggaggaaggcgggaaggatgcccggggcttgctatccggcctgcggcggcggaagcggcccctgagctggcgggctcacggggacgggccccagcacccagatcctgacccctgtgcccgggccggcattcacacctcgggctccctcagctcccgcttctccgaaccatctgtggaccagggccccggggcaggcatccccagtgccctggttctcatcagcattgtccttatcatcctcatcgccctcaacgtcctgctcttctaccgcctctggtccctggaaaggacagcccacacctttgagtcctggcacagcctggccctggccaagggcaagttcccccagacggccacagagtgggccgagatcctggcgctgcagaagcaattccacagcgtggaggtgcacaagtggaggcagatcctgcgggcctccgtggagctcctggatgagatgaagttctcgctggagaagctgcaccaaggcatcacagtctcagaccctccctttgacacccagccccggcccgatgacagcttttcctgaggaccccggccacgcagctgttcccccacatggacagatggacacacagagcctcggcggccactgctggcacggtgtgagcgccaggcatctcccacccgcccctcccgacggcccaaccaggggctgtgcagacgtggggaccacggaaccgagatgcactttagaccagggagctggcccggcctctggcaggccccccactaacttattttgcccggctgaggttgtggggggcgcctcctggggtgcacgattccctcagctctgggtttaatgtattatatttatttggggccgacagtgccccaataaagggtcagaagtgaaaaaaaaaaaaanaaaattcagggattttatgtacggtgcgggaaaaacagttctgaattggcctggactatgactttccggccccgtttctgtgacacgtgggaatctcccgtcccctaatggagccttatgccaaaccgtacctt

SEQ ID NO: 238500 - DNA, 2377 bp, Homo sapiens
  misc_feature (2243)..(2243): n is a, c, g, or t
gtacctcatggcgagctgcagctcgggggcgagctgcctccccagaagcagaacgcctcattgtggattactcctgcgccctgcagcgtgagatcctgctccagggccgcctctacctctctgagaactggatctgcttctacagcaacatcttccgctgggagaccacgatctccatccagctgaaggaagtgacatgtctgaagaaggaaaagacggccaagctgatccccaacgccatccagatctgcacggagagcgagaagcatttcttcacttcctttggggcccgtgaccgctgcttcctcctcatcttccgcctctggcagaatgcactgcttgaaaagacgctgagtccccgcgagctctggcacctggtgcatcagtgctacggctcagagctgggcctcaccagtgaggatgaggactatgtctcccccttgcagctgaacggtctggggacccccaaggaagtgggagatgtgatcgccctgagcgacatcacctcctcgggggcagctgaccgcagccaggagccaagcccagtgggttcgcgccgtggccatgtcacgcccaacctttcccgagccagcagcgacgcagaccatggggcagaggaggacaaggaggagcaggtagacagccagccagacgcctcctccagccagacagtgaccccggtggctgaacccccgagcacagagcccacccagcctgacgggcccaccaccctgggccccttggatctgctgcccagtgaggagctattgacagacacaagtaactcctcttcatccactggggaggaagacttggctgccctgcttcccgacctctccggccgcctcctcatcaactctgtcttccatgtgggcgctgagcggctccagcagatgctcttctcggactcgcccttcctccagggcttcctacagcagtgcaagttcacagacgtgaccctgagcccctggagtggggacagcaagtgccaccagcgccgggtgctgacgtacaccatccccatcagcaacccactgggccccaagagcgcctccgtggtggagacacagacgctgttccggcgcggcccccaggccggcgggtgtgtggtggactccgaggtgctgacgcagggcatcccctaccaggactacttctacactgcccaccgctactgcatcctgggtctggcccggaacaaggcgcggctccgagtgtcttctgagatccgctaccgaaagcagccgtggagcctggtgaagtcgctcattgagaagaactcgtggagcggcattgaagactatttccaccatctggagcgagagctcgccaaggctgagaagctgtctctggaggaaggcgggaaggatgcccggggcttgctatccggcctgcggcggcggaagcggcccctgagctggcgggctcacggggacgggccccagcacccagatcctgacccctgtgcccgggccggcattcacacctcgggctccctcagctcccgcttctccgaaccatctgtggaccagggccccggggcaggcatccccagtgccctggttctcatcagcattgtccttatcatcctcatcgccctcaacgtcctgctcttctaccgcctctggtccctggaaaggacagcccacacctttgagtcctggcacagcctggccctggccaagggcaagttcccccagacggccacagagtgggccgagatcctggcgctgcagaagcaattccacagcgtggaggtgcacaagtggaggcagatcctgcgggcctccgtggagctcctggatgagatgaagttctcgctggagaagctgcaccaaggcatcacagtctcagaccctccctttgacacccagccccggcccgatgacagcttttcctgaggaccccggccacgcagctgttcccccacatggacagatggacacacagagcctcggcggccactgctggcacggtgtgagcgccaggcatctcccacccgcccctcccgacggcccaaccaggggctgtgcagacgtggggaccacggaaccgagatgcactttagaccagggagctggcccggcctctggcaggccccccactaacttattttgcccggctgaggttgtggggggcgcctcctggggtgcacgattccctcagctctgggtttaatgtattatatttatttggggccgacagtgccccaataaagggtcagaagtgaaaaaaaaaaaaanaaaattcagggattttatgtacggtgcgggaaaaacagttctgaattggcctggactatgactttccggccccgtttctgtgacacgtgggaatctcccgtcccctaatggagccttatgccaaaccgtacctt

SEQ ID NO: 238501 - DNA, 2294 bp, Homo sapiens
  misc_feature (2160)..(2160): n is a, c, g, or t
tccccacttgggtcgcgttgcgtcctgttctcccccgtgaccgctgcttcctcctcatcttccgcctctggcagaatgcactgcttgaaaagacgctgagtccccgcgagctctggcacctggtgcatcagtgctacggctcagagctgggcctcaccagtgaggatgaggactatgtctcccccttgcagctgaacggtctggggtgagttggaggtcaaaggaggttgaagggttcgggggagaacaggacggtcggcgtgcagagttcctggagtgctggggggcctgagatggttgtatgacgtctggaggattcaggagggtgtatggggtctcaaggacacagcagtcccgcttcctcccctttcccacaggacccccaaggaagtgggagatgtgatcgccctgagcgacatcacctcctcgggggcagctgaccgcagccaggagccaagcccagtgggttcgcgccgtggccatgtcacgcccaacctttcccgagccagcagcgacgcagaccatggggcagaggaggacaaggaggagcaggtagacagccagccagacgcctcctccagccagacagtgaccccggtggctgaacccccgagcacagagcccacccagcctgacgggcccaccaccctgggccccttggatctgctgcccagtgaggagctattgacagacacaagtaactcctcttcatccactggggaggaagacttggctgccctgcttcccgacctctccggccgcctcctcatcaactctgtcttccatgtgggcgctgagcggctccagcagatgctcttctcggactcgcccttcctccagggcttcctacagcagtgcaagttcacagacgtgaccctgagcccctggagtggggacagcaagtgccaccagcgccgggtgctgacgtacaccatccccatcagcaacccactgggccccaagagcgcctccgtggtggagacacagacgctgttccggcgcggcccccaggccggcgggtgtgtggtggactccgaggtgctgacgcagggcatcccctaccaggactacttctacactgcccaccgctactgcatcctgggtctggcccggaacaaggcgcggctccgagtgtcttctgagatccgctaccgaaagcagccgtggagcctggtgaagtcgctcattgagaagaactcgtggagcggcattgaagactatttccaccatctggagcgagagctcgccaaggctgagaagctgtctctggaggaaggcgggaaggatgcccggggcttgctatccggcctgcggcggcggaagcggcccctgagctggcgggctcacggggacgggccccagcacccagatcctgacccctgtgcccgggccggcattcacacctcgggctccctcagctcccgcttctccgaaccatctgtggaccagggccccggggcaggcatccccagtgccctggttctcatcagcattgtccttatcatcctcatcgccctcaacgtcctgctcttctaccgcctctggtccctggaaaggacagcccacacctttgagtcctggcacagcctggccctggccaagggcaagttcccccagacggccacagagtgggccgagatcctggcgctgcagaagcaattccacagcgtggaggtgcacaagtggaggcagatcctgcgggcctccgtggagctcctggatgagatgaagttctcgctggagaagctgcaccaaggcatcacagtctcagaccctccctttgacacccagccccggcccgatgacagcttttcctgaggaccccggccacgcagctgttcccccacatggacagatggacacacagagcctcggcggccactgctggcacggtgtgagcgccaggcatctcccacccgcccctcccgacggcccaaccaggggctgtgcagacgtggggaccacggaaccgagatgcactttagaccagggagctggcccggcctctggcaggccccccactaacttattttgcccggctgaggttgtggggggcgcctcctggggtgcacgattccctcagctctgggtttaatgtattatatttatttggggccgacagtgccccaataaagggtcagaagtgaaaaaaaaaaaaanaaaattcagggattttatgtacggtgcgggaaaaacagttctgaattggcctggactatgactttccggccccgtttctgtgacacgtgggaatctcccgtcccctaatggagccttatgccaaaccgtacctt

SEQ ID NO: 238502 - DNA, 2898 bp, Homo sapiens
gtccaggagcttctggccagggcatagtagttgctagggacccttttctaggtactaggggagggggctccccaacctgcgggcaggcagctgcctccacgatgtttggttttaataaagtctctttgtttccttctctgtctctctgcccctctgctttcccttctctgtccagtccctctctccccggcttctccctccttctaggcctctgcggcccctccccgccttccctcccgggctgggggcggcgccgtgacgcggcggggcgggggaaggaagggggtgtcgctgacgccgcggcggcctccggcggctccggccttttgtgcgggcggttgggtcgggtgggggcggcggccgcggaaggccaggccggtgccctgcggggacgcccagcgcagcccagccccgcgcagcccagccctgccctgccctgccctgccctgccctgcgcccggggcgcgcccaccgcgccgcatccatgttcgacaccacaccccactctggccggagcacgccaagcagctccccatcgctccggaaacggctgcagctcctgcccccaagccggcccccacctgagccagaaccaggcaccatggtggagaagggatcagatagctcctcagagaagggtggggtgcctgggacccccagcacccagagcctaggcagccggaacttcatccgcaacagcaagaagatgcagagctggtacagtatgctgagccccacttataagcagcgtaatgaggacttccggaaactgttcagcaaactccccgaagcagaacgcctcattgtggattactcctgcgccctgcagcgtgagatcctgctccagggccgcctctacctctctgagaactggatctgcttctacagcaacatcttccgctgggagaccacgatctccatccagctgaaggaagtgacatgtctgaagaaggaaaagacggccaagctgatccccaacgccatccagatctgcacggagagcgagaagcatttcttcacttcctttggggcccgtgaccgctgcttcctcctcatcttccgcctctggcagaatgcactgcttgaaaagacgctgagtccccgcgagctctggcacctggtgcatcagtgctacggctcagagctgggcctcaccagtgaggatgaggactatgtctcccccttgcagctgaacggtctggggacccccaaggaagtgggagatgtgatcgccctgagcgacatcacctcctcgggggcagctgaccgcagccaggagccaagcccagtgggttcgcgccgtggccatgtcacgcccaacctttcccgagccagcagcgacgcagaccatggggcagaggaggacaaggaggagcaggtagacagccagccagacgcctcctccagccagacagtgaccccggtggctgaacccccgagcacagagcccacccagcctgacgggcccaccaccctgggccccttggatctgctgcccagtgaggagctattgacagacacaagtaactcctcttcatccactggggaggaagacttggctgccctgcttcccgacctctccggccgcctcctcatcaactctgtcttccatgtgggcgctgagcggctccagcagatgctcttctcggactcgcccttcctccagggcttcctacagcagtgcaagttcacagacgtgaccctgagcccctggagtggggacagcaagtgccaccagcgccgggtgctgacgtacaccatccccatcagcaacccactgggccccaagagcgcctccgtggtggagacacagacgctgttccggcgcggcccccaggccggcgggtgtgtggtggactccgaggtgctgacgcagggcatcccctaccaggactacttctacactgcccaccgctactgcatcctgggtctggcccggaacaaggcgcggctccgagtgtcttctgagatccgctaccgaaagcagccgtggagcctggtgaagtcgctcattgagaagaactcgtggagcggcattgaagactatttccaccatctggagcgagagctcgccaaggctgagaagctgtctctggaggaaggcgggaaggatgcccggggcttgctatccggcctgcggcggcggaagcggcccctgagctggcgggctcacggggacgggccccagcacccagatcctgacccctgtgcccgggccggcattcacacctcgggctccctcagctcccgcttctccgaaccatctgtggaccagggccccggggcaggcatccccagtgccctggttctcatcagcattgtccttatcatcctcatcgccctcaacgtcctgctcttctaccgcctctggtccctggaaaggacagcccacacctttgagtcctggcacagcctggccctggccaagggcaagttcccccagacggccacagagtgggccgagatcctggcgctgcagaagcaattccacagcgtggaggtgcacaagtggaggcagatcctgcgggcctccgtggagctcctggatgaggtaggaggcgccgctcgggcagggctcggggctgcggggctgcagggtcctgtgttgaaaccccaccgtgcggcaggcacttcccctctccggatctcagtgtcctcctctgtaaaatgaggaagccgctcagagtccccaccccacagcattgcaggggaaagcatggaagcatggatggaagacagaactgattggctcacgtcctggagaaaagtccagaggcgtctcacattaggcacggccgggtttggtcactcaatggcagtaagagtcagtctctcgtgcccactctgccctgtgcccatctccagggttggcttcattggaggccacccttttccccc

SEQ ID NO: 238503 - DNA, 1482 bp, Homo sapiens
  misc_feature (1348)..(1348): n is a, c, g, or t
tggagaagggatcagatagctcctccagggcttcctacagcagtgcaagttcacagacgtgaccctgagcccctggagtggggacagcaagtgccaccagcgccgggtgctgacgtacaccatccccatcagcaacccactgggccccaagagcgcctccgtggtggagacacagacgctgttccggcgcggcccccaggccggcgggtgtgtggtggactccgaggtgctgacgcagggcatcccctaccaggactacttctacactgcccaccgctactgcatcctgggtctggcccggaacaaggcgcggctccgagtgtcttctgagatccgctaccgaaagcagccgtggagcctggtgaagtcgctcattgagaagaactcgtggagcggcattgaagactatttccaccatctggagcgagagctcgccaaggctgagaagctgtctctggaggaaggcgggaaggatgcccggggcttgctatccggcctgcggcggcggaagcggcccctgagctggcgggctcacggggacgggccccagcacccagatcctgacccctgtgcccgggccggcattcacacctcgggctccctcagctcccgcttctccgaaccatctgtggaccagggccccggggcaggcatccccagtgccctggttctcatcagcattgtccttatcatcctcatcgccctcaacgtcctgctcttctaccgcctctggtccctggaaaggacagcccacacctttgagtcctggcacagcctggccctggccaagggcaagttcccccagacggccacagagtgggccgagatcctggcgctgcagaagcaattccacagcgtggaggtgcacaagtggaggcagatcctgcgggcctccgtggagctcctggatgagatgaagttctcgctggagaagctgcaccaaggcatcacagtctcagaccctccctttgacacccagccccggcccgatgacagcttttcctgaggaccccggccacgcagctgttcccccacatggacagatggacacacagagcctcggcggccactgctggcacggtgtgagcgccaggcatctcccacccgcccctcccgacggcccaaccaggggctgtgcagacgtggggaccacggaaccgagatgcactttagaccagggagctggcccggcctctggcaggccccccactaacttattttgcccggctgaggttgtggggggcgcctcctggggtgcacgattccctcagctctgggtttaatgtattatatttatttggggccgacagtgccccaataaagggtcagaagtgaaaaaaaaaaaaanaaaattcagggattttatgtacggtgcgggaaaaacagttctgaattggcctggactatgactttccggccccgtttctgtgacacgtgggaatctcccgtcccctaatggagccttatgccaaaccgtacctt

SEQ ID NO: 238504 - DNA, 2377 bp, Homo sapiens
gtccaggagcttctggccagggcatagtagttgctagggacccttttctaggtactaggggagggggctccccaacctgcgggcaggcagctgcctccacgatgtttggttttaataaagtctctttgtttccttctctgtctctctgcccctctgctttcccttctctgtccagtccctctctccccggcttctccctccttctaggcctctgcggcccctccccgccttccctcccgggctgggggcggcgccgtgacgcggcggggcgggggaaggaagggggtgtcgctgacgccgcggcggcctccggcggctccggccttttgtgcgggcggttgggtcgggtgggggcggcggccgcggaaggccaggccggtgccctgcggggacgcccagcgcagcccagccccgcgcagcccagccctgccctgccctgccctgccctgccctgcgcccggggcgcgcccaccgcgccgcatccatgttcgacaccacaccccactctggccggagcacgccaagcagctccccatcgctccggaaacggctgcagctcctgcccccaagccggcccccacctgagccagaaccaggcaccatggtggagaagggatcagatagctcctcagagaagggtggggtgcctgggacccccagcacccagagcctaggcagccggaacttcatccgcaacagcaagaagatgcagagctggtacagtatgctgagccccacttataagcagcgtaatgaggacttccggaaactgttcagcaaactccccgaagcagaacgcctcattgtggattactcctgcgccctgcagcgtgagatcctgctccagggccgcctctacctctctgagaactggatctgcttctacagcaacatcttccgctgggagaccacgatctccatccagctgaaggaagtgacatgtctgaagaaggaaaagacggccaagctgatccccaacgccatccagatctgcacggagagcgagaagcatttcttcacttcctttggggcccgtgaccgctgcttcctcctcatcttccgcctctggcagaatgcactgcttgaaaagacgctgagtccccgcgagctctggcacctggtgcatcagtgctacggctcagagctgggcctcaccagtgaggatgaggactatgtctcccccttgcagctgaacggtctggggacccccaaggaagtgggagatgtgatcgccctgagcgacatcacctcctcgggggcagctgaccgcagccaggagccaagcccagtgggttcgcgccgtggccatgtcacgcccaacctttcccgagccagcagcgacgcagaccatggggcagaggaggacaaggaggagcaggtagacagccagccagacgcctcctccagccagacagtgaccccggtggctgaacccccgagcacagagcccacccagcctgacgggcccaccaccctgggccccttggatctgctgcccagtgaggagctattgacagacacaagtaactcctcttcatccactggggaggaagacttggctgccctgcttcccgacctctccggccgcctcctcatcaactctgtcttccatgtgggcgctgagcggctccagcagatgctcttctcggactcgcccttcctccagggcttcctacagcagtgcaagttcacagacgtgaccctgagcccctggagtggggacagcaagtgccaccagcgccgggtgctgacgtacaccatccccatcagcaacccactgggccccaagagcgcctccgtggtggagacacagacgctgttccggcgcggcccccaggccggcgggtgtgtggtggactccgaggtgctgacgcagggcatcccctaccaggactacttctacactgcccaccgctactgcatcctgggtctggcccggaacaaggcgcggctccggtgagtggtggctgggcccctccacccgatgccctggtggccccagggcctcctgtccactcctcaagtcagcagcagagccttggttcccaccctggtggaggaacagaagcgtggggttcctgaggcccttgtcctccgaatagtggagggtagaggaagagtggccctgggatggctcctcccatctacagagggtgtttgagcctcaagactctgaggatacagcaaagccaggcaatatcacctctctcagggagctcatattctagtggggaattggacaatagagaaatgatcaggaaaatctgcagaacattcactggcagttaggcctatggagaaaaatgaggaaaacacggcaggctaaagaagcagggtgtggaggctttacacccgacacgctggtcagggaagggcc

SEQ ID NO: 238505 - DNA, 1732 bp, Homo sapiens
gtccaggagcttctggccagggcatagtagttgctagggacccttttctaggtactaggggagggggctccccaacctgcgggcaggcagctgcctccacgatgtttggttttaataaagtctctttgtttccttctctgtctctctgcccctctgctttcccttctctgtccagtccctctctccccggcttctccctccttctaggcctctgcggcccctccccgccttccctcccgggctgggggcggcgccgtgacgcggcggggcgggggaaggaagggggtgtcgctgacgccgcggcggcctccggcggctccggccttttgtgcgggcggttgggtcgggtgggggcggcggccgcggaaggccaggccggtgccctgcggggacgcccagcgcagcccagccccgcgcagcccagccctgccctgccctgccctgccctgccctgcgcccggggcgcgcccaccgcgccgcatccatgttcgacaccacaccccactctggccggagcacgccaagcagctccccatcgctccggaaacggctgcagctcctgcccccaagccggcccccacctgagccagaaccaggcaccatggtggagaagggatcagatagctcctcagagaagggtggggtgcctgggacccccagcacccagagcctaggcagccggaacttcatccgcaacagcaagaagatgcagagctggtacagtatgctgagccccacttataagcagcgtaatgaggacttccggaaactgttcagcaaactccccgaagcagaacgcctcattgtggattactcctgcgccctgcagcgtgagatcctgctccagggccgcctctacctctctgagaactggatctgcttctacagcaacatcttccgctgggagaccacgatctccatccagctgaaggaagtgacatgtctgaagaaggaaaagacggccaagctgatccccaacgccatccagatctgcacggagagcgagaaggtgacggaggacccggtgacgggaccacgcggtcccccgctcagcaggccgcctcccccaaacatgcaaagccccatttgttctgcaccctgagttctctccgagctgtccccttctctctgttctcccggcccaggcgcccatcacccctgacctgatccccgcaccagcctctcctctctttccctgcaacctgttacctcacacagctgctcaggaacagcagaaatagtaaaactcttccatgtatgtggcacctcagccgcccctcccttcgtaagtctccccgatgttgtgtcctgtccctgtcattgtggcctcatgtccgttggttgcaagatggctttctcaccagcggtccaacaagaagggggacaggtgtgggggacacttcccagcagacttctctttgtgttttgttggttaaaagtggatctggccaggtgtagtggctcatgcctgtaaccctagcattttggggaggctgaggcaggaagattgcttgagcccaggaggttgaggctagcctgggcaacatagtgagaccctgtctcttaaaaagcaaaaaattaaccaggtgtggtggcacgcacctgtagtcccagctactcactcaggaggctgagacaggaggatggcttgagcccaggaggttgaggctgcagtgagccgtgatcatgccactgcactccagcctgggtgacaaagccagaccctgtctca

SEQ ID NO: 238506 - DNA, 1500 bp, Homo sapiens
gtccaggagcttctggccagggcatagtagttgctagggacccttttctaggtactaggggagggggctccccaacctgcgggcaggcagctgcctccacgatgtttggttttaataaagtctctttgtttccttctctgtctctctgcccctctgctttcccttctctgtccagtccctctctccccggcttctccctccttctaggcctctgcggcccctccccgccttccctcccgggctgggggcggcgccgtgacgcggcggggcgggggaaggaagggggtgtcgctgacgccgcggcggcctccggcggctccggccttttgtgcgggcggttgggtcgggtgggggcggcggccgcggaaggccaggccggtgccctgcggggacgcccagcgcagcccagccccgcgcagcccagccctgccctgccctgccctgccctgccctgcgcccggggcgcgcccaccgcgccgcatccatgttcgaatgctgagccccacttataagcagcgtaatgaggacttccggaaactgttcagcaaactccccgaagcagaacgcctcattgtggattactcctgcgccctgcagcgtgagatcctgctccagggccgcctctacctctctgagaactggatctgcttctacagcaacatcttccgctgggagaccacgatctccatccagctgaaggaagtgacatgtctgaagaaggaaaagacggccaagctgatccccaacgccatccagatctgcacggagagcgagaaggtgacggaggacccggtgacgggaccacgcggtcccccgctcagcaggccgcctcccccaaacatgcaaagccccatttgttctgcaccctgagttctctccgagctgtccccttctctctgttctcccggcccaggcgcccatcacccctgacctgatccccgcaccagcctctcctctctttccctgcaacctgttacctcacacagctgctcaggaacagcagaaatagtaaaactcttccatgtatgtggcacctcagccgcccctcccttcgtaagtctccccgatgttgtgtcctgtccctgtcattgtggcctcatgtccgttggttgcaagatggctttctcaccagcggtccaacaagaagggggacaggtgtgggggacacttcccagcagacttctctttgtgttttgttggttaaaagtggatctggccaggtgtagtggctcatgcctgtaaccctagcattttggggaggctgaggcaggaagattgcttgagcccaggaggttgaggctagcctgggcaacatagtgagaccctgtctcttaaaaagcaaaaaattaaccaggtgtggtggcacgcacctgtagtcccagctactcactcaggaggctgagacaggaggatggcttgagcccaggaggttgaggctgcagtgagccgtgatcatgccactgcactccagcctgggtgacaaagccagaccctgtctca

SEQ ID NO: 238507 - DNA, 412 bp, Homo sapiens
caacattcaagaacagatgagtaatgtaagaagataaagggaaattctgaaaaaataaccaaaagtaatgctagagataaagtggatagtaacagaaataaagaatgcttttgattagctcctacattacttggattggctgaaagatacttaggaaataccaaactatgtggagagtagacagcatatttctacataacacataggtcaaagagagcatctcgggagaaattttaaaatagttttgaactgatgaaaacacagcttatcaatatttgtgggatgcagggcttagagggagatttatagtattgaatgcataattagaatagaaaaaagatctaaaatcaataatctaagtttttaccttaagaaactagaaaatgaaggacaaattcaatccaaataaggc

SEQ ID NO: 238508 - DNA, 757 bp, Homo sapiens
aatctatccaagattcccaatttacctctgtttctcttcccattcattcttacatgcctttattcaaaaactactgaatgtcttttattccctgaactggcttaagtacattaaagccccttaattactagtgcattgctgagttggcaggctatcacaaggaatgaaatcttaatggagtccacctatctgaaattcatagcctctgcccatatacttagcctgacaccagttttgggagagatataaactagatagtaggtgtgcatttaagcaggtaaaacattgagatggctaaggacgatagtggcgtcacatgtggtacattagatccaaaagaaagcaataaaagcattttgtcatttttggagaagatctagaatatgttagagtagctatcagccccaagggagacagtaatttaggctcctggtgcttgactcttaaaaagtagcttaatcatgaacagaagaaaatgatctgaagatcagatcctcagagccaatgtttcaactgtgttcctcagacatgcctcagaggccagttctacattgcaggtgggaggaggggctggaggagggagtcaatgaatgaaaacattttttccacttttagtttttcttaagtcttcctctgccacaataggaaatgaatagatactgtttaaaattgattaatcaagaagtagcatggtaaacatagtattttaaaagtggatataagaagaaaatgtgtagaaacctagaagaaaatgcta

SEQ ID NO: 238509 - DNA, 346 bp, Homo sapiens
tgtcctggtttaacagtggtttagagtgtaggctctggaacaacaatgctaaccccgggagcctggagccgctatcgatagaagacctagtgcaagtcattcaacgtcttcattgcctgccattcctcatatgtgtcaagtgtctggaagagtacctgtcccataacaagtcttcaattacctggagcaaatgcaagaaaatttaaaagctagactctctgctagctttcacggctacagaagggctctaccatgaactaagctgataggagccaaaggaattctatttcaaatcctaaaatacagttgaaaccgcccatgccaacaaaactttacgaaacatccc

SEQ ID NO: 238510 - DNA, 1930 bp, Homo sapiens
  misc_feature (643)..(643): n is a, c, g, or t
  misc_feature (1136)..(1136): n is a, c, g, or t
  misc_feature (1583)..(1583): n is a, c, g, or t
ttgacattgccaagcacccagtgtatcttatttctaatctctttgcccatgagccagagccgcttgcccaagggctcccagccaggggctgtggagttgtcaggtttgtgcctccgaagctgtgtcctgaccactgtggctgccgctcctggaggcctcagacctgctcccctacacacgtgggcagcaggactcccgagggcctctccccagacttcgggagaaggctcacctcgtgggagggagggctcgctcatgcccatctcctttcgttctttgcgggccactcggccaactgacgtcggcctctcctgtctggatgtccagtttctgtggctcactcctcaagccagatcatctgggactgagggtggcctctgggctcctgtagacttccacagccaggatttcacatccctccccagagcctcggaccgaacagccacaagcagccatgagtgtcgtgcctggactaagctggagagacaaaggcgtttgtggcaagggcccagctggaagccctggcaggccagagcatgcatgtgctggcttgcacgagcatactttggtgtttgtgttggggacaccgggcttctgagggactggcgtggctccagggtggggagcagcctggttgaagcgnggccaggcactcactctgttgttcagatcccagctccactgcctgctgtgtccacagtctcctcacctgtcaaatgggaatatctatgtggcgggagggtgctgaggtttccacgagctaatctgcctgctgtgtagtaactagtagcttttcttactgttagtgaacttgttttagtctgaaggaaggcacccatgccccaggtgaagtccagctgagttcagtgaggacgatggagacccttggtcttggcacccttctgccttacactgggaatgcctcaggcttgctcctgctgtgtgtctgtggttgcccactttctgctggtctccgagagactgattcaggtgttcaggagtctgttcgctattacatcacctccttgtgagaaataaagtggagcagcctcatccagacagcaaagcaaggagggagcgtgaggagcagccaggtgagctggtggcatggggccgcctgtgcagaggccggcctngctgcttcatgtggctcagggaggctcagcacgtccgtcatcacacctcagggcagcgagagtggacctggtgccttcagaagcccacccgaggcctgctgctctggcctgcaaaggtggagtcaccaaagctcattacaaagtgtttgcttatttttgtctgccctgcatttttttatttcttgcaaaggcctcagaggatgtgggccccagcccaaacacatcttgttttcactggtagagcttttcctagtgtctgcacaggggtgcttccagtggctctgccatagccccagacaagctgctgacacggcagccatgaggtctgggacaggttccagggggtgcttttggcctgctccagcaggagtggaggctggactggtctccagcaggagtggaggctggactggtctccagcaggagtggaggctggtctgggctccngcaggagtggaggctggtctgggctccaggagtggaggctggtctgggctccagcaggagtggaggctggtctggggagagagctacacctccccaggcccaggtctcacgaaaggagcatcgaagggcaccgaggaaaaagccacttagccctctcctgtcctgcaccattatctgggcccattggttcttgggtccctgtctttctcaacaggcagccccagttggggaattaagttgattctggactggctatgcctaatgatagctgcaatttgaaacccataaagttcgagttcagcaataaagttggggaggcagtgtcaacaccttccttgtagaacggc

SEQ ID NO: 238511 - DNA, 848 bp, Homo sapiens
gaagagacaggaaaactaggattacttcccagatctctagtatggccccgaaatgcaatcaactgaccaggttaggaatactgaaggaaaagcatgacatctactcagatctcacagtaaagtctgctggatacatagggcaagtatcactagcatagaattatacaacagctttaaggggaagttgcaccaaagtaagagggctaagattgaatattggagaacatctacttttggagggatggtgatgaagatatgtagcaaagaggtaaggaagaagaggtcagcatggtagcattgaaaaaataggacaggaagatttttttcaaatatcaaaattatatggctaaataagaaaaaagtctgaaaaaaggctaattcgggtttcaggagtttactggtgacctttttgggcttaacttcaattgaatgatgaaaggaagacaggtttaaaagagagtgtagattctgagaaactaaaagcaagaggtcaatttactaattctagatatttaataatagaagagaaacagaacttactgatagtgtgacaggacagtggggtaagccccatagagctttgaaaacagaagaaccgattgaagatctaaaaacagtggataagtgaagaagcaaagatgtggatgaggaaaccagcaagaaaattagaaacccactggaagaatgggaaaaaaatagagataaaatgcaaaccttttggggtgacagagacggaaaaagatgctcattcctgggaactctcttctaacagtaagtagaacataaggtcaaacgtccagatactgacactgaaaaaggatgaggaaagatacagtggagaatggact

SEQ ID NO: 238512 - DNA, 351 bp, Homo sapiens
gaagagacaggaaaactaggattacttcccagatctctagtatggccccgaaatgcaatcaactgaccaggttaggaatactgaaggaaaagcatgacatctactcagatctcacagtaaagtctgctggatacatagggcaagtatcactagcatagaattatacaacagctttaaggggaagttgcaccaaagtaagagggctaagattgaatattggagaacatctacttttggagggatggtgatgaagatatgtagcaaagaggtaaggaagaagaggtcagcacggatgcaaataaacattagtccaggcaccttttttgccttggtctactcaatttggttata

SEQ ID NO: 238513 - DNA, 480 bp, Homo sapiens
aatatgatccaagggaatatataagaatttataataattgtgcatatatagccttctgagattattggtggatctaggtacaaataacagaatctgtgggatgaacagaatactgggacagagtgagacattaaaaaagacttacactagtcaaaggcagcaagaagtggttctttgtccatttttaaaggttaagtggcatatcagagggaagaatgtgcccctgcgttgggggctatttaagaagaggtggtcttccagggtagctgtattactaaagaggtaagagagattgtatagggagaggtgcatcattttaatgtgatggtaagtagacctttgctgatcttaagtaaattttcaataaagtaccaagagtaggaactgaattagccacaagctatttgcccggaaatcatatatcatgtacaataaactcacagagtttgcaaataaacagaaaaaaataaagtagttgta

SEQ ID NO: 238514 - DNA, 339 bp, Homo sapiens
cgcactcggtgggctgtcctggggcacccatgttgtgtgttttggttttgtttattttgtatctgcctggtttttccaagtctaatcaggatgtcccctggggtgacattctttgctgagagaagggcacatgcctcggttccctgggctgtagaaagccagtgctcagccttgctttctgccgcagacttggtgcccggagactcgctatcaaagtgcagtggagataatgtccaatgggaggctgaggcaggagaatggcatgaggcagagcttgcagtgagccaagatcgcaccaccgtactccagcctgggcaacagagcgaggctctgtctcaa

SEQ ID NO: 238515 - DNA, 472 bp, Homo sapiens
gtgtttagagtgaaaacgatataaattcagggaagaagagagagacagtaatgggagtactttaaacattaacagcaatggtagactttaaaaacatttttcagtccttgctgcatcaaagtgataaagaaatatgatataaagaatctgagtcatataatttgcctgtctgatatataaggctgatgtaataaatatatcattctgttgttgtaaagagaaaaaaatacttttaaattcccctcagaacattttttaaaataggttatatttttaaacattgttaagtaggttacattgtattataaagaaagctgaaaaaaaaactaaaaagtagaaatattattaaccacatactctacaatgaaattttaggttaataacaaaagggagagccagaaaccaaacctttccaaatcccaaaacaaaaacctcaattacttgaatttaaaaatgtaaaattattgtccct

SEQ ID NO: 238516 - DNA, 445 bp, Homo sapiens
aatgagaagataaaaatccaggttatcattagccacattcactggtcaagaaaaaggcctctgcagaacacagctgagcagaaccacacagaagtggaagaagcaaagaggtttccagaagactaggatggtcggcagagagtatccgaattattgctccatgctgcgagatccctgttcctaggaaagccgaggtctgccttccaatgtgcaattctagcttaatagggaagttatatcactgttgacagtcttgtcctttcttaataaatcttaggagttatcccataaggaatattcattttccttcagacatgaagtgaccattaagatgcgccagtaaagaatccatggctttcagtgtctggccctatttcttctagttcaagaattttaagaaaaaatattgcaataaaaggtatatttttattagctacaaagtgga

SEQ ID NO: 238517 - DNA, 374 bp, Homo sapiens
atacttctgaaataattccagatctcatacattaagttgaaatcaaaagctgtggatcatgttataatataatatatttgaggtcaaaagccttcttgctgagaaaaagagaaaagggttgataagcgcaagagtgcatgtgtgcctgcaacagcaatttggtgtggggagttctcgaggacagcaaggatgtgagccatggcagcaaatcaggaggaagctaggtgttcaccacattaaccttatcattaagaaaacaatctgcctctcttggcctgggaatccctcctgagtgcttctaggctgcgagtgtcaaattgttctttacagatgctgagcagaagaggattttccatttcatcttttggccttcc

SEQ ID NO: 238518 - DNA, 346 bp, Homo sapiens
aaaacacccctgaatggtcacaacttcagaaaagagaatatggggataggaaagtaaaatgagattgtttggtacatgagtatcactctggaaaattccatggatgggaggatgttccaggtgcacattttaagcaataactcagcacagagtcagattgtgcagtgtaacaaaactgtccttagctgcatatttgtcagtctttctggaaggttcccagctcccccaagatggcagctggctctcgtccctgaggtcagaaagaacccctcccccgctgccctaggactcacagatttcttcacaaaagacacaaactctgcatggtcaaagcacatcacacatg

SEQ ID NO: 238519 - DNA, 420 bp, Homo sapiens
atagaggacaagcttgtgctcaggagggcctgaattatttcagttccctgaatgtgctggccctcctcatgcaggagctgccccagggtttgtaaaccttcccctactaccaggcaccaccactgctatctgatggccgcacaaaggaatgagtgaacaccgtcaggaagacattggtcctgtgctctacgagagggtgtgcccaaccaccactgtcctctcagcatcctccattgtgaccaacgtcaccagggctgcccgaggaaaccctaagagagggaggggtattttccgtgaaaacacacctggatgcaggtctaggaaaccaacccctggtcagagtagcccaagagagaacaggcccatgcccagtgctttggtaagaatgacaaattcttacttctaaacaacagttccaaa

SEQ ID NO: 238520 - DNA, 137 bp, Homo sapiens
gtttctatgtcttttggttttctttttcatctttcttccctttacatctctgtctgtctattttctttttcttgatcttccttactctctctctcttttcttcatttctttctttccatccttctgtcgtcttctcg

SEQ ID NO: 238521 - DNA, 395 bp, Homo sapiens
ttttaaagtgaattaacgaacaaaagcacgtacagcgttttatttttaatgtacacatttaagatacaatgtcatacacttatggaaaggtgcataatgagataagcagtttccataatatagcaacttctgggttaaaaattatttctataaaatctgttattcgtcaggcgcggtggctcgcgcctgtaatcacagcacttcgggaggctgaggcgggaggattgcttgaggccaggagttcaaggccagcctgggcattatagcgagacccccccccccaactctaatagtctcagctacttggaaggctgaggcaggagcatcacttgagcccaggagttctaggctgcagtgaggtatgtcagtgacaacagagcaagaccctatctttc

SEQ ID NO: 238522 - DNA, 532 bp, Homo sapiens
gtttttaaaaaattgctttattacctcacataccatttacatgcactttatgatatttacatgtaatttatgtacaataaacttcagcaattctaagtgcacactttgaagacttttgacaaatatatagtcttataaccaccaccacaaccgtggtacggaccctttccatgatccccaaaagtttccttgtgtctcagtgaagtcagtcccctccccccactctgggctctggaaacccagatctgctttctgtcatgacagttttgctttttctagaatttcatagaaacagaatcaacagtgtctcacttggcgtcccgttttgtcataccttttatgctgtctaaatgggggatgctggttttgatttgaagcaaagggagaaaagggtgatgttccgggtaacactatctgttcggaggcttgttgcctagtatcgacactctctattcatgggaaaaggtatcgctcaaggttaaactgcagaggttagtttccttgtatttatttaatgagctgaattgctatt

SEQ ID NO: 238523 - DNA, 595 bp, Homo sapiens
tttgctgcatccctcaccatgtggccccttcaactctaaaaccagtaatgatgcgtggaatctttcacaggcttggactctctgacctcctctttggttaacagccagggacaaatcgagttccagagggttctcatgatttggttaggaacacccaggtggtctccctttccttgtactggtaacacaatctagtcacaggagtaaagtgcatcctattaacagtctgaagattagtgggagaaatcatgatgccattttagcctgggtaatttataaagaaaagacacctgcctggctcaaggttctgcagacagtacgagaagtgtggtgctggaatatctttccggtgaggcctcaagaagtttacagtcacggtggaaggcaatgaggagccagcatatcacatggtgacagcaacagccagagcaaaagagggagggagaggtgccactcacacttaaacaaccagatctggtgtgaactgactcatcaccaaggggatggcactaacccattcatgagggatctgcccccatcatccagacacctcccaccaggcctcatctccaacactggggattacatttcatca

SEQ ID NO: 238524 - DNA, 540 bp, Homo sapiens
tttgctgcatccctcaccatgtggccccttcaactctaaaaccagtaatgatgcgtggaatctttcacaggcttggactctctgacctcctctttggttaacagccagggacaaatcgagttccagagggttctcatgatttggttaggaacacccaggtggtctccctttccttgtactggtaacacaatctagtcacaggagtaaacctgggtaatttataaagaaaagacacctgcctggctcaaggttctgcagacagtacgagaagtgtggtgctggaatatctttccggtgaggcctcaagaagtttacagtcacggtggaaggcaatgaggagccagcatatcacatggtgacagcaacagccagagcaaaagagggagggagaggtgccactcacacttaaacaaccagatctggtgtgaactgactcatcaccaaggggatggcactaacccattcatgagggatctgcccccatcatccagacacctcccaccaggcctcatctccaacactggggattacatttcatca

SEQ ID NO: 238525 - DNA, 424 bp, Homo sapiens
atattctaaggatccttagttcagtcttcttataatgtgtaatactggcatctcattctgccttcatacctaaataaaggtgcaatttcttgcagaaattgccctagacaactgtcctaggtctataactaagtcaggcaagaactaggttcatttaccttctaactataacaatcacattgaaacagttttcacgcctgtaatcccagcgctttgggaggccgaggcgggcggatcatgaggtcaggagataaaaatacaaaaaattagctgggcatggtggccgcgcgcctgtggtcccagctactcaggaggctgaggcaggagaatcgctggaacccaggagacagaggttgcagtgagccaagattgtgccactgcactgcagcctgggctacagagcaagactccgtctcaaaaaaaa

SEQ ID NO: 238526 - DNA, 364 bp, Homo sapiens
tcatcttgcataactgtaactccgtacccattaaacaagtgcccattcttgcctcccacagcccctgacacctctcattctattttctgtctctataaatgtgaccactctagggaccacatattagtggaatcacacagtatttgtcatactgcgactggctaatttcacaaagcatcatgtctcaaactgcatccatattttagtaggtgtcaaaatttctctcctttttaaggctgaaaaatattccattgtatggatatacatactgcatttcgtgtatccattcatctgttaatggatattgggttggggctgcctctatcttctttctttttttttttttttttttttttttttggag

SEQ ID NO: 238527 - DNA, 450 bp, Homo sapiens
ccgcgtccactacggctgcgagaatatgacagaaggggggccctgaaggcggaggttgcagtgggctgggattgcgccgcggcactccagcctgggtgacagacggggactctgtctcaaaaagcaaaacagagcaaaacaaaacaaaaggagcttttctgaatcagggtatcggcttctgttcgatgcctgcctcccacctttctgagttgagttaactcatccagaacacactttgggaagacactgaaacactgtagaatgtgggcatgttggcctctgctatttgatgtgagttttattatctagaggaaaattgcaacattatatcctttgggtaatctccagtatttatgggctcaaatcagtgttgatggtgtattcttttgttcacttattcaaaaaaaaaaaatctacataaaaaaaaaagcggccgctcgaattgtcgac

SEQ ID NO: 238528 - DNA, 354 bp, Homo sapiens
ttagacaccacaccagaggaataaatggaaaataacttgatggagatgagtgcttccaaaccagtaccagatgataagcaagaagatgtggaagaaacagtaccagaaaataaattaactatagacagtctggcagaagggttccacttattcaagactgcctttaacttcttttacaacatggacccttctaaaatacgggcactgaaactaaagcaaatggtagaagaacgattggtaccataatataaagatttatttatttattaatttttttgagacagagtctcagtccgttgcaccactgcgcttcagtctaggcgacagagcgagactccgtctcagaaaaaaaaa

SEQ ID NO: 238529 - DNA, 347 bp, Homo sapiens
ccatgagaaataggtattttgagtgtgcctctttactaccgaagcacaaagaagataagtaagacattgaagtgattggaggaactctctccagagcctgacgacttctctctacagcagggaactgcctccattgctgatgttggattaaacagaacagcctgtgcagttagttcatggattccataaagggactggaccttaatgaagacgttcctgacatgggtttggggtaagaaggagagtctgtttgcaaaattattattgataataactagaatttaaatgtatatcttttcttggttaattaaataaattaatcagctccccatctgggccagaatatc

SEQ ID NO: 238530 - DNA, 4130 bp, Homo sapiens
agttgctgatggccaggtcctgctggtcagccgccttggacggagtctcgggcctgcttttccgttttctgtccccttactctggcttctggatagcctttggaatattccgggcgatagctgggcctccagagagagtgggctgcagggtgtgggcccggcctccccttgcctggcgggttttcctggtcagcgttcctgctgctccccggtcatccctcctgtgctgcagcctttttctctggttcagacccacactctgccgtcccactgcctgggcttgctgagctctccgttctggcttgaaggcctcgcccgagccctgtcaccggctctgcctgtcaggagggcccaagtgtgcggcttcggtggggctgcctgacactgacctctggggttgtaaaggtcccagagggtcctaagtcgggcctgatgtggctgagatggcaagagccggaacgtttctgtaaaatctgaaagcccttgatggggccgagggggtgaggaggattcccaccctgtgtggacaggagcacgcagcagcggagtgactccaccacgtgagtggggtccagcgggtgtggcactcgatgacaagacagtttgagagcggcttgtctccggggacctggcgtaggtctcctctgccttaacccttggcttttgcacttcctctgtctgtcctccatacaggcttcttgccctagtgaggactggcttcttaacagggtgagccggttcctgtcctaaccccactggcatcttacactctgggagatagcttccccctgagaggcgagtgagccacgtaaggggaggtgggcgatggcttcccttctgtcttgggttgggggagtcaggtacagtattttttcttttaaagcatcattgatcacataataaggtttgtcatagtccttaatcacagacctgtgaaatttggagaattcacggcacctaggatgggagtgagcttctgattgtgagctgatttgggagctaacctcaaggaaactcctcttgcaagccccctgctgggtgtcgtggccctcgcccagtgacctcccggggactctggacgctctttgtctgcccttccttttccctcacctcgctcccccgtgagaaagtgggactcatgcagctcagctcagtgacagagggtttattaggggtagctctgggacccatcttttggtgatttcttctctctctttctctaatggaataattgtttctgtctacacttctttattttctcctctctacagctgccttctaaaaatgtgcttttctgttcctgcagaactgaagcttgcatggcctttgttgtgactttcccgtcacgagcgttgtctcttggtattttcccataggccagcctgcaggtcatacgttgttcattttttttgttgtggttggtccagtcagccaggaccagagcaggtgggaccatgtggtgccacacgcagccagctgggcctcttcggcaggcgtgtgggcagtgggcaggtgggctgactgccactctcagatatagagctgacaccgagactggatgctgtgctgtgctaggcacaggaggggaggggaacagatgtgagtcagatgtgcggtttgccctcacaacttcactttctagttggggaattggacatttacataaatgtacaaacacctgtcatacaaaaaagaaaggaataggtgtcatccaaataccacctctgttggggtatgtggtgggcagcctctaacacggcccccggtcatccctgcctcctaggagtcgtgccctggtgggtccctgtcccttgatgtaggctggacttattgacatgcttctagtgaatagaatctggcaaaagtgatggcctgtcactctgggactgtgttataaaagcctgctgcttctgtcttgggcactttctgtctctctctctgagccttgcctggaggaattcagctgccatgatatgagctgccctgtggagaggcctgcatggtgaggaactgatgtctctggccagcagccagggaggatctgaggcccaccagcagccacacgagtgagaggggaattgagtctttacatagttgagccctagccaaccttgattgcagcccgtgggccagaggctaagcttgcctgaattgtctcagataaataacatatttatcttacagcttatttatttatctgtaagataaataaatatttgttgtttgcagctgctaagttttgggttaacttgttatgcagcagtaggtaactgatacaaggggatctcagcacagagagagctgtgaagtgccaaggaggcggcacctttggctaaggaatttggggaaggctttgaggaggatgtggtatttgagcaaggctatcttttttccatagagtgtacacctcttgtacaaggtagaacatcttgcacataacagaaggcctgtctgtcggtcccactttccaaggtgagtagaataaagtcactgttttcctgttgcctgagaacctccaaaccctctgttgaagaagggcagggctggctgtttcctggagccctcctgcccagccagacgtgtggcatctctgatgtagctgagtctcccgggcctggtggcctccatctgcagtgccaccaactgtgtgtggggctgctttgcacaccatatgctgattagggagcaacaacatgggacctgcaggcccgatgccccaggcgctcctcagacccgcgagccatcccacagtctgcccggggcagctcctcacctgccctcgtggctcttccaggctggctcagcctgtggtagaagggtctgaagacccaggttaaagccttgtttctctctcttactgatggcgaggcactgaacatcctccgtgggcctttttttttccccctccaccttttattatggaaaatttcaaatatccacagaaggagagaggagagcataatgaatgcctgtgtactcatcaccggcttcagtagttaccaactcatggcctcctgttgcatttctaacgttcatgttcattccggcaaatgtctgttctttagatggattagtccacgttgaaaaaatgtcttcaccattatcctagcattcactcaggcttccagaagctatgttggggaacatcactaatcatttaagaaatgcaaatcaaaatcacagtgagataccagctcacacttactaggatggctactattaaaaaaaaaaaaaacagaaaaaaacgagtactgatgaggatatggagaaattggtactctgtgcactgttggtgagaatgtaagatggtgcagctgctgtagaaaatattatggcagttctaaagaaatgtaaaatagagttgctgtatgatccagcaatcctcctttgggggcatgcccagattgaaagcaggatctcgtcgagataattgaacacccatgttcatagcagtactgttcacgctagccaggaggtagaaggatcccaaacatccatccttggataaatggagaagcaaagtgtgttatatacgtgcaaaatggtgtactattcagtcttaaaaaggaaggaaatcctgccatatgccacaacatagatgaaccttgagaacattatgctaagtgaaataagccagttacaaaaagaaaaatactatatgattctactaatatggggtacataaatagaaacagtagaatggtggttgctgtgggaaggcagaaatgggagctgtctaatgggtacagagtttgttttgccagatgaaaacattgggagatctttttcacaacaatgcgaatatacctagcactactgaatgtgcacttaaaaatggctaaaatgggccgggcgtggtggctcatgcctgtaatcccagcactttgggaggccagggcgggtggatcacctgaagtcaggagtttgagactagtctgaccaacatggtgaaaccctgtctctactaaaaatacaaagaattagctgggcatggtggcgggcgcctgtaatcccagctactggggaggctgagtcaggagaattgcttgaacccaggaggcggaggctgccgtgagccaagatcgtgccattgcacttcagcctgggcaacaagagtgaaaatcagtctc

SEQ ID NO: 238531 - DNA, 596 bp, Homo sapiens
ctatacctaataatgtttgctgagggcttccagtgtttggtatctgctacaggctacgattatttgtaaatacttttgacagaataaatgcaagagatgatcacagtgtggctatggaacactttgatgtgaaatcagaaacatctgtaatctggattagcaaagcaatattcactttaatggcaaaaccgaaatcagtgcaagcatacaaaatatttttattgttaaagaagaaaatgagcttaaatgaagcaaaatgtgtttgaatgtccagcttggtgatcacaccaacatctatgcaacatgaaagaaagttttctatgtctggaatgtttgtcatgaaataaaagtcaagtctcaaggcaattaatgttttatgtgttttaaatttttattaaaaattggtggcttttaaatatcaaatatttgtgatatcatctgtaaatttttaaataatttctatttgacatgtgttaatgtttacttcacttgatgttttctattattagatgtctatatcaggtatagatcatttttatgttacgaaaatatcgatcttatcacaataccacaatatattggttgataattataaa

SEQ ID NO: 238532 - DNA, 533 bp, Homo sapiens
tgggccttcattttcattgccattgaatatagaagggagaagagaaggaagaactaatattggtttatttttaatgttagaacgaactggtgtctgaagtcagttttgatttacatatgttaaagcaggtagggacaatcccctctccaagtactagatccagtcctagacaaagaggaaaaagccgatttctacatttgtaaaagatttcattttttgtctccctaaaataatttatcaataagattggcagggtggggtgaggggaaacaatatgaactgtacttgtttacattgattgaaatagatcaaaaaacctctctcaatgtcctggatattactttatctctctttgtcttccttttggaagtctctttctccaactttcagagatatgccagaggaaaagagatgaatataatcccaaattatggactagggttccctttatgaggaaagtaagggagaaaagggagattccagaaatacaaatgaaccaaaaaatttggaattaaagttaagtggtattggct

SEQ ID NO: 238533 - DNA, 249 bp, Homo sapiens
tggccctaacctgaaacgccatgtgctgttgagcatgttgtgtctcaatcaagagataacgaaggggaagaaccaaaggtaaaatcagcaaggagatggaacaatggtcttaaaatgacagattaataacacttgttctctaatggggagatgagggctgacaagtctagggactggaaaatcaataaacatactcctcttcaccagcactcagacatttgtatccagagaaagcttccttaatgctca

SEQ ID NO: 238534 - DNA, 2021 bp, Homo sapiens
  misc_feature (1697)..(1697): n is a, c, g, or t
ccaaaaaataaattggaaaaattttggagatttcctacagtttggaaaacagatgaactacatagcctaggaatattgaaaacattgctcacctgggccctgcggccagcagaattggccccgctctatggctgctggggcctgcgcactggaatcgccgtggcctgcgcaccccaccatgccagtttgaacctccatggcctcaaccagattcggaatgtcaaaaagcagagtgtctatttgatgaatttgaggaaatcgggaactttgggccacccaggctctgtagatgagaccacctatgaaagactagcggaggaatcactggactctttagcagagttttttgaagaccttgcagacaagccatacactttgaggactatgatgtttcctttgggagtggtgtcttaactggtaaactgggtagagatctagcaacctacgtgatcaacaagcagacaccaaacagcaaatctggttatcttctccatccaatggactcaagcgttatgactggactgagaaaaactgggtgtactcccacgattgcgtgaccctccatgatgtgctcgctgcagagctcactaaagccttaaaaaccaaactggacttgtcttccttggcctattctggagaagacgcttgatgcccagcccggttttaaggatattaaaagctgtcaggccaagaccccagcttcattatgcagctgaggtctgattttttgataacgtaaataggttctcattcctgctatatgaggaacagctctgtggaaagaacgtgtagcctcctaccttgccacaagttttgatttttaatttctacagaagattttcaggattaattgctgattcctcctcatatgatatcctttatctttataatgcttaatccctatacctgaatataaccacctttaaaaagccaaagaataagaaaggaaaaatttcagcaggagaaatgaattgtcctcactcttcattctttgaaggacttactgcagaagtaccatgaagagctactggttaacctgctcactggtactgtctcaaaattgagacacattaccgggtaggctacaatgttcctggactctttcaaagtgaagcacttcttgagctctttagcatgtgagtgtcaaaagcaattcacatgggaaagaccaattcttatatgtgcctttgtgacttgcccaggagtatggcctacacctgggttgtcctgggagacctagtgctgtttcttccacatattcacgtgtgtgtgtgtgtgtgtgtgtgtatttttttattattttttcattttaagggttagtatggaatcagctgcctactagaatgcaaagaacttccaatgacaagaaaggaggaaaaaaatgccattttcataagctgagtgatgtagcataataaacaaaatcatggagctaaggaggtgctttgtaaacgtgaaggggcataaaaaggaaagagatacttgtgtcaataaagagagcctggtcctagacgtagttcagccacaaagtagttgtgcctttgtggacaagtttcccaaactccctgagcctctgctttcccatactgttaaataaggggatagaatatggttgatttccagcattcagtggtcctgtcaagcagccttaacaggctagctcctaattcccattgggtagatgaggggatgacaangaacaatttgtgagctatataggaaacattgttattggtgttgcccctatcaggatttcagttgaattcatgttaaaattacagccgtcctttattgtacacttattgggttaagcctattataccatattacctcattttaatttttactgacctgcactttatacatgaagcaacaaggctccaggacattaaaactcacacaaagttatgctcatgttatattattttcttacttaaagaaggatttattagtgacaagtttgtattaatatgtagcaaaggcttttccaatgggtgaataaaaacacattccattatagt

SEQ ID NO: 238535 - DNA, 462 bp, Homo sapiens
gcatgcccactttagtgtcttgtggaagacattttccccacagcatgcaggtaagggggcatggagatggctgtgacagccgtccctgaagtcagtccccagaatctgacctcctgcgagtgttctgctggactttgggaagatgagcgccacttttcggaccctctctgctaagaagaggactcgaaaactctgctcactgcagaagcactggcgggacaggcgtcccaggctggcgagagtgggcactgccatgctgcccctcactccatctcgccccgggttcacacaggggacactgagcagcagctggacgtagacagagctaatggagtcttcccaggtggtccctcctttcagaaaggcccctctgtctgagctccttaactctgaaaccagataagaaggtgggagacaggggccccttttctcatgggattaaatgaactcaattgacagagc

SEQ ID NO: 238536 - DNA, 351 bp, Homo sapiens
gggaggcagaggttacagtgagccgagattgcaccactgcagtctgcctgggtgacagagctagactctgtctcaaaaaacaactttccagtggcttctcactgctctgagaataaactccaggctcttccattgcaaccaacaggatctgttgattcgaccccagcccctctttccaggccctcatcactttgatcctctcttaacctatcctgctccagctgcactggctgccttcctattcctccagcataccaagattgtttctgcctcagggcctttgcatctgctgttctcttcgcctggactcctctttgttctttttttttttttttctttgagatggagtct

SEQ ID NO: 238537 - DNA, 304 bp, Homo sapiens
gggaggcagaggttacagtgagccgagattgcaccactgcagtctgcctgggtgacagagctagactctgtctcaaaaacagaaaaacaaaaaacaactttccagtggcttctcactgctctgagaataaactccaggctcttccattgcaaccaacaggatctgttgattcgaccccagcccctctttccaggccctcatcactttgatcctctcttaacctatcctgctccagctgcactggctgccttcctattcctccagcctgggtgacagagtgagtctctgtctcaaaaaacaaaaa

SEQ ID NO: 238538 - DNA, 418 bp, Homo sapiens
cattcacacatgcataccttgaaaaggcaaataaccttggtttaaatcctctatcttatttaaatccatgactgaagttaagtaaaaccacttagaaaagtgtgtaatcagctgggcatggtggctcatgcctgtagtcccagcacacctgtagtcccagcactttgagaggcagaggtgggcggattgcttgagcccagcagtttaagaccagtctgggcaacatggtgagacctcatctctactaaaaatacaaaaattagctgggtgtggtggtgtgcatctgtggtcccagctacttgggaggttgaggtggaaggattgtttgagcctgggaggtggaggctgcagtgatccaagatcacaccactgcacttcagccccagtgacagtaagaccctgtctcaaaaaacaaaac

SEQ ID NO: 238539 - DNA, 469 bp, Homo sapiens
cagagcaggtgtgcagtgttaggacctgtggctgagctgacctaacagcctgcctggaggcatcagtcaggctcaagtagaacagcaaggcccccatcttggggctgtcgtccaggcacagagcggtcagcatctactgtccttcctggagaaaaaagggaaaatgcatttgtcatttaaatgttggaatgggccaggcacggtggctcctacctggaatcccagcacattgggagggcaaggttggatcacatgaggccaggagtttaagaccatcctggccaacatggtgaaaccccatctgaaaaatacaaaaaattagccacctgtggtggcgggtacctgtggtcccagttacttgggaggctgaagcatgagaattgcttgaacccaggaggtggaggttgcagtgacagattgctccactgcactccagcctaggtgacagagcgtaagactctgtttaagg

SEQ ID NO: 238540 - DNA, 389 bp, Homo sapiens
atttaactagccaggtgtggtgacatgtgcctgtagtcccagctactccagacaccgaggacagatgatcacttgagcctaggagtttgaggttacagcaagctttggtcgtgccacagcactgtagcctgggcaatagagcgagaccctgtctcaaaaaaaaatttaatgtagaacgttggtggttaaagatgcatgatataaattttaggataaccattaaaacactacaaagacttcctgtttatggtaaggtaatgttgggatgaaatgaaacaacaaaaatccgaaaagcaagaaaaaagaggaaaaggaacataggcaagacaagatgagatgagagtgatgagactaaatgtttgggggctaaatctgccccaattacttga

SEQ ID NO: 238541 - DNA, 937 bp, Homo sapiens
aaagaatcagagtcctataactggtaaagtaaaatttaaaataaataaataatgttaaatgttcctgataagggagataaggatttagaagtgactatgggtttagtgacaaatagtttgaaggtatagtgggggcagaacaaagtaagttgcagctgaacaagtcatgaatggaaggtagagaataataaggccaagtggacttcctttcaagctttgatttaagaggaagagagaagataagtcactcagcaaagagaagcatggaatctattctcaaagcgagaacaatctatgttttaaaaatgtccaccactcttctccatactagctgtatggtaatcctgtgttctcatctataaaatggatttctaatagtacctacctcatagggttatggtgaaggtcaagtcttcatagctcttaacaattgtttcttatctgtttcctccaccaaactacaagttcatgagcaacactgacagctctcagtgcataatgtggtgtattgttaataaatacatgttaaacaaatgatgcttctaaggctctgaccacagtgcactgcccaaggtaagcaccagagaagtcagctggggagtgtgatcctgttggggaagaagagagccacacaccctcagtttgctgttttccaggccctgaggaggtttctcctgactgccaaggtgtgaacacaggcatggcggcagaagtgccaaaagtgagccctctccagcagagttactcctgcttgaacccgcagctggagagcaatgaggggcaggctgtgaactccaaacgcctcctccatcattgcttcatggccacagtgaccaccagtgacattccaggcagccctgaggaagcctctgtacccaaccctgacctatgtggaccagtcccataaacattcaataaatgtctccataccaaaccc

SEQ ID NO: 238542 - DNA, 521 bp, Homo sapiens
cggccgctgtcttctgctgcggcttccgcgaccacaagtactgctgcgacgacccgcacagcttcttcccctacgagcacagctacatgtggtggctcagcattggcgctctcataggcctgtccgtagcagcagtggttcttctcgccttcattgttaccgcctgtgtgctctgctacctgttcatcagctctaagccccacacaaagttggacctgggcttgagcttacagacagcaggccctgaggaggtttctcctgactgccaaggtgtgaacacaggcatggcggcagaagtgccaaaagtgagccctctccagcagagttactcctgcttgaacccgcagctggagagcaatgaggggcaggctgtgaactccaaacgcctcctccatcattgcttcatggccacagtgaccaccagtgacattccaggcagccctgaggaagcctctgtacccaaccctgacctatgtggaccagtcccataaacattcaataaatgtctccataccaaaccc

SEQ ID NO: 238543 - DNA, 531 bp, Homo sapiens
cggccgctgtcttctgctgcggcttccgcgaccacaagtactgctgcgacgacccgcacagcttcttcccctacgagcacagctacatgtggtggctcagcattggcgctctcataggcctgtccgtagcagcagtggttcttctcgccttcattgttaccgcctgtgtgctctgctacctgttcatcagctctaagccccacacaaagttggacctgggcttgagcttacagacagcaggtggttcctaacttcctggcaacaaccacaattgtaattcgttcaaagagattgactgctgtggagacagatcatcaccatcaccatcaccatcaccatcaccaccaccaccatcatcatcattgtcatcgtcatcattatgttgcttttagctcactggagcctcacagaaccctgtgaggtaggtattacctcagtttaccaaatgagaaaactggggctcggagggggtttcatggctgtcccagacttacaaagcaagtcagaaccagaatcatatctaaatcttct

SEQ ID NO: 238544 - DNA, 720 bp, Homo sapiens
catccccaggtaaaaggcccaggcactgggctttggggcatttctctaggagctgatatttgtctctcaatggcctcattcttgaagaatgactcagacacagtttccatcaatggatccgggatcagtgggaacagaggcataaactgtaagcagaatagcattccaccattgggctatgacctgaggagaatcaaggtagctttctcaggcctcgtggacgtcgtggatataaagaatgatcttgtaggagggtataagaaccccagcatgatttcaatggagaaggcccagggccccatcattttcattgttggtcaggatgaccataactggaggagtgagttgtatgcccagtctctgaacggttacgggcccatggaaaggaaaaaccccagatcatctgttaccctgggactgggctttacactgagcctccttacttccccctgtgcccagcttcccttcacaaattactgaacaaacacgtgatatgggttggggagccagggctcattctaaggcccaggtagatgcctggaagcaaattctagccgccttctgcaaacacctgggaggtacccagaaaacagctttccctaaattgtaatgcgtttgtctgttgttgacatgagagagtcaagatcagattctagtgttcaataaccctatgtgaatcagctgtctcctggataacattaaagccatgtctttgtcatt

SEQ ID NO: 238545 - DNA, 743 bp, Homo sapiens
tgaattagaaggaaggagattattgggtttggaattttgaaatatcaaacctggaacaaataatctcactctcagtttatttgtatgtgaaataaggtggggcagggggagtggttatggaggggacgcataatggatgtggagcactctatacagtcctgggtagggggtagttaatgatactacttagcatgacagttgccagtcacactgtcacagtctcccatttgtctatggggaaccagctccttgcagggactgcctgagtttttgtttggtccaactgagtgacgaacatataaggatgtggggctgggcgtgaaaatgagtcaccaaggtggaactcccttctgtgactcatcaggtgagttccagaatggcagaggcctctaacaaaaaagatgcagtccgttcgtctctggtattctccgcacacctgcagtttagggcctgatagctagacctcccctttgggaaagaattttaagtgaataaaaaggaaaagatgaatttgatggaaaagaaagccaatattttcactattcagaagtataaaaggaatctcacaaaggttatacttaaggtactcaacctagagtttattctaaaataccaccccaaatcccctatctaacatgaataaggtggcaaaagttctggttgcatggcaagatcagacccttggcgaaacactcacacacacacctcatttgtgtagtgtttaccttagcccttaccaggca

SEQ ID NO: 238546 - DNA, 565 bp, Homo sapiens
actcacaagacccgttcttcttgcaatccccaaatccccattctggattcctccttctctccattgctgcttattcctctacaaccccagctccgcttgctttttctactccctcccttctgtctctaagcagggactccacctggctcggtacatggagatccaatatggagcaccacttttgggcagagtcctcatgctgcgtcaactcataggtcactggcctcatgtccagcctttatatggaagtctttggatgaatttctaatttctgcaccatccgtcagccaggatagtcaggccacaaggcacaaagctcacagtgtatctcagaattccttactcagaatgttgcgaggggcctggcagacacttggaatctgctggaccctccccaagtcaatcgtttcaaacccatgcttaggacatgtgatctaagtaagagtgttttatatgatctgtaaattatgtatttgaaaaatctcacaaaagaataaaaacaaaaatcacaggtagtcccacactttaaatcccaatcataaaatggaataaagttatacaaaat

SEQ ID NO: 238547 - DNA, 350 bp, Homo sapiens
ttgccttgtttacgagaaataataattcatcaaacaaccaaaaaatggaaaagattcaaaattaggcagaccagatttcacccataatagagacctcacaattatagcggtcacactattcaccataatactcaataggatatactgctatctgacctgctatgtattttatttatgtgtcatcattttcttctcactggaatgtaagccccataaaagaagcttttcatctgctgtagcaccaatgcttagaacagtgtgtacacacagcaagtgctcaataagtattgataaagagaggatctctgtggactgatggcatcaccattactgaactccttctctttttc

SEQ ID NO: 238548 - DNA, 405 bp, Homo sapiens
ctcaaggcaggcagcgtcttcccccagccccaggctttctgaggccacacctggacacgtggtgcacttagccaacactgacttattttacctggcctatctctttgccttgttgggtgaaattaatgcctttgagggcctaaggtggtctggttaagtgacaagggcataggaagacacaaccttacctagctggaagtcagagatttggactctagcccactttcccactgagtggtcttgggcaagccacctcctttactggatccagaaaagtagcattgagccaggtgtagtggctcacacctgtaatcccagtaactggggaggctgaagtaggaggctctcttgaggccaagagtttgagaacagcctgagtttgagaacagtgagaccctattctta

SEQ ID NO: 238549 - DNA, 647 bp, Homo sapiens
ggcaacatgacctagattgcattgactacatgtgcttgtttcctgtgcttttgataaactgacatctggggctgggctaaccagggaaagactgtccttcccagggctagccaattcttagagattgcaaatgactcacttagaggtgtgcctttgatatgcaaaggaacaaatccagagcccctgctgtgaaccacttcctctctctggctcctacactctaggagacagaattcctctgccctaatcatcccaggaccagtcaagacagccagtcctacttctgcttaccttgcctggcccatctcgtcccagaaccaccacagtcaagactttactgcctccttctgccttgttgcctacccagatgcttccatgtggggccctgtgtaacatggcatgccccctcctcttgggaactagagtaagctatgttttcaatggcagtcatcccctgatctgttggcctcaccacacctaaataattttataacataggtataaaataaagtcacttcatggcttggcacagtggctcacgcctctaattccagcactttgggaggccaaggtgggtggatcacctgagatcaggagttcgagaccagcctggccaacatggtgaaaccccgtctctactaaaaaaa

SEQ ID NO: 238550 - DNA, 460 bp, Homo sapiens
aattctctcatgctattattttcaattgtagtctgtctcattactgcttatttcctcaaggctttaagttatttacataaaggtgcacttgatatatgaccagcagcatcagctcaagtgtgctagctccaattcctttaagctgtagtgttttcctatatgatagattacaaggtattttttttttaaactgtagcattgtcgctttgggttggacatgcaatttcaaataatcttttgggaaggaagtattttattattttaaattactggattcttagtctcctatcacagagaagactggtagctacagtcagtgtgtttagtatcatctacaacattctgtattaacatacaaagtgcaatcctggaccttgattccccccacccccgccgagtctaattgaaaatacagctcagcacgtgattttaggaacatcaaattgtcctttaccctcca

SEQ ID NO: 238551 - DNA, 438 bp, Homo sapiens
tacccacactctctccttccacggacctcagaagtatctgtgatagcttaactgttatgggctgaatcacatccccccacaattcgtatgttgaagtcttaactcccaggaccccggaatgtaacattatttggatacaggatctttacagatgtaatcaaattaaaaggaggtcaccagggtgggtcctcattcaatatgactggcatcctcataagattaggatacggacccacatagaggaacaaccctgtgaaaatgtgaggagaagatgctgtctacgagccaaggaaagagactgcagaagaaccagccctgccacaccttgatctcagacgtctagcctccaggacggtgaaagaagaaacatctgtttgtaagcagtccagtctgcagaactttctggtatgacaaactatataaatcaatcaatgtaac

SEQ ID NO: 238552 - DNA, 225 bp, Homo sapiens
agtgcctgcagactaaataagccagatatgtagtgtccattttaaaatcaaaataaatcttttaatccagatatttagcttaacttgcttagggaattttggaacagaacattcagtggccaattttcataccctaagaagaatgaaagttactgggtaacaattcaaccttcttgttgaattgatttactactcatcagggtcatgcacaagcatagaatcaga

SEQ ID NO: 238553 - DNA, 472 bp, Homo sapiens
gcaaagttaaagagaaaatgttgcctgaatgtgactgctccctttaggaaaacacagctggtgagtgtatgggtgaggtcccccaggggccacagcccgtgtgtagggaggtggcaccgtgtggaggccacgcctgtcacaccgataccacatcttcctgtcagtgccactcaggctgatcttcaccccatgacccagaaaggttttgtgaaaattaaatcccgtgtgctgtgccgtggcgtctgtgcacatggaggctgggacggtggcatgggctgcgtgggcctcacagaagcatcagctgctgggacatgattcctgtttctgtaactgtcctaagctggctgtagtttgttctataatagtcataagagaaaagaaccattgaataaggattcaatcaataatgtactgtaataagtataatttaaaaatgtatttataagtaaaatgttttagtttgttagaaaaa

SEQ ID NO: 238554 - DNA, 373 bp, Homo sapiens
gattttgacccttgggggttttggtggctgtatccttttctgccttgtactcttcttggtagttactgttctggtgttcatggaatagatcctgtgtcagcaagccaggcagccaggcagatattactgtgcttggcaagtgcatccttttctctgctagcactgaagccaaggtccatgtgttctgaccacaaagactgagaactcctgtgttcagcaatgtttgctcaagtgattattttcaggaggttgttaaaatagctgcattcacagaagattaacagaataagctgctagctgtttatactttaaaaattaaaaaatttaaattaaagttcacattaaaaatgtggttatagttaatagttgactg

SEQ ID NO: 238555 - DNA, 2716 bp, Homo sapiens
gttatgaagatagtctgtcttgataaaatcccaggcttaatttagataatgtcagtctgccacacggagttggtagccataaaatgctacttctgagttctacacttagctgtagaatgcaaattgagtgacacctttaaggctacagtacttgattttttaacatcttttctgttggggctttgactagttctgcagaaagggattgggacaaaaccaggagtttgttatttttagtttttctttgccatttagcagcagaaattcgatccccactgataaacagaacctgctggaccacctttgctcagataatttctataacacagaggttaactcactattggttgaaataaatgcttaaactttgaagcactttttaaaaaatcataagtacaccagtgctgcacctccaatgataatcatttaggaaacacagaaaacaaaaattaaatgaatggtccacatgtgaataaataaccttaatccactcggatatgcagcagctcttcccactgcaaatgggttttgtggtggtaacttgaattggaggagagagacagctggcctggtgctgctgctgctgccaaaagccatcttgttaacatggtttatttccattctgtcttcctgctacccacaagagccctgtcctcctgtctccctcctctttcatcagttttcagtggcatactgtcctcagtcacatttctcctgctttgccagtaaacagcatgtagctgattcttctagtcctcgcctgcattcctacaattcctgctcattccgaattggttctgttatctcctaagttgttgcaactcctagaactcagccttcttttacatctccaattctcattatgtgtttgaatggcttcagcttttccctccgctagctctttgagctccaaatcatcaactcagacaaaaaacacagagaagggagtgcatactgtatgtacatgaacatgtttgtgtgtgtgttttatatatatgtacatgtttgttttcatctctacctgggtattttttgggaaatttatggccatatgtctttaaaaaaaatcccatttaacaacaaatacaataccttctgttgggccaaccaatatgacatagatccaatatgtgagaaagttgccagggaaccccaggagtccaaaatgattttatttcagaagagaataaaaataggaagagtccctgtacatctgcattgttcatttccgctatttctgtagagtaggaaaggctttgtcagaactcagcttgaccagcagggagcagcagaggcccatgggaaacggaatcctttgtaggtctgtccccatcaccactggtaacaggacatggaagaaggcaccacacgcactgcacatggaactccagcaagaacctgtctttactctttaattttgataggaagtagaatagcaaatccccatgcccaaatcccgtgatggccaagtagtcttagctatttgaaaaacacccttaaaagacaggtttgttgtttaggccatcactcaggtgtatggaaaataaactttagaacacttaggccttgacatatttagtgtaatttgtgctcattgtgtatcagtggaagagatttgtgtcaaataaaaaattgagagtgatagcacaaaaccacaaagagagggtacactgtaggtacatgaacatgcatatgtgtatatatgtgcatgtctataaaccacattatgaggtgaaaacttagtgaaatgtgtttgaaaataagtggtgcatttgcaaaatatatataaaataacactatgtttactttgatgtcgtgttgttctaggaatacatcaagttcatttgcataattcatattttccactggtataatgcagggaacaccagccaagaggtagcagcatgaaaagaaaatctggatttcatataatttgatctaaaaggcagttaaagattactgggtcaagttgcagataatatttcagatcagaatcagaaagtattttctaactgaactggccttgagtggcatgtgctgagctgcctgtgaagttcatgtggacacctgcagctggagctgtgcaaacagactggaggaggcccagctggggtattgtccaggtcacttaagcatgccatgaggagttggatggcgtggcttgtcaggccccgtttaactccgaaatgtctttgttacctaaagcacaagcaggaaaatgaatataggtgatcattaaattcctttactgtacatcatattgaattaatatgaaaaatacagagaatgtagacatctctgagttaaaatattttccaaaagttttaaagcatggataatatatctttaaaattggataaaatgtgcttggatgctttaaacatatactcaaaatagtaaataaatgtttgtggccaggcatggtggctcatgcctgtaatctcagcactttgggaggctgagacaggcagatcacttgaagtcaggagttcgaaaccagcctggacaacatggtgaaaccccgtctctactaaaaacaaataataataataataataatgcagaaaaatctgggcatggtggtgcatgcctgtaatcccagctactcaggaggttgaggcaggagaattgcttgaacccaggaggtggaggttacagtgagccgagatcatgccgctgcactccagcctgggtgacaaagcgagacttcgtctcc

SEQ ID NO: 238556 - DNA, 2662 bp, Homo sapiens
gttatgaagatagtctgtcttgataaaatcccaggcttaatttagataatgtcagtctgccacacggagttggtagccataaaatgctacttctgagttctacacttagctgtagaatgcaaattgagtgacacctttaaggctacagtacttgattttttaacatcttttctgttggggctttgactagttctgcagaaagggattgggacaaaaccaggagtttgttatttttagtttttctttgccatttagcagcagaaattcgatccccactgataaacagaacctgctggaccacctttgctcagataatttctataacacagaggttaactcactattggttgaaataaatgcttaaactttgaagcactttttaaaaaatcataagtacaccagtgctgcacctccaatgataatcatttaggaaacacagaaaacaaaaattaaatgaatggtccacatgtgaataaataaccttaatccactcggatatgcagcagctcttcccactgcaaatgggttttgtggtggtaacttgaattggaggagagagacagctggcctggtgctgctgctgctgccaaaagccatcttgttaacatggtttatttccattctgtcttcctgctacccacaagagccctgtcctcctgtctccctcctctttcatcagttttcagtggcatactgtcctcagtcacatttctcctgctttgccagtaaacagcatgtagctgattcttctagtcctcgcctgcattcctacaattcctgctcattccgaattggttctgttatctcctaagttgttgcaactcctagaactcagccttcttttacatctccaattctcattatgtgtttgaatggcttcagcttttccctccgctagctctttgagctccaaatcatcaactcagacaaaaaacacagagaagggagtgcatactgtatgtacatgaacatgtttgtgtgtgtgttttatatatatgtacatgtttgttttcatctctacctgggtattttttgggaaatttatggccatatgtctttaaaaatagatccaatatgtgagaaagttgccagggaaccccaggagtccaaaatgattttatttcagaagagaataaaaataggaagagtccctgtacatctgcattgttcatttccgctatttctgtagagtaggaaaggctttgtcagaactcagcttgaccagcagggagcagcagaggcccatgggaaacggaatcctttgtaggtctgtccccatcaccactggtaacaggacatggaagaaggcaccacacgcactgcacatggaactccagcaagaacctgtctttactctttaattttgataggaagtagaatagcaaatccccatgcccaaatcccgtgatggccaagtagtcttagctatttgaaaaacacccttaaaagacaggtttgttgtttaggccatcactcaggtgtatggaaaataaactttagaacacttaggccttgacatatttagtgtaatttgtgctcattgtgtatcagtggaagagatttgtgtcaaataaaaaattgagagtgatagcacaaaaccacaaagagagggtacactgtaggtacatgaacatgcatatgtgtatatatgtgcatgtctataaaccacattatgaggtgaaaacttagtgaaatgtgtttgaaaataagtggtgcatttgcaaaatatatataaaataacactatgtttactttgatgtcgtgttgttctaggaatacatcaagttcatttgcataattcatattttccactggtataatgcagggaacaccagccaagaggtagcagcatgaaaagaaaatctggatttcatataatttgatctaaaaggcagttaaagattactgggtcaagttgcagataatatttcagatcagaatcagaaagtattttctaactgaactggccttgagtggcatgtgctgagctgcctgtgaagttcatgtggacacctgcagctggagctgtgcaaacagactggaggaggcccagctggggtattgtccaggtcacttaagcatgccatgaggagttggatggcgtggcttgtcaggccccgtttaactccgaaatgtctttgttacctaaagcacaagcaggaaaatgaatataggtgatcattaaattcctttactgtacatcatattgaattaatatgaaaaatacagagaatgtagacatctctgagttaaaatattttccaaaagttttaaagcatggataatatatctttaaaattggataaaatgtgcttggatgctttaaacatatactcaaaatagtaaataaatgtttgtggccaggcatggtggctcatgcctgtaatctcagcactttgggaggctgagacaggcagatcacttgaagtcaggagttcgaaaccagcctggacaacatggtgaaaccccgtctctactaaaaacaaataataataataataataatgcagaaaaatctgggcatggtggtgcatgcctgtaatcccagctactcaggaggttgaggcaggagaattgcttgaacccaggaggtggaggttacagtgagccgagatcatgccgctgcactccagcctgggtgacaaagcgagacttcgtctcc

SEQ ID NO: 238557 - DNA, 406 bp, Homo sapiens
acattattcctctgtcctactcatgaaaacttgccaggagtgtcactcaagctaaagggatttaagtggatcccaggagaatggagaaaaatccattctactgtacccaagattttagtgttcaggttgataaaagacaggtgaatacccaaaacatggatgatgtatccatgtctcagtcaaaacttggacaagagagtctcaaggctggattctgtaccttaatagagtctagtcactggccttgacttgacctacagaagggaagaaagagaccatttcaaagaagagtcaagttaatcaatctggataaaagccaatatgtaacaaacctgcacgttgtgcgcatgtaccctggaacttaaagtataatataaaaattaaaattaaaattaaataaaatttt

SEQ ID NO: 238558 - DNA, 535 bp, Homo sapiens
ctcatttcttcataaattacccagtctcagctctttatgggagtgtgagaatggactaataaaatatctctagaattatgtttttggagataatttaaagataaacaaatattggaaacctcatttgatcacacagagaacagtaaatggaagttctactttttctccagggcctttctcatgcttatgcagggattattcacccagatatcctgaaataagacatccaattaaggtacctgctatctcatgtaacacagaagaaagttgagcatagaggttaaacattacctaatattgttggaaaagcttcgaagcgttcattttcaaagcagctaatgtaaaccatgataatcactagtagcactatgccattttaaatacttcaatattttgtagttattagattctaagtaagtataaaatgtagtgaatacaaattttatttgcctaaacagtgttagacaatataaattaacgagttattttttattctgtttaatattttcaagccaataaacactttactaaagta

SEQ ID NO: 238559 - DNA, 295 bp, Homo sapiens
gactcagaaggttggccaggctgggtgggcaggattctcgcagcagctgcgacagcggctgccagcaccaggctcctgggtcaggagtgtggtgtcctgatccgtaggggtctgacaggctcagctgcatacagacaggcgccgtctcctccgctctcctgcagcttgggagggtgtggataagatgtgaggtgcagcacctggcagataggaagttcctggcaaatacatgcaggaaaaccagctttcattcatatccaatttgatgttttggtaataaatgactttaatgtca

SEQ ID NO: 238560 - DNA, 293 bp, Homo sapiens
aaaggagacatgaaattaccacgagaatatgtggatttacaatgattctcagaatactttttgggttatttcaatcctatgattggatcaaatacatagccaaataacatccacatttggggaactttgtgtattacacacactcactcctgctcttcttagtcctctccataatttttacttctgcaaaaacctccctgtgtctgtgtttaacgtaaaattacgtatactgttcatttactaagcacaggtatatactttcaataactaaagaaagaaaaagtacttttaag

SEQ ID NO: 238561 - DNA, 304 bp, Homo sapiens
tctttgggcgcagggggcgcggagcttgggaagtggagccctggcgagtccccagcgattgcgcgcagcttcccggggtttccctgcgggggtcgcgtgtgctgggtgtctgaactcacgcgcgggccagaggtagccaagagctggaactcttgcccaagtgccccggggaagggagtgaaggcccggcctgaaagtctctgaccctcccgagtctcgtgtccctagaagcagccttgcgaggtggccacgccagctgccctgagagaagcagaggaaaatgtccaactctccctccgcccag

SEQ ID NO: 238562 - DNA, 324 bp, Homo sapiens
gagtagagaagcctagggtcttaatttgggaagagaatctaaatgaggagggggccaggcgtggtggctcacgcctataatcccagcactttgggaggccaaggcaggtgaatcccttgaggccaggagtttgagaccagcctgggcaacacggcaaaatcccgtctctacaaaaaatacaaaagttagccaggcatggtagtatacctgtggtcccagctacttgggaggattgcctgaatccaaggagactgaagttgcagtgagccatgatcgcgccactacactctagcctgggtgacagagtgagactctgtgtcaaaa

SEQ ID NO: 238563 - DNA, 486 bp, Homo sapiens
ccaactccagttctttataaggcaggctgtggcttggtcagagtatggggcgaattgccattttaagttattttggaaatatttagtaacttaaaagaacattttcagtgtgaatttttctcattagaatttaaatgaggttttcatcttactttgcagtaattaaaaggcctgagggataatcagggtgaatcacttcaaggagatagtctaaattcagactcttcgctatttgaagggaaaatagttcatttgtgaatttaaaaactatacataaattatggtttgcattattttcctccagcatgctatacattaactttgaattctatattcacttggtctttttctggcttttatatgaggattgaattaaaaatgccagaataaaatttctcagtccagcaaatgcttaatgcatagctttaaaaggcagaaactcaaatcaaaaaagcctgggcaacacagcaagaccccagtctctgc

SEQ ID NO: 238564 - DNA, 433 bp, Homo sapiens
aagtatggactaaaatcacactcctccttaccttaccgcttggactctggtggctcccaactcgccgtcagaccccacctgccccggtggtgggaagcgcctggacagaccatgaccacagccaaggagccaagcgcttcggggaaatccgtgcagcagcaggaacagactcagtgagaagggagccatccacaagccaggaagtgagctctctgcaggaacagaagctgccggcaccctgacttggacttccagcctcagaactgtgaaatgtctgttgtttaaactactcagccattggtatttcattatggcagctggagcagaccaacgcaagccttttattctccaaatgattctggtgacctctcaagacctttctctatgacgcccgccaactttgtaaataaatcctaccctttcatgaatggac

SEQ ID NO: 238565 - DNA, 483 bp, Homo sapiens
tcgatgcccccaagacattccaacactgagctgtttcttctccaggtcttaagctttgaatacaagctataccagcacatctaaaatcggtctctacatttttccatcttaaatatgagctgtccagcttagtcaaaactaactgcaaaacactgggtgtaccatttgagtcatttggtcttaaaagaaacactattatcactgtgtcacagtttgagagattttcacttaagcatttaagttgcaaaccactacatatttgtcccattagtgactagtgggccttaattttggcattcaaattagggtaaaaaaccttggttcttgaaatgctacagaaaatagcttgaggccaggcacagttgctcacacctgtaactccagcactttggaaggctgaggcaggcagatcacttgaggtcaggcgtttgagaccaggctggtcaacatggtgaaaccctgtctctactaaaaatactaaaa

SEQ ID NO: 238566 - DNA, 532 bp, Homo sapiens
gaatcagatctgtttggggctgggggttggagaataaaagcaggagaagtctatgggattctagaaatagtacctgcatccagcttccctgccaaactcacaaggagacatcaacctctagacagggaacagcttcaggatacttccaggagacagagccaccagcagcaaaacaaatattcccatgcctggagcatggcatagaggaagctgagaaatgtggggtctgaggaagccatttgagtctggccactagacatctcatcagccacttgtgtgaagagatgccccatgaccccagatgcctctcccacccttacctccatctcacacacttgagcttgccactctgtataattctaacatcctggagaaaaatggcagtttgaccgaacctgttcacaagggtagaggctgatttctaacgaaacttgtagaatgaagcctggaaagagtgatgaattatattatattatataaaaataataataaaaatataaagaaagctacctttcttctatacccaaattgt

SEQ ID NO: 238567 - DNA, 378 bp, Homo sapiens
aaaacaatttctgaggattctgaaacttgatttctagcctcagcatctctactgattgacttgtaattttgactctcaacttttctatttctagcttcagcatctctactgattgacttgtaactttcactctgaacttttctatccttgcagaaatttttaattataatatataatctgttgtataacctggcactggtgattaagacagttgtgtttatatatgtcttagagctagtcaactcactctgctataaaaaaatcatgatttgtacatgcatgaaaatgttgcctcttagctaatttgatcaatatcacatgaaattccactactgttatacccacaccaccaccagtaagtaagtacttttgagtgat

SEQ ID NO: 238568 - DNA, 521 bp, Homo sapiens
gcagcgcggcgggaaccgcagccaagccccccgacacggggcgcacgggggccgggcagcccgaggccgggggcaagcagggagcccgggccaggcgcgagccgagctccccgaggtggccgggccaccatgctgaagatggccatgaagctcaaagcccgggcggcggagagcgagaagaagacggccgcggcggctgccgaggtggctgccgaagctgcggcggcggctgcggcgttggccgagccgagagagccgctcgcgccgcggaagagcggggaccccgagaagctcgcgaagaaccccaagaacccggcgcgggaggcgctccccgaaaagttcctaacagacaaggagcgcaagaagctcgagaagaagctgctggagcagaggcgaaaggaggagaagaagaaggagaaggagaggaagaagatggagaagatgctgaagaagaagaagaagaaggtgccagaagcccaggaggaggcccgatgccccgaggccgccgccgccgcggccgc

SEQ ID NO: 238569 - DNA, 443 bp, Homo sapiens
aagtgatcccccccacctcagcctcctgagtagctgggaccccaggcatgcaccatcacgcctggctaattttttgtattttttggtagaaacagggttttgccatgttttccagactggtgtcaaactcttgagctcaggcaatccacctgccttggcctcccaaagtgctttgattacaggcatgagccactgctcctggctgagagttacttttattattggggttatctatcagccttccataactgtatgtctaacttataaataaaattctaagggtgtacagagttctcatttatcctccacctatgttcttccagaactgaaaaattttgcaagtatatatatatatgtacgaatatgtgtttctgtttcttttgagatggagttactccagcctgggcaacaagagcgaaactccatctcaaaaaaaataaaat

SEQ ID NO: 238570 - DNA, 475 bp, Homo sapiens
tgttagtaacagggtctcaggcctggcaccatggctcacacctataatcccaaaactttgagaggccaaggcaggagggtggcttcagaccaaggagttcgagaccatcccagcctcaattatttttttaatggacttttattttaattattttactctttcatatttaatgtcaaaacctaaagtgcttttaaaatagactaccagttttcctctgggcacagttttaaccttatctcaagttttgatatgaagtattttcattttcgctaatcaatatataatctgaaatgtcaaatttaatctattcattgatctaagaattacttagaagagtttcgattgtttaaatttctatgcgattgtcttttagaggctaattttcaatatatcttattgttttatgaaggaagcctggaagttttctacttttgaaatctattaagattctttttagaccaagttaattatcagt

SEQ ID NO: 238571 - DNA, 398 bp, Homo sapiens
tccctcttgacttctctgtcaagaaacttcttccaggtttatacattagccagagaatacagtagggggagaaggttaggaaatctcagattacttacgagaggtgaaaaatagcattacggtggacgtatacagtttcgcaaggaaatgagcaatctcttctttgatggaatatgtgaaagccaaactggaaggaataattagattaaatagtgatgtaaactggaaaggaagcattacttcctgcactgtaccaaatgtcttacaggtgtcagtgggacccaccagctcagtaattagggttttaactgtctccacttaactatgtgcaagtggttgaaaacaggagtttcattgggacccctggcatcagaacattttggtgaagtgagctttgt

SEQ ID NO: 238572 - DNA, 674 bp, Homo sapiens
cagactcccaaagtgttgggattataggcatgagccattgcacctggccccaaatagaccaaatcttttgattagaaccaaattattcttcttctgcttatgggtggttggtatccacaaattgcaaatgcctagtcttcactcctctcagtttttctttttgtttctgtaataaacactctgggaagtttttcaaaagttatttcttttgatagtaattattgttaaattaaatgcttttatatctttagcaatgttgccaaaaacaatgagcaaaatcatgttttcttctaaagaagtgatgcaatatgaaataaagatgtgtgtgcttttcagaaagaaatgaaagaaattctagaaaattgtggttgggctggcattaatagctgaggcaataaaaaaattctctggtctgcagaaatcaatcttaagggcaaaggtagtctatagtatgggttatcaagtaaatgaatcaaattcactttagtactttatttttgtcaaggattttgtctctaatgtgtgttaagcaatacctcatcccttccacatcctgcaccagtccaggctgcagtgggaaaagacaaatgcagcagatgccaactaggaagctctcagggcacatgtagtgtttggctgaaattctatttatctgtatattctcatgaggcagg

SEQ ID NO: 238573 - DNA, 632 bp, Homo sapiens
tgcaggatgccaaagctgcctcctgaggcatgagtaggaattttccaggtggataaagagagggcattagcagggttggacagtgtttttcggaggcccctttcactgtgactgtatcacctgctgcttccaactcggactctgccttgcattttgagaggaagggagtaggctcttttgagtaccatcttgaaggttctccaggactcaggagatgccctgttggggctctgatgggaattccaggtcaccagatgcctcctgttacatctccactctaagccctgtgtctggccttggatcctcctcccttgtaaatgtggccgatgacgaaacagagacatcagtcccatttgtggctccatcagctttggaagcagatcacgggaattttctgagtctgggcccccagccagaaggcatttataatcagacatggagcaatcattagagcagaaacaataaattacaacagcaccaagagaactccccaaagctgctcacgcgaggggagatccaaggagcagaatgctagcaggctctgggcccgcctgcccctcccgctggcagccaaggcctcctgcctcaccacactcagcctctgcccccagacgtctgtgagtgatgcagca

SEQ ID NO: 238574 - DNA, 364 bp, Homo sapiens
ccttaaatatgtatgtgtacctcctaagaacaagaacattcaactacatgacataatacagttatttacctcactgaagaaattgaagagtaatgtaataccattgtttaatatattttcaatttccccagttgtcactcttagtcactgtgttccactgcctccattgtctttttctcagtgctaatacttaaccataacttgaatgtatgataacactacagagggccttcacattcatatcttttttttttaattgagacagagtcttactctgtcactcaggctagagtgcagtgggctgagatcgcaccactgcactccagcctgggtgacagagcaagaatccacctcaaaaaaaaaa

SEQ ID NO: 238575 - DNA, 521 bp, Homo sapiens
tgagggttcagtattttaacaatgtggtgttattgttgcatattagctaaatatcagtgctttcctgatatgaaacttatgtcttgagttttgtgattctacttttaaaatatctctcaaaatcatctactttggcttatctctactgcaacactgtagtacagaacacccttttccactgcaacagcattctgactgctctctgcctcaaaccttttaaaaattgttcttaaatgaggctgggaaccttaacaaatccagtcactctactatcatgtgcctggggatagtgctgggtgtgtttacaatagagtgcttaatactgttggctcctggccaatcaaagatgagcatcaaaaccatgcatggtggaatgtatctttattcccagctactcaggaggctgaggcaggagaattacttgaggccaagagtttgaggctgtagtgtattatgtttgcacctgtgaataaccaccactctgcagcctgggaaacatagtgagacccccatcttttagg

SEQ ID NO: 238576 - DNA, 545 bp, Homo sapiens
caaaccttcttggaaatgagcttaggcacaggctgcccttgtctgccctcttctgcatgatgttccttcagatgagacaggaaggcagcgctcctctccctggtggcttctcgtctccagaacacacacccccagtaccttggactttttcactctctgtagcttcatgcttgggtctatccttagaacaatactgaaggtattctttgtcccataaggagcagcactgacccatcccctccctccttttggaaattctagtaatacacctaagagtgtgctggggctgggcacggtggctcatgcctgtaatcccagcactttgggacgcggaggcgggcggatcaccggaggtcaggagattgagaccatcctggctaacacagtgaagcaccatctctactaaaaatacaaaaagttagccgggtgtggtgacgcgtgcctgtagttacggctacttgggaggctgaggcaggagaattgcttgaacccaggaggtggaggctgcagagaaccgagatcacaccagagcaagagtccatctc

SEQ ID NO: 238577 - DNA, 439 bp, Homo sapiens
cctgttcgcccacctttcctttgtttattgatatttccaccagaggaaggaccaggcaaaagggagaataaattcactttttaagataatgcttctgagttttagcacagcatcccacttcccgggaagctttattgccaaggcaataaggagaccatgtgagtaggagttaaatgcacagccatttgtgaagtgagactgcttgggttcagatcttgattctgccctttattctatgttgtggaatatattacattgtgctgtgcctcttttaccttatttgtaaaatagagcaagcacccaactcaagcagttgttgcaagaactgcctgctatgctgtttaatacagtatgtggcaaatagcaagtgggtagtaaatgttaataatactgtttggattctcattttacatatgagaaactgaggtttaatgaagtt

SEQ ID NO: 238578 - DNA, 357 bp, Homo sapiens
tttttttttttgagacggagtcttgctctgtcgcccaggctggagtgcagtggcgcaatctcggctcactgtgagctccatctcctgggttcacgccattctcctgcctcagcctcccgagtagcagggactagaggcacccgccaccacgcctggctgatttttttagtagagacggggtttcaccatgttagccaggacggtctcgatctcctgactttgtgatccacccgcctcagcctcccaaagtgcagggattacaggcgtgagccaccatgcctggccagatctattataattttcttatccactgtctgttgatagacatttaagttatcttccagttgtgaactgtta

SEQ ID NO: 238579 - DNA, 393 bp, Homo sapiens
tgggatcacagacatgggatatttttactctccagcatgaacacataggtggatttactgtgaaactactgaagcttacacttcagggtccctggcttcctcaaacagggcttccaagccctatatctaattttgcacttctttcttaagagttgcctgtaccaaatatataagcctcagggccccaaacctggatccagcctgagtgaatgtttttttagagccaggtctgatagaagcctgtttttaaggaattaccaggaactgagcatgctgtttttggccctcaggggtttctctcagaactaagaatttgggggctgtcctcagtcacaggtgcagcctgaagtctgttcccgccatgttcactctcctctatttaccatcacctgc

SEQ ID NO: 238580 - DNA, 2613 bp, Homo sapiens
cacttgtaatcctagcacttggaaaggctgagacaggaggatcacttgaggccaggagtttgagaccaacctgggcaatatagtgagaccctatttctacaaaaaataaaataaatagccaggcctggtggtatgcacctgtagtcctagctactgaggaggctgacggaggaggatcacttgagcccaggaattggaggctgcagtgagctatgatcacgccactgcactccagcctgggcgacagagccagaccctatctctgaaaacaataataaaacgacaaccaatgctgactgtgtctccatcactgggtggggctgaggaagcaggcctcagaaaggaagccagttttcccccaaaattattccctgaggctgcctctgggcctgtggatccagatgtgtgggggccttcaggagtggcaggggagtggggcctccagcgtgaaaacggaagtcaccgtcagccttgcacccccggctctgcctcccaggactggtgtttttgcctctgttttaatttcctgctgggtcctcccttggacattgtcaggtatgcaggctgggacatcccttctttcctcctacattccccctagagcccaaggctctgtccgtggtccagccactccatggcagggaagctgtacctccataatcagctgcctgagggcccctgacccaccaccaggcaccaccctggtggggctgaggttagaagggaaagaatgccagaactccagtcctggaggcaggagagtgtgtgagcccagccccgccctctcagactctcagacctttatttcatcctcattttcctggctagaggttccatgcatcatttttttttttttttttttcagatggagtctcactctgttgcccaggctggagtgcagtggtgctatgtcggctcactgaaacctccgcctctcaggttcaagcgattctcctgcctccgcctcccgagtggctgggattgcaggcatgcaccaccacacctggctagtttttgtatttttggtagagacggggtttcaccatgttggccaggctggtctcaaactcctgacctcaggtgatccacctgcctgggcttcccaaagtactgggattataggcttgagccaccacgcccggctggttccatgcatcttacctggatgacttgggtccctaaatgggcccctgggtgcccagcctcccctcctccaatacattctctgataatctgaccttgtcatgaccattggggcacctgttgcccacagggtagaggccaggtgcctgaggacagcactgaaggccgtgcacctccacctccagcctccagtcacctcacctagctcactgctctctctcctgcaaagtctctcctgcttccctccctaagggaagggctggccgctcactgcttgggcccccttgatttctaagacacctgtgaagggtcccacgaggccaggcacagtggctcttgtctgtagtcccagcgctctgggaggctgaggcaggaggatcacttgaggtcaggagttcaatgtggacaacacagtaagaccctgtctctacaaaaaaatttaaaacttagctggcattggtggcgcatgcctatagtcccagctacttgggaggttgaggtaggaggatcgcttgaacccaggagttcaagtctgcagtgagctatgattgcaccactgcactccagcctgggtgatagagcaagaccccaactcaaaaaaaaaaaaaaggatcccacggctcaccttgtgctgccacgatcggttggcagctctgctctgtgccgtcctgtgcctgtcactgagtaagatgcaggagaagttgggcaaaagccctcaggataaacgaataagtcattcagagtaggtgctggtgggaaatgggcttgagtcactcacctggggccagaagaggcccccagggagttgtgagcagattagaccctccaagaccgccccaggggttggcccatgctttccctaactgtgcaaaaatggtttgggataggctgggtgccgtgggtcacgcctgtaatcccagcactttgggaggctgaggcaggtggatcacctcaagtcaggagttcgagaccagcctggccaacatggtgaaaccccatctctactaaaaatacagaaattagctgggtgtggttgcacacgcctgtaatcccagctactcgggaggctgagggaggagaatcccttgaacccgggaggcggaggttcatggggaacccagcaggaaattagaatagaaccaaaaacgccagtcatgggaggcagagctgggggagcgaggctgacgatgactcctgttttcacgctgagagaccccactcccctgctgagatcgcgccactgcactccagcctgggcgacggagcaagactccatctcaaaaaaaaagttaattaattaattagattaaagtacaacaattagcagggcatggtggtgcacgtctgtagtcccagctactcaggaggctgaggcagaagaatcgcttgaaccctggaggcggaggttgccgtgagccaagatcgcaccactgcactccagcctgggcgacaaagtgagactccgtctcc

SEQ ID NO: 238581 - DNA, 346 bp, Homo sapiens
ctcaaatgatctgcctgtttcaacctcccaaagtgctgggattacaggcatgtgccatcatgcctggcctttttcttgatttttaattgaacttcctgttaatcactcttatttttcttcagcttttaagttccagggtacaagtgcaggaaatgcaggtttgttacataggtaaacgtgtgacatggtggtttgcagcacagattaacctatcaccttggtattaagcccagcatccattagctattcttcctgatgctctcccttccccccaacctgcaaccctcatttttttttcttgaaaccctttgcctttggtttcagtgaactgttctatcctgatctt

SEQ ID NO: 238582 - DNA, 481 bp, Homo sapiens
aggtgatccacctgccttggccccccaaagtgctaggattataggtgtgagccactgcacctggccatatttatttttctattctctctttaaataccatagccttttacctactccatgctatcagaactgcttttgtcaaagtcagtggtcattcattgtggaattgcctgacaagttcttcctgcctgctacaaaggcaaaatctgttcactaagtctgtggcattgcagtaaagaaagagtttaattgatgtgaggccagcccatgcagaagaactggagttgtcactccaaagccttggaggttagggtttttatggacaatttggtgggcagggggctagggaatgggtgctggtgattgtttggggatgaaatcataggggtgtggaaagcagtcctcatgtgctgagtccactcaggatcagttgtgccatgactcatgagtcccatggggtcagtctgaaaaacagttcaaa

SEQ ID NO: 238583 - DNA, 509 bp, Homo sapiens
  misc_feature (464)..(464): n is a, c, g, or t
  misc_feature (475)..(476): n is a, c, g, or t
aggtgatccacctgccttggccccccaaagtgctaggattataggtgtgagccactgcacctggccatatttatttttctattctctctttaaataccatagccttttacctactccatgctatcagaactgcttttgtcaaagtcagtggtcattcattgtggaattgcctgacaagttcttcctgcctgctacaaaggcaaaatctgttcactaagtctgtggcattgcagtaaagaaagagtttaattgatgtgaggccagcccatgcagaagaactggagttgtcactccaaagccttggaggttagggtttttatggacaatttggtgggcagggggctagggaatgggtgctggtgattgtttggggatgaaatcataggggtgtggaaagcagtcctcatgtgctgagtccactcaggatcagttgtgccatgactcatgagtcccatgggtcatgntcaagttttgnnctggttttgtgtttttgggttggatatagttgc

SEQ ID NO: 238584 - DNA, 234 bp, Homo sapiens
gaatagggtggcttgctctagcaaatacagacacaggacacccagtgaaatactgcatggaatatacttatactgaaaaattattattgtttttctggaattaaatttaacgggggcccggcatggtggctcacgcctgtaatcctaagcactttgggaggctgagcaggtggatctcttgaggccaggagttcgagaccagcctggccaacattatgaaaccccgtctctact

SEQ ID NO: 238585 - DNA, 332 bp, Homo sapiens
gtctcttaattaatccaccgcttacagcttgtttcccattgcaacaaggcctcccactgcaagacagagaggagaaacccggcaagagtcagaagatctggggcaagaaatgaaccgaaatcttcactgagtgcagcagccacaagcttgatgacagagcctgtgtatttcactccaaggctgcacgtgtctgtaagaacgggcctcgcccatcttatgcaatttgcataggaatctgaggaatatcagcaactctatacaataactaaacaaatttttttcagagtaaaaatttgttatggagcttaaataaagactgacaaaacattgca

SEQ ID NO: 238586 - DNA, 420 bp, Homo sapiens
ggaattcctgacctttcctaaacatcgtcagcaatgagtctcagcccttatctttctgcctgaagagctcagggctcttcagggtcaggagtgaggaaaccggaagaggatgaagaatgcggggtgctaatgagatcacttctgtcctgtagttggaaacccggcaagagtcagaagatctggggcaagaaatgaaccgaaatcttcactgagtgcagcagccacaagcttgatgacagagcctgtgtatttcactccaaggctgcacgtgtctgtaagaacgggcctcgcccatcttatgcagttcggatcgtcataggagcagatatcaacaaatcgatccaaggtgtggctgggttctttgcagagtaataaagtgtgatggagtgtcaataaaggctgactaaactttgcaaacaa

SEQ ID NO: 238587 - DNA, 414 bp, Homo sapiens
ggaattcctgacctttcctaaacatcgtcagcaatgagtctcagcccttatctttctgcctgaagagctcagggctcttcagggtcaggagtgaggaaaccggaagaggatgaagaatgcggggtgctaatgagatcacttctgtcctgtagttggaaacccggcaagagtcagaagatctggggcaagaaatgaaccgaaatcttcactgagtgcagcagccacaagcttgatgacagagcctgtgtatttcactccaaggctgcacgtgtctgtaagaacgggcctcgcccatcttatgcaatttgcataggaatctgaggaatatcagcaactctatacaataactaaacaaatttttttcagagtaaaaatttgttatggagcttaaataaagactgacaaaacattgca

SEQ ID NO: 238588 - DNA, 282 bp, Homo sapiens
ctcccattcccccgggctattccacctatcactcttcacccatccatcttttactatcctccaaaggctgcgttatgaaatcttaatttcttccaaggcaggggcggcaaacattttctgtaaaaggccagatagtattttaggctttgtgggccatatggtctgtgctgcaactactcaattttgccagggtggtgcaaaagcagccctagacagtacgtaaataaatgggtgtggttgtgttctaataaaactttattaataaaaacaggcagcagacca

SEQ ID NO: 238589 - DNA, 180 bp, Homo sapiens
tgacgggcagaaatggagttaggtagtttttttcctctcaatttccagctcagaaaatcagttaattgagtattcagagtgatgctcacacttgttgctcatgtgtaaccacagtgggattgtgctaattaagtaaggccttggttggtttttctaattcaccccttctgtcgtcttctc

SEQ ID NO: 238590 - DNA, 401 bp, Homo sapiens
ccatctcaaaaaacaaacaacaacaacaacaaaaaaaaacgggcaagcttacagcagttcacacaacagcccagacaggacctgctggagactatcagcatcctgtttcctgggctctgccagctcctggaatgctaccagcatcatcaaaccctagtggtacttgtctccagtggcagtgtactccaggacctctttgagccaggtaatagactctcctgtctctgggtgccccatctcatcttgggcatacatatctggatttctggtctccattcattttgttcctggatgtgagttcctgcttggacagcatttttcaaattaaattttacatttagtttgtgatttctttcaagccctaccacaactcgcattagtcaaaaccagttataggccgg

SEQ ID NO: 238591 - DNA, 348 bp, Homo sapiens
aactatctgtaaaaatgctttgtgatgcgaagattcatctcacagtgttaaacatttgttttgattcagcatgttggaaaaaattttttgtagaatctacaaagggacttttcggagcccattgagaccaatattgaaaaaatgaatatccagctataaaaactagaaacaagctctcggtgaaaatgctttgcaatgtgtggattcatctctcagagttaaacttttattttgattcacccagttggagacacttaattggtagaatctattaggggacatttcatagcccattgaggcatgtggtgaaaaactgaatatcccgcaataaaaacctgaaacaagcga

SEQ ID NO: 238592 - DNA, 394 bp, Homo sapiens
gctgagatctgccagattaacatgaaaccttactttagtccaattacttcatgtatcatgtacaactttcaacaaaatattaggcaagaaaaaaaaaagtaagaagagacaaagtaagcatcaaaatcagactcagactttggaattattagataggtatatatttttttcttttgagacagggtcttgctctgtcacccaagctggagtacagtggcatgatctcagctcactgtaacctcaacctcccaggctcaagtgattctcccctctcagctacttgagaggctgaggcaggagaatcgcttgaacctgggaggtggaggttgcagtgaaccaaggtggtgccattgcacaccccagcctggatgacagggtgagactccatctcaca

SEQ ID NO: 238593 - DNA, 576 bp, Homo sapiens
tgacttaatattttagattagacatattagtccaacaatgataatgtcctctccattatatgtgaaaataaagcacttgactcagaaacattatctttaagtatttctcaagcacaggtaatggatttgtacggattcatccacatttcttttcctacttcttttgtaaccaaaagccaatctttgtgatgtatctaaatagagactcaggttataagccattgctatggaaaataacaaggtttgacaaaaagaggtagaataaatttttttttaaaaatttccaacaataacttttacccacccaaattaaatattatctaactctaggatggcatgggctcttttaatgactatcatttagagggataccggtttgactaaacactgtagctgaaacgatattccaaactagtctcccttcatgcagtatacacagtctcagggttaacccgggagaggaaattttaaatgtacaaagctgtcattatcttagatcataaccagatactcttttccccctgttttggtaaaccacagggatggtatttcagatgcaccattatatacaaaaaa

SEQ ID NO: 238594 - DNA, 623 bp, Homo sapiens
  misc_feature (1)..(1): n is a, c, g, or t
ngagtcttatctctggtgccatttggtcttcctaagtaattacagaaaaaaaaaaaataggtggaagttgcagctgcatgccccatgactcaggctgcagagaccaattcctgtcaaggctcagaataacttaaagttccaagagctttaggtttgatttaacaaagcttgaataatagtaataaataatattattaatctcaaaatcctgggctcaagtgatcctcctgcctcagcctcccaaagtgttgggattacagtttacatgaacaacagacaagctgaaaggttgtaaggaaaaggtggggagacattctctggggaactgaaaagctccctcaaatatgagggaattgagaaagccatatacatgcagggcaagatgcatgctcataaaagactcaagaagtccaggtgtggtggctcacacctgtaatcccagcactttggaaggccaaggcgggaggatcccttgaggccaggagttcgagaccagcctgggcaacatagcaagactccgtctccacaaaaataaaaataaaataaaataaaatagcaagacacatggtggtacatgcctgtagtcttaggtacttggaaggctgaggcaggataatcatttg

SEQ ID NO: 238595 - DNA, 435 bp, Homo sapiens
ttctcgcttagatgcacctttacaaagaaaatttccctggctggctgccaacggtttctctgcccacttccattttaagcaatttttatgagtgtcccatctcttctcaaacaaaggcagatggcaaaacttgctggtttacttttaaagaaaacttgacccagactgttataagctaagaagaggctttgtgaagtcacatggcctgggtttacccatcaccccctgataagcactcacacctgtaatcccagcactttggaaggccaaggcgggaggatcccttgaggccaggagttcgagaccagcctgggcaacatagcaagactccgtctccacaaaaataaaaataaaataaaataaaatagcaagacacatggtggtacatgcctgtagtcttaggtacttggaaggctgaggcaggataatcatttg

SEQ ID NO: 238596 - DNA, 576 bp, Homo sapiens
aagggagcaaagcagactttgttctcaaaggattgtatctattagttccgacctgtctggggactacctaaagaatggatgccagacattcgcttttgttttgcctgactcagaaatctctcaagatggaaaagcttctacttaagaggacagttctccaaaacactgaaaggcaaattaacaaacctctgctgtccagagcaaagattacagtttacatgaacaacagacaagctgaaaggttgtaaggaaaaggtggggagacattctctggggaactgaaaagctccctcaaatatgagggaattgagaaagccatatacatgcagggcaagatgcatgctcataaaagactcaagaagtccaggtgtggtggctcacacctgtaatcccagcactttggaaggccaaggcgggaggatcccttgaggccaggagttcgagaccagcctgggcaacatagcaagactccgtctccacaaaaataaaaataaaataaaataaaatagcaagacacatggtggtacatgcctgtagtcttaggtacttggaaggctgaggcaggataatcatttg

SEQ ID NO: 238597 - DNA, 507 bp, Homo sapiens
  misc_feature (479)..(479): n is a, c, g, or t
cttttcataactatttgtcttttgagaaaagtatttctgttgcatttgccttcacagatggagctgagcatttcataatagctaccataaaaaagagggaaactttcaagcttgttaaatttgaggttcttaaataaatttcttagagaaaatgaagccagaaaaataattatttagtttgggcactccattctgaagatggccctcagagtagcaggagctttttagagaggtagtagcagtagattgtcctacaatctgacctccactgcctatccgtgggaagttgtaaaaggctatctttaagaatattttaaagaggccaggcgtggtggcgcacgcctataatcgcagctacgtgggaggctgaggtgggagaatcgcttgaacctggtaggcagatgttgcagtgagccgagatcgcaccattgcactccaggctgggcaacagagcaagactctgtctcacatataaagangattacctaagagagctagaagacacaa

SEQ ID NO: 238598 - DNA, 781 bp, Homo sapiens
ataactgcaatgacgtttatcatgtatgatttaaagtcaggaaatgcctcttggtaacctacagggtcagtttttcactgatgggttacaactggcctaattggtttgacaaacctagcttgattacatggacaaggagacataaaaggcttgttgagaatttctcctcgaagccctcctgaaagcatgattcctagcacagaatcttggtggttgacactggagacagaatgcacactctgtgtctgtgaatacttggagccctgggtagctttcaacctgggatgtctttcagactcccagtccatgcccgcactctctttcacttgctgcaccgtattgtttgcctttaaataaaagccccatgtaaatatgttctatggaatgtggtggttcctttcaaacatccaaacaggaagcttttcagtatgtatacatttatattgagaatacacctaagaatgaatttgctctttgccagttcataaaagtatatatatttatatattgagctttagacaaaatttacaagtaaaatacagaaggaaatttcttgaaccattagagaataagttactgacctgattcccagttaccaccaaatatgttggggtttattccttacaaacaggtttctcctacgtgttcacaacacaactatcagcattggttgtattcccactaacaccctgttactgtctaatcctcagaccccattcaagaccctggcactctacattaagctacccctgggtatagttaccttcttcactctactctg

SEQ ID NO: 238599 - DNA, 464 bp, Homo sapiens
ctacactttgagaaccgctgctcttgtctcatctcctcattttatttagaaggacacggacctcggaaatccaaaatgacgcagcctgttagtgggaggatacagattagatggtttgtctcacttctcttgcttaggttttcggtcagatacttgggaaatataccctgatggcctgtcctgttctctgtagctgcaaagactgttacaatatattatccccgcaaaaattttaataaaaaaggaatcatcagcaaacctgataaattctacaacaagcatactgtgtttgaatttgagttatgacatttgaattaggatctctatttgaactgaaacactaaggcaaattctatggcgccctactccatgcaagttgttaacgacaaactgcacagtaaatatcacaaacacggaaataccacagtgtctgcatctgaaatataattcagtgacagattcca

SEQ ID NO: 238600 - DNA, 1928 bp, Homo sapiens
  misc_feature (6)..(6): n is a, c, g, or t
  misc_feature (907)..(907): n is a, c, g, or t
  misc_feature (945)..(945): n is a, c, g, or t
  misc_feature (1150)..(1150): n is a, c, g, or t
  misc_feature (1261)..(1261): n is a, c, g, or t
  misc_feature (1373)..(1373): n is a, c, g, or t
agattncttttaacaattaagatcttgggtattgcaacctattcataccccctgaggaatggacctgctactttttatagaggcttctttgttctctccagatgtggatgccgggcatcctcaggaagggcctgagaacaaagcagaggaccagatcctgtctttgttcccaaccattgtctgcccagcatatgggtcattgtattctgtaggaatagtcagcatagtgcctggcaccgtaactatttgttcaatgaacaaatgaatgaatgttgaagagagagagactagaggctggatttcacttgggcctctcattctcatttatataattaattcactcattaaacatttttttcttctctttttctcatcactgacttaaagctcacattcattaaacattaactgaatacttatactgtatactaaatattatactagatcttagggggaatgcaaatataggacagatttccaataccctatggagctaaagatctatttaatctagactgaaggggaaagaatttttaacccatccctaggagaggtataaatagtgggtcagcttactgtacttcataggagaggagagctgatggtgcctcttcttaatacagagtggagtttcatcagaaaagctcatcagtagagccggacagaaaagcttcatagatccttaaaatgcagtttcattgttttgcttgaaatgccccatagaaaaagggaacatccttttttaaatatcagtgcctgagcaccttccagaatagagagaattatttttggatcacccacataaaaataaagattactactcctggcggggcatggtggctcacgccctgtaatcccagcaccttgagaggccgagatgggtggatcacctgaggtcaggagttcnagaccagcctggccaacatggagaaaccctgtctactnaaattacaaagattagccaggcgcagtggtgcacacctgtaatcccagctacttgggaggctgagcatgagaatggcttgaaccctggagatggagtttgcagtgagccaagattgggccactgcactccagcctgcacaacaaagcaagaccccgtctcaaaaaaagttgtcagttccttagtcccaaaatagagagcttatgnttaaaacactccaaagaatctgttctgttttaaatatgtaaatatccttttttaaaaaaataatttatttcttcgaaaaaagttcagtagccttaagttgaattgttgaancgtggagatttattatgacttggtttttaaatttctttgaaattctccacaataataaagtaaaaagagattaataaaaagttcttttcttaaactgtgaaagcaattgtanacatgtggaaagatgtgcaaaagaaaacaaaattaactcatgatcccattaactatggtaatggttaggcttatttctctctacatttttccctttgcgaagtgtatttaaataaaatattcagtattgtattttgagctttatgactaatgattattgtgtacattttgtcagtaatttaacaactacttaaagttgctgcttttaatgatcattcagtgttctgtcatatgaatggatcatcatttatttaaccattctctaacaggttatatttaggacagttaggttacatttcattattcattacttttttttttttttgagacagagtctcgctctgtcgctcaggctggagtgcagtggcatgctctcggctcactgcaacctccgcctcccaggttcaagcgattctcctgcctcagcctcctgaatagctagaactataggtgtgcaccaccacgcccagcactttgggaggctgaggcaggaggatcatttgaggccaggaatttaagaccagcctggggcaccatactgagatcctatctctac

SEQ ID NO: 238601 - DNA, 472 bp, Homo sapiens
tgtctagttaatgttgatcaaattatctgttattagattccaagcatgtctttgcagatttaacttattttgaaattttagggatttattgaaacatatgctgctcctgtatttctggaaactctgatcatgagaaaaaaaggatggtctgatttacattctgtttgacaaatgcatttgttagtgatagtaaattgaaagggtcagcaaattaatgcattatccttaatttcatagcctaaattgatagtatttattagagtggttattggcttataattttttatgataaattgattattcttgaatctttagtatgtaattttcaatgcaatatctaagacataggaaatttaaatccaaacactgaatgctttttaaattatctactgatttatatttaaattttgtttgttaacttataatttataattttctattgttttctaagctttagtacactttccttaga

SEQ ID NO: 238602 - DNA, 503 bp, Homo sapiens
ttagcaagtaagtaagtgaacagatatatgatcattcctcacagtgatcaatgctatgatggaaaacagcatggcagggagtgtctcgactgtgtctgtggagggtcacttcaaatgaacacagaagggacattgagctgaggctgggatgacatgggaaagctgcatttgcgtggtggggcaggagcaccctggacggaatatcaggtgtaaaaatgttcaggcaagaaggagctaggctgctggagaggcaggggttaggcagtgaggacaagagagaaggaaggcagctggaccacgcaacagtcattgagattttattctacataaaatgatctaccactgagagaactttaagcaagacagtgatgtgatctgtttttgctcatttaaaagatcactctgcagcccagcaccgtggctcctacctgtaaccccagcacgtcaggaggccaaggtgggaagattgtttgaggccaggagttcaagactctgtctctaca

SEQ ID NO: 238603 - DNA, 445 bp, Homo sapiens
attttctccgcctgtatgtatggataatcctattcaacatttttaaggtctagaagctgctaggtcactagaaagtaattttgctatgatgtgaagaggttctctatgatgatgtatgactgataaattatgatgattaatgtcagaatataagggtcactgcctaactcattctctgttatcagtagagggaaaggagctgctttctcttcactatttttttctagaagaattttctatccctgtgttttccagtatagtgactactagccatttaggcacgtaagatgtggctagttctgagatgtgaaatagatgttaacacattgaatttcaaagacttagtacaaaaaaaagcaaaatatcttaatttgtatagtgattacatgttgaagtggtaatattttggatatttgtgttaaataaaatagattattagaattta

SEQ ID NO: 238604 - DNA, 229 bp, Homo sapiens
tcgcctgccgccacgcaagacatgactctttgctcctcattcgccttcagccatgattgtgaggccttcccagccatgtgaaactgcaaatggcaatgtttcagataatgcctgctccacaagcttggatccagagtgataagaaggaatgacagagcttccagtttattcacaatggatgtgaagcatgactaagaaataaatttctgttgtgttaagccactaataa

SEQ ID NO: 238605 - DNA, 499 bp, Homo sapiens
cagaaatcagtcatcagaccaaggggaaatcatatgggaactcacagtaaaaagggaagcatttgacttcaggcagatcccagtcttgccattagttttcttctcctctaaggtgggccccatagccactgtttctgcctgcctcgtaggatcagcctgagactcaggaatgataatggctataactgaatggctttgtgagacatcaagattattaaataagcggcacacagagatggaacccatttatgacacgtttgtggtagcatttttctactttgagttatttgtagcttcacaagaattttcatttccaaatataaagtgaaaatgttgtgtcattcgccattaagcaacccacagaacagttcctgttctttctaaaatgggatggagtgatttatcggtacaatgcagaactccttgtttcatacccgctgttacttttcaacttgtgaggttttcatatataattaaaacagcctcaatatttgtaata

SEQ ID NO: 238606 - DNA, 862 bp, Homo sapiens
aatgattctttagttcccgcttttaaaacattttgaccatacaatgaataaatgttgctcatactatctgcataatgaagtttaggaataactgccccctgccaaaagattgaatggaaggctcaggaagtgctcatgtacgttttaaaagataataggaattctatgtgaaaaatggcccacttctttattttaatactgaaaacaacttcctaatcctaaaatgattttcttcccctaatctattcttgggcatcttcttgaatttccagcctgctttgagggaagtctgggtttacaaaggcgagattcaaagcttttcaaacaggacaggtcctctggttccctgtgagaagagcccaggacccaccctgtgaaagttcatcccacctaaatttgttcatctggactcagtctttgccagtgtgattgaaggcgtttgtaagcacatccaggagtactatccacctgggcagtcacgcaggagacagagcccagggtgggctagttgcctgcttggagatggatcgtggttaacttcacattcttgttctcttgggccaaagtcttgttcatggtttagaataagacagtgttcaagcagcctgtggtcagactaagattgcgtagtcatcctcaaaagtggccttccagtgtgctctgtgtgagtctttttttttccatagaaaccagccaaaggacagtgatatatttaagaaataatcattttatcagacacactgaaatggatcaggataaacaagaaagtactcggtggagccctgtgtactgccaggtgggagaggagttctcttgtgtggttattggtttctgaaaccgaagacaagaggcagcccatttc

SEQ ID NO: 238607 - DNA, 807 bp, Homo sapiens
aatgattctttagttcccgcttttaaaacattttgaccatacaatgaataaatgttgctcatactatctgcataatgaagtttaggaataactgccccctgccaaaagattgaatggaaggctcaggaagtgctcatgtacgttttaaaagataataggaattctatgtgaaaaatggcccacttctttattttaatactgaaaacaacttcctaatcctaaaatgattttcttcccctaatctattcttgggcatcttcttgaatttccagcctgctttgagggaagtctgggtttacaaaggcgagattcaaagcttttcaaacaggacaggtcctctggttccctgtgagaagagcccaggacccaccctgtgaaagttcatcccacctaaatttgttcatctggactcagtctttgccagtgtgattgaaggcgtttgtaagcacatccaggagtactatccacctgggcagtcacgcaggagacagagcccagggtgggctagttgcctgcttggagatggatcgtggttaacttcacattcttgttctcttgggccaaagtcttgttcatggtttagaataagacagtgttcaagcagcctgtggtcagactaagattgcgtagtcatcctcccaaaggacagtgatatatttaagaaataatcattttatcagacacactgaaatggatcaggataaacaagaaagtactcggtggagccctgtgtactgccaggtgggagaggagttctcttgtgtggttattggtttctgaaaccgaagacaagaggcagcccatttc

SEQ ID NO: 238608 - DNA, 487 bp, Homo sapiens
caggttcccattactctgtttatccccattgtctgagtgagcctcagtgttaaatcagtgcacaattagtgctttcatatcaggttgattatttagttcttcctccacttgcccagacatagaatcttcctccagtaccctgtttcttatgtagttccacacaacatccaaatgcacacaattttttgagtaaactatttccccacttaggttacccttcttccctctcttttcatgaatcaatttcctgttcttctgtcaaaatccaaatgaagacttactggctttgtgagttaattatgcatgcccctcacatcctcagtagtattcagagttctccagagaaacagatcaataggatgtgtgtgtattttggtagggggatagggatgacggtaaagaaatttagtatacagaattagaccatgtgattttgtaggctgagaaattcagacccaggagagctgatggtgtaagttccagtcca

SEQ ID NO: 238609 - DNA, 211 bp, Homo sapiens
agaagagaggaggaaagaataaaagaagtggggtgaagttttggtttggtagaggaaacttgaagacattttcactggaaaggaagagaggaagaggagggagatgtctgtaaggacgagcaaaccgggtgacagctgatttcctcatattgaagtaatgagtcctagttataataaattcctaataaaaacccagtttatccctgcaata

SEQ ID NO: 238610 - DNA, 503 bp, Homo sapiens
tggcagggacaagcgacccagccagccctcctgcaggtgactgggaatgagagctgagcacctcccaggtagggaggataggtgcaaaggggctcaccccagctctcgccatcctgagaggagagaggaggtgcccttcgcaggcagcagagccagcccagccgctggctttcatttcccttcctcacaagagccatttatgacaatccgtcagggcaagctgatgcggcagatcgcttttggcagaagtcctttctacttgtcataaatcacagagaaagccaccggcggtgaatacaaagaaagtccaagaccactggctggaggttaacagctgttagcgacccagggttcaggagactttacaaatccacaaatacgaacaaggcaggctcctacaaataaattgggctgtgaacaactaagaatgctgtctgggatgaaagtcacaactcagaatcacaaatgataatacagcaagagcaggacaaaggcggcctgcc

SEQ ID NO: 238611 - DNA, 511 bp, Homo sapiens
atgttctctaggccttttagaaaacatggacttgttcttttggccacatacctgcaaatctataagaaagatgatattggagacatcaagggaatgggtactgttcagaaaggaagccccacaagtgttaccatggcaaaactgcaagagtctacgatgttactcagcatgctgttggcattgtaaacaaacaaggtcagggcacgactcttgccaagagaactaatgtgcgtgttgagcacattaagcactcttaagagccaagatagcttcctgaaacatgtgaaggaaaatgatcagaaaaagaaggaagccaaagagaaatgtaccagggttcagctgaagagccagcctgttcccagagaagcacactttgtgagaagcagtggagaggaacctgagctgctggggtgtctctcctatgaatccatggcatgataggtgttaaaaacaaacaaacaaacaaacaaaaaaaaacaccaaaacaagaaaatactctggactgtgttta

SEQ ID NO: 238612 - DNA, 177 bp, Homo sapiens
tccaacctcacatttctttttctttctttttttcttttttctttctttctttctttctttctttctttctttctttctcattctttctttttcattctttctttttttctttctccttccttccttcctctctctctttctttctttctctttttctctctcttctctttctttctt

SEQ ID NO: 238613 - DNA, 720 bp, Homo sapiens
ttctttcaacacaaatttggtgtttagtactatttttagtagtagttgtttggcttctgagagacttaattttttggaacacttttagatttacagaaaaactgaagaaagtagggttttcacagccccccagctcagtttctgctgtttactgccatctctcattagtgtgctgcctgtgtcacagttgatgagctgatactcatacattattactaactcaagtccacaggttcactcttaatgttgtatgttctagggtttggatagatgtgtaatgacatgtattcactgtgacagtgttgtaccgagttcactgccctaaaaatcctctgtgctctgcctgttcatccctccctctgcccaacccctggcagcccctgatcgtactgtcctctagttttgtcaagtaatactttaagaagtaaactgggccaggcacagtaggcttatgcctgtcatcccaacacttcgggaggccaaggtgggctgatcacttgagcccaggcgttcaagaccagcctgggcaatatggtgaaaccctgtgtctacaaaaaatataaaaattagcctagcatggtggcacatgcctgtagctcaagcaacgtgggaggctgaggtgggagggtcattgagtctgggaggttgaggctgcagggagctgagatcatgccattgtactccagcctgggcaacagagcaagactctatctccagaaa

SEQ ID NO: 238614 - DNA, 367 bp, Homo sapiens
cagatgtaaaatgatgtagcaatccaggtctagtctctccaactctagtacatttactgtgtcagagtattaatatctggaatattgccaggtgtggtggctcacgcatgtaatcccagcactttgggaggccgaagtgggtggatcacttgaggtcaggaattcgaggccagcctggccaacatggtgaaaccccatctttactaaaaatacaaaaattagctgggtgtggtggtgcatgcctgtagtcccagctactcagaagactgaggcaggagaatcgcttgaacctgggaggtggaggttgcagtgagctgagatcatgccactgcactccagcctaggtgacagagcgagactccatttc

SEQ ID NO: 238615 - DNA, 342 bp, Homo sapiens
ctagtcattagcctgtggttttttgaagcagcatgctataatattacagcggctcattactgacaacctactctgtgccagctgctgtaagcatatgattaccaatacataagcaaaccctgaaggtaggggtttaaaaaacaagaagctgaagttcataggttaagtagattgttgataaatcatagagtcagtaagtggctgtgccgagattcgaactggcatttggtctctgggcaaatatgctccactatgttaactacgctttctatttctggttgaaaagcatattgaaataatgttttgtattctttttgaaagagagattcttataccattacc

SEQ ID NO: 238616 - DNA, 448 bp, Homo sapiens
aaatttattgctcacaattctggaggctggaaagtgctagatcaagacaccaacaaatttggtgtttgatgacagccctgatcctcatagatgataccttcttggtgtgtcctcacatggcgaaagacaaggacactcccttcaatgttattaaaaagggcacttattccattcaggaagatggcgctctcttggcttagtcacttcccgaaaggtcgcatgcctaatactatccacatatgaatttggagggggacacaaatatttagaccaaaccaaaaatttaataaacaagaaaaactatgtggaggatggcatcattaatacttgacatgtgaaaaattgatgttcctaccacaaaggaaagaaatgacttattcttcatgttcttcatgacatagaacaaaataaaggcccaatgaaagataaatctatacaaaaaaatgaa

SEQ ID NO: 238617 - DNA, 237 bp, Homo sapiens
ctgcactccagcctgggtgacagagcaaggctttgtctcaaaaaaaaaaaaagaaagaaagaaaaaagaaaaccctagaaattaaataaaaatacactaacataaataaagaatgctgtctgggcacagtggatcacacctgtaatctcagcatttttggaggccaagatggatggattacttgagcccaggagtctgagaccagcctgggcaacatggcaaggcttcgtctctaca

SEQ ID NO: 238618 - DNA, 894 bp, Homo sapiens
cagagccagcacctcactgcggggtagactgaagagggtcataaagagcctctgggggaggaacacctctcccttacatcttccacaaaagaacttcttggtttttctcagacccatggcagagatgtgccctgtctcaggctgacagctggaaggggctgggactcagagctaggtattgccagtcttctccatgactccccccactcctcctgctcctgagcgtctccatcaccaggcaagcccccacccccattctggatagagagaataaacccaaggatggaagggtgggctaaagaggaagtgctcacaattaaaaagagaaagaattaaaagcagcaccaatagggaagggtaattatccttcagttgctgcagaaatacaattagggccatgctctctgagccgccaggatattgtggcttttgctaattaaggagcggatgtgtcctgccagcgcaattagaggctggcccaggcagcaggggctttgcctctcctccaccagtgccacactgcaagggaaattaaccagggagcccagcgctgtgcctgcagggaggggatgactgggccaggattccaccagcctcctgtccacaaccatttccccttttcctcttcctgctctgcttaccccagcaccaccactctgacttcattctgaagcttccagggctcagtaaccacaggaagaattttcaccatgggccatgcccataggcttccagaagggggaggcaccagtagagaggggtcaccatttccaagctctagtttctcttctgcatggtggttcaatgctttatgattagtaaaggaaagagagaaatgagccacttgcctgcttctctttacgttattatcccagcactttagaagctgagggg

SEQ ID NO: 238619 - DNA, 442 bp, Homo sapiens
cccacatcatgctcagtgctgtttctgaagaccatctagacttttgtgttctctggaacattctactcaccttcagctgcagcacatttcttcagcctctccaccaagctctttaaaatgaaaggcagttactgtcttcccttggacaataatgaatgtatctactgtatgtgcagaccatgtcgagaagtggctgggttaagaaaaaagagggtttttgtaaagcctgtttatttttttaagtcagttttgagcatttctattttaccacccttcacatggttttggggaacccaaattgtatcaaggtctcatgccaaaacaagccaaaagttgttttctttacctttttcctccatgcaccatgatttcaatgattgtttcagtgtcattttaaatgttttcttgtgacatgtactgatgataaaagtcatcttgacaa

SEQ ID NO: 238620 - DNA, 370 bp, Homo sapiens
caaaacacctggtagtaccaggactcaagtctccccatttctcaagtataaaggttgtattggaagccttctgaagttttctcccagccctcaagtttttagctctcaatggtactatttatgtttgtcacatgaactaatctataagaggccctgcccttctagaggatgtgtaaattcagagatgcggcccagctgcaggccaccaccctgctccctccagaatgaaacaggcccagttgagtgacatcagcaaaccgtgtccagaccgtatgatggaatcttttgggctcttatgacaatgtaatgttgacattttttgttttaagggaaaaacaagttatttcataaacatatttctttttaacct

SEQ ID NO: 238621 - DNA, 499 bp, Homo sapiens
atatctgagttgttagcaccactactctggggctattactaagtagaataagggttacatgaacacaagcactgtgacaggtggcagttggtctgataaccgagaaggctaccaagtgactaatgaatgggtaacatctacagaatggatacattgcacaaagggaggactcctgtcccgggtgggatgaagcagggcagcattagatttcatcacattgctcagaatggcatccaatttaaaactcattaatcgtttatttctggaatttgtcattgaatatttttggatcagggttgaccaagtgtaactgaaacagcagaaagcgaaagtgcagataagaagggggctactgtactgttattcagcctgttttttctgtttcccctgagagcatataaagtccagggggaaaggaccagccttatgtgtgtgggtattcaatactctgcacattatatactgtagtaaatgtattgaataaactttcagctatcta

SEQ ID NO: 238622 - DNA, 561 bp, Homo sapiens
atcattttcatctttgtgtccttagtacctaccatggttcttcgcacctaatggaatttcagtcctgtgccatggaagccttgaattccagtgcccgttacttcttctgctgccagtggctcccatttgtgttctctcctgtggcatcggattcgatgcagaaatgggatacctgtgtactcatcagctcctattcctccagctcaaccaaagttcttttaacagtaaaaaccaatatgcaaagaagaggaggaagagatggaaccatcaagccctcctgggctcagaatatgtgtgtgtgagcgcacatacacaggtgcatgcagctttgcaatataagattaaactgtacaatgttctataatctccatttttccattcactatattatgaacatcttccaaatcaccatatagttttgtataacacacattttgatgactgaacagtaatgtattctccacaatttgtattaccaaatctttactgatggacacaagttatttagagttttgatcattaaaaacatagctttaataaacattcatatatctttgcacc

SEQ ID NO: 238623 - DNA, 677 bp, Homo sapiens
attcttgataactagagagttttgttccttctaggatagactcaagaaatttcttcagaaaataacaaagaaatttaaaatataatcagaatagttaggtgactggtatattccattctgtctttcatgctaagaggttatttagagaacaattttcttttctttttttttttttgagacagggccttgctctgtcacccaggctggaacgcagtggcacaatcatggctcactgcagccttgacctcctgggctcaagcagtcctcctacctcagcctcccgagtagctggaactacaggcttgcaccacctcacctggctaatttttgtatttttttgtaaagacagggtcttgctgtgttgcctaggctggtctcaaaactcctgggctaaagtgatcctcccaacttggcctcccaaatgcctggattacaggcatgagccactttgcctggctgaacataattttaaagtttttgagtgaaaaataatacctagtagaaaaaagatatgttatactatattaaattgtctgtggaaggccgggcacggtggctcatgcctataatcccagcactttgggaggccaaggtgggcggatcacctgaggtcgggagttcgagaccaccctgaccaacacatggagaaaacctgtctctactaaaaatacaaaatt

SEQ ID NO: 238624 - DNA, 1796 bp, Homo sapiens
  misc_feature (54)..(54): n is a, c, g, or t
  misc_feature (1691)..(1691): n is a, c, g, or t
  misc_feature (1710)..(1710): n is a, c, g, or t
tacagcaaatcactgatgtggaccacagaacctcacagtttataaagctgtagntgctgtcatctgatcctcatcacaactcatactttagggagggcaggagtttctgtatctattttacagatgaggaaactgagccttgcggaagtagttataatttgattcaggtcacaagtccaaggtgcaagagctctgagagtgagccttctgtcccattcctgttagacctcactccaatttcagtctgcagagcacaaccatctcttccacaggcaccacactcaaatgctcacaggagctagtgactaatctagacacttccatgcacctgggtgagcagcagggagagacagagactggacatgtggaaggcagagattgtgtctagggtgggtatgagcagcctgactgtagcccagaatcaccatggccaaacaagcccactgctgtcagtgcttccagttgtaataagcaaagccagaaatccagacttttatgcaaaaatgttctgacttttaaagttggcgattggttgaatttatatctatagtgcatttggcatgtgcgtctttggttaatgagctgacttcaggactcacgctggcagtaaaacaatcaacatgttatagttcatccctctctattccttggctcccaaacttttgggataaagatgtgggtttttaatcttaaaaactggaggctcttggaagtagaaagagctgctgatctctccctgctttgcttttgaactgtctgccttgtgcaagttcaacagtcaaactgttttcattccacttaagtggatctttcttctttgcccacagccttctaaaagcccttctcagtcttctcaggcttttactttaatgctaggatagtctaaatcttcaaggtggctatcccttctcccctccgtggaattcctgatagagtctcaataaaagcaaccttagaaacagaggcttttgagctgaacaagaccctactgctgtcttattcatccattttccaaaccagttttccaaggcaggttttggtagttctgcaaatgttagtgtcaaatttcatttaaaaatattttaaactgtaattttaagatgtatgcttggatgtattgggcagcagcttctaaggtgttgaagattactaaggttggtgcaaaaagtaactgtggttttcgccattaaaaatattaaaaataatggcaaaaactggctgggcacagtggctcacacctgtggtcccagctctttggaaggccgaggcaggtggatcacctgaggtcaggagtttgagaccagcctggacaacatggtgaaacccttctctactaaaaatacaaaaatcagccaggcatggtggtgagtgcctgtaatctcagttactcaggaggctgagtcaggagaatcacttgaacccgggaggcggaggttgcagtgagctgagattgtgccactgcactccagcctgggtgacagagcaagactccatctcataataataataataatggcaaaagcctcggtggctcacgcctgtaatcccagcactttgggaggctgaggcgggtggatcacttgaggccaggtgttcaagagcagcctggtcaacatggtgaaactctgtctctactcaaaaatacaaaaattagcctggtgtggtgacgtacacctgtaattccagctacntgggaggctgaggcagganaatggcttgaacccgggaggcggaggttgcagtgagccgagatcgcaccactgcactccagcatgagtgacagagactctgtctcc

SEQ ID NO: 238625 - DNA, 506 bp, Homo sapiens
gaaggctgcaccgcgtacgatcgagggggcactaactctcctttctgaaagcgctgtcaccccgtggtttctcctgcggttcgaccggcgaccctctccgccctccctgctccatctgagggtcaccgcctattcgtgacctttcggctgattactagagtgtcacaaaaaggcaccttctcccccttcccgaaagctccatttctataactcaaccagccgtcggggacccggggccaggcggggtcagacgggacgggcggacactgcccgtcaccccggggctccggccctcccgccagccgaggctcagtgggcagggggctgggctcccccgaccccgggccagggcggatcgcgggcagaggtggctccgcccggggctccggtttcaatttcgcaacgtgacggtgcaaacctgaggcctacaaacgccagcggcgacggtccgcgccccgcccgtccgccaggcccgggctccccagctccccgtacgccgcggccgc

SEQ ID NO: 238626 - DNA, 299 bp, Homo sapiens
tgatgtatgtaaaatgagtataaatatagaacttgaagtcaaagcttaaggaaataaaattgtttaactaaaagaaaagttagaaattcttccagtgcttttccttttcttttccccaagttttcacactcatttatttagaagaaacaatagagggtgaatgtgactgagagttgcatggtgtcagtacatctgagcaactccaagtttggtttggtggacaaagagaaagggaagaacaaatccgtattaaacacttctgtatgccaggtattatgttaggtgttgtacattgattt

SEQ ID NO: 238627 - DNA, 481 bp, Homo sapiens
tctgggctgggtctgtcagtggctgtgctgtggcccctctgctgggcaccttctcagaagatcactcatccctggcatcttcctgggccttctgcagcttctctgcacgtgaaacgaagtcctctggcttcacgcaggtacatttaccttgaggaacttctcgatttcaaagtgttctgctctgggaaggaggagggcacaagcccccatggccccatcctgggagccccacagactgggatcccagtggtcacaaaggatcctgccagggacggaggcaccaaatctagtctggagaacaccgggccatcctcactgccagccctcagagcctcctacgtgcgtctgtaatgcaaggcaaccctgcatgacactgtctgcaatgattctgtccctttctgtatattcttagagacaagatgcatattagttacagtttactgatatggtaaaaggtaataccctccctccgctcaccaaa

SEQ ID NO: 238628 - DNA, 374 bp, Homo sapiens
taactcccaatcaccttgactgaccttgatgtcctcaaaatttcctcaggtatattctgattataaaataacacactttcaaagatggctgaataggaacagctacagtctacagctcccagcgtgagcaatgcagaagatgggtgatttctgcatttccaactgaggttcatctcactgggacttgttggacagtgggtgcagcccatgcgagcatgagctgaagcagggcagggtatcgcctcactcaggaagcacaaggggtcggggaactccctgtcctagccaagggaagccgtgacacatggtacctggaaaatcgggacactcccaccctaatactgcacttttccaacagtcttagcaaacggcac

SEQ ID NO: 238629 - DNA, 479 bp, Homo sapiens
gtgatcctcctgcctcagcttcctaagtagctgggactacacgcatgtgccaccatgcctgtagagacagggtcatgctatgttgcccaggctggcctcaaactcctgggcttccacctcagcctcccaaagtgctgggattgtaggtgtaagccaccgcacccagctcattcttatcatttttaaatacaagtcagagaacatttggccaatctaccaattgcaccgtagaatttgaaggaaaattaacagtgtggttgttctcatatttgcaaaaaagataaatgctatcataagtattatatgccttaaaatacaatgcaaatagactccgatatttgtagataaaatattaccaatgtatgtcttggatttgcttcaaagtaataaagggaagggaggggatgggtttacagatgaaacaagattggccatattgaagaaagttatgcaaacttggaaataaaaggatgactgca

SEQ ID NO: 238630 - DNA, 363 bp, Homo sapiens
ctgagacacggcattcagtactttaacaacaacactcaacattcctccctcttcacgcttaatgaagtaattgtgcaaacgaattgttccaaagagaattttctggtcttaacttcagactgcaagtccctttggaatggtgataccggtgaatgtacagataatgcatacatcgatattcagctacgaattgcttccttctcacagaactgtgacatttatccagggaaggattttgtacaaccacctaccaagatttgcgtgggctgccccagagatatacccaccaacagcccagagctggaggagacactgactcacaccatcacaaagcttaatgcagagaataacgcaactttctat

SEQ ID NO: 238631 - DNA, 422 bp, Homo sapiens
agatacaggggaatggacagattgaccttgcagaggagtaagcacgaggacagaggccatgcagagaggcagtcacctccctggagataatgttgagaactccatgcagccacccaccccaaccccagaccctttctcattctctttctccagtccaaggggggcatttgaactgacccaacttgagtcacgaactcatccctggaccagtctgcagtatgactggaggaagtggtcaagatatctcaatacactgacatggcccctggtacccatccctacacatcccccccttcccatgaaagagggggactcaagctgttcagctaccccctccccatatggtatctaatataactcttaaatctttccctccagcacatgttggagtatgaatcagaaatttccagttgttcccaata

SEQ ID NO: 238632 - DNA, 487 bp, Homo sapiens
ctggtagtgtaagctgtggattataatataaattttatttttcatttttggtagtcaataaaagcaaatgctataaatttcaacaggtgcaagaaagaatatggcaaaatgtaaggcttttttctatccctatcccttagctgcttagtttttctcctcagaggcaatctgtgatactagtttcttatgtattcttccagatatattctgtgtatgtataagcatatacatatatagataatggtattaaaaaaatagaagtagtaacatgctgtacacattgttttgtgtatacagcagttaattctgttaattgttaatttctttttaaatttagtagcttggagatcattccatatcaataccatatcaatttcatatgaatagaactgcctcgtgttttaagttttaaaaatagtattccattctatgtatataccatgatttatgaacattaaagatttaaggagcatcattataacatata

SEQ ID NO: 238633 - DNA, 622 bp, Homo sapiens
tatgttccttacatatatatatatatttttttgtagttacagaagcatgtaattttgctttgccattaaagcctgcctgaggtgtttactgtttagagctacaggatagctttgtctttgagaactgggttacatattgtgtgccaggcattgtgctgaggttttggaattagaaaaattgattaaaacctgttccctactcctaagaaataaaagaaaatatttggatggcacttgttatgtttgtatcaggctttcttctaagtgcttcacatacattaactcatttaatcttcacaatattgccgtgaagtagatttattattatctatttattactattattccctttatatgtataagtctaatggggcacagagaagttaaaacacttgcccgaggtcacacagataagaaatgatggagccagaattcaaaactcggcagtcttaggctggtgtctttgctttcaaccacaatataatactgcctctcaggaagacacagactgaaatcaaatatatgtagggcagtgagacaggttccacaataggttgggggtgacaaatgggacgcaggtcagttctacctcgtgagatgaggggatgatttaaaacttgat

SEQ ID NO: 238634 - DNA, 423 bp, Homo sapiens
cacatgttggcaagttcaccccaaccaccaaatgtctgagttgacagtattttcagcaaaacacagaaaatcaagtaacacatacagtggttccccttatccaagaaaatctggttcaaaaagagatgtgtaccagaaggtaatctgggagaggccacattcaaataactttcattacagtgtattgttataattgtctactcacctgatttcgggagtttgagaccagccagaccaacgtggagaaaccccgtctccactaaaaatacaaaaattagtctggaatggtgtcgcatgcctgtaaccctagctactcaggaggctgaggcaagagaatcccttgaacccgggaggtggaggttgcagtgagctgaggtcacacgactgcactccagcctgggcaacagagcaagactccgtctg

SEQ ID NO: 238635 - DNA, 500 bp, Homo sapiens
agagtgtttgctgataattattgacagtttgctaattacagcattatttggcctgttaaaggtatatgtacttctcccagttaaagaaaaagtacacaagagggctttttctctctctctctcttttttttttttttttttttttttttttaccagaaaagatactcctgtatccagataagaacccagattcccacaacagaacatttagaaaaggggtgggggagtgtagcgtatctctggtcagcaatgtctacaacatagacaataactcaacactgtacactactcagaagctaaactttccctgaacattacacagaacagtcccataaaaggtacaatttctactgcagtggtattgttttggcttgtctgagtctacaagttgtattggttctagattgggctgatctaagacattccacttcgtgtatacttatgtaatgttacacaagtgaaagaaatacatttttaaaactttttctgattaaaatacc

SEQ ID NO: 238636 - DNA, 430 bp, Homo sapiens
ctacaccaaacaccccctgtggcctctgtgttctgccccacatcagttgatgctggggacattgaatgatctagcacagagccagggtgggggcaaagtctgacacaataactctaaaatgggagctaagtcaatcaactggtctgggagggttagggaaggtacccttgagctgagatctgaagggtggatggaagttaactaggccaacaggggggtggaaaaagcattccaggcagaaggaacaacaagtgcaaaggccaagaggccgaaagaagcaactaaaacaaggccaagagggctgggtgaagtggctcccagcactttgggaggccaaagtgggcagactgcttgagtctaggagttcgagaccagcctgggcaacatagtgagaccccatttctacaaaaaatacaaaaattagctaggc

SEQ ID NO: 238637 - DNA, 414 bp, Homo sapiens
tctgtagagattgggtttcaccatgttgcctaggctggtcttgaactcctgaactcaggagatcctcctgtcttggtctcccaaagtgctgggattacaagtatcaggcaccgtgtccggatgtccttctcacttttttattttttcaactacttgtgatcatgctatatattagacttgtacagaagagaagttggactgtgatttattcttatttttaatttttgaaaagcatttgaagtaaattgaatcttacattatgtggagaagttgacctcgtgtaaaatgtattaatatttcagctgatttctggtatggttcagggtacctagaaaatatcttgtgccataaaaaatgctgaatacagactattatatgtctttatttattttctggattaggtggtttgggaaa

SEQ ID NO: 238638 - DNA, 550 bp, Homo sapiens
agtgccttcctcagtgtgtccccgctacttatttgtgggttgtcttcccatatgtttcttcctcagacactaaactgaaaccagtgtcttattcatccttgtttcccttgtgggatcaggtactccaccaacctgcttaagaaacatggaaaagattcactgcaggttcatttgtatcaaggatttgctcagatatccttctatgcgcaagccactctttcattcatttttcatcctcttggctcctgactcgctctctgaattccagaatcttattctaatgaaatatgggacacaagtctctggctctgactttgacaccgtctcacccttcccagcgcaagccactcccttgacatccctattagtagggacagctctcctggctctgccaatcactgccctaattctccatttcctggaattaaacctggcacaacaaatgttaaatgaatcctgattaaatacataggccaatgcaaaatagtatacaaatgacttattttactaggtggtagggaggtcgtctctggtttcctactcttaatga

SEQ ID NO: 238639 - DNA, 397 bp, Homo sapiens
ttgaagggaacaatttggtcccatgtccagttcctgtgggagtaagggaataaggtggtgagtgtggaggaccatcccaccactcccctgacctctgtcagcaggcagggccatgtgcccagcaggtaggggtccccacggcagctgctcacgcatgtgtcccagggtcacttggagcacctcataggagatgctgagcagaagctgcggagcttcaccctggcaccctcgcatccccctcacctaccagttctggctaatcattctccagtttcaatggcttcgcctccaggagttgccactcttcggatgctacctaggctcctggaatcactgtggctgcctgggcagaaggccagggaactgggactttacatcgcccttcccagggcagcca

SEQ ID NO: 238640 - DNA, 289 bp, Homo sapiens
aattctaaagaagaatgcagctcctttagaatgaaaagcagtatagcatcatagagtgtgaactttaacattaggcagatgggggtgaaaagttgcctttagcattatctttctgtttaactctgggcaagttactcaactgctttgagcttgaaatttctgtctgtaagatagagatgttaatagcatcttcaaagggatttgtgagatttatacaggttagtgtgtataaattacccatgtacttggcacctagcaagtgttcaataaatgatagctattatcatta

SEQ ID NO: 238641 - DNA, 429 bp, Homo sapiens
tataaattactatcatccgtaatgtgattttttttactatttcttcaagccatatttatattcatacagtatttcttatttttttcaaaatcttcaatgatggtctattaatttaaaaaacagaaattcactgttgtataatgacagtttgttgttaaacttgttcaaatttctcttcaatcaattaataccttaatctgtaacagtcaaaaaatagtctctgtagaaattagttttgagactatttgactgtgaactcagtcactgtcttgcaaacattttcctttcattgtcctaattgccttatatttcattgaaatttcactttggttgtatatttcatatgcagttttcttccaaactagaaaatccatgttctgatacctacagaaatattttttaattttaaaagtaaagtagttaaactta

SEQ ID NO: 238642 - DNA, 433 bp, Homo sapiens
cgagacaggaatggtgaaactctgttagtctacaatgtgcaaggtggcagaagtgcatgccaaaagtggacataggcaggccaggtgcggtggctcacgcctgtactcctagcactttgggaggctgaggcgggggggatcacgaggtaaggagatagagaccattcggctaacacagtgaaaccccatctctactaaaaatacaaaaagttagctgggcttggtggcgggcgcctatagtcctagctgcttgggaggctgaggtaggagaatggcgtgaactcgggaggcagaggttgcagtgagctaagatcgtgccactgaactccagcctgggtgacagagtgagactccgtctcaaaaataaacaaacaaaaaagtggacataggcattctagtcagaaagtttgtctagtagtccaaaaaaaaaaaa

SEQ ID NO: 238643 - DNA, 975 bp, Homo sapiens
gtagatcagcagtccccaacctttttggcaccagagactgatttcatggaaggcaatttttccacggacctgggggcagggagaagggatgcagggagggggtggtttcaggatgattcaagtgcattacatttactgtgcactttattatttcattgtaatatataatgaaataattatacaactcaccataatgtagaatcagtgggagccccaagcttgttttcttgcaactagacgtcccatctggaagtgacgggagacagtgacagatcatcaggcattagattctcataaggagcacacgacctagatcctcgcatgcacagtccacaacagggttcacgctcctctaagaatccaatgctgctgctgacctgacagaggtgacctgacagaggtggagctcaggcagtaatgcaagcagtgtgagcagctgtaaatacagatgaagcttcactctcacctgcagctcacctcctgctgttcagcgtgggtgtgggtggctggggacccctgtggtatattatacacccacagcaactttaggagagataatttttcccaatataactgcagattataaaattaagtcaacaggtatttttcttacccttctatggttattactattccaactaaatgtatgaatggcctaatctaattgtttttacatcttggtttaatttctcagtaacaagtaattatcaccaaaatctcattccttttttgaaatcaaaacaaaagcccaagttcctagaaattattatacagggataaatgaggcactgaaggtgggagaaccatgaaattacagttgatccttgaacaacatgggtttgaatggtgtgggtccacttatatacaggcctttttctgtaagtatattggaaaatttttttgagatttgtggcaatttgaaaaaacaaaccatgtagcctagaaatatagaaaaattaaaaagttatatagata

SEQ ID NO: 238644 - DNA, 400 bp, Homo sapiens
cttctctttaggtcatattctacatccagtcttcaagaattgtctatgtagtttcaggtcttgtttgcaaacccttctatcctttcagtctgtgctgctgctcactgattgttctctttcttacctcttccttggattatcacaattttctcctaagtcacctactttcagctgcttctggccaataggctctccatactgcttcaagagtgctggatgaaacatagcatatgatcatgtttgtggcatcacaggtggtttatgttcttagagctgtcgatcaagaaaaataatgagacaagtctcaatcattttaggaagaggtttatttgccaaagttaaggacggatcctgggagatgggtctgtgcctttctctgaagatgattttgagggctcca

SEQ ID NO: 238645 - DNA, 456 bp, Homo sapiens
aacaacttttagaaagtagaacaaaaatttaggactaacactacctgatttgtaacacttttataaacctgtagtaatcaaaacactgtggtattagtgtaaagataaacacatagatcaatggaacagaatagaaagtctagaaataaactgacatatatgtgaacaactgattttgataaagataaaaaggcatctttttcagtagagaaaagatggtcttttagaaaaatgttggctgaaacaattggatatacaaaaccaaaaaaagaatctcaattcatacctcactatgtataatatataaatatgaatttaaaatgaggccaggcacgttggctcatgccagtaatcccagcattttgggaggccgaggcaggaggatcacttgagcccaggagtttgagaccagcctaggcaacatagaaagaccctgtctctgccaaaaaaaaaaaa

SEQ ID NO: 238646 - DNA, 150 bp, Homo sapiens
cgcagcccagcagctcagctgtgtctgtgggggaaccggggcctgcaccggttcagagtgccctgtcctgatcacttccctcgtgcgatagctccatcatccaggtgtgcttactggcaggaaccgagggaataaataaagatcactgga

SEQ ID NO: 238647 - DNA, 768 bp, Homo sapiens
tggaacaaatagaggagaatctacccaatttgattttaaaaggagaaaatctgtagctaacatcatacagtcatgtgtcacattatgacagagacacattctgagaaatgcatcattaagcaattttgttgtttatgaatatcatagagtgtacttatgcaaacctagatggtctagcctactacacaccaagactgtaagttatagcctattgcttctaggctacaaacttgttttgaatattactgtactgaatattgtaggcaattgtgacataatggtaagtgttagtgtatctaaacatgcctaaatacagaaaaggtacagtaagaatgtggcattctaatcttatggaaccattattattaatgcagtctgtcatttaccaaaatgtggttatgcaatctatggctttacttaatagtaaaaaattagaagctttgccactcacatcaggaacaagataaggatttcctctctctccactgcttttcaatgtactggaagtcctaggtaatacaagaagtctgtttatagataacatgattgtctagatagaaaatccaaactaattgctcctcatggaattaataagcaattatagaaaggttgcaggatacaagtttaatatacaaaagtcagttgctttcctatacatcatcaatgaacaaggaatttgaaaacaaaacacattattatttacatgatcacctcacaaaatgaagtgtttaaaatctaacaaaatatattcaagactcatatgagaaa

SEQ ID NO: 238648 - DNA, 468 bp, Homo sapiens
ggttccagatcacggcccagggacccctggcgttcagtttgcagacattctcttgccaggcagccagctttgcttcctgtctgacttttgctcgcctttgcttccacctcgtgctcccattttctctcctttctgcattgctaatgatattgtttgttctcggtgccacataaaaaaagcacaagataatcacccaggcattagtcatcattaagctggtgataaaaacaaaaaaattctaaagtgctgtttccaggatgggtgtcgtgcctgcgatgaatggtgtttattacaaatgtgagtttcggggagccatcccagccagccgcacgggagacggaggatgcgtggccacagatggacccgatccgttaggtgtaaaaggtaaatacggcgagaagtttccatcaccacctggaactgccccaatcttcgttgaatttgtcattaaagcatcgtgctcatctg

SEQ ID NO: 238649 - DNA, 866 bp, Homo sapiens
ctttttcccaacattttccccttctcttttttgtaaaaccgccacagctatcattattactagcataaaaggtggcctctttttgtttttaaattaattgagcaaggcaattgcaggctgtgcagcctttgattgccagttggtgatccaacttcattgttcttagcccttattcaaaatggagtcgctctggtttgaatgcttcccacgtatctcccctttcccttttacaagaggacccttaatcctaggggtttcaggatgaaggtccatgctgaatgggggcaatgatactcctgcctaactattagggtctcttgtattcagggtagagaggcactcagtcagaaagcattggtccgttaagcatctgtaggtaaaaccctggcgctccagcagtttctcagcttcctgtgcggttttcttgatctgtccccatgttatggggattgcacccacacggttcgttcatctccatgaggtagaactttccactgataatgagaaacaggccccttctaatagaaggcacagagaaagcaaatggaggcttctcaaaccttcaatttgcactgtacaggtgggtccgctagatgctgtggctcatgatagatcttcagatgtttggtgggcacccacacaggcacctgattgtcacctggagagacacaagcaaatcttcttccccatataattatctttcctttttcccagctctttgtatgtgcattcctccaccatgtatcttgtccagcctttttattttccttttgtcctgttaggtgttgtttcactgcagttatgggttgatctttttgtaaatttaaaaattttaatgttaataaagctaaatgcaattaaaaaaa

SEQ ID NO: 238650 - DNA, 421 bp, Homo sapiens
cagggatttttatctgttttatttgctgctacattttggcatcagaatcacacctgatatacagtacgtaataaatatttgttaaaggaataagtaaatgaacactatgctgaaagtaaaattaggggaaatatttacttggtctgttctagatttctaaaaggcttgccaaataatgtcatgccacattaactatatggctgtaataattattgctggtgatgatcttaatatatatgtgcccttttattttaggaagtactttgatgtatgtcaggcttaaaacccagatgacgggttgatgggtgcagcaaaccaccatggcacatgtatacttatgtaacaaacctgcatgttctgcacatgtatcccagaacttaaagtaaacggaataaaaaagaaagtaatttgtttcctgcat

SEQ ID NO: 238651 - DNA, 655 bp, Homo sapiens
aacagacaagagacggtaatagaggctgcccctaggaaaggacccagggaaaagggtatgtaaatagggagactgccttttcagtatgtacccatttgtactctgagtatatctacgggataaattcctagaacaaaactgccatgtttaagggaatatacgttataaatgtcatcagatattgtcaaaatgccccccaaagaaattgtatcaatttctattaacaacgtaggagtatacttgttttcccatacactaactttggatattacccattgtattgacttttgccaatcttatagataaagtataacatctccttgctctgatttagttaaaaaaaataaataacttggggagcttttgttctattttgtataatggaagctatctcaattcatcaaataaatacaaaacaattccaacacacatatttattatctcacaggtctcatgggtcaaagtatagcttatactgaccctaggctcagggtctgatttactttctttcttcttctttttttctttccgagatggagtctggttctgtcacccaggctggagtgcaggggcttgatctcagctcattgcaacctacacctccctggttcaagcaattttcatgcctcagctgcctgagtagctgcgattacag

SEQ ID NO: 238652 - DNA, 601 bp, Homo sapiens
aacagacaagagacggtaatagaggctgcccctaggaaaggacccagggaaaagggtatgtaaatagggagactgccttttcagtatgtacccatttgtactctgagtatatctacgggataaattcctagaacaaaactgccatgtttaagggaatatacgttataaatgtcatcagatattgtcaaaatgccccatacactaactttggatattacccattgtattgacttttgccaatcttatagataaagtataacatctccttgctctgatttagttaaaaaaaataaataacttggggagcttttgttctattttgtataatggaagctatctcaattcatcaaataaatacaaaacaattccaacacacatatttattatctcacaggtctcatgggtcaaagtatagcttatactgaccctaggctcagggtctgatttactttctttcttcttctttttttctttccgagatggagtctggttctgtcacccaggctggagtgcaggggcttgatctcagctcattgcaacctacacctccctggttcaagcaattttcatgcctcagctgcctgagtagctgcgattacag

SEQ ID NO: 238653 - DNA, 506 bp, Homo sapiens
cataagagattaacaaaaataactagtagtaaaatagaatatttataacagtatgccaacatcactactcttgggctttggggtcattattaagtaaaataagaattactcaaacacaagcatcttgatactgctgcagtcaatccgataactaagatggctgttcagtgactaatgagagggtagcctgtacagcgaggataagctggttgatgggatgattcacaagtcaagtggaatggagagggacagtgtaagatttcatcatgctcctcagaatggcacacaatttaagacttatgaattgtttattactgaaactttccatttaaaattttcagaatgtggttgaccatgactaactggagccattgaaaatgaaactgggcaaggtgcagtggctcacacctgtaatcccagcacttcgggaggccaaacgggaggattacctgaggccacaagtttgagaccagcctggacaacatagaccctgtctctatttaaaa

SEQ ID NO: 238654 - DNA, 326 bp, Homo sapiens
ggaccaagggaagcccaggccgcggaggtgaccactagggggcggcgcggagccggggcccgaggcctgtcgccgaggctgagtttggccccctgccccaaattggttcccatctttcagacagacattggtgtgaggaactgtagggtttatgatagagagggaaacggcgactctcattatctgaccctaataatgacctgaaagattactagtgaactcggtaatctgaatgagagcagtacgggccccgcctctgcttttttgctcttttttttttttttcaaaactgagtctagcctgggcaacagaaaaagaccctgtct

SEQ ID NO: 238655 - DNA, 1375 bp, Homo sapiens
  misc_feature (56)..(57): n is a, c, g, or t
  misc_feature (602)..(602): n is a, c, g, or t
  misc_feature (1014)..(1014): n is a, c, g, or t
  misc_feature (1054)..(1054): n is a, c, g, or t
tttcatcgtttctgcttaccctacttttctttcccatcctgatccctctcccaccnnactggactctgaaacgggcatgtacagagaagaggagaccccaacacgcttcaagctttgagtggagaggacacagcctctgctgggacagggaacagagggatgcggagaccctgaagatgcttttggacagtggtctgaggttgggacagtggcaggagataccattcacccaggatctccaggacaagagatcagcctggcagttacatgtgttttttttcaaactggttgccaggttggcatgagcgatgacatcagagattccgaccttcctgattggagggaccggactctgtcggcacctgggagttcagttggacaacagtaacttctcagagctgttctccactcctgacttctcccagcctcgagaattgataacacactcttctggatcccagcagtgtccagaagaagaccaaggacagaacagagactaggtttggtgagatgggacagattttgggaaagatcatgatgagccatcaaccgcagccccaggaagagcggagcccccagcagagcacctcagggtacccccnccaggaggtggtggatgatgaagtgtcgggaccatcaggtgaggggactggaggaagaagaggtggcataggattgactaagatgaaggaagggggccaggcgtggtggctcacccctgtaaccccaacactttgggaggctgaggcgggcagatcacctgaggtcaggagttcaagaccagcctggccaacatggtgaaaccccatctctactaaaagtacaaaaattagccaggcggtagtggtgtgtgcctataatcccagctacttgggaggctaagacaggagaatcacttgagcctgggaggaagaggttgcagtgagccgagatcgtgctactgcactccagtctgggtgacagagtgagatgctatctcaaaaaaaaaaaaaaaaaaaaaaaaaaaaaaaaaangaagaaaaaaaagaagggtcagaggtcaggaaggagaacntggggagggtgtgtgggaagaatggagaaattcaggctgggtgcagtggctcacacttgtaatcccagcactttgggaagccaaggcaggcggatcacttgaggccaggagtttgagaccagcctggccaacatggtgaaaccctgtctctattaaaagtacaaaatggagctgggcattatggcaggcacctgtaatcccagctacctgagaggctgaggcaggagaataactggaatccgggagatgcatgttgcagtgagctgagattgcaccactacactccagcctgggtgacaaagcaagattctgtctcgaaac

SEQ ID NO: 238656 - DNA, 510 bp, Homo sapiens
cccccaaaattttagataaaagagttgagggaagattatttaaaaaaaaaatggacagatttttggatcatctcagttttatggatagcatattaaagtcacaggatatggtcatttaataccctgtaccagagacaacattggcttaattcatttcgtggttttctcaactggtacagaagatgctgctccatcaacttgttcttaggccctaactcctgtcttggtttgtcctggacttctgctcacattctccctcttctccagttttggtttcactagtgatatccattgcctcgtttctgatcaggtcaatctcctggaattgctttagccaggccagctcttagttgacctctgaagcagctctcctccaccccctatcgacataagtctgcatgtgcacagctgagtccaggaaacttaatcctattcatacattgaatagtaaattattgaatgtctataaagtgccaagtactgttctaggtacttgtgatatatcagtga

SEQ ID NO: 238657 - DNA, 438 bp, Homo sapiens
ggtgggggggtgatgaaggggaaggacatgaagggatcggtagtggtgagaagaccaacttcccaaatattagtaagtttccatttcttaagcatgtaagtgcccaaactgtgctaacggctttacgtagaattcctccacctaagcctcacgacacccctacaaaattgataaagatatgaatccatttcacaggaagtacgtttagaaactcgcccaaggtcaaacgacctgcaagcaacaaaacccctcagaggtggctggaacagcgggactacagagctcgtgaactcggccgaggaggaaccaggcgaagccggcggacgcgagtccaggccggccaccagaaagacgccccgagcccgggggccaggcccagagttgcggaggccgcccagcccgacctgattcaggctccgctcgcgcgcccgcggccgc

SEQ ID NO: 238658 - DNA, 465 bp, Homo sapiens
cacatgtctataatctcagctactcgggaggctgaggcaggagaatcgcttgaacccgggaggcagaggttgtggtgagccgagatcgtggcatcgcactccagcctggatgacaagagtgaaaatctgtctcaaaaaaaatgtaattaacttgctccctaagaattgcttctaaatatacctaggatactttttataagtatggggaaaggcaacattagtgccagggtcttactctacagaaaatgattcctcaaaacaaagcagagataaaaatagaaatatatgaccaaataccattcactgaagatgcgataagtgtatcagagaaaagactggtgttgtttaatgcattatattgttgctctgcttattagaatcatgttggtttcctaatggatgtaatattttgtgattattttgtggccctttcaataaaataagtcatgaatccctttgagacat

SEQ ID NO: 238659 - DNA, 577 bp, Homo sapiens
ggtttcaccatgttggccaggctggtcttgaactcctgacctcaggtgatccaccacctcagcctcccaaagtgctgggattacaggcttgaaccactgtacctggccaaaaaccagttttgatcctgtaagaacgtcggttctcatccttttctgactcagaatgagatgaaagctgtggggccccacctggaaaactgtatagtttgttataatttcagggagtacttaccaccctacccccagcttaaaaattataagttatccagtagcacataccctagatactaaagagtgtgttcaaagctattcattcaggctgcacctaagtcaccaacagagggtccaattcagaaaatgatggcacaactgtgtgatggagtacagttcagactactgtcttactggattttacagaaagtaggttattaggctaacagggtctcactcttgcccaggctggagtgcagtggcttcactgctcactgcaacctcgacctccccaggctcaggtgatcctcctacctcagcctttggagtagctaggactacaagtgcaagcaacaacacctggctt

SEQ ID NO: 238660 - DNA, 541 bp, Homo sapiens
tgcctcatttattgagaggttttaatatgaggtctattgaattttatcaaaagccattaccctgtctattgagataatgatgtgggttttgtctttagttctgtgtatgtgatgaatcacatttatttgtttgcatatgttgaaccaacctggcctcctgggatgaagcctactttatcgtggtggattagcttttttatgtgctgctggatttggtttgcaagtattttgttgagggtttttgcatcaatgtttatcagaatatttgcctgctcctttattattgtgtgtttgtgttaagaacacttaatgtaagatctaccctcttagcgaattttaagtataccatacaatattgctatttataggcaggtcttgctttctgaaagtcagttattatatctttgatgtcttttttctaattggggtgtttgtaccatttacatctattgtaattgttgatatggttgtattcttatctaccaactggctacttgtttcctcataatcctgtctgttctgttttcctttcttcttttct

SEQ ID NO: 238661 - DNA, 341 bp, Homo sapiens
gcagggctgggtgaagggtgatcttgcctggacagtgcagaactcaggggcctcctcttgactttgacttccactgatgaacatggtcagtgtggttcactggcatatccctggggtctagccaagctcttgctgcatccttgccaaataaacaaaagatgcttctgaggaggcacatgctgttatgagttttcctatcggctctgcttcttctaacacctcacactacccttttggaaatctgtctaagctcttggtcagattccctctgaatttcaccgagcatgttgacacacctctgtacctgtgattgtcttgcctgtaaatagttgtacttgcag

SEQ ID NO: 238662 - DNA, 604 bp, Homo sapiens
ggtgatctgcccgccttgtcctcccaaagtgctgggattacaagtgtgagccactgcacccaaccacaccttttctattaaagggccagatagtccctttgtgggacatgtagtctctgttgcatatactcaactccatctttgttgtgtgaaagcagccacaggggatacataaatgaataagttaggatgtgtttcagcgtttcatctatggatattacaatttgaattttgtataattctcatgaagtggcatgaaatagtcttgttttgactttttgccaaccattttaaaatgtaaaacccattcttagctcttgagccatataaaaacaggtggtggggcagatctggcccacaggctgtagcttgccaactcctgacttactggatttgaggtacagaatgagtgagactgaaaataacattttgagcctgagtcactgagaaagttaaattgtcatttaagaagagagggagcagtttgtagcacccctcccactaccgacccccatcaccatacactagtgggatcagaaccagtgctgaaggtacatgtttgagaagcatcaaatcatctgcatagaactgctggctgacacta

SEQ ID NO: 238663 - DNA, 417 bp, Homo sapiens
tgatttaaaacacgctctaatgcagttataatattaaggcatatatgtgtgtgtatggactcaggtctggccatctgtactcatctgtgaatataagtatagtcagtcatacctgagtccacatgcacaagaaaaaggcaaggaaaggaacagtccagggtgttctttgaaaactgcagtcatttggtaaatgattatggaataaattccaaaccttgagctcatgctaaggccctttgagatcagcaagtgctttccagaaggggcttttcagcagagtgacatccttgcagctttttcccagatttttttttcacttccttcaattccttcatctctcttcctagtgaacttctactggccctatgctattactataactttctgcttttgagccatggccccttgagatcttgg

SEQ ID NO: 238664 - DNA, 440 bp, Homo sapiens
caatatgtaaatttacaaagagaaataaaaagccatattcattagaatacatgcattgatgggttggcatattcttttccaaataggaaaattgtagattcaaagcaaaatacttggccggacccagtggctcacgcctgtaatcccagcactttgggaggccaaggtgggtggattacctgaggtcaggagttcaagaacagcctggccaatgtagtgaaaccccgtatctactaaaaatacaaaaattagccaggcataggtgggtggtatgtgcctatagtcccagctactcaggaggctgaggcaggagaatcactcaaacccgggaggcagaggttgcagtgagccaagatagtgccactgcactccagcctgggcgacagagcgagattctgtctggaagaaataaaaaagcaaaatactctctcaggaaactg

SEQ ID NO: 238665 - DNA, 177 bp, Homo sapiens
atctgaaaacagagatagccatactcagctcctaaaagtactaccccctcactgtaactaaatgattcaatgtatgtaaaatgccttatacataacaagtactagaaacgtttgttctgtgttctcttttccttctctttccttcccattcccatttctgattacagggaatttaca

SEQ ID NO: 238666 - DNA, 604 bp, Homo sapiens
gatactgtatctcaattattagacagtagcaaactgtcaaaatctaaaaagtaacatggaatatgtgagcccaaatggttggaaatgtattattcatttttataattgagaaaaatgtgttaacgctctggaatgtccatgtgtggaaaaataaaacgttatatggaattgcacacacatatgatttataatgcatgcttccaggaccagaaatcctaacgaagaaccttattcaacagaaaaaaacatttttttttcttcagtatgtgcaattctggtatactgtaatgctgaggccaagcatatattttattagtttaaatcctagctaagcaataaaatatgtgtcattttaaataaaagaaaacatgtttttcacaaaaaaaaaaaaaaaaaaactcgagttttttttttttttttttacttgtcaaactgtttatttgccattcacactgattgtaacactggatttacagaagaaactgtggtacaaagagaggaaggctctggtggctcctgaacagcagcagtccagctgccctgctcaggctgggcacgacgaatgctcccaggagaggggaggcggcccacccgactgtgtacc

SEQ ID NO: 238667 - DNA, 220 bp, Homo sapiens
tttaagcaatgaaaagtgtatgtgtatatacctatatattatatagcttatataatatatatttcatattatatattagatattatatatatgcatacataagatatatatacacacatctatacagatatttatttatttattttaaaatatgtaattttgtaatatgtattccttgtcaaattaaagcagccattattgtttgcaatcattttatctc

SEQ ID NO: 238668 - DNA, 1855 bp, Homo sapiens
atagtataattatagctcccaattgagaggaaagagtatttctcttactgtttgcatataaaatcctaggagataactccagttggtctaacttagccaattcttccaaataggccttaagctgcaagaaagccggacatttcctcaactaagaaactgcagcaacacggtgggacaaaaaatggataataacctcctagaaaggatcactgtggagatcagcataactgagacttctggagacagctgcaaacaaggaagggcaagagctatttattggccatgcagtggttgccagcacatccccaaagactggctctgtggaggactctggtgatcttcatgcctgaggcctccacagccctgtggcagccttgaactccttagttccctcctagtatttagtggaggcatatggaccccagtagcttgtgccatgaaagataccagcagctttcaccactgaggtagccaacagccaatgccaccttgtgtccttgggtgagggagatattgctgcactccctgactcccaagaaagagctgctcttgtaccaccctgggacaaggcaaccactcttgccaaccttgggcttaccctaaccgcaagtggtggttgctctagaccctggctcctatgcagcctccccatctccagcctcagacaccagagccaatccacagcaggcgcctccacaccccttgctgcaactctgcttctgcccaggctctagacactaaattcacggctgcccaacaagctcccatgcctcatacaccattaccaaagaggcagtgggaggccctgcaccatgaaaacaagggcctctgctgtctcagacccaggaggcctgaaactccgtgacaacctggttctagacatgggcttcctggccactccctgggcaccatgcatcaggcagtgtccctatcatataagcacacctgtgagctatacctggcaccaagagggattccttcttctaagacttcctctattggagaaaaacagatcaggacgacctcagcagtcttcaccacctaagaccccaacagctgtcctcaatgctgtggacataacagcattggccactgggaccctgcaatcttcagcatcactgccctcagctgatgtagctgcacctagactatgtagactatgcccaaatcagaacgggaaccacatcatcccacccagtgcacaaatagtcttaacacatttaagaaagttgaaatcatctagtatcttttccaaccacaatggtatgaaactagaaatcagcaggaggaaaactagaaagttcacaaatatagtcatgtgtagtataataacatttccatcagggactaactgcatatactactgtggtcccattagatagtaatctagctcaaaaagtcctgtttcctagtggcatggcagcagcctaatgactcagcacaacacattaccttttctttgtttagatacacaaatacttaccattgtgttacaattgcccatagtattcagtacagtaacaggttgtacaggtttgtagcctgggagcaataggctataccatatagcctgtttgtgtagtaggctttatcttctagggttgtgtaagtactctctattttgttagcacaaatgacaaagtcacctaacaatgcatttcgcaggatgtatccctgtcgttaagtgatgcagactgtttgtggaaatcaaacatcatacttctgaacatccaataggtcaaagaagaaatcaaaagagaaaatagaaaataagagaaatgaaaacaaaacacaacttaccaaaacttacgtgatgcagcaaaagcagtactaagaaggaaacacatagtgatat

SEQ ID NO: 238669 - DNA, 497 bp, Homo sapiens
actgagtctcgctctgtcgcccaggctggagtgcagtggcacgatctcggctcactgcaagctccgcctcccgggttcacagcattctcctgcctcatcctccctagtagctgggacaggtgcccgccaccacacccggctaatttgttttgtatttttagtagagacagggtttcaccatgttaggcaggatggtctcgaactcctgaccttgtgatccgcccgcctcggcctcccaaagtgctgggattacaggcttgagccaccgcgtccggcaggggccagagaattgtttattgtgagaggctgtcctgtgccttgtaggatgtctggaaacatccttggcctctacccaccaggtaccagtagcacccccacccaccaccaagttgtggtgatggaaaacgtctgcagatattgccagatgttccctggggagcaaaaccaaccccagttgaggaccactggcacaccccaaatcccttctgctatgttcc

SEQ ID NO: 238670 - DNA, 2035 bp, Homo sapiens
cattccaaatggtcaacattggctcaacactgagtgagaagaaaaggcagaagaaaaccaaagggcagaactgatagcttcaggtcagtctgagtgcagaatgaaagactcagctgtttttattatttccagcttgttgaccttgctatacattcacagaagtttgaacttttctagataatcagcaaaacaaagcaagatgagaagagagtttgaagggtttgtttaggctcctctttgtagacttagagcagcagtttcaaaattcagttccagcagcatcaggtcacctgggaacgtgttagaaatgcagattcttgtgccccattcaggcctactgaaccagaaactggagagtggggcccaggaatctgtgggctaatttttttttaatgttgtagttatatatataaaacatagcattttctattttaactgtagaattcagtgacattcacagtgttttacaaccataaccactatctgtttccaaaactttttcatcaccccaaacagaacctttgtaattattaagcaataattcctcactccctccaatccccagccccagataacctctaatctccttctgtctctatgaatttgtctattctagatgttatgtacaagtggaattatgtggcctttttagtctggtttattttgcctagcagaatgttttcaaggttcctacatgttttagtatatagcaatacttcgatactttttatggctgaataatattccattgtatggctataccatgttttgtttatccattcatctgttgatggatgcttgtgttgtttccaccctttggctattgggaataatgctgaaatgaacactggcatacaaatatcagcagtctgtcttttaacaagctctccaggtgactctgatgtacactgaagtttgagaagccctgaagtttccagagaccaagtgctgtttttaaacaggaactcagaacgctaggtggaggctgtgtgccctactgcagctttctgcatcccagccaggggtcaaggctgtagccacttacatcttatttctgctgccaagatcaacatttagagtttctcgaaggtcctaagactagacccaggagaaaaatgcctttctggattaagggttctctttgaccttgtttcaaggtgatgtttcaaaatatttcaaagggatggcagaaaaacatttattaaaaatacatagccattcagttgtttttgactagactgtctggactcagatgttttatgttactccatgattaccttgatattagatataagaatgactcattctacttttatgtagagaaatcaggtctgttttctgagaattatagaagtagtaagtgagaggaaaaggagaaagaaaaaattgtttgttataagttcacagatacttggcttatgtttgattatgattgtataagaatttccaggttcaaagaccttcttaactaattccttcatgttcagaaaggttaaataattttattgcagttttacagctaggaaatgacaaagtcaggattagaatccaggtctaagtccaaagttgctgaataaatcaatttatactggcttctagaagcttaaaacagtatgcctttcagagatatttgggtttttaacaggggactcctggatatatcatattttaacctgaagaaatctgccttcaaaggtagaatatacctaaggcagaggaaggggaggccttttcaacaatcacaaaatgatccatgtaatctgcaagctcagctctagcaatctctgaggtgcaggttcagaagtatgttgtgtttcatcttgtgtcacatgttaagaatgaaatggaagtgtaaggcagagcagcctggcccatgatggtctggatgttatgatgccttaagtacagtaggagtaaggcaggcgcagtggctcacgcctaaaatcccagcactttgggaggctgaggcgggaggatcacttgaggccaagaattagagaccagtctgggcaatatagcgagatcccatctctac

SEQ ID NO: 238671 - DNA, 388 bp, Homo sapiens
ggaggattgcttgagtccaggagatagaggacgcagtgggcagtgatcatgccgctgtactccagcctgggtgacaaactgagaccctgtctcaaaaaaagaagaagaaataactatatgccagtgtaactgccattagagagccaattgatgatgccctaggagaaaccaaggaagactttcaggaggcttgagtctgagaggcattgggatctacttcttaagtataggaaggtactagtggcacgtgtgctgaaggcagatagatgtggtatgggagcttctgatttttatataaggaatcctctaaaatgctttgaagaaattttaaaaagtttagcatatagaaagacttaccatgttcttgcaaaatagatttaaacattgt

SEQ ID NO: 238672 - DNA, 480 bp, Homo sapiens
tgcgcggccgcgacttcggggacctgctcatctactcgggcgcgctgctggtgttcctgagcctgctgggctggatcctctggtacaccggcaacatcgagatctcgcgccaggagctggagcgcgactacggcctgcggccctcggcgctcgcccgcctggcgcgcaagctctcccgccgctggtcggcgcccgccgccgcgggccagcgccccgcgcccggctcccggagagcgcgccgagccgcccgcgcgcccccgccgcccgccgccggctcccgccgcgtgcgcctgcagctcgccacgctcgaggccgggcccggggcggcgggcgcgggcagcgagtgaggcccagacaaccccttggctccagctgtcaggaccagactgagatgtgcagctgcccctacatccgtggccagacggacgctccctgtaccccctccctcctcacttggataaaaagcagatttgccttagt

SEQ ID NO: 238673 - DNA, 388 bp, Homo sapiens
tgcgcggccgcgacttcggggacctgctcatctactcgggcgcgctgctggtgttcctgagcctgctgggctggatcctctggtacaccggcaacatcgagatctcgcgccaggagctggagcgcgactacggcctgcggccctcggcgctcgcccgcctggcgcgcaagctctcccgccgctggtcgccgcgtgcgcctgcagctcgccacgctcgaggccgggcccggggcggcgggcgcgggcagcgagtgaggcccagacaaccccttggctccagctgtcaggaccagactgagatgtgcagctgcccctacatccgtggccagacggacgctccctgtaccccctccctcctcacttggataaaaagcagatttgccttagt

SEQ ID NO: 238674 - DNA, 340 bp, Homo sapiens
tgcgcggccgcgacttcggggacctgctcatctactcgggcgcgctgctggtgttcctgagcctgctgggctggatcctctggtacaccggcaacatcgagatctcgcgccaggagctggagcgcgactacggcctgcggccctcggcgctcgcccgcctggcgcgcaagctctcccgccgctggtccgggcgcgggcagcgagtgaggcccagacaaccccttggctccagctgtcaggaccagactgagatgtgcagctgcccctacatccgtggccagacggacgctccctgtaccccctccctcctcacttggataaaaagcagatttgccttagt

SEQ ID NO: 238675 - DNA, 457 bp, Homo sapiens
tggtaacatatcatgcagcaatgttattctaatacattaaacagcagtatttggaacaaaatatccagtcagtttcagtaactattgtaccgaaatttttttaaatgcaattcagccttacaagtgcaaccaccataaaatcaaagactgtaagttcctaatgatgaaaccgtgtattgtggccatcatcgtacttagcgtagtaccgagtacacagcaaaggctcagtaaatacttgttgatcggttggttggctgcttggttggtgaatttgctgatagatggcattgaggcaagatagatagtgcactactagtaagttaaaagaagagagactctatttgctaagtgtttccacacgtgtcctaagatctgccttaggcagaaaacttttccaaatggtaagtttatttatccagcaaacattatcagtcccctacagtgctagactctcata

SEQ ID NO: 238676 - DNA, 270 bp, Homo sapiens
attgcaccactgcactccagcgacagagggcgacagagggcaacagagagagactgtctcaaaaaaataaatatataaactaaaataaaatattgaagatgatgaggttgttcagtgtggagaaaaaagcattttatcttctttctgtttcctcatgctggaaagaacagtatcttgggacccagtagcaatgagtttggatcccaggtgagccacttttggcagtatgacttcagaaaagctctttaacatctctgagttttcttttct

SEQ ID NO: 238677 - DNA, 567 bp, Homo sapiens
tctaatttgatttcaaaagaatattagtttaggtagatatacatacacgttaaaagttcctgaattccaggcataaactgtagtatttttattgttgagctcttttttttttaaattaaattgggttatgagagaaggtaaagaggtaaactttaggctgtgctattctcagtaacataattaaatgtaggtttttgattcttgatctattaactaataattttgtagttatttgtgcttatgaggtgtttgtgttggaatatagggagcgcgtgattggttaacctgatcatctgccagtaacatcatgtctttttcacagtatttttaactagtgagcttttgctctcgcttatgacacagggtaaaataaatatccatgatatatattttctagaatgattaatgtatgtaattcttctaaacagatcactgtttctaagtgtgaatcaatatttcccaagcttaaaatatttgcatttcttcacagcaaaacagttatgttgttaaaccacttgttttacttttctctcaaccatcatcttattttctttcctcccctcctgt

SEQ ID NO: 238678 - DNA, 621 bp, Homo sapiens
ataaaacagaaacataagtttcatgaaaccacactcacacaaaccaagtgcaatgcattctgatatgttctgttctcttcccttctatcacattctatttatacatagtctccaatttatattatatattttaatttatgttacatatgtttacattatatattttatatattcttctagcatatatataacagttttaaagttttgccaaaggtcaggatccagaaaccttcagtgtgaaaaacaatgccccaagaggaagaggtgacttagctttcatctctcaccatggattaaaagcctctgttcctaaactatcgaaagaacaaaaaaccaaacaccgcatattctcactcataggtgggaattgaacaatgagaacaacacatggacacaggaaggggaacatcacactctggggactgttgtggggtcgggggacggggggagggatagcactgggagatatacctaatgctagatgacgagttagtgggtgcagcgcaccagcatggcacatttatacatatgtaactaacctgcacattgtgcacatgtaccctaaaacttaaagtataataataataattttttttaaaaaactaactttttaaacattaa

SEQ ID NO: 238679 - DNA, 2029 bp, Homo sapiens
  misc_feature (1211)..(1211): n is a, c, g, or t
  misc_feature (1512)..(1512): n is a, c, g, or t
cgcgtccagatcccccatcccacaggcctgcataggcagcagcggtccatctgtttaacagaaatgtgctgagcactcccatacaccaggcgctggtgtgtgggcagagccccagcagggcacagaacagatgaaaatccgcccatctggatcttgacagagccgaaacaaatgggatacgcagtattctggatggtgatgtgtgtagtggacaaagtgaatcagagaagagcagagggagtgctggattgggagatcagtcgtgattttagatagtctggtcagggagggcctcaactgagaaggtgaaatgtgagcaaagacgtgaaggaagccagggaggtagcaggtagctctctagggagagttgcaggcagaggagattgggtcttgactggtgtcctcaggaaggaagcccctgggatggagtgcagggagccagctggaagggaaggagaggggccagggaggccacaggcccggccatatgagcatcatgggtcattacgggggcttgagctggctcagagggaggcagggagcttttggacaattttgagttgaggagtgatgtggtttgaatctgaattatattttataacgggttaaccacagatccaaggactcagtaaaagggtgaaaggcttctcatgcagttagccttgctgccagttcccataaatcagactcctccccactccgtttctgaattttctataggatcctcggcctcagcagatataaacgcttaccattgttgtgttcatgtctctagcccctgcacactgcaggcccctctcagcttcacatacccctctccatgtatgagatctggtgctagcaatcagattcaacccgaaggaacaagtgcatgtgcctgctgctctcaggagaaaaggcagcctgttctgggaggagctccctcactggcccacccacttgtgttgaagcaaaaagcaagaatcaattacttaaaggcaaaggagtgatattgctaaagcatgtgagtaatcattgcttctgattattgaagaggtcagattatgaatgaaaggataaaatgttttaatagtagagcagtgtcctgactataggggcccgttcatggagctggtcatttcttgaaatgagaagaaaccaacctggaagatgtctttttcagtagagtatggaataatcttacctgctctggattgccatgagcaggtganaatgaaggctctgatattgtgtggtggtgtcacaggatggtgggggcggggcagaagtctcctgttggtgttctgatgcctgttcagctttgtcctcaggaaggtttggtcatcttggttctgccatcctcttgccttcctacggcagcagctgttcatggcactgaagatgtcccttcactgtcccaaaactggcactagaagtggctgggcaggggggccagagtcataggaagggtcttggagtcatcagatctgggttccaggcatggtgtgccttttcttggcaggattgatcttnagcaagtcaatgaacctctgcatcagtttccttatgtgtgaagttagagtgcttggctgtgctacctgattcctgagattggtgaaagagggcttggtttaccaaggctctccatcaagtggttgacctctaggaccagggccctctcagaggtgcagcttccatgtcagttggtgttgtaaccatggaaaagtccctttccaatcaaacttttagcacccctttccccccatctctgctccctttgccacaggataccttgtaaagttcctgccccagtatagggatatttttactgtctcaaaaaaataaaaaataaaaaataaatttcatataatcttcagatatattcattcatttacatattgtctgtggttgttttcaccctttaggtcagaagtagccgacaacctttacacagtatttaccactgttatagacatctttaaatatggtttacttttgcctgtttttgtactttatagaaatgaagtaataaagtattgtctgtcttgca

SEQ ID NO: 238680 - DNA, 2313 bp, Homo sapiens
  misc_feature (1211)..(1211): n is a, c, g, or t
  misc_feature (1512)..(1512): n is a, c, g, or t
  misc_feature (2051)..(2051): n is a, c, g, or t
cgcgtccagatcccccatcccacaggcctgcataggcagcagcggtccatctgtttaacagaaatgtgctgagcactcccatacaccaggcgctggtgtgtgggcagagccccagcagggcacagaacagatgaaaatccgcccatctggatcttgacagagccgaaacaaatgggatacgcagtattctggatggtgatgtgtgtagtggacaaagtgaatcagagaagagcagagggagtgctggattgggagatcagtcgtgattttagatagtctggtcagggagggcctcaactgagaaggtgaaatgtgagcaaagacgtgaaggaagccagggaggtagcaggtagctctctagggagagttgcaggcagaggagattgggtcttgactggtgtcctcaggaaggaagcccctgggatggagtgcagggagccagctggaagggaaggagaggggccagggaggccacaggcccggccatatgagcatcatgggtcattacgggggcttgagctggctcagagggaggcagggagcttttggacaattttgagttgaggagtgatgtggtttgaatctgaattatattttataacgggttaaccacagatccaaggactcagtaaaagggtgaaaggcttctcatgcagttagccttgctgccagttcccataaatcagactcctccccactccgtttctgaattttctataggatcctcggcctcagcagatataaacgcttaccattgttgtgttcatgtctctagcccctgcacactgcaggcccctctcagcttcacatacccctctccatgtatgagatctggtgctagcaatcagattcaacccgaaggaacaagtgcatgtgcctgctgctctcaggagaaaaggcagcctgttctgggaggagctccctcactggcccacccacttgtgttgaagcaaaaagcaagaatcaattacttaaaggcaaaggagtgatattgctaaagcatgtgagtaatcattgcttctgattattgaagaggtcagattatgaatgaaaggataaaatgttttaatagtagagcagtgtcctgactataggggcccgttcatggagctggtcatttcttgaaatgagaagaaaccaacctggaagatgtctttttcagtagagtatggaataatcttacctgctctggattgccatgagcaggtganaatgaaggctctgatattgtgtggtggtgtcacaggatggtgggggcggggcagaagtctcctgttggtgttctgatgcctgttcagctttgtcctcaggaaggtttggtcatcttggttctgccatcctcttgccttcctacggcagcagctgttcatggcactgaagatgtcccttcactgtcccaaaactggcactagaagtggctgggcaggggggccagagtcataggaagggtcttggagtcatcagatctgggttccaggcatggtgtgccttttcttggcaggattgatcttnagcaagtcaatgaacctctgcatcagtttccttatgtgtgaagttagagtgcttggctgtgctacctgattcctgagattggtgaaagagggcttggtttaccaaggctctccatcaagtggttgacctctaggaccagggccctctcagaggtgcagcttccatgtcagttggtgttgtaaccatggaaaagtccctttccaatcaaacttttagcacccctttccccccatctctgctccctttgccacaggataccttgtaaagttcctgccccagtatagggatatttttactgtcttttttattttttgagacagggttgcccagggtggagtgcagtggcaggatcacagcttactgcagccttgacctcccaggctcaggtcccatctgagcctcccgagtagctggggctacaggtgtgtgccaccctgccagctaattttttatatttttttgtagagacaaaacttttatttttttttcccatgttgctcatgctggtctcaaactcctgggctcaagcaatccacccncctctgtaatcccagcactttgggaggccaaggcgggcggattatgaggtcaggagattgagaccagcctggccaacatggtgaaaccctgtctctactaaaaaatacaaaaattagctgggcatggtggcacgtgcctgtaatcccagctacttgagaggctgaggcaggagaatctctagatcccgggagttggaggttgcagtgagccaagatggtgccactgcactccagcctgggtgacagagcaagactctgtctc

SEQ ID NO: 238681 - DNA, 1874 bp, Homo sapiens
tgagacggagtcttgctctgtcgcccaggctggagtgcagtggtgcgatctcagctcactgcaagctccgcctcccaggttcacaccattctcctgcctcagcttcccgagtagctgggactacaggcacccaccaccacgcccggctaatttttttgtgtttttattagagatggggttttaccatgttagccaggatggtctcaatctcctgaccttgtgattcgcccaccttggcctcctaaagtgctgggattacaggcgtgagccaccgtgcccggccgggtgtatcatttttaaacagagctgacaacaacagtaccttccttctagttatgctgttgagaatgaatgtcgcatgtacaaagcacttcgcaacatgcctcacatatagtaagtactcaataaatggcacttatgacatttatcaacatcaaatttttgtgaattaccaattttaaaaagcataaggttcaaaatatcatatagagcatgattattttatatgatgtatcctagtatttgaatagtcatctttgggtgacgggttgtagtgaatttcattctttgattcttacctgtattttctaatatttctttaatgaatgtgatttgcttgtgtagtcagcattttaattagtgggatatgggggatcagtgagcaatttgtcgtaggaacaggagtcaaagcaggggagaaagctttagttctgttttctcaatttctaagtcattcatccaccttaaatcaaatttaaatagacttagtttttttctctgttttgctcaatcttggcctgaacaataatgcctataaaaactggaaatttgtcaagtgatttatacttacgttttttctctgagacagggtctcactctgttgcccatgctggagtgcagtgatatgatcatagttcactgtagccttggattcctgggctcaagcaatcttcctgcttcagcctcttatgtagctgtgactacaggcacatgccaccacacctggcaagtttttatttttattttttttttttagagacggggttcttgctatgttgcccaggctggtcttgaactgctggccttaagcgatcctcctgccttgacctcccaaagtgctgggattacaggtgtgagccatcatggctggcctgatgtatacattccctggaccctcacatcccctgagttttctcacttgtaaaatgaagcctgagattcgatggagattctaagaaaaccactgaagcccaccacaaaagcagggagaggttgagcaggtgagcctggatctgagatcatccccaccttgccacccacatcagagcagctccatgttttccacttgcttcattacatttttgtgtaagctttgaataaggggttcccaggctttaaaacatgacttgaaatcattagtttacactttaaatcatctctaaaagtggatttatgagtgatggattttgtcctattttttcatttaatttttactaatattctgtatagcatactttaggaaactctacactagacaaatgtattttccataaaaaccagaatattaggcatgtcaaaaaatgtatacaagcaattctgatgatccatattatttcagatatgatgatgatatttttaaaaaattaccaaagaataataagaagggaagtttcccaatggtaagaaggggtgtttaatgtaagtttcacctctttctctctccctcattctctccctagtgggtcaagggagagggaggggttaaagatgacttcctccaagattgttccagatctattgaggcctgctctgtctaaatagtgcttccaggaacagcagggtctcaattatctcaccgtgggctgtgaaattgt

SEQ ID NO: 238682 - DNA, 759 bp, Homo sapiens
agcgggagaagcagagttttgaggcagagctgatcaagggaacctcaacaaacaaccccagccatggaggcggcggtgtctttgaagaccccatgagagcatcaaacaagggagagagcctggaacaaatcatcgtagtaaaatggcggcagagagctagtaatgtgtctggaattggtgggttcttggtcgcactgacttcaagaatgaagccgcggaccctcacggtggtgtctttggtggctgttcacccttccacagtaaacatgcttgggaagcaactttgccaaaagccttcggacagtccagcgtcaacaccgcaagccaagtggaggagaaaaatctgcgcctctttctctcaagggatactttgtctctggggtactttctgacccagtggacccctggcagaagtaagcgtggactgtggctgcaggaccacgcagagtcaacacgaaccgaagccaggccttggccacggcagctctggggtccaaccacttgatcaatgcaggaaatgctttgatggcagaattcttccatggccagcttctcatattctctgggacagacacaaaccaagaaaaatgagtgtggcgcagaatctgatgtgtccttccttaccccgtgctggtagcaaaaagtatgtcttgaacttttctttgttacacacagtctgggtaataacagactgaaggaaaactaaagaagcttgggaggctaagttcaatgacaaatgaagaactaaggcagagaaaa

SEQ ID NO: 238683 - DNA, 584 bp, Homo sapiens
cctccagtgaaccatgtcttctggtatttacatcttgtgtggtcccctccattaaatttgggctttaaccaacagaatgctgcagaagcgacaccctgccacttgtgcttttgtgatcctagccaccagtaagaagccctgtgaccttgctgagaccctgaagagaccacatagagaggccacttgaagggcaaggggtcctgactctacatggagagagaagcccagccatccctgtttcccagctgagtcctgaccagataactcactacaagactgaccacaggcaagaacagcagaagagctgcccagctgagcccatccaagagtgcagaatttcaagcaagtaaaatgactaatgttgtaagccactaaaattctagggtggttcttacatagcaatatgtaactgtgataaactaaataaatgaataaaagggaatgaagaattacttcacagaataagtttcatgcaaagacatctcaatgtctctaagaaacacttctaaggaagagcagagtcaagaaaatagcaacagaactaacaggaaatagaggaactcataccaccagcttccatttac

SEQ ID NO: 238684 - DNA, 1528 bp, Homo sapiens
  misc_feature (378)..(378): n is a, c, g, or t
agcgggagaagcagagttttgaggcagagctgatcaagggaacctcaacaaacaaccccagccatggaggcggcggtgtctttgaagaccccatgagagcatcaaacaagggagagagcctggaacaaatcatcgtagtaaaatggcggcagagagctagtaatgtgtctggaattggtgggttcttggtcgcactgacttcaagaatgaagccgcggaccctcacggtatgacagctcctctcccaacagctctactttctacatctactctctaccaccgcaaaacttctttcagttccatgaaagggccatgtttttctggtctcttggcctaggagcatgttgttcttctgccagcaaccttcttcaaccatcnccacaggatgactcctctattggatacttccatgaaaagtccaggcctgggttatgtacccttcccaaagtgcaccccagacacccaacagtttttccagcccagactcaccacactgtgtggtaatttcctgatcactcagttgtgctccccacagactataagctctatgagggcaggggccacagtttgcttgttcactactatatgctcagtacctggtaaatattagttgactgaagaatgactatgtggtaatctattccattggtggcctccagtgaaccatgtcttctggtatttacatcttgtgtggtcccctccattaaatttgggctttaaccaacagaatgctgcagaagcgacaccctgccacttgtgcttttgtgatcctagccaccagtaagaagccctgtgaccttgctgagaccctgaagagaccacatagagaggccacttgaagggcaaggggtcctgactctacatggagagagaagcccagccatccctgtttcccagctgagtcctgaccagataactcactacaagactgaccacaggcaagaacagcagaagagctgcccagctgagcccatccaagagtgcagaatttcaagcaagtaaaatgactaatgttagaactcagaatgaaggggcctcaggttacctgcatcattctggttttttgctcctgttttactacgaagcaaacacctcgactataagccgccatagaccagggtctgtgtctcattcgtgtctggacaatgcatcacagacactcaactgttttctgcctgagcagaattaagacttggcctcctaactcctccatcaccatcttctccactctcttccttggccttcatcaccaacaccacctcatcaaccgtgaaagattcaaagagtaaggaaaaccatttctaggaccatgaaatgtgtcactggatctcctgcagaaatctgccagagctacaatgtgactggtttctacatgtctgacaaatttctatttaaataagtatttttcaaaatgcaaattgctacctattctttggccatcaaatcactttagtgggttgcaaccggctttttcttcttaatagaaaaggaaatgtgttgcatttggtaaacatggaaattgttttat

SEQ ID NO: 238685 - DNA, 229 bp, Homo sapiens
gttttcccttgagccttgagcatgaaaagtgtgctgctggactgtgatcttacatacattctctctttatttcttacccattctgcctgaagagctggcaacaatttgaaatccatcatcccggctgtgttttgtggattaaactacttattctcatatgttctacccatttccttgtcaggagtgaattctgtgtattacaaataattgatgatgttgggcacatctc

SEQ ID NO: 238686 - DNA, 467 bp, Homo sapiens
cctttcaatcttttccttgcttctggcatgagttaccatctcttttaagaaattggttatgcatttgaaaatacacgtagctatacatactttaaacatatcatttagcaaggatgctccttatcggaccgttgctgggaacagagaacacgacagttccagactgtttccaagattggatgaagagattcaattgacaatgctgtgaagagagggatttggagcttgttgggggaggtagtgttgacttccttgtgcaatctaggattgagtgggggatgcagttggaaggcaagagaagtaagactcctccatcttcctggtccagagaaattatgctggatccccctacccttaatgagaaaggaggtgtttgtgtttccagcatctatgagatctgattgctaatgtagctacctttaaagaattctgctatttacaataaaagtgagatctccctcctccaa

SEQ ID NO: 238687 - DNA, 418 bp, Homo sapiens
tctcttccctggaggctcccccatcctcgtggcctctgcgcggtccagctcccctccgagctggctcaaggggtaacttgatccaggtcagctggtggagtatgaggtagcgtctagctgagcgtcacggtattttattaagtccgaaatgtgatcgctactgttgtcacactttagcgcccccaacaatccccttacaaatgagaaaaacagagcctccccaaatgcctttcctctgacatcaaggaaagcgcatggaaccctgcccagaggcctgagcccgggtgaccccaggagtggctccagagcttgaggaaaggcctggggggcggagggggtgtttttccagtttcaggcaaagcagtgagctgggggctatctgctgtttcctctgcgcctgggtctgtaaagtcagcgg

SEQ ID NO: 238688 - DNA, 364 bp, Homo sapiens
caaaaaaaaaaaaagaaagaaaaaaaaagaaaaaaaaaaccctataatactagctcactgtatggcctatagcatttacttaatgagtatatttattaatattattttacaaataaatatttataaagaaatgattcgccttccctttgaagggatcttaacactcttaacacatttgaagtctgcacagctagtacttaactcttagcactgtttgctcttcatttttcattatcagcctcatctccctggttagaatagatgagattataaggtttttgatgacaatgtcatactgatgcgacctccacagtaaatctggcacagtggttaaagtaaacacttaataaatatttaattagca

SEQ ID NO: 238689 - DNA, 462 bp, Homo sapiens
atactatatatttataccctatatatgaatttatgcatatataaaatatataaatgtatttacatatatacataaatatatagtattatattgatatataaatatatttatatacttaaatatatatttttgcatactatatatttatactatatatttaattatactgtattataacttttgagaagatcagtattttcattttttaaaatagtcacataattgttcttgaattcttttctgccatttccctacttctcctaaaatatcacacaaaatctggactgtataagatacatagaaatatattttaatattataaaatcaatacattaaaaattttagtgatcaggtgcagagtggctctttcctgtaatcccaatactttgggaggccaaagccggagggtctcttgaggccagaagacaagtctgggcaacacagcaaaaccctgtctctaca

SEQ ID NO: 238690 - DNA, 357 bp, Homo sapiens
ctgagtacaggtgagcacctgagcctggatctggctgccctcagctgcatgggcttaacagccggtgctgtcaatagatgtggccagattatctcaactttagacatgtgaaaatataaacaagagctgcttcgagttttccaagtgtgttcctctgtggggggacatgtattcctgtgctgattgaatgaggaatatcactctgtaaatttttttttttttgagatggagtctcgctctgtcgcccaggctggagtgcagtagcacaatctcggctcactgcaagctccgcctcccgaattcacaccattcttccacctcagccgccaccacacctggctaatttttgttttttag

SEQ ID NO: 238691 - DNA, 163 bp, Homo sapiens
cctccgcctcgctccgcaccaggtctgaagcccagtctgaggccgtcgcagctcggcggcaacagaaccacggctgggatggggctcctgcccctccgacctgcaggtcactgtttgtgagaggtggacaccttaattttctttagttgatcagaatggaaca

SEQ ID NO: 238692 - DNA, 439 bp, Homo sapiens
atatgacagcaattccactcttagatctacctaagggaacagaaacaccttcagaaagactcacatatattctagagaaacaccttcagaaggactcacgtgtattctagagaaacaccttcagaaagactcacatatattctagagaaacaccttcagaaagactcacgtgtattctagagaaacaccctcagaaggactcacgtgtattctagagaaacaccttcagaaggactcacatatattctagagaaacaccttcagaaggactcgtgtattctagagaaacaccttcagaaggattcacgtgtattctagagaaacaccttcagaaggcctcgtgcgtatttgtgttatagtttagtgctagtgccactgaactgtatccctacatatggctaaaatgacgtgttttctgtattttacaagaaaaataatt

SEQ ID NO: 238693 - DNA, 224 bp, Homo sapiens
agtttatatgaagaggcaaaagccccataatagcctacacaatattgaaggagaaaaacaaagaggactcacaccatccaacttcaagacttactgtaaagctacagcaatcaagccagtgtggtgttggtgaaagaaagacaaaccagattaatgaactagattagagagcccagaaatagactcacataaatatagtcaagtgaccttttgtcaaaggagca

SEQ ID NO: 238694 - DNA, 278 bp, Homo sapiens
agccctttgcatcaccccagcccttccctgccctgccctgtcctggcccaggcaaccgcctcttgcctagttgcccacagcagccttcactcaggccttcctgcctccagcctggtccccacaacgtgcctcccccgatggccatggtaatactggaataaggtccttgtgataggccccacatgcctgaactctcccccccccatcccccttgtatttgtctgttttcacattgctataaagaactacctgagactgggtagtttatgaaaaaaaga

SEQ ID NO: 238695 - DNA, 509 bp, Homo sapiens
cagagaggaggaatgtgtgtgaaaggaggtgcccagagggctctttggggacccttcgtgagtccttggctaagagtgaggcttcacatgcacagggtgaggcatatgaagtttgccagagagaagctgctgcagcattgagatcagaacagaaatggtagaagtcgaacggtactgggagatgttgaaagtccatcccagccagagtggcaagacctcatgagcatgtcctaacattccagacatgtagctgagacccccaggggctttgttttaggagtaagaagcacacggtagagaaaaatttactctggatggtccctgaagaacactaaggccaagcctagaaagatcaatagggaagacaagagtttagaggctgaacccttccagattagagcctcttgagaaacaccttggattttccacagcataccctggcaacaacagcaaactcctacataagctcaaagtgatcagctcatagttgaacttcctgctagaaagtt

SEQ ID NO: 238696 - DNA, 441 bp, Homo sapiens
tacacagctgaaaaatcgtgtatttctaaaacacttgtaatcatgtttcactcattttttatttttgcttgtgctattgtttctttggaaaaggctgaatcataaattcaaagttctatttttcagtaatttgtttaaccatgtatatattggctttttaagattcttgagtttattaaagataaaatgaaggtaaacaaataatattaaatgtcagtcagttttgatctgcctgcttgtaagagaggaaactagttttgactggaatgtctagcagttttgtaatttttaattaaatatcgtcaatgatttgcaaggagaataaaacacaatgaactaagtatttcatttgtgaggtgatagcaggtctttctgtttttcaattcctccacgattatgattatgaaataaatgattaaagattgtcaaatttacaaacgt

SEQ ID NO: 238697 - DNA, 441 bp, Homo sapiens
caataggaatatggtattagtttatataatattttatcttgttcatggctaagatatatttgtttataagctttagcagacttatctgggtggatcatcatgagttttatgtttatggtgccttccagaagagtaagaatagaatgtataaatattaaaatagaaaaaaatggatttagctaatgtaaagtaataacagaaaaagaagtgcaataaaagtattataaaatgaaacataaaaaagatggcaccaataaggtctaatttaatagtaattaaactaagtgtatataggttaaacttactattcaaagacaaagattcagattaatctgtgaaaacaaaccaagatctagaaatacatttcctaaaaataagaaaagagagaaaactttaaaacaataagtttgaatatgaaaaaaatataaaggcaagtaagaa

SEQ ID NO: 238698 - DNA, 228 bp, Homo sapiens
tgaggtcaagattatctcacttgacagcttcttgcctgcagagagatcacagccaggaagtgtgagcctctgggttgagacctgcacaatctcgggtagtttttgtataaagaacaggtttttcttttcttccccccccaccccatcatgaaaagaggctttgcagagtaaggcagaggaggctgctgacatctcatccagaataatcagtagagcaaaatactctta

SEQ ID NO: 238699 - DNA, 521 bp, Homo sapiens
agttcggccacttaacggttatatgacctaaacacagtttcttgcctctctgtgcatgactcttcagctgtacagtgaggataatagggcctaaatcctagggttttggtaaaattaaagcagttaatgcaaataaaggagccataaaaatgcccagcacatagctagtgtacaggaagtttattagctcttatttgttgattctgttagatcatgacaaatgttaagcctgaaaacaagatggccataccactggcttgtaacccatgttcattctaattcttccatctggggctataatagtagttgaatgtttctaacactatccttggcaaattcccatatattcacatacagcatggatataaatattatgaaaaaatgtctcattgagaattgctgtctagtacactagtaacactagacatacaaccacttaaatgctgagtgtcagttttataattagagaatgaagcaaattgtttcattacttgtttaataaacttgtgatttatgtttat

SEQ ID NO: 238700 - DNA, 666 bp, Homo sapiens
gtggcttaagcctgtaatcccagtgctttgggaggctgaagtgggaggatttcttgaggccaggagtttgatacaagcctgggcaacatagcaagacccctgtctctacaaaaaatttcaaaaattagctgggcatggtggcacacacctgtaatcctagctacttgggaggctgatgtgggtggattgcttgagcccagatgtttgaggctacagtgagctatggtggcaccactgcattcaagcccgggagacagagggagaggccatctctaaaaaagtaatgccttctcttgatccactgagaaagggttctactgaggttagaggctgaagaatgctgattcaggaccataccctaccttgtttcccaccagtcttcaagaaaagcttgcctatgcttggctgggatacacaaagagacataaaattaatactctgtagctgcatttcccactttctatgatattagaccatcttaggtctaattcagtgctcttcctatttatcaacacgtgacttagagctgatcttcctctaagattttaggggagacttctttctccttgttctcctaacatctgatctcaagaaagaaaggtacaattatgtttgtaaaacatagctaagagtttgtatcaaataatctgtacattttaacttgtt

SEQ ID NO: 238701 - DNA, 364 bp, Homo sapiens
acagtgaatcaatttagtgaatccaaatgactttgtccaggtcacagaggaagtgggtgtcattgccagaactgaactctatgcctccctgtccagcaaaattccactacatagaacatgatgtaccatgatcacgacagttccaggcagggagtgaagggagagagcccaggcttcggagctaagcacataaagtttgaatccagctcttctgcatattctatgaatcactgaatatatttacatacattcactgtattcagtttcatctctaaaattagcataatatcccatttttagagttgtgagaaagataataaataatgcatattttaaaaactggtaaataaaaagttcttgaaag

SEQ ID NO: 238702 - DNA, 579 bp, Homo sapiens
aaaagtgcttcaacccaaaacttatttccatggcttacacaggcctatcaacctgaatccagtccacgttttcaggttgatctctagtcatttccaaggtatggggtcttgctattacccaggctggtctcgaactcctgggctcaactaatcctcccacctcagcctcctaagcagctgggaccacaggtgcacaccaccatgcctgctcctctgtgaagtctttcttgaaaccatcatgcaaattctattgttctttcatctatctaagagcacccgtattttctttagtatttatcatatgacatttgaataattttctatctatctatgtatcaattatctgtctcctctaccaggtgaaacttcctatcaagaaaaccatgtctaagttctttttgaaatacccagtactcacccagggttcaacagtgtatcattctgaaagtatctgttgaagccaggtgtggtggctcacacctgtaatcccagcactttgggagggtgaggcgggtggctcgcttgaagtcaggaattcaagcccagcctggccaacatggtgaaaccctgtttctacta

SEQ ID NO: 238703 - DNA, 488 bp, Homo sapiens
agcaaacaaatagcaagatgttagatttaaacctaacctgatatatcaataatcacattagatgtaaatggtctaaacactccgattaaaaggcagagattgtcaaagtggattaaaaagcaagccccaactatacgctgtctataaaaaatacactttaaggtaaaaagatgcaaatagattaaaagcacaaggacagaaaaagatataccatgccaatactaatcaaatgaaagctggaatggctatttcaatcaaaatagatttcagagcaaagaatattatgaaatgattttatttatccctagtaatgataaaggaattaattcattaaagggatgtaacaatcctaaacatttatgtacctaataagagtttcaaaatacataaagcaaaaagttacagaactataaaggaaatagacaagtatccaaaattacagttggagacgtcaacatacctcttaataactgacagatcaaatagac

SEQ ID NO: 238704 - DNA, 307 bp, Homo sapiens
taagctgggtggataggggaagagaacactacagaaaatccagattcatgtttaaaagtatgggagagttcagggagagcagacatttatttagtagaactggtattttcctttgtttgccacacattcttttttaagtatcttattacaaagacaagtaatgagaatcatcagaggtctctattacttcattattccccttttcttacatttacagaagtattttgggagaccaaggcaggcagatagcttgagcccaggagtttgagaccagcctgggcaacgtggcaaaaccccacatctctac

SEQ ID NO: 238705 - DNA, 498 bp, Homo sapiens
cgtcgacctctgtctctgccttccccgaaccgggacccggccagccagaatcacaggcattcccacctctggcgccggaggggaccgactgacccgcgcagacggggtcgcgccgccgcccggccctcggcccccagccagcctgccccggcccacccggccccgccggccagacacggcgacctatacggaccgcccccacgccgaccctccaaaggcccccggccttgggtttcccgtgccggggcccccgggcagtcctggcggcgtcagggccgcgaccggaccgtgggccccgcccgcccgaccgcagatgcagagccggcctccgggctcggggccgggctgacacggccgagaaagggcccagccccgcgcggaccacagactggcaggccggccagacagacggacaggctgaccccggcccgggggagcaggcgcagcggctgcgcaggtcccgccaccgccttctggccccaggcggcccctcagggc

SEQ ID NO: 238706 - DNA, 432 bp, Homo sapiens
cagaataatatttttaaaatttttagtttctaagcttatctgaaattttaattttcttttcttatgtaataccagagttattaggaaggtattatctaataacactattttcagtgatattttaagtagttgtcctagaaaaatttctattttttaaaaatgtatatttaaaaatacattaaatgtgtatatacatcaatcatatgtatcgatttctgtttttcttgaattgcaaatgaaatttgtatttttgtgttcctggaataaaataaactcgaatgggtcgtaatatattattcatgctgtaattcaacgtatttgaatactttaagaatgttacatttatagttaacagatactgacctataaattttctgtcatataatgatgctgtgagacaatctgagaagaattaaaatttaaattcatgta

SEQ ID NO: 238707 - DNA, 1343 bp, Homo sapiens
cctaggagatcatctgtctcatactctgttccctgagctgaggctggcagtagtagtgaggtggagtggcatgggttgagggactaaacctaagttcccactctagctctgtcacttcctggccaggtgactctggatgtatcacatcatccttcagagcctatttcttagattgtaaaatggaagtaaaacaaaaaatgagattcattcagtgttcgttcaacaaatagttttgactatctgggctatgtgccagtcactgttctaggcatttggactacatcaaaggaaaaactatataattccatgctcctttggcacttttactcaagtgacgaagatgatgacgataacactcatctcaagagctgtaccaagtgtgtgagatacaaacgtgagggcactttatagaccacagtaaatgatgggtttcattactcttgtactcaaacaggtgaagtgacttgcccttgggaatgggccggccctggctaaggattcttcccaccccactacccctcgggtattcattctgtgaggacccctgttataatgtccttgcaagcagctcatagcagctgcaggttctctgagggctgggagaggctgaggcgaggggggggtccccttctgtaacctctggccccctcctcccctgccttctcctcctgctcgtttattttccggagccatctccctgcctctgcctggctccactctacagggggcattccctcccctgttgctgaagaatggccacagggcaaggtgtcacttcttacccttcacacacactctgcccagtacacgattttgttctgtttttagtctttgcatttgtttgaggacagaaactaccagctgggaagtaagatggtagcaacacctaagcctgagtccgcccacacctgtcaccaagttcctctaactgtcacctggacacctgtgctttccctatgccctcacccgatgcctccctttgctctgtgtgcctgcctccccatcaacagaaagtccatggacacctgtgctttccctatgccctcacccgatgccctccctttgctctgtgtgcctgcctccccctcaacagaaagtccatggttcatctttatcttggcacttaggcgcttaggtcagctcagagcctcattgctcgcctgggttgttatacccaccactccaccctactgcgttcttttgcctccaaatcctcccttccttctgcaactacaggaacctttgtacttcaaccttacttcacgtcaccacatgtaactattccagttagtcctgtgtgttagtccattttgtgttgctataaaggaatatctcaccgggaa

SEQ ID NO: 238708 - DNA, 356 bp, Homo sapiens
tcgttacctaatccccttagtctttttcagaccttcgcaaagcgcactgccccttcttaggccttatacacaaaaggagcttcgacgggaacgccctcgacttcccactgccaaacctatactcttacccgcagctgcttcaccttcttggcaggaaaagtgtcggttgtttctctggcttcacgctgatccctcgcttgagctcccctcccgcccctgcctccgtctgagtctcacattgttctcggtattggggcatcatccccttccgcattcccacctgcctctagatcccattcatcctcccggcccaactaacgaatgaacgaacgaatgaaaatgtatggagtacctat

SEQ ID NO: 238709 - DNA, 448 bp, Homo sapiens
agctgggccaatatgtggaaaatacctaaatttaagtgttattacaaaaatgaagcaataatgagattctggctaaaggggccactaaataagaataatatatatttaaaggattgtgtaaaaaagtagttctaggtgcactgtaagcatatagggttttttcccatgtgtatttttaaagaatggaaaggtcaaaaaatagggtcacctgtgttagactaatttaccttattgtatatgctgcatgagatggaactttgcattatagttatcatagagaagcatagtttgcctcatattatggcaatttatcttcaatcaaaaccttccagagtcatttcattttggaatgtcctgtaaacattcaaactgccagaatatgactgtaaaacagcgaagtgttctcttgcattaaattgaagatatctgtttaattttttaaaaagga

SEQ ID NO: 238710 - DNA, 361 bp, Homo sapiens
ctatcggattttttgttttctctctcattgtaagtgcatattaaatatttcctattgtataaacttcttaattatttctcttcagaactcttgttaggtttccatcagatttgcacctggtgacactttattctcttcaggttattactagcccagctgcagttagtggatctttgtttgtttcaattagcctttccaaggcccaggacattcttatttgtgtaccccaagcattttatgagaacataagtgtccaaatgttagctcttcaattagaatttccaccttcaaattgctgtaaaaaataagtactttgtaccccttgacaatgataaatacactatgcttttatgttgtgaca

SEQ ID NO: 238711 - DNA, 416 bp, Homo sapiens
aattgaccatcttaaccatttaagtgtacagttcagtggtaattacactcacgttgttgtacaacccatctttagaacttccaacaggaatacttttgtccagtgatatttacaaacatctctgatatctccttggggtagcaggttcccagcagtggaattattgaactaaatggcctgcatttataaagagtcttgatacatagtgcccacttcctttccagaaaggctgtattgatttcatattccccccagcattctttgagtggctgctttttgaaattcacatcttctgggaacagcttaaatggatggtgctttgtgcggcctaactgtggactactgacaattttaagaggctgagacgtcattctgtagctgccttctttagaacttcccttctgtctgcacttctc

SEQ ID NO: 238712 - DNA, 387 bp, Homo sapiens
gacgggcaccaccatgcctggctaatttttgtagttttaatagagatgggtttcaccatgttggtaaggctggtctcaaactcctgacctcaagcaatccacctgccttgggctcccaaagtgttgggattacaggtgtgagccaccgcgcctagccactcttctttttattaaggatggaggaacaagtttctctttgttctaatatttttggagtgtttttccaagagaaaaaaagaatagagatacagctttattctgctcttttgaacccaagcttctccaaattattatggtagcatttcttattaaatatttacttctctcttattcttaaattgctttgttcatcttcattagtaattggtaaaggcccatcccttttaa

SEQ ID NO: 238713 - DNA, 1080 bp, Homo sapiens
gattgttccatttatttctctacttggtgtattccattctattatttaaaaatcatcctaatcctaatcagaaaaccttacaatatgacttcctcatggaggccattcacttttatagtccttccttcagtagatcacactgggtaaagccatctcacctgttattatgcctttcctcaatcccaatgtgacacccatttcctactcaacttggcttctgaactttcttgtccattagagccacaccacctttctcgtttcctccgttcactcatccatcgtgtaagagatgccaaacacaggaggcttcctaaatgaagaaatgttgttcttgatgttaaagattttagtttggtgaaattctctatctttcagaatcttctcctcagctcctaaatgtgtgttgcctccagtgttggcttggattctcagctccttatgtattttcccttggcaaattcctgtatcctactttctttcccattctgcttcatcccactacagcatgttatgtttagccagtttattggaaacagtcctggagaaggaatggagagatactagttctgacaaggttgccatttcatttattggcttctcaattgctcacttcttaggagaagagttgggctaactcagcgattcccaggcttgtctgcacattggaattacctggagagctttaaaaaatgtggatagagcatccctcccctagagagtctattgtaattagtttggggtgtgggggggtttaaagttttcttggtgattctaacgtgcaggcagggttgcgaaccactatgctgaatctacttaacgctaattccccactctctagaacaaggaactgcttcacagtgggatcaggtagattttggagtttaatagaccaggttcaatttccagccagcaatgacacctcagggaaaatcacttcacctttttgagcctaattccactatgaaattaatgaagattaataatatctaccttccaaatataaggatcaaacaagatcatagaacaggacaggcattcaagcaaaggtaattattattatttctcctaaaacaacagttc

SEQ ID NO: 238714 - DNA, 315 bp, Homo sapiens
aggtcagaaattgtgggttgcagaaatctgtgttttaataacccttcagatgactgtggtgcccgacaaagttgaaatgcctgctcccatgtgtgctgggtttagtttgtgctttagcaaagcgggataagaaagaaaggaggccaggatggaattcgctggtttccaactagaagtgacagaaaatagaaagagtccagtaatgtgaggtcttgaagtgttgggagaattcattcatcacttctagattccagacaatcagaaataaaattttaaaagtctttcaatgacaaactaagacttctcagttgggaa

SEQ ID NO: 238715 - DNA, 425 bp, Homo sapiens
tatcctctgtatttttcgtatgcggttataaatgtgttttggggatctattttattccttaatttatatatttgattctagcgtcaagcaggttccctttgaatttttcctttaaagaacatgtgctatttcctattacatcctgtacccctcaaactgcccaattaggtatactcctggggaaaatatggcaaagtttgttgtaatgcagtttttttacctaattaagtagctactaaaataattaatttcaaaaatttggagcaaacctagaaagatgcagatgtctttgtggcttttcacgcaatcaagtttacctatctttgcttttaatatgtatttcctcttgatgaaatgtttatttagtttagtaaacttgggatatgtcatttatatccataaatcaactttttaaaaaagagata

SEQ ID NO: 238716 - DNA, 249 bp, Homo sapiens
agggatgtgacttagctcctgtctggcacgaccctaggtcctgtttatgatctctgttttaatattaacgttggtcagttgtgtctaaattccaaaagagaaagtatagtgaggcatgtccaatctcctttcacatcactgctgggaactcagcttttcaggtttctctggggttccgtttggccaagagggggcccactcagttgggggacttaggatatttatttatttatgagacagagtctcgct

SEQ ID NO: 238717 - DNA, 360 bp, Homo sapiens
cccacaaacttctggaatgagaatcttaggaggtgagctagagttatttacctggtacttccagttacttctgatgctgacaatcaacagaccccacttgagaaattctaatcaaggacttagcagtactgaaatgatattttgattgaataattctttctcttttctctgactctgtcttactctgtgtagctcacattttctcttgtggaagaaatagagaatgcattaggtctacttgtttaagcagcctccaggggtaacaaaactggaactcgtggataataacatgtctgtacaggaaggaagtgcaaagggtgtgttgagttctgaattgtgtaggaacccaatctgtaacag

SEQ ID NO: 238718 - DNA, 1736 bp, Homo sapiens
  misc_feature (63)..(63): n is a, c, g, or t
  misc_feature (810)..(810): n is a, c, g, or t
  misc_feature (814)..(814): n is a, c, g, or t
  misc_feature (871)..(871): n is a, c, g, or t
  misc_feature (1169)..(1169): n is a, c, g, or t
  misc_feature (1219)..(1219): n is a, c, g, or t
gagtaaaggtgacttttgttatgttttagaagagactggtggcattttgcctctgccctaganatttgtggaactttgaacttaagaaagttgatttagggtatctggcagaagaaatttctaagcagcaaagcattcaagaggtgatttggatactgttaaaggcatttagttttataagggaagcagagcataaaagtttggaaaatttgcagcattactatgcgatagacaagaaaaacccattttctggggagagattcaagccagctgcggaaatttgtgtaagtagcaaggagcctaatgttagtccccaagaccatggggaagatgtctccagaccatgtcagagaccttcaccacagcccctcctatcacaggcccagaaggaaaaagtggttttgtgggcctggtccagggtccccttgctgtgtgcaacctagggatgtggcaccctgtgtcccagctgctgcttcagctgtggctgaaaggggccaatgtacagctcaggttgtggcctcagagggtggaagccccaagctttggcagcgtccacatggtgttgagcctgcaggtgcacagaagtcaaagaattgaggtttgggaacctctacctagatttcagatgtatggaaatgtctagatgcccaggcaaaagtttgctatggggtggggccctcatagagaacctctgctagggcagtgtggaagggaaatgtggggttggagcccccacacagagtccctactggggcactgcctagtagagctgtgagaagagggccattgtcttctagaccccagaatggnaganccactgacagcttgcaccatgtgcctggaaaagctgcagacactcaacgccagcccntgaaagcatccgggagggaggctgtaccctgccaagccacaggggcagagctacccaagaccatgggaactcacctcttgcatcagtgtgacctggatttgagacctggaatcaaaggagatcattttggagctttaacatttgactgccccactgaattctggacttgcatgggacccgtaaccccattgttttggccaatttctctcatttggaatggctgtatttacccaatacctgcacacccattgtatctaggaagtaactagcttgcttttgattttacaggcccataggnggaagagacttgccttgtctcagatgaaactttggtctgtggacttttangttaatgctgaaatgagttaagactttgggagactgttgggaaggcacgattggttttgaaatgggaggacatgaaatttggagggcgcaggggtgtgatatggtttgggtgtgtcctcacccaaatctcaactcgaattatatctcccagaattcacatgtgttgtgggagagacccagggggaggtaattgaatcatggcagccagtcttttccgtgctattctcgtgatagtgaataagtctcacaagctctgatgggtttatcaggagtttctgcttttgctgcttcctcattttctcttgccaccgccatgtaataagtgccttttgcctcccgccataattctgaggcctccccagccatgtggaactgtaagtccaattaaacctttttttcttcccagcctcaggtatgaatcagcagcatgaaaatggatttgaatacagaagcctaatcaaatttgctgtccctcatgggtctatagatggttaataaaacattggggtaattaacc

SEQ ID NO: 238719 - DNA, 346 bp, Homo sapiens
cctcattcattcattcactcttccactcattcctccaagcccatcgcccctggagtgtgccaccctgggctgggggcttgatgtggatgaggaaaccagccccggcccattctgtgggaccccagtgcaccaagccagtcatgaagtggaggcgatgagagccgtgacacaggtctggacggagagatagtggggcaaagagaaggaaaggaccaatgacggggaagcagggcggggagcacgaaggcaatggtgaccacagcaatcgcagcggttatctttggagcgcctaccagctccaggccctgagctgacactggggtggtacctagttaagagtttgcca

SEQ ID NO: 238720 - DNA, 205 bp, Homo sapiens
tccccgatgctggttcaaatcacgtggaaatttcatttctgagctgccaccagcacagcaaagctggtgccatatttgccatcagtcttttgacatggagctatgcttacaagaacaaggcccaatgcttctgttaaagatgtgaaatgttgaatacatctgacatcaaactgttgaataaaatcaacgtcaaaccacagctgaa

SEQ ID NO: 238721 - DNA, 398 bp, Homo sapiens
gctcttagaggtcagaatagaagttcccttgaggttgggggtggatagtgaatagagctggaagggggattctgggatcatgagaatgttctgtttcttaatctgggtactgatttaagcatgtgttaagttacaagatttgttgtacttttgtgtatgtacaaaggagttttacaaagttcctgctggaaagccaggagaaatagacaatcatgtgattgctggtgagattgtccattcaaataacccctatggaagcaatctggcaatatctatcaaaattataaatgcatgtatcctttgatctaaataattttcctttttggactttgtcctagttgcacacatggaaaatgatatgtaaataagaatcattgcagttattgtctgtgatagca

SEQ ID NO: 238722 - DNA, 1702 bp, Homo sapiens
  misc_feature (1205)..(1205): n is a, c, g, or t
  misc_feature (1251)..(1251): n is a, c, g, or t
  misc_feature (1270)..(1270): n is a, c, g, or t
  misc_feature (1274)..(1274): n is a, c, g, or t
  misc_feature (1583)..(1583): n is a, c, g, or t
  misc_feature (1617)..(1617): n is a, c, g, or t
  misc_feature (1620)..(1620): n is a, c, g, or t
  misc_feature (1622)..(1622): n is a, c, g, or t
  misc_feature (1624)..(1624): n is a, c, g, or t
  misc_feature (1628)..(1628): n is a, c, g, or t
  misc_feature (1639)..(1639): n is a, c, g, or t
  misc_feature (1645)..(1645): n is a, c, g, or t
  misc_feature (1652)..(1652): n is a, c, g, or t
  misc_feature (1657)..(1658): n is a, c, g, or t
  misc_feature (1665)..(1665): n is a, c, g, or t
  misc_feature (1690)..(1690): n is a, c, g, or t
  misc_feature (1697)..(1697): n is a, c, g, or t
caattaaatacagtggacacaagccagtgttatttattaaatcctggtgctcaataagggtgcctgctgagggttgggagcctggggccactacatcctgccttttctctaaggagattagctagtattaaagaagtgttaagactagcccagactgagtctttctcctcaaagcatgaagcacctgagagcatcctgctttcagcaggagggagccactcagaaactgttccctagaaccctgttgttcaaagtgtggtaggaggaccagcagcctggctggtcaaagtagagttctcacctaggagatgtgggaactacagaaacttggccccctagatcttcagaatcagaatctgcactttaacaaagttcctaggtacctcggtgcccattaaagccagaggacccctgacctacaggccacagacccagataaagcagcccaagctatcgtttcctcttgttctcttgagtcacaccagcgaggcttttgtggtgcctttcattcactgcagtgtcgagatgtgccgccaagtcacgaatattgtccacactgtccctgcagtgtaacattatcagggcctaggaacgactgagcccctcgtaggcatgtgacactgtgttcctaagactgcttctctcttttcatgaataaaagcagacacaacgcaggtgtttagaaaactagtctggtattaatattttaagctagaccttggatgccatcagactttatattcgtgtttattttcaattctgttcattttattgtctcttacattaaatatactgtttggccctagaaatgcaaaatcacgaagtcaccactctgcctgcccttaaggagctcacaagccattaggaccattagacattagcttttcgtttcttcttaaacaaccagaataagggcattctccatctctagcccctttgaatggttaccctagagtactctgagtccatagcagccaggaagtcttgctttaacattttgtccacagcaactcagatgtcaccaggtcatttctcttacctaagtaccttctcataaagtgaacctggcagttttggacagatgtcgtcctcagtcctgtggtggtgatggctcaggcctcctaggctaggaacatatcagctaaggcctactgcagccactcaccagaagggtctctccactagagaacagtagctgcgcctcnagcattgctctgtttcagaggtgtgtctctctggtcagtcagttcnagaaggttaattaataaancccncatgctgagaaatgagtttcctcaagtgggcccagttttcagggagactggcacatgcctgtcatccctgcttctacacgagatttcttagaacagtcgcagtctgccttctagattccatcctgttttgttctaactcttgggttcaattttagaaaaatcaggctgtaatcccagcacttcgggaggccgaggcaggtggatcacaagttcaggagattgagaccatcctggttaacacggtgaaaccccgtctctactaaaaatacaaaaaaacaattagccaggtgtggtggcggtcacctgtantcccagctactcgggaggctgaggcaggagaatngcntnancccnggaggcggagnttgcantgagccnagatnntgccacngcactccagcctgggcaacagagcnagactcngtctc

SEQ ID NO: 238723 - DNA, 473 bp, Homo sapiens
gtgaattattgtttgattttgctttgaataatttgcatgccggagttccttcctttctctgtaaatctgtaattctctagggtagtgcgacctaatataactttctacagtgatgctgttttgtatctgcactgattagtatggtagccactagctgttgagcacttgaaatgtggctaatgcaactcaggaaattaattttaaatacctaattttaatttaaatgtaagtttaaacaattggctatctaccatattggacagtgcaatcctagtgttctctggccttgagatggctcctcgtctgtgatttcctgattggtgaaagggaatgatacatgtgttcctttttttccccaagactcaactccaaagtgactgtgggaatcctatagtgcagtcagtcccttagccacagaactgtaggtggctggcattgatgcctgtgagaaagaaccaatagtagcacctgta

SEQ ID NO: 238724 - DNA, 655 bp, Homo sapiens
ggtgggctgggcaccgcttctgcctgctggaccctactagggcagctccggcctcactaactggggctctaactccctctggggcacgtacacctccaaaggacggagcccagagcccccactggggcgttgccagaggccacatctaacagcaagcctttctgtgccggctgctgcccttaagcttgaactcagcctggctccaggccccagtcaaacccctgccctcagaccggcgtgggtggagtccaggaccagatggcccaggaggaagtggatgctttcttggtagggaatggggcagagctctgaagaaacctttgactggtgacttctcactccctgcctcagttttctcaaatggaaaatgggtccgggtgcagtggctcacgcagtaatcctagcaatttgggaggccaaggtaagcgggtcacttgagctcaggagttcgacaccagccttgccaacatggcaaaaccccgtctctagaaaaaaaatacaaaaattagccaggtgcggtggtgtgtgcctgtagtcccagctattcaggaggctgacgcaggagaatcgcttgagcccaggagttcgaggctgcagtgacctatgattgcaccactgcactccagcctgggctacagagtaagacctgcctcta

SEQ ID NO: 238725 - DNA, 311 bp, Homo sapiens
atttcgcagagtaatttgctatgatttaaagcctaatattttgtcattcttagtaaatctctggacggatatatttataacttgccattttaattaagattcttctattagcgagaggcattttaaaaatcactattttgtttcttttgttgtaggacatatttcagaatcccacaagggggagttctagcacctccaaactgcccttcagaagtatgctaatttttctaaaagaaaaagtttcaagtccatatctttctcaaaagaacaaaacaattgggccgggcgcggtggccaacgcctgtaatccc

SEQ ID NO: 238726 - DNA, 463 bp, Homo sapiens
caggcttctttgtaaggtgcaggtggggcgccctgtggtcctgtgaccttgaaactcaaagacaagttatctgccccgacatactcaggatcagtggttggttagaaacaggaaaagtgcagtacagcttccatccagcaacacggaaagggatgcacacagcagtcgctggagcaggaagtcctgctgagtgaggacgcctggcttcctgggtaccatctagcaccctgctctgctctcaggaagatgtgccagagccattgccttctgcagactcagctctgccctattctccttattcattattctccatggggtgggtcttgaggggatacgccatttctgggggccacacggcttcctgttggtgtgagtctggagtcctgggggtggcttcaagtattggctgttactcaccaaccttgcattcttttggagaatacatttactcaaaaacttggtt

SEQ ID NO: 238727 - DNA, 354 bp, Homo sapiens
gatgtcatgagtccgcaggtgctgcttttccgctttgccggccaagtaaatggaagacacggcaatcagtacagatctcaaagcaaggcttgttggacaaataaatgaagatgagcccaagagcccaggagagggaccgggaacagcagggcctccgtgactcacacaagcttcatccctgaaccaaggacgcagcctgccaacaatggccccaagccacaccccgccacagggggaactgatgctgcggtgagaagtgacagctttctgttgactcttttttttttcaagcagaatatgaattgagacatactttcattttcataatcagaacctaacacttagtaaccaatg

SEQ ID NO: 238728 - DNA, 512 bp, Homo sapiens
gatgtcatgagtccgcaggtgctgcttttccgctttgccggccaagtaaatggaagacacggcaatcagtacagatctcaaagcaaggcttgttggacaaataaatgaagatgagcccaagagcccaggagagggaccgggaacagcagggcctccgtgactcacacaagcttcatccctgaaccaaggacgcagcctgccaacaatggccccaagccacaccccgccacagggggaactgatgctgcgctgaagaaagccaccactaagaaaacgaaaagagaagcagcagaccaggagaaaatatttgcaaaaccaaatctgataacggacttgtatccagtatttgcaaagaacttctaaacttaataacaacaacgacgacaaaggagcaaaatccctggtggtctagcagtgaggattaaaaaagaaaagaagcaaaatatatgaacagctgtttctccaaaggagatataccaatagctaataaaatatgcacagatgctccacaa

SEQ ID NO: 238729 - DNA, 447 bp, Homo sapiens
cagctttgcgcagaaaagcctaactcttagctcgagattaattaaaaaacaaaaacaaaaaatgaaaacactgacttttaaaccttaatgtcatatactgccaaaccaggaacacttccacagacacacacatacatatgtgtatatattacaatgtgccaggaatatggttaatcctccaagcaattcagtgaaatactgttgctctgagtcttctgagaaacatttgccaagagaggattatacacgcaaggattttgttagagaaaacgccagtgaaaaaaaatgattaaagagcagaagaaggctggagaaccaacacacagaaatgccagactgactctgagtgaaaaagagagtaaaagaaagtggaatgaaagcatactcagtaccttgtagtctaaggaaagcccagcctggccttggggagttctccagctaaagctg

SEQ ID NO: 238730 - DNA, 398 bp, Homo sapiens
ataatctgggaagtactacacaaactccagttatcttttttctcaattgaaacacattttttctgacttctaaaggtctcttagaaaagaaatcataacttctacagaatgagggagtttttattgatcttacttataaaaagaaagatccagcactatcttcaaactctatgacaagatgtaaacgtctaattttcttcattctctagtcatttcacagttgcctaaatcaggtaaaggtgacttctttcccaaaaccaatcatagcctgtttatctgtgtataattttatgttggggctgtttttttttcataaatttggttgattttggtggtgtagatgcaattgacagtttctagagagcatgcataatgtctattattttcattttatttcc

SEQ ID NO: 238731 - DNA, 235 bp, Homo sapiens
ggattataggcgtgagccagtgtgcccagccagatatgtattttaaaaatattttcttccagtccatggtttgtcttttccttaacaatgtctttcaaggagcagaagcttttaattttgatgacattcaatttatctttatggatagtttttttgatgtcatttcattgtatgtgtttttcaacttttctctgggtttgaaatcttttataataaaaagttgagagaaaaaggc

SEQ ID NO: 238732 - DNA, 382 bp, Homo sapiens
ggctgaaaaccaatatgtaaacttagtatcacagtcctaaagtatacagttgcttggcagaagttaaaaaacaatgggaagatcaagttccacaagggcttattttgactttgtaacatatgtgtacaaatccttatttatcctctggcagcaagaaaagaacgttctattgaatcacagaaaaaagaaaatgttattccatggtctttggggcatgggaatttttgcaattttccttccctaggtattctagtttctgaaacaatagaaaactaggcagcacttcagtatcctgtgttcagctgcaactggaagttatttttctgaagggctgtttctctctctctcgtttctctgtatgaatatatcttctatattttaa

SEQ ID NO: 238733 - DNA, 548 bp, Homo sapiens
cagcacccctttgtccagcatatgcacgctatagacacttcccatttgttagtcacttagtagccatttccgttatcagatcaactatcatggtatggcagcacttgtgtccatatggcccttattttacttaataatggcttcaaaatgtaagactagtgatgctggcatttcagatatacccaagagaagcttcctttaagtgaaaaggtgaagggtctagatttactagggaaggaaaaaaaatagttgctaagatctatggtaagaatgaatcttctttctgtgaaattgtgaggaagaaaaataattcatgctcgttttgctctcaaacctcaaagtgcaaaagttagggccacagtgtatgagaaatgcttagttaagaccaaagaggcataaaatttgggggtggaagatatgaagagaaacatattctgattgatggcagtcaggttcagtactatctgaggtttcagacatccactggaggtcttggaacatatgcccctcaaataaaggagggactactgtatatgttaataaaatga

SEQ ID NO: 238734 - DNA, 255 bp, Homo sapiens
gacagttactttctggagagattaagtagacagcttctggactttgggatactaggcacccctgaggcaaagcatgagacaccataatgaaaattggggactgactgattcccccatccctttctggtgcctgactgacaaataggtttatcttccaaagatagaagtgtggaagatttcttaacgaggaagaggttgctggaaagaagaaacatttgagggatgagatgatcctttaaaaattataaccatgat

SEQ ID NO: 238735 - DNA, 393 bp, Homo sapiens
acacacacacacacacacacacacacacacacaaacacacacacgcaacatttagagtaaccacaaagctatgcaaagagatcttttcaaaaacagtgcaaagtggaattcttaaaaatgttcacaggaaggcagaaaaagaaaacagaaataaaaaacagagaacaaacagaaagcaaaaaaccaaaatggcagacttaagtgctaacaggtcaataataacatcaaatataaatggtttaaatataccaattgaaggacagagattggtgagttaattttccaaaaaagacccaactatatcctatctggaagaaattcacttcaaatataaagatataggcaatgatagaggcaggttgaaattaaaaaatgataaaacatatataatcc

SEQ ID NO: 238736 - DNA, 486 bp, Homo sapiens
tgagaaagatataaatatccaggtacaggaaggtcttttaacaccgaacagattcaacccccaaataagactacctgaaggcatgtagtaatcagatgctaaaggccaaggacaaagagaaagtccttaaaacaccaagagataagaagcaaatagcatataacagagctccaaatcgtctggcaacagccttctcaacaggccagtaggtattggaacattttaaaaaaaaactgtcatctaggaatattgtgtccagcaaaattgtcattcaaatatgaaggaaagatatagtctttcccagacacaaaagctgacccatcctgcaagaaaagctaaggggagttcttcagtctgaaagaaaacactaatgtgcagaagaaaacatttcaaggtgtaaaatacactggtagaattaatactatgtatataattttttagtatagagcaattttatagtatagagaatagagcaattaggcaaaa

SEQ ID NO: 238737 - DNA, 6017 bp, Homo sapiens
  misc_feature (1110)..(1110): n is a, c, g, or t
  misc_feature (1689)..(1689): n is a, c, g, or t
  misc_feature (2686)..(2686): n is a, c, g, or t
  misc_feature (3447)..(3447): n is a, c, g, or t
  misc_feature (3847)..(3847): n is a, c, g, or t
  misc_feature (5376)..(5376): n is a, c, g, or t
tttaatgggaaactccccccgcacacacacacactttttttttgaggcacagtctcactatgttgtccagactggttttgaactcctgggctcaagagatcctcccacaccagcctccccagtagctgggactacaggcatgacccactgcacccagctaaatttttcaattttaaaatgttggcaactcacttaaatgtaagacaaataaacacatctgtaggctggcagtgctgcccacactgcccagactaggggttagggggtctgtatgggccatcaccaggctgctaaccacagcaaccaatatgtgccaagcctgactacacgtaccttctcattccaccctcctggcagcctcacatctgctttacaggtggggaactgaggctctaagagactaagaaaattacccaaggccactgcagctagccaggggcaggtatgggagtcagagctgggtgcagctgactacaaaccctgtgctcaggatgacaccctctaggagcctcgacctctctcccagttctcttctccctccactcaggcaaatgagctctgccttcacagggcaccaggctggaacatatgtctggaggccaggggcggtggctcacgcctgtaatcctagcactttgggaggccaagatgggaggatcattgaggtcaggagttcaagaccatcctggccaacatgatgaaaccccgtctctactgaaaatacaaaaactagctgggcatggtggctcatgcctgtaatcccagctacttgggaggctgaggcaggagaatcacttgaacccaggaggcagaggttgcagtgagctgagatcgcgccattgcattcaagcctgggtgacacagtgaggctctgtctcaaaaaaaaaaaaaaaaaagaaggaacttctgtctggggtgtgcctagcagtcattcacaccctcactgaaatctcagctccctgggaaaggatgtcgtgttaaagggagaggaaagaacagacagcgtgggagtctggggtctgagctgggccagccatggaggtgatggggcccccgacagccagaggccagatgcagcttgaggctttgtcccgtaccacgcctgttgtnctgtggggtgtactttgccatgcataccttgctcgcgtgctgcgggcattggctgtcccagcttggccccactcttgcaaagtcagcttgtgccaggtaagcaggaaaaagccgatggcttatctgattcccggcaaggcagaagcaggctgggaggtgcgtgtgtgtacattagcatgtgtttcagcgtatccagaccagcttccgccaggagctaggaccaccttgggcaggtacatggtgacccatttgacctgcagattcttaggaaactttttggaaaccatatgcccacttgcagtgagacacagtggttaggagcatggagccagttggcctgggttgaacagtttattagctgtgtggcctggggcaaattacgccctgggactctcacccgcaaaccagagataataatagtacctacctcatggggctgttaggcaaattaaatgaggtcagataaatgcaaagtgcttagaatggcgcttgatgtgtaagaagggctcgacaaggttctctattactatcattatctccagcccaggcccaggaatgagcttccactctagtcaggangggtgaagcccttcctggcttagcaccacccttccatcaccatgacaacgcacatctccttgtgggagtgggggcagcatcaggagaactggaagccaggagctggctgtgcaccttatctgacctgcttctagaggctcctgggcacctccaggacttaagggggtagactaggacttatggcaccccaaatgtgctggataaccctgactggagcatggcaccgaagcttcttgactccaaagccacagactggggagaaccccggaattcctgaaaatgtggagggccttagctttaccctctgattcgaccccagtccaaagggaacctacaggatgctccgaggggttgggaattggtgggtcacactccccaaggactttttatactgcgtctgaatggtgtttgcatttttttgcaaattggttgctacctttaaaactcaggaaatggcacataaaaaattcaggtatctggcttttctttaaagtgccagaagatcaagccacggtggttggcattcctgctggggcaaaaatgcagctgcccttgggccaggccatcactctgcagttcttacctccccttccccttgccctaccaccctgcaccaggcctgcaggcttaccatgtgtaaccacctctctgaactacaagggaatccagaaattggggtgggcattatcctggccctcggtgcccttgacctgagatcagtgcagcccatcccaaattcctttttccaggactcccacatacacccacttagaacacatctgtgagccagatttacttcttagcacactaataaaacaatgagcagtcacctaggttcaggtaatgggttgtacgagctcccagacctttctagaacaacttaagcctcagtcattcctaaaagctgggggtggaggatggggtggggaagaaaccatgccaagcagtgaaaggactgataatagaatattgcagacacgcagcctttccttcccantcaaaatggaagcatttgaaggaaggctctggctcaagccaggggggccttgctctaatgagtcacctactgcgtcgccgctggtcagcctgatgttgttaggatggaaatgagctggggttgccagatttggcaaatacaaaaacaggacacccaggagcattgatgttttggatgaacaatggaaaagattttggcgtaaatatgtcctgtggaatatttgggacacacatattaaaaacgtatttgaaatttggccaggcgctgtggctcacacctgtaatctcagcactttgggagaccaaggctggtggatcacctgaggccaggagttcgatatcagcctggccaacatggtgaaaccgcatctctacaaaaaatacaaaaattagccgggtggggtggcacatgcctgtcatcccagctacttgggaggctgaggcaggagatcacttgaacccaggggcagaggctgcagtgagccgagatcgcgccactgcactctagcctgggcaacaaagagagactccatctgaaaaaacaaaacaaaacaaaacaaaatctgaaattcacatgccactgggcatcctgtgttttatctggcaatcctgagaagagtcttagaatgcttgaaaagagctttaaacatcatttcttaaaatgccaagcctccctttggtggcactccccttatagctgagtgtaagctctggatgacaggcacgtgggtgccaggaggccaggacctaggagcgggaccngactctctgcagccctctcctctcactctcttttcccttccagtcacagtcactgcagcagacatcatggctgtggatgtggcagaataccatctgagcgggtccccggggagaccctcatcctgctgcaccctggggatgagcctgtgactcggaatccactcaccgaggccttctgtggagactgtcaagtagccaagggaaaataagcccaggaaggtcaaggttagattcatggggcgttaaactcagagaccacccagtccagaggcagaggttatagtgagctgagatcacaccactgcactccagctttccagcctgggcaacagagtgagactccgtctcatcagaaaaaaaaagaggccacccagtccagggccatggctcccaccttgtnaccctttgcctcagcagggagatgggagctggctgggagatgcctcgagactccagacatactcctgcagccctccccatggacagcggatggggtcagagaagaaacataccagccgtcttttctccctttgttcctctcctcattcacagatgggagaagtgaggcttagagagtaacggggtcaggatgtgcactcaggtctcctgactcccagccccgtgctccccatcactctagcccctaccctaacgcagcccctggggagcccagggctgatctgaagggtgtgcccgggaatcacctttcccatcactttttcccaaaagtgagccagggagccgcacttttcaccctcaggctcacaggtcttgcccccctgcccccaccctgccccctacccgtatggccttgggcaagtggtgaaaccggaacttctacttacttatctgtaaaatgcaaaagatgaggcttgcctcagggctgttgggaagatttagagagctgatggttgtgcagcgcccagcatggtgcaaacgccactcttccagtggcagcgctttgcacacgctgttcccctgtcctggagtccttccctgcctctgccactgcctgcctgagtcctggcacctggtggtggggttataggtgcagatctggacccagtctgtctggaggcagatctctcctccgtccctcagcttcctcatctgtaaaatggggaaaacaatagaaccaacctcacaggattgccttgactccatgggttaatatacgtgacgtgcttagaacagggcctggcaaatcataaatagtaagtgcttcataaggggagctattcctcctcctcctcatcccactcgtttctggtcttcgcctagaccccacttccaatatcaccccaagactggtattccataaaatcaataaatgaatgcgaattgtcatttcatgtcaccttcctggggcttttccttctgtgcccccagccctgcccccttttctgccaccccgggcatggctccacccttcagctcccaaagagcctcaggcacaggggagcctgaacctgctttgccacctggctgtgcccacagcctgcttagagaccttgggcctctggtcctgccctctagccaacccccggctactacccagccctgctgtgaccctgttcccaggactcccagaatacaccaagccttagcagggcggggcccgggagcctccatggatctctttgtcatgggcatacgtagcccacaggtgacattctgtcaacagcggcaggaggaaggagggtttcttcacagcccttccaccgtcgttacccattccttctgtttttccctggtctgcccagcccgtgactatgtgctgcgtgacttttgcgcacgtcacacgattgcgtgattagaccatgttggggattcatttttttcctctcttaacaatgccagaaatgtgtctctgcattgccacagtgccatcctaatgacctcaattgtcattctcgaaggccagtgacntttcctcccaagacagagccaccagccctcactggccccctcggtgggaccttcaggctgtctccagatttctgctgttataaatacagcctcgatgactcatcccagacacaaaacctgttgggattttccctttagaataaattcaccagagtgggaccgctggatgggggatgttcttgtcatccgcattttccaaacggagtatgaagcccagaggtgctgggtgacttgcctggaagccaaggtaccggtgcccggctctgccgtttctcaccgctggccttgagtggagaaacagatgtgctcattacccttccttggtctcagttttcctcttttagaaagtagggccttggccaggggcggtggctcacgcctgtaatcccagcactttgggaggccaaggcgagtggatcacctgaggtcaggagtttgagaccagcctggccaatatggtggaaccccatctctactagaaatacaaaaaattagctgggcatggtggtggacgcctgtaattccagctactcgggaggctgaggcaggagaatcgcttgaaccggggaggcagaggttgcagtgagccgaaatcgtgccattgcactccagcctgggcaacaagagtgaaactccatctc

SEQ ID NO: 238738 - DNA, 404 bp, Homo sapiens
atgactcaagagcaagtacttaatttggaaggtgaaggaactgctggtagctctctgtacagcagctgtataaataccgctcaggcagacttcttggcaaatacagcaaggctgctacaaacagccaaaaacaaagcggaattgttctaggaaataaattacttgaacagcggaggagactttgccctatttgatatggaaagcacagccatgggtatggatatcagagcctcagagttaggagctgctccaagccttcttccctagatgcctcacacccctcctggacaacttccaagtatcacagctctggatggccactcatcttctgtgtacagggtccggcccagctgaaacccaaatcatgcacatgtactttatataaacctaatttatttatgaaa

SEQ ID NO: 238739 - DNA, 264 bp, Homo sapiens
tcatctaaacccaaagtaagcagaggggaggaactagtaaagattagagtggatataaatgaaatagaaaatcaggagagaaaaccaacaaacccaaaagttgtttccttaaaaagataaacagccaatggcaaacctttatctagactgttcaagaaaaacatgatcaaattactaaatcaggaatgagagtggggacattaataatgaccttacagaaagaaaaaggattatgagaaaatataacaatgctaaaaaacatag

SEQ ID NO: 238740 - DNA, 201 bp, Homo sapiens
aagaaattgatgctgcaggagagagggaataattgccgaagcaaagatcttgaggcctgcttccactgagggactggaggctccttgagcaaaattatctacctcttcacctttggatctttcacagttcccagttcggtgtactacagattgtacttgctaaataaaaaatcattgtcatggtttacctaaatgcctgaa

SEQ ID NO: 238741 - DNA, 148 bp, Homo sapiens
aaaaaaaaagaagttttaagtgatttttgttaatattactctactttaccaaagtgaagtccagtttcttttcacagagctgtaaatactcagataattagtcaattcagacagaatgaacaaaaaatgctcataatccttcccatcc

SEQ ID NO: 238742 - DNA, 758 bp, Homo sapiens
ctctgttgcccaggctggagtacagtggtgcgatctcagctcactgcaagctctgcctcccaggttcatgccattatcctgcctcagcctcccaagtagctgggactacaggcgcctgtgaccacgcccggctaattttttgtatttttagtacaggcggggtttcaccgtgttatgtaggatggtctcaatctcctgacctcgtgatccacccgcctcggcctcccaaagtgctgggattacaggtgtgagccaccacaccaagccggttgggtgtacttttcaggtgttctcagagcagcctaagctttccctaagcgtcacctcactatacacttggccgcaacctcccaatccacttactaaaatgtaagctctgtgaaggcaggaacattttctgttgcaggaaggagccctgggagctggaggaaaccagaaatggccctgccttgaaggagatccctgaaggcaaggaagccaagagagagattaaatgaagccaagaaagaagctgggggtgcaggtccagatacaattaactacatacaagttcccagggtacacagaggatgtacatggcagggcggggagtgaggtcagcagtcaaggagtagtgcaaagatcagactgaagtcaggcattgagacaagagagctccatttctaactcaccatcactgttacacagagatactcttttaggcaggttcacacaggtgggacaatatctccataccttgtaaaaatgcaccaatttcc

SEQ ID NO: 238743 - DNA, 3106 bp, Homo sapiens
  misc_feature (920)..(920): n is a, c, g, or t
  misc_feature (944)..(944): n is a, c, g, or t
  misc_feature (1045)..(1045): n is a, c, g, or t
  misc_feature (1107)..(1107): n is a, c, g, or t
  misc_feature (1130)..(1130): n is a, c, g, or t
  misc_feature (1201)..(1201): n is a, c, g, or t
  misc_feature (1211)..(1211): n is a, c, g, or t
  misc_feature (1369)..(1369): n is a, c, g, or t
  misc_feature (1429)..(1429): n is a, c, g, or t
gagttcgacgttctctggaggcttgggagatgcagccagggcgcagagttggcagtggctgcagacatctcttttcaatgtggacctcctgccacagccacgagattcaaggattttctaggaaaatgaacgccagtggatgtgtggaattttttcacaaagtaagtgacgggggtccctttgcacttctcatgcccccatggttaattgtgtgtgtgtgctggaagtggaggagggcggtgggtggtgcagctgtttgaggactcacccttcttcggaaggctggggtcaatggggtgctgtttccccgagtcagttgaaacgcccatggctaaagcctgtggatcatctcacccctgcatttcctatttggctctcactttggtcgaaagacagcggagcgcagaaaatctgtcataattgtgaaagtaggacctgtcatcctctaagggtcattcttcctggcccaccgggcttgttgacacctggagttgggtagcagagagagggatgtcgggaccgtgaattaacagtggccaccacttcatggtgaatggcatccagacaacaccttcacctgtctggggaagaacataggctaggcctgggagaggctgtctactgaagtccctgcaggggtccaggctggactatacccctccagcttggcgagagagccaaggaccagcaagggaagtgatgtacgctgagaaccgtccgggcgcccagcacgggtcagggcctttggcttacaggctgtgtttatttctgagcagccctatgcagttggcattagcatcctaccgttcccactagccagctgggactcaaaccgattaagtaactgtctacctgcttcctgtgttctgtgtctgttggtgttgattaaaaaatataaaaggccaggttcatgcctgtantcccagcactttgggtggccgagncaggaagatcacttgagcccaggagttcaagaccagcctggggcaacatagcgagacctgcatctctatttttttttttttttttttgagacagagtctcnctctgttgcccaggctggagtgcagtggtgcgatctcaactgactgcaacctccgcctcccnggttcaagcaattatctgcctcngcctcctgagtagctgggattacaggcgcccgcgccacgcctggctaatttttgtatttttattagagacngggtttcacngtgttggccaggctggtcttgtactcctgaccttgtgatccacctgccttggcctcccaaattgctgggattccaggcatgagccactgtacccggcctcaaaatattttttaacagaagtagcagggtgtggtgatgcctgtagttgcagctactcnggaggctgaggtgggaggatcacttgagactgggaggttgaggctacagtgagctgtgancgcgctactgcactccagcctggatgacagagtgagaccctgtctcaaagcaaacacacacacaaaaagtaaaatccctgtgattatatttttgctagtacttgctaagctgtagctgcttcaatttgagagcagagcctgggctgcccaaagaaagtcctgaccccttaactcagaactccgtcagcagaggaattgggttctctgggctgttctctactcaggcacacccttgctgggcctcccatgccccagggcagtccaggaaatagtgtgtgcatggtggaggggaaggaccttgactgagaccagacagggttggaatcttgggtctcctacttcctgtctctgtgaccttggccaaccatttaacctcacttgaggaaattgagcctcagtttcctcatctgtaaagtggggttgttatgacgataagacaggataaaacacatgaaacagccagcattttaccacttttaacctacagaacggcagtttgacatggctcactcaagtatgtccatcatggagatgcctcagtgaggtgctgggacatggtagactcagtaatgttcccttcctctcctccagccctcagtgttgaaggctttgtcatcctgaatggcgacgaatgggaagtgagctctgaaactgaaaccaccatttggggacaaaagctggcattgtagttgtggctctctgggaaggtctcatctgtcttctcggggctgttccctaaagctgtcattacgctggctttgcggcaggggtgcagcagcagtgggtggtgatgcggctgctcttgagtggcctggtggggtcatttcagtttcaaggccttggagagtgtgcttagcaggtggggcctaagatttgcatttcagctgcccaggtagtcaagaagcggtatagcaaagcggctgtgagcccattctctggagtcctgctggctgggtttgaaccccaggtctgcctcttgcctgctggtgcactcagccaagttacttcatctgtctgcctcgatttcttcatctctagtggtttctacctcagagactctgggagccacaaacaggatcccacttcttgaacaatgcctagaacaaataagcaatttctatgctgtagagagtgtttgcttacttaaaataatgcttattaaaaattggcgggtgcagtggctcatacctttaatcccagcactttgggaagccaaggtaggaggatcatttgagcccaggagttcaagaccagcttgggcaagatagtgagaccccatctctcagagagagagagagggagggagggaggaaggggagagagagagagagagagagagagagagagagaagatagaaagaaagaaaaagaaagaaaatcaagatgagctgtgattaataagtagggcctgattattggaacttggcattggatataattaagttgatcagaatttctcatgactggagagtcagacagtctgcccattgtgctgtgtgaccttgggcaaataacttaacttctctgagcctcattcctgtgtaaaatgggtgtaggaagtgaggaattaggtttataagaagggttgtgaggaggaagtcagaggctgcttctgggagggcctaatcctggtgcctgggtctcccgtaggagctgctgtcgtgagtgtgtggctaa

SEQ ID NO: 238744 - DNA, 185 bp, Homo sapiens
taaagagctgggattacaggtgtgagccactgggcctggctggcattctcatagatggaaaagttaacattgtacagcccttattatttatttgttttttaatgtagttccaatatggtgggagaaaacgtaaggggaagaaacaatattgggaatgtggtataagggggaacaacaacaacaac

SEQ ID NO: 238745 - DNA, 1161 bp, Homo sapiens
cacttccacatgtctctcctacctggaacgaaccaatatacatcttccatgtattgattgatgccttatgtctccctaaaatatgtcacaccaagttgttacccaaccactttgggcccatgttctcaggatctcctaaatgctgtgtcatgggccattggccactcatatttggctcagaataaatctcttcaaatattttacatagtataactctttttcattgacagagacttactagttcctgatccttaaagaaatttctctccaatcattagatgaccattaagctaacaaagcagagacgtcagtggctacacaagacaaagaatacagacttataacacaattacatcagaaaagttactaaaaaacaaaaataccaacaaactgtaaaaacaacataacctgaggagtagagaaagaatctgattttttaaagttgccacattgcatttttaatgtccagttttaacagaaaattacaagacatgtaaggaaacaagaaaatatgtctcatacacaggacaaaatcgattaacagaaactgttccagaggaagcccagacataaaacttattagaaaaagtctttaaatttagttcaaagggttaaagaaaaccatgtctaaataactaaaggaaaggatgaaaatggtgtttatctaacacagaatatcagtaaagagatagaaatgataaaaaaaaaaaagaatcaaataggaatgctagagttaaaaagataactaaaaggaaaattttaagaggagctcaacagcagatttgatcaggtggaagatataatcagcaatcttgaacattgttcatttgagattttccagactgagaaacagaaagaaaaaaaattatgaagaaaaatgaacagaacctcagaaacctgtagatctctatgaaacatactaacatatacataatggggagtctcagaaggagcagaaaaagagaaaggtgataaaaatatgtgaagaattaatgtctgtaaacttaacaaattgtatgtaaaaccgtcttaaactggcactttcccagaaaacacaacacacacagagaaaagacaccggttgagccgcatactgggcccctcttcaaaagcgtgctggacacaccgcgatttggggaccgcgcccacataggtacaaca

SEQ ID NO: 238746 - DNA, 442 bp, Homo sapiens
aaatcttgcagctgctcactctttgggtccacgccacctttatgagctgtaacaccgcaaaggtctgcagcttcactccttgaagtcagtgagaccaagaacccaccaattctggacgcaggctgacagtgaagggttgaaaacagatatcccatgtaaatagccctcaaaagaaagcagtagtggccattcttatatagcacaaattagaatttaagtcaaaaactgtcccaggagacaaagtcattacataatgataaaagggtgaattcaacaggaagataacagcaattgtaaatacatatgtacctactattagactacctaagtatatagaacaaatatcaaaatacctgaaaggagaaatggacagcaatagtgtaatggtagaataattcagtaccccactttcaataaaaaatagaaaatccagatagaaaat

SEQ ID NO: 238747 - DNA, 3071 bp, Homo sapiens
  misc_feature (1834)..(1834): n is a, c, g, or t
tttgtcacttccagtgccctgcccagccctacagaaaatacgtgattatttaagggtgaagaagccaaagctgggagagttttagtcacctatctaggggaaagtgtgaagatttcaaagcccagggtccttcacggagccacacggctctccttggcacttaatcttcaagctctcctcagcccacacttgacccttaacaggggagacaaaggcagactccaggtaagttgtcagggttagcataagcagctcagggcaactggtgggtagggagctgtacagcccagggattgcagcctcttgttttgcatttcctggagtcaaggctaaactcatggtctcctcaggggtcaaagcaggcctgactttcagtgtcatcttcaggacacacacacgcacgcgcacacacacacacacacacacacacacacacacacacacacaggattatacatgcaactaaccaatcacacagagctggaccatctagcctggtagaaggtctgccgagttctgcgggtcaccatgaaccaggcttgtgagccctcttagtcatatgtaaagggctgtgtttgagacccggtagcccacaaagctcttttctgcccaagccttggtttttccgtatgttagtggggacagattggaactaaacagaccttgagtcttttcagggtcagtctcaactctcttagatgctagagggatataggcagggctagcacagaacagaagcaagaaatagtcaaaatgaatattttggactgcatagactcagaatgtgctttacttgggcacccagggcttctcagacttcagttgttttcattccaccattcccttcctccccctcctcatcaccagcagcagcagcagcagcagcagcagcagcagcagcagcagcagcagggcgcacagctctggggggaatcaggcactgggctgtggtggtaccgaggttacccctgaagtcctcacgcctccctgtgaggttgatagattgaaactaccttattttgagtatgaggaaatagaggcacagtgaggtccagagaccgcccaagagcacacacctaggaagctgagtgccaggtttcaaaaccaggtctccctgggcagggcagggcatggctgtgtttgaaccactcaggtctcctttgtcatagttgacagcactagttacttgataatgtctttttaaaaattaatttacttaaaaaaacttgagtgctattctaagcaatgtgacatcgtggatttcttgggctagttatatattttatgatgttcatcaatgtacaattatgtaaaagttgaatgatcaagttctgcctaagaccatctcatgtaccagcagcgaggttagattcaaatagaaaaaagggatctggtccaagatttgacacggattcactgtctgtgggaccccttgctagggcacttgatcatctgggtcattaaatctgggggccaggcacattctcattcattcgagacgagcccatcctcttccagagcatgggggcttcttgaaaccctgtcctttccaggcacacactgaggtggggagagggaccctggagtcagaccacctggctttgaatcccagctgtctcctctgagctgtatggcctaaggcaagtcatttaagcttcttgtacctcagattctccaactgcaaaacggagatgataataggcagaagcctcgtggggctgtgagaatcgagtctgcatatgtaaagcactgggcactgtgtctggaggctgtgagcaccaagcggctctaatcattcccgttttacaaaggaggacagagagactaaggaganaaactctttctcatctctcgttgtgtgtcagtgcaggggcaggactaaaagctggtctgtggtctgcaagctttaggggttacagagtccccaggaactcctaggaaattcagctggcggctaccttccaccatccccaggttctgattcgtgggcctggggtgggacccaggaatctgcatttcagttacttcccaggggattctgatgcaggtggtgcgaagaccacttactgagaagctgcaagctgggtttgagaggtccctacctccttcttccttccccgagccccacccgcccccttctttccactgggcaactatgtaaacagcattatttctacccttgcacggacagaaaggggtctgtgctgctgcctctgttggtgcctcttcaggtcagggtgataagaagagaaggaacaaagaggggaaaaagatcacagcagagagacagagtgctcattttaaggtggaaatatgccatttcctgaccacagcgggacttccctaggttgtattaaaaaatcctgtactgcccatgtctggtacagaagtatgtatagaattgtagagaaaatgaacactttgggatgatttgaaagcaaattacagaactaccagtttcaccactttaaaacttttggggaatggccatttagatataacctggtgcagtcaggtaaccccaaacagagtttttaaaagtttccacacccttctttgctggtgcctgccctgcatcatgctgtcgctgtgaggagggacttgttccagatctctggggcagcccgagtgactcacctaaagtcacacagcttccacggaacattactggaagctcagtgagggccttctgcctctgaaacttgctctatttccctcaagtcctgcttccttttgtaggtttaagacattagttcctgagaaattgactaatcaagaatattctggaaatcttagtttagcaaaacaaaaaacaaaaaaaaaaaacaaaaaaacagatgggtaaagccatgttccaaggcattcactgtcctggcttgggagaagaatgatctcccaaaagctcagaaaacatggttgtctaaaagtgtccaggctggcctctgggtgatccttgtgcacggccagggtctgtggagggtctgtggtgcctctctggcactgaagctaatgtgggagctggctctaattgcacattggcctaaagcaaccagcaagacctgcaccgtctc

SEQ ID NO: 238748 - DNA, 3050 bp, Homo sapiens
  misc_feature (1813)..(1813): n is a, c, g, or t
tttgtcacttccagtgccctgcccagccctacagaaaatacgtgattatttaagggtgaagaagccaaagctgggagagttttagtcacctatctaggggaaagtgtgaagatttcaaagcccagggtccttcacggagccacacggctctccttggcacttaatcttcaagctctcctcagcccacacttgacccttaacaggggagacaaaggcagactccaggtaagttgtcagggttagcataagcagctcagggcaactggtgggtagggagctgtacagcccagggattgcagcctcttgttttgcatttcctggagtcaaggctaaactcatggtctcctcaggggtcaaagcaggcctgactttcagtgtcatcttcaggacacacacacgcacgcgcacacacacacacacacacacacacacacacacacacacacaggattatacatgcaactaaccaatcacacagagctggaccatctagcctggtagaaggtctgccgagttctgcgggtcaccatgaaccaggcttgtgagccctcttagtcatatgtaaagggctgtgtttgagacccggtagcccacaaagctcttttctgcccaagccttggtttttccgtatgttagtggggacagattggaactaaacagaccttgagtcttttcagggtcagtctcaactctcttagatgctagagggatataggcagggctagcacagaacagaagcaagaaatagtcaaaatgaatattttggactgcatagactcagaatgtgctttacttgggcacccagggcttctcagacttcagttgttttcattccaccattcccttcctccccctcctcatcaccagcagcagcagcagcagcagcagcagggcgcacagctctggggggaatcaggcactgggctgtggtggtaccgaggttacccctgaagtcctcacgcctccctgtgaggttgatagattgaaactaccttattttgagtatgaggaaatagaggcacagtgaggtccagagaccgcccaagagcacacacctaggaagctgagtgccaggtttcaaaaccaggtctccctgggcagggcagggcatggctgtgtttgaaccactcaggtctcctttgtcatagttgacagcactagttacttgataatgtctttttaaaaattaatttacttaaaaaaacttgagtgctattctaagcaatgtgacatcgtggatttcttgggctagttatatattttatgatgttcatcaatgtacaattatgtaaaagttgaatgatcaagttctgcctaagaccatctcatgtaccagcagcgaggttagattcaaatagaaaaaagggatctggtccaagatttgacacggattcactgtctgtgggaccccttgctagggcacttgatcatctgggtcattaaatctgggggccaggcacattctcattcattcgagacgagcccatcctcttccagagcatgggggcttcttgaaaccctgtcctttccaggcacacactgaggtggggagagggaccctggagtcagaccacctggctttgaatcccagctgtctcctctgagctgtatggcctaaggcaagtcatttaagcttcttgtacctcagattctccaactgcaaaacggagatgataataggcagaagcctcgtggggctgtgagaatcgagtctgcatatgtaaagcactgggcactgtgtctggaggctgtgagcaccaagcggctctaatcattcccgttttacaaaggaggacagagagactaaggaganaaactctttctcatctctcgttgtgtgtcagtgcaggggcaggactaaaagctggtctgtggtctgcaagctttaggggttacagagtccccaggaactcctaggaaattcagctggcggctaccttccaccatccccaggttctgattcgtgggcctggggtgggacccaggaatctgcatttcagttacttcccaggggattctgatgcaggtggtgcgaagaccacttactgagaagctgcaagctgggtttgagaggtccctacctccttcttccttccccgagccccacccgcccccttctttccactgggcaactatgtaaacagcattatttctacccttgcacggacagaaaggggtctgtgctgctgcctctgttggtgcctcttcaggtcagggtgataagaagagaaggaacaaagaggggaaaaagatcacagcagagagacagagtgctcattttaaggtggaaatatgccatttcctgaccacagcgggacttccctaggttgtattaaaaaatcctgtactgcccatgtctggtacagaagtatgtatagaattgtagagaaaatgaacactttgggatgatttgaaagcaaattacagaactaccagtttcaccactttaaaacttttggggaatggccatttagatataacctggtgcagtcaggtaaccccaaacagagtttttaaaagtttccacacccttctttgctggtgcctgccctgcatcatgctgtcgctgtgaggagggacttgttccagatctctggggcagcccgagtgactcacctaaagtcacacagcttccacggaacattactggaagctcagtgagggccttctgcctctgaaacttgctctatttccctcaagtcctgcttccttttgtaggtttaagacattagttcctgagaaattgactaatcaagaatattctggaaatcttagtttagcaaaacaaaaaacaaaaaaaaaaaacaaaaaaacagatgggtaaagccatgttccaaggcattcactgtcctggcttgggagaagaatgatctcccaaaagctcagaaaacatggttgtctaaaagtgtccaggctggcctctgggtgatccttgtgcacggccagggtctgtggagggtctgtggtgcctctctggcactgaagctaatgtgggagctggctctaattgcacattggcctaaagcaaccagcaagacctgcaccgtctc

SEQ ID NO: 238749 - DNA, 303 bp, Homo sapiens
catttcattttaattgatacctctaaaaatcatctcttcagcccgattgtattttccagacctgacctttgagtcagaagagagccaatttgcaaataaaggggtgtctcatggctgcctgctgagggactgttcataagcctttttgtgagggtgattcaatagctccattctggtacagtgagtcctgcccgttttagccatttgcctataactgttttactgttctgtgaataatttttatttatcttaatattattttcatgcataataactataataaacaaccctgtcagtgcctcc

SEQ ID NO: 238750 - DNA, 413 bp, Homo sapiens
attaagagaggccagtgtggtgctcttaaaaatagtttcacacacaggactaaagaaagcagaggctgaactctggatctcctgaggagctcactcacagccaccatccaccaatgttggccgtgccgcacactgagataaactctttaactaagttatcttgttcaagcctcatacatcagctttgcgaggcaaactctgtttttattccttttggcagatgagaaaattgaggcttagagagcttgtctgacattcacaaggttacagggccaggacctaaatgcagaactatttggccaccttactcctccccatctatgcaacttagctgagtagtagtttctctagaccagtcacctcactcatcactatccctgattggcactgtagtgattacaaattgttttttg

SEQ ID NO: 238751 - DNA, 195 bp, Homo sapiens
caggcaatcaaggaaaacttgccaagaaatatgagtgaataaatgattttgaaagtttcattgagcaggaacatgaaaaggatgatttggggatagctggaaggatagttacttgcatgaataatatttattcaccgtcagtgtgatatttctcaatagaaagattgtatttaaaatgtacaactacaataacag

SEQ ID NO: 238752 - DNA, 482 bp, Homo sapiens
aaagggaagtagagagtgttccaaggaggaatagcgtgtgtgaagaaatgatgatgtgtctgtgaatctgtactgaagtgtaggtgtggggacatgaaattggagcggtcagtagggatcagatctcgagggtcttgcaggccaccctaacggtcttgattttatgctgcagaaaatgaggacttgctgaaagattttaaccaaaggaatgtttggagatatttgcctttcaggggaaaaattaccctgacaacagtggggagtatggcatggggtgagttgcttctgggccaggaaaacaaagtgaagagaccattgtaaatataccatgtgattcagaatgagaattccaactagggcactagcaataagaatggagagaaaaggcaggagaatcgcttgaacctgggaggcggaggttgcagtgagctaagattgtgccactgcactccagcctgggtgacagagcaggactcatctca

SEQ ID NO: 238753 - DNA, 261 bp, Homo sapiens
tagaaatcagttacaagaggtactttgaaaactgtacaaatacatggaaattaaacatgcttctgaacacccactgggtcaatgaaaaacttaagaaggaaattttttaaaattcttgaaacaaatgaaaatgaaaacacaacataccaaaccctatgggatacagcaaaagtagtactaagagggaagtttatagcaataaatacctacatcaaaaaagtagaaagatttcagataaacgatctaataatgcaccttaaa

SEQ ID NO: 238754 - DNA, 647 bp, Homo sapiens
ctgtctcctatggcagccccttctatccaatgcaagagctaacatccacctccttgtccccccactccctgcccgccgtccccagggccccccacctggcttctaacatcacctttaagagccctacacggtatccctgatgcctcagccactgggcagccctgcagcaacgtgcagaaaatgatgcaatctgcagaaacttctcaacttctcatttatatctaaaagcagactgttctcaaaaaaaatattttcaaagcctatcatgcagacaaagggggagtgcgtttgatgtgtaaagacctacaagtaaataagaccaacagcctaatagaaaaataggcaaattatttatacagacagttcacagaaaatacaaacgactctaaaacgtgtgacaagatgttcaacctcactcataagataaatgcaaattaacacaacaccgagcaaccatttttcaattaagagattggcaaagtttggaacattcctggtgggagagcaagttggtataaaccctactgagcaatatctaccaggatgcaggagccctttgatgcaacaattccactgccaagaatttctccggcatttatacccacacgagtggaaaccaatgtgcaaggaaagtcattgcagctttg

SEQ ID NO: 238755 - DNA, 828 bp, Homo sapiens
cactaatatcatggtgatctctttacctgagtacatatggatcttgcatcccttatatagctttgtaatattccttaatatgggtggactatattttaatagttctgtattgattctaatgttgcgctattaggcagtattgcagatacatccatgtgcatatatctttgtatgttggtgtttatatctgtagtgtagattcatagaagtaggatatagctcagttttaacacaaagccctaaatgttggcattataatctaagatattgacagccattgaaggttaattttaatttttaaaattaaaatagaagaaaacacatggagccaggtgtggtggctcacacctgtggtctcaactctttgggagactgagccaggaggattgtgtgaggccaggagttcaagggtgcagtttgatatgattgctcctgtgaattgctactgaactctagcctgggcaatgtagcgagaccctgtctctacaaaaagacaaacaaaaaaaaaaaagaagaaaaagaatgatttggccaggcatggtggctcactcctgtaatcccagcagtttgggaggccaaggtaggaggatcacctgaggtcaggagttcgagaccagcctgaccaacgtggtgaaaccccatctctactaaaaatacaaaaattagctgggtgtggtggtgggtgcctgtaatcccagctactcgggaggctgagacaggagaattggttgaacctggtaggcggaggttgcaggttgcagtgaactgagatcgtgccattgcgttccagccagggtgacaagtgaaactctgtctcaaaaaagagag

SEQ ID NO: 238756 - DNA, 331 bp, Homo sapiens
agtatttgttgcttatgtgtaattcatatttaactgggtatcctgtatttttacttgttaagtccggcaaccctagcccaggctttctcaggttttttttaacagggatcccaagctttttctattggtttgagagcctgctacacaaataatatgatcttaacaattgaatagttatgttaagagtgtagttactgcagttagactgccaaagttcaaatcactgctctactacttcttaggtgtgtggtcttgaataagttttttgacctctctaagcctcagtttcttcattaataaaatgagttgcatggcttatatgaaataatgc

SEQ ID NO: 238757 - DNA, 427 bp, Homo sapiens
ctaattgcagtgtcccttacaagagagaggcagagtgcaattacaaacacaaagaggagaagcttatgtgaagatggtgtttaaaaggccacaagccgaggagtgctagagcatgctggcagccaccagaagctggaagaagcaaggaatagattctccctcagagcctctggagggggaatggccctgctgacaccttgattttggtcttctggcctcagatctgtgacagaatgcattaccaccgaatttgtggtaaattcattacagcggccataggaaactaacacagccttatatcagaatttacttaaaatggatcatggacctaaatgtaaaacctgaaactgtgcaacttctagcagataacataaaggaaaaattttgtaaggctgggttaggcaaagatttcttgcatatgacacca

SEQ ID NO: 238758 - DNA, 504 bp, Homo sapiens
ggcacaaaggcccagctttcccatctaatgagacaacttccaccgaactcacaacaccgtaaaccttctagagaccaaggcaacgtgcacccagaaaatgtttggatcattctctgcctagactaatttagagggaagattctcagcgaatccagcccccaacccttgattgtctccggcaaggatgttaggtccccctgtgcttcaacatgtttggaacaagaaccaattcgtttgttcctaacgtgacacctggaggaggcagagtcgctgtggatgccacgccacctcgcagccgtgacagctaatgacgcctgcagtccccaccatggtccctgcctcatcctctgtgccgttgtcttgtgtgttccatttatatgaatggcaacaaaagtagaaaccaggaaagcaaaatggcttcagtgaggctgttttgttttgttttgtttttcttcttcaacctgggaaattcaggtcaataaaagtgtaacagaaagatgagaa

SEQ ID NO: 238759 - DNA, 379 bp, Homo sapiens
agcaggaaggctgtgtctcccttccccacactgtattccaaccagacagctcccttctattttatatgttgggctagtatgaaaaacaattctgctaggaaagctggggaaactaaggcctagagagaggcaagtgatatttgtttcatggcagggctgggctgagatcctgcttttctgggtctgtctttttgctcttttgggtctgatgcagttctcagcccaaagagtagaaatctgttgcttctggcctcagctgtgccccagcttactcagtgacctcttgcaagtcctgccctctctggtctcagtttcttcatctgaaccaggggtaccctggaacaagctgctctctgcaggatctgccacctgaaacctt

SEQ ID NO: 238760 - DNA, 423 bp, Homo sapiens
ggagatgagactagctgatccaggaggcaattatggattctggttaagagagctcaggctttgaagtcagactgtctggattaagatcctggctatgtttcctcttagtccatgacgttgaacaggttacctaatccaagctcggtaacaatcatagctcctaccgcctgttgtaaggattttaaaaaggatcatacatccttttgacccatggaaacaatgttttttctcttctagttacaaatttcagtaactctttttcctatacaaataggagatacagaggaaatcctctcagtgagaaattatcattcccttcctgcaccccctgtcagttcccattttgacagcattttgttattgtcattgatgacattattaatatagaagcaggaaaaaagctcaaatagatttctttcatcc

SEQ ID NO: 238761 - DNA, 574 bp, Homo sapiens
aggtacagttaacttacagtgtctcacttacatgcgctgctgaggtgaaggtgtttaaaatcaataagtgtaagtagtttccctggaagagagaagtaaaacgtaccaatcactcagtgctggaatatttttatgctaagcataatttccttctttagtagttagagcagttttttaaaaaaaaatagttaacacgatgcagaagtcaaacagcatgattctgtttccgtattttcctcactttttggtatgctgcggcacatttagaacatgatctgtctggaggttttattcacatggtggcctgcccttcagggagaacttgcttgccttctttctttggcagtttggatttgacctagccctgtggtatgtgcaagtaggaacatctacaaacggttaactctttaagtcttcctacgatttatgttcagttcattcacacacacacacacacacacagacacaaaagctttgattgtaattatgaacgtgaattaaaactgtttcaggccatcagatttatgtaaaagttaggcttgttttgttcattttaataaaagaatagtgaata

SEQ ID NO: 238762 - DNA, 859 bp, Homo sapiens
gtacagccggacaacaggccaatgcccccgactcttctccctgcacaatgctcctgctcctgtccctctatttctacctaactcccctgcccaatggcgggaggccccagacactgcaggcatggtgggggccaggaacctcgttggctggagcatgtttcctggtgatcctgaggcagcggggccaacaccccagacatctggagccttggtggtccagaccaagacggatgcttccctcagctacccacccaggctctctcttctggagctcatttccggtctgagaaagaaggctcttaattcaactcctgatacccgaatgacctcagccttcaagtgacctggcacaaccctccatgaacagtttattcaggcgctctttccagactcatttgctgaaccccccctcccaaatccccaagaccccatcaatgcctggcactgtgccctgaggcactggggtttgaagatgaatgagtgagaaccgagaacctgctcacatgaagctcataaccaaggggctgagactgcctggtcacccccaacgctattgtgtgggaccagtgcaggacagagatggacagacagaagtcaggaagaccagggtctggtctcaagcatgggggagaactccactgaggacgcccaggatggagaggtccagacgtatgccctggagtccagtatgtatacccccaactccatcactgattagagcctgtttccttgtcaacaaaatgggactaataatgccttcctttgcaaagctattgtgaggctaatacgtcatatgtacatacaatgcctaacgtggttactgcacacagtaggtactcaataaatagagctgttagta

SEQ ID NO: 238763 - DNA, 812 bp, Homo sapiens
ctcccctaggtaggcttctgagcttccaccagggctcatggccctgtcctggtaaaccagctgccctgggaggcctgtgatcttaggccctttacccgggtcctggctccccagctcccctctgtctccatgtagggccaacaccccagacatctggagccttggtggtccagaccaagacggatgcttccctcagctacccacccaggctctctcttctggagctcatttccggtctgagaaagaaggctcttaattcaactcctgatacccgaatgacctcagccttcaagtgacctggcacaaccctccatgaacagtttattcaggcgctctttccagactcatttgctgaaccccccctcccaaatccccaagaccccatcaatgcctggcactgtgccctgaggcactggggtttgaagatgaatgagtgagaaccgagaacctgctcacatgaagctcataaccaaggggctgagactgcctggtcacccccaacgctattgtgtgggaccagtgcaggacagagatggacagacagaagtcaggaagaccagggtctggtctcaagcatgggggagaactccactgaggacgcccaggatggagaggtccagacgtatgccctggagtccagtatgtatacccccaactccatcactgattagagcctgtttccttgtcaacaaaatgggactaataatgccttcctttgcaaagctattgtgaggctaatacgtcatatgtacatacaatgcctaacgtggttactgcacacagtaggtactcaataaatagagctgttagta

SEQ ID NO: 238764 - DNA, 446 bp, Homo sapiens
taatcctagatcaatgatttccagctttgtaactttgggcaaattctcaaattctctgtagaggttataaaattatgctagacatggtaactccctcatgttgctgttgtaagggctaacacgtggaaagcctaagcaaactagaatcataataaggattcagtaaaatccccaagaaaactctagagatgctggattctgcccttatccttctgttcctgccatgattttaatatttctctgtgagctttgctcgggtccaggcaccctaggctcacttctagcaaataattctgaaaaataattgtttacttttttctctcctatcaaaccctaggttccttaaagccacagaatgaaatacatcttttcttcttcccagtagtctgagcaatatttggcacattatagaaacttaccaaatatttgttaaataaaaatgaata

SEQ ID NO: 238765 - DNA, 574 bp, Homo sapiens
tatatcaatttatggccaatctggtttcatttataacatcattcgctcattcctaactccctggattatttgattgacatgtttctaaagttccttttaatctgtaggttccccctctcatttaatcttttgcaacttattcattgatgaaactgggttatttgtcctttattgtttctctcattctgaaatatgctgtaatgtcattaaccatattcttctttcctgtattttctgtaagctttgagctaggcagaaatattttaatcagattcctttttttttcttttagcaagatttcttcataaataatattgtatgtgttcatgaaaatagaaataaaaatagaaataaagaagaaataacagaaaaaggacagaaattgttaaaatttttttatgaaaacagatagtaaataacattgtaataaatcccaacagaacatagagaacctgactttattgacgttagtgggaggaggtttgtgattttaaaactatatattatggttatgtcatctaaaaatcaaatattcaagcacatatattaaaattagtcatcattacatttttcc

SEQ ID NO: 238766 - DNA, 205 bp, Homo sapiens
ctgtctccctgatggtgcatggaaaggacgttggcatctggcactatcaccctgacagtgcatggaaaggacattggcatccagttggcactccttctcccttattcaatattaggtttgatttgccctttgccgttgtttccaaagatcaaggaatgtcaataacttttttttttttttgagacagagtctcgcattgtagccc

SEQ ID NO: 238767 - DNA, 2095 bp, Homo sapiens
tttcagattttaccatggaagatttaggtcaggtattatttcctgacaacaagagttgttaaatcaatacctacatacattaccaagagaattatcttttccaaaggtctttaaaaatgtagtacatttttttttctctgtaattgtttaggaagcagtgcttcctgaaagaccaaaccaagatttttgcattatgtggctttgcacactagatgagcatttaataagttcaagcttaatttaaaaccatgatgacacaggtgtgaatgtcatttctctgaggagttaaaaatacaggcattgtcatactatcatacactctggaaaatggtattacatatcataaaatgttatggcttgggtagaaattgtagtttgctcttttaaaagctttagttaaattttgctcatttgttttgcaaatgattctttttaattgagtgaatcagatgcttttcagttcattgaaaatccccctttgacaaatcatgttttgatgagcttacgttctgtttctgggttcagcttctcattttagttgtcatacaaagcgttggcttatattatggttaagtatgtgctttattggaggttttgcattaccttatgagaaattatagagtgtttgtgggagaggcgttatgatttgttttaatttttttcaggatataatctaactaccactagggataatgtgtagtggtacataattatatacattatgttatatgtatgctatcctgtgaggcatccatcattggtcactgtcaaagacaggctgttagagtagatgggctattggactggactggtggtggcatgcccatgttttaaaaacaaatatttgtacaagttatttgaatttatgcaagaaattaatacagtgttatgttggagatttaatagcataaaagacaagaggttttttttttcttttttctttttttacttttggcatagctataacccctttgtatgtatttataatacactctttcagtatgagattatatattagtgtatgcagtcacacagaatgttatatatgtaagataaagagattatagataaatattttcctgaatattatttactacataatctgtcactggcccaatttcatgtgatcatgtaatgaaagatccttctgcagttaagcctattagggctttaaccctaagtctcctgaatatattttaatttctatttccaaattaatgttatattggtatggtataatagtatgtacttattttcttttgggagggatataattatattaaaaggcaatacaattaacaaagatttttcacactggttaaaggcaaagcaagagatgtgatggaaagacatgtgaagctgggttattatactcattacataaacatagtgatcttcttcctaaatgtggttttaaaatttatccttgtgtccctttctttacaacttagatagaatgcatatgttgaaaagaaatgtgtaggctgtggaaatactggtagcagtagccagcttttagttaaagttagtagaaggagggagagaaaaagagagggtgaatacacatttccgtacaagttacaggattatttgctttttattaaaatatattaaaccttcagaaatttgggctgaggatagaggatattctgattatggacttatttttattaaaagttaaattttatggttaactatccagagtaactagagtaggttaatgaaatggcaaatagaggaagagatttcttttaatgaaatgaaagaatggcaactagtacgttaactatttcagtatataattcttaaaaatgtacagttattaaaatgaattattccgtgttctatttttaaaggctatcagatgctaattagtgttattttgttttactatttaagtattaaatgaaataatgaggtcatagagctttggatttagacagactgcttacaagcccaatttcttcattcaagagcagtgtgacatcatacaagttactttacgtttttatgcctcagtttcctgcatctggaaatcagggtaatagtttatgttggataaagctgatttaaagattaaatgagatattgtgtg

SEQ ID NO: 238768 - DNA, 2074 bp, Homo sapiens
  misc_feature (1447)..(1447): n is a, c, g, or t
  misc_feature (1879)..(1879): n is a, c, g, or t
  misc_feature (2005)..(2005): n is a, c, g, or t
tatttctttgttgtctcttttttattttttagagacagagttttactatattgcccagactggtctcagactcctggcctcaagcgatcctcccacctcagcctctgagttacaattgtctcttgaaagtaatttcaggtaggcttggggctaccaaggcaagcctagggaagcctactacatgaagaggattagagtcctctggagaagttggattcatatgaagagatactaatcagaaagttgggagttagtcatccatggaaaacaggcatgtttgagaatcatattctggcagtgcccatccatgcattatcagtggagagagaaccttggctaatggacttccccagttttgatcccatggataagaccatgggggagagggtaaggcttaggctaatgcatattcttggatcattcagtcacctccttccactctgagtccctgttgaccagggaatgtcttggtgtcatagcttggctttccaatggctctccccgtggggaaagaatacacaggctgtgttgatggtattctagtcctgacgagagctgcgtttctcatggtcagcaaatgaattggcatccgatatataagcaaatcttgtgactgtaaagtcatatactttcttgttagttgagggaatcagatttctgagggtaagaggtgaagccaagaacatggcaaattcattatcttgataaaaactacccggtaaggctgcccattttctttcaaactgcaacaccatatgtccagcgaggttcctcttacgagacatcaggggtatcaggagtgggtgccaagctggagtcctgagaatgagggaaataggagaccatgagttttgagcaccaccgcaatttctcttctccttttgtccctcttgctttaggtagtaatgcatgccttaagataataaaaggtctgtctttgtgggctcttcattgccatagaaaaatgattggtatgagtttcccaaggcctcggataaaaatatttcttcagagagggttttgaaaacttatgccagttacctgggtggactccaatctttcaagcactgtgtgtcttttcctggtcctccctcgctccctccttcctttccttccttctctaaacagagtctaaggtaatgcccctctccagtttcttgggatagggaagggggtggaattacttctgactcacccttacccttatggtgtaccctttggggttctggctaaaatatatgtattgggaagtgggacgcagtggctcacgcctgtaatcccagcactttgggaggccaaggcgggtggatcacttgaggtcaagagttcaagaccagcctggccaacacccatctctactaaaaatgcaaaaattagcctggtgtggtggtgcatgcctgtaatcccagctactcaggagactgaggcatgagaatcgcttgaaccngggaggtggagagggtggtgagccaaaatcacgccactgcagtccagcctgggtgacagagcgagactctgtatcaaaaaacaaacaaataagtaaaatatatatattggggtccattagtttttccaccctgggtggactctgacctttgacttctgtcatccttgccccatgaagccatcggaactgcagctcgttttccgctttttcatcgccatttctttcagctgacaaatgctgtttacctcactggcttctcctttattcttaggttttggcctgacagttgctatttttttttttttttttagctctttgatacttttaagaaaatggtttttaggccatgcacaggggctcatgcttgtaatcccagaactttgggagaccgaggtgggtgaattgcttgagctcaggagtttgagaccagcntggccaacatggtgaaaccccgtctcgattaaaaatacaaaaactagccgggcgtggtggcaggtgcctgtaatcccagctactccagaggctgaggcaggagaattgcttcaacccgggaggcanaggtggcagtaagccgagatcgcaccactgcactccagcctgggcgacacagtgagactccatctcaat

SEQ ID NO: 238769 - DNA, 403 bp, Homo sapiens
gcaaccatgtgttctgcaaattctctaatagggttagtttcaaatactgtatcagtcttgttaaatccatacatcatctaaatgacctggaaattgtcatgatcttgcattcacattacatttcacaggcgatctttcctacccagagtgacatacagaaaatattcattagaccttgggaattaatatggagaaaatattatcagcatatgtcagtgttcactttgtaaacagatatcatttaaataatttttggtaaagctagtggcattggcaatatgttaaaactcttgcataattttgtaaaaaaaaaaaaaagtctaatttttgtagatgaacactgaaatgtatgggggtaaatgttatagtgtctagatttgtgttaatattgccacaaatgaat

SEQ ID NO: 238770 - DNA, 484 bp, Homo sapiens
gagacagagtcttgctcagtcgcccaggctggagtgcagtggtgcgatctcggctcactgcaacctccgcctcccaggttcaagcaattctctgcctcagcctcctaagtagctgggattacaggcacccaccaccatgcccggctaatttttgtatttttagtagagacagggcttcaccatcttggccaggctggtcttgaattcctgacatcatgatccacccacgttggcctcccaaaatgctgagattacaggagtgagccaccgcacctggccagattcattcattcttattcagtgctgtgtacttggggaatcttctggaggagagggacaaaaagggaaaaagccattttttctaaaataaaccggaaacattcaaatttggaactgaagctgattctgggtggggagggatgattgcaccaagcatcctaggttctgttctggagaatatccctgccctttcctgcgtcttctc

SEQ ID NO: 238771 - DNA, 1618 bp, Homo sapiens
  misc_feature (21)..(21): n is a, c, g, or t
  misc_feature (855)..(855): n is a, c, g, or t
cagatatggtgatatccttanttctggaattcaaatcaccagttaggggtaccttctcaaataaataaacataatagcactttacgtgtgaataaactcagagaggccctgacaaaccagggttgggctttgcttgggggtaccaacaggcatctactttccatttctattactgtcttgatgtttcttagaattccatcctggaatgctgaccctcaatgagaaggataaattaaaactttattaggctcatttaaatgtcaattaacaaaggatgttcttttttagatcatttaaatttatttcataagctagttgcccaaaagctgctctgctgggcactcatacaaaattattttttaaaaatatacaaattaaatagcagaagagcaagctccccagaacagaaagaaaacaagcagtgctgatcaccatctgggtctccttttgggaggcagaacccaaggggaaaatagaccacatcccctcctttggacgcaatgccaatgcctagggttttgtcagccctggagagagagagagagggagagcgcaggtgcaaattcctcctgtcaatgtaagaattctgtgcttttgatacctccaagagcctctctctgcagaaagtatggaaaatatcgcactgttaaaataacaaatgcagtcagaacaataagaaatacaaaggttcatacctaaggtgtgaaataagaatttacttgcaaactataaggaaggagcacaacaagacagcagatgctaaaagcaccaaagaagagaccaggtcatttgagctgtaatagtttaaagtttggagtgaaaggcctatggaaagaggtaggactacacttgacntttgtagtgcgtgtttgttgtttcagcctgcccaggatcccaccccttattctgaagacagtacctaggttttctattgggacctaccctactcctacttttaatccaaatggcttagataaggtggaccattcccatccttggatctagagagtggcatgtcatccagccttggccagtcagagtcactgtggcttgtgcagggatgggcacatgagctaatcagagcagatgagagtcatccccagacttttgtcagaactgctgggaaagcctatgcccttccagtgggcattgctaagctggtacaatgcaagcctgatgctgtagtggacatccttccaccatataaagacagcctccctgggaaagcagagccatgaaacggagaaagacttcttactaaatccttagagcactagatccagcattttccatctgctatcgctgcatgacaaaccaccttaaaatgctttggcttggccaggtgcagtggctcacgcctgtaatcccagcactttgtgaggcagaggtgagtggatcacctgaggtcaggagttcgagaccagcctgaccaacatggtgaaaccccatctctactaaaaatacaaaaattagctgggagtggtaatgggcacctgtaatcccagctactcaggaggctgaggcaggagaattgcttgaacccgggaggcggaggttgcagtgagccaagatcacgccactgtactctagcctggatgacagagcgagactccatctc

SEQ ID NO: 238772 - DNA, 1650 bp, Homo sapiens
  misc_feature (21)..(21): n is a, c, g, or t
  misc_feature (855)..(855): n is a, c, g, or t
  misc_feature (1627)..(1627): n is a, c, g, or t
cagatatggtgatatccttanttctggaattcaaatcaccagttaggggtaccttctcaaataaataaacataatagcactttacgtgtgaataaactcagagaggccctgacaaaccagggttgggctttgcttgggggtaccaacaggcatctactttccatttctattactgtcttgatgtttcttagaattccatcctggaatgctgaccctcaatgagaaggataaattaaaactttattaggctcatttaaatgtcaattaacaaaggatgttcttttttagatcatttaaatttatttcataagctagttgcccaaaagctgctctgctgggcactcatacaaaattattttttaaaaatatacaaattaaatagcagaagagcaagctccccagaacagaaagaaaacaagcagtgctgatcaccatctgggtctccttttgggaggcagaacccaaggggaaaatagaccacatcccctcctttggacgcaatgccaatgcctagggttttgtcagccctggagagagagagagagggagagcgcaggtgcaaattcctcctgtcaatgtaagaattctgtgcttttgatacctccaagagcctctctctgcagaaagtatggaaaatatcgcactgttaaaataacaaatgcagtcagaacaataagaaatacaaaggttcatacctaaggtgtgaaataagaatttacttgcaaactataaggaaggagcacaacaagacagcagatgctaaaagcaccaaagaagagaccaggtcatttgagctgtaatagtttaaagtttggagtgaaaggcctatggaaagaggtaggactacacttgacntttgtagtgcgtgtttgttgtttcagcctgcccaggatcccaccccttattctgaagacagtacctaggttttctattgggacctaccctactcctacttttaatccaaatggcttagataaggtggaccattcccatccttggatctagagagtggcatgtcatccagccttggccagtcagagtcactgtggcttgtgcagggatgggcacatgagctaatcagagcagatgagagtcatccccagacttttgtcagaactgctgggaaagcctatgcccttccagtgggcattgctaagctggtacaatgcaagcctgatgctgtagtggacatccttccaccatataaagacagcctccctgggaaagcagagccatgaaacggagaaagacttcttactaaatccttagagcactagatccagcattttccatctgctatcgctgcatgacaaaccaccttaaaatgctttggcttggccaggtgcagtggctcacgcctgtaatcccagcactttgtgaggcagaggtgagtggatcacctgaggtcaggagttcgagaccagcctgaccaacatggtgaaaccccatctctactaaaaatacaaaaattagctgggagtggtaatgggcacctgtaatcccagctactcaggaggctgaggcaggagaattgcttgaacccgggaggcggaggttgcagtgagattgcgccactgcattccagcccgggcaacaagagcaaaactctgtctccaaaaaacaacanaaaaaaagggttgaatatctcat

SEQ ID NO: 238773 - DNA, 392 bp, Homo sapiens
tagtggcatgccaaatgttagaactaaaattgaacttctggcttttctgaatattgtgggatctcaggttcctaactgctaagccacagctaaggctttttctcagaccttcagcagcttctctgctaaggttgacctcttccatgcttcattcctgacctgtgtcttggctctccaagccccagtattctgccttgaattttcatttcactgctcaccatagcccaggcagaaatactaagagaagtcaaccattaaataaaaagcaaaaaatcggagggagtgggtggctcacatttgtaatctcagcactttctgaggccgaggcaggaggattgcttgaagccaggacttcgagaccagactgaacaacatagtgagaccttgtctct

SEQ ID NO: 238774 - DNA, 701 bp, Homo sapiens
  misc_feature (673)..(673): n is a, c, g, or t
  misc_feature (701)..(701): n is a, c, g, or t
ggaggcgggagggtgggacttattaatgaggcttgtttccgagtccgggtagcagatacacgtgacatcagaaacatctcataatcacgaaagaaatcgaagcacgcgtgctctctcgggagggccctccttctgcgtgccagcccttgggatctggacttctggctcctggaaacattcaaaaggaaaccggtgggccatggaaccgctgacaggattggatggtaaaacagtgtcttagatccaccctcggtgcctacaagggtaacaggccacacccccatctcagagatggcagcgacctcatccaaggggcaggggaagcctcagaggagtgattttagcagcctctcacttcctcatttgcctgtgttcattgtcctgggcaaatcttcagccccagagacagtagtgtttattttagaaccaaacccgctggccaggacaccatccacgtgaaacatttcttcctaagcctgaagctttgttgtaaccctgttgtcttcctccttattggctcagcagtgagatgggctggcttgaacctccaggtcttgaaacctgcccaagataccaacaaccacctgtaataagcaagaggataggtagcacatgccagggagatgcgagatgaagccacaccacggctcaagggctacagtctgtgaaagancgtcctatagaccagatgggtctgtgan

SEQ ID NO: 238775 - DNA, 378 bp, Homo sapiens
cctttctccacatccgttcctatttctcagccatctcagtgacatccgccatcttgagagtcaactactgactggactgagttgtgtggtatatgcttctgtttacttctcttctgtcttttttaagtggccaaatagcaaacgcttaaataggaaatctctgggagacttgaataaaagactttgcttggtagaacagtaggattaggattcctgtctcctttcagattcaaatgcatctgtttctggggttaacagtggactgttaagaggctgtgcagcttgggttaagtcattcttatctctgggcttcaggagcttagaccagatagtttctacaggctctcttggtgctgatgccttgggattctgtggctg

SEQ ID NO: 238776 - DNA, 437 bp, Homo sapiens
catgaatgggcttagtgcccgtataacagacccctgagagctccttcgtcccttctccctgtgaggatgcagtgaaggcaagaaggtgccgtctgtgaaccaggaattgggccctcaccagacatcgaatctgccggcacctcgatcttggacttctagcctccagaactgtgagaaataaatgtctattgttacaacagccagaacgaactaagaccaagatgtgtttttgacagactctgaaggctatttatgtgctgggatcattgcaatctgttcttcacctttttaagagtgtgggatttcacttcctagatgttatcaaacaggctgcattcataattctggctaactatatgtgagtgatttctctgtacccagcaatgtgctaagtactttgcatggagtaataatatttctcttaataaacctatgca

SEQ ID NO: 238777 - DNA, 901 bp, Homo sapiens
aacagcttttggtaattttaggacaggtcttgcttcttttctttcagtggtcagaaaaagaccacgtttatccaagccctgtgcctatgctatagctctctaatcaagaaatgtttctttcaactgaccacggctcctaactttatctctctgtcctttgaagccgatagctattatttctaacgaccatcactaattcaagaataaacactctgttttctcccaaattgctacattctgttaaagggaactagaattaaaatcccaatttctatcagcactctattttatgaaagggtactaaagtaggatgccacaaggcttgagagcagaagcaaagcgtgacttctctgtgctccctgagtggccccttctcccactgtgacggtcaagtccacctacttacgggtgttctcagattgactctacgtggtgaatgaggactcaaagataaggactgctacctttcttttttctttttctttgtttgtttgggggcatggacggctactgttttttttttttcccctgtatcatcataaagacatttattctggaaaagatttgatctttgccccttatctggctggaagtaatttagacaagaaggggaccttgcctggggaggaacaatctcccccagaaccacgatgggggctgttttttcaggtttcagatgcagcctgtgactgtcttggttacgctcttgtgaaaaggatccttcctgcatctagaacttctacagcagtagggctttctggtcctccagacttccagaagcagaagcctcaggaaatgaggccacttatttagcttgttcatggccattggttgtttggtctatgtctcaccgcattggctgttgccttgctctgtgccccaataatacagaatgtaaata

SEQ ID NO: 238778 - DNA, 1977 bp, Homo sapiens
  misc_feature (481)..(481): n is a, c, g, or t
  misc_feature (493)..(493): n is a, c, g, or t
  misc_feature (531)..(531): n is a, c, g, or t
  misc_feature (535)..(535): n is a, c, g, or t
  misc_feature (779)..(779): n is a, c, g, or t
  misc_feature (1140)..(1140): n is a, c, g, or t
  misc_feature (1545)..(1545): n is a, c, g, or t
  misc_feature (1653)..(1653): n is a, c, g, or t
  misc_feature (1873)..(1873): n is a, c, g, or t
  misc_feature (1971)..(1971): n is a, c, g, or t
aactcctgggctcaagtgatcctcctgccttagcctcctaaagggctgagattacaggtgtgagccaccacgcctggccaagaagagagttttaaatgttaataaattggcctgtgataacactgaattatattgggtttcaagaaatcacaaaaaaagcaacacctccctgctgtcagcagctcatagaatggtgggctagacataaacgtatacaaggaaattgccacattgtaagaaaatgtcctattagtggcacatactcatggccatggaagagcaaagaagaggagatagaaagagatagggtgaaggggggaggacaggaaacccagtcaacttttagttcatgtcttttaaaataaggaagagactctaatcagaagttgacaagtgtcaccttccaatattgtgactttctcaatatcacagaggccagggttttaagaaaaatcactctgcgaagatgacactgactttntcttaatctccnctacctcatcttcccaaaaagattaactgaactaatanactncaaacttctggcctaacttccagtttacaggaaatcatgaatgagagaaactgaacagcctcaacaggaaacaatcagacacatcctccatgtgggatgtcctccaaggcaagtggcctggtctctttctaaagtcaatgtcaaaaaaaaaaaaaaaaaatcccaggcacagtggcttacacttgtaatcccagcactttgtgaagccaaggccattggatcacctgaggtcaggagttcgagnccagcctaaccaatgtggtaaaaccctgtctctactaaaaatacaaaaattagctgggcgtgttggtgggcacaagtaatcccacctactcggaaggctgagacaggagaatcacttgaacccaggaggcggaggttacagtgagccaatatagcaccattgccctccagcctgggtgacaagagcaaaacgccatctcaaaaaaaaaaaaaaaaaaaaaaagtgagagaactgttctagatgctagattaaacataaaagagtttaggactacaatatgaattgcaatgcatgagcactgtgtatctgaatttaggaagaaaaaatcgccataaaagacaatttggagacaactagatanatttaaatatggactggataccagatataatgagaaaattatcgttcatttttcatattttgaaatgttagtgtctttatgtacgagaatgcccttactattaggaaacagatgctcaagaacttaggccaggcacagtggctcatgcctataatctgaatacttgggaggctgaggcaggaggatcacttgagtctgagaccagcctgggcaacatggtaagatttctctctatagaaataaaattaaaattagccaggtgtggtggcatgtgcctatagttccagctacttgggaggctgaggtgggaggattagttgagcccagaagttcgaggctgcagtgagctatgattgcaccactgccctccagcctgggtgacatagtgagaccctgccttaaaanatatatagagagagagggtaagcatcatgacatctccttaccctgattaatctcaaactgttcagcaaaaaacatatatatatatatacacacatccgcataccttcncatacacatatacacacacaaatagagaaagcaaatgcaggctgggcacggttgctcacacctataatcccaacactttgggaggccaaggcaggcagatcacctgagatcaggagttcgagaccagcctggccaacatggcaaaaccccgtctctactaaatatacaaaaaagttagctggatgtagtggcgggcgcctgtaatcccagctactcgggnggctaaggcaggagaatcacttgaacccgagaggcgggggttgcagtgaacggagatggcgccactgcattccagcctgggtgacagagcgagatgantgtctc

SEQ ID NO: 238779 - DNA, 846 bp, Homo sapiens
agaaatgctgggctttgaaagcaccttagatgtcatcaactgcaacctctaaaacttacagactttggatggtgtcattagaagtcaggggccaagggactttaattccactggaagcagaacaagaagagaaacttgattctatgcagagctgacctccaggtggatataaattattgatgaggactcagcctgatgaatttgggggtaaacatggattggctatagatgaatcacagactttctctcaaccagagctcccggggctgggactctcactttccagatgaggaaacaaaggaccacagaagtcaagcaacttgccaaggtcaaacccaagttacagccagagctgggacgattcctgcggctgaccccttgctgggctcgtttccttccgcctgcccagccatctctggttttatctgatgtgtctgatgtcaaacgtcatgaatatggaaagcagaagaccttgttctgggttgacaaatgcttgcagttagggatttttttttttttttttgctcaagcttttccaacatctatcaaatgcacctgtggaatatgcaaacaaaattcctgctgcatctgggccgatctaatatatcttagaaactcagtgatcattgtatccttaaaacgggtttggaaaattaaataaaattttatccacagagagaatgtaattgtgaactgcctcccaaaatctaattgttttatttctcaggatatgggttatagcaccacggtgtgctacaaggaactcaccaattacagcttaaaacttccaggcttggccaggtgtggtggctcatgcctgtaatcctagcactttgggaagccgag

SEQ ID NO: 238780 - DNA, 495 bp, Homo sapiens
tgcaggatggccagagatgtctgccctcactccgctaccctctcagtcttctttgaccactctggtcccccaacctcaatgtcgaccccacatctgcaagtgacatcactgtccatgtagctctgtaagtcttcaaactgggagtcagcctacctcctgccatcactgaccttcaagcaatccagatgaaaaatgcctctgggcattttggggacaggagatataaggaatgagtcataaatatcctgtcatataaaataggatgctatgaaacactccccgggtcatgtcaaaaggagacaggagccaacctgaatacacttccaccagccaaaggcgagattttttgagcaccagtaagattaataactgcaatggattgacaccaatcagacatgtttaaatccactgattcacacatatttaaaaataactagtttttcaccttagggggatgctaggcagctggtaaataaagggaaagcattaaatatt

SEQ ID NO: 238781 - DNA, 443 bp, Homo sapiens
aaggtctcactctatcacccaggttggaatgcaatggtatgatcatagctaatcattgcagcctcaaactcctgggttcaagtgattctcctgcctcagcctcccaagtagctgagactacagtcgcacaccactgctcccagctaatttttttttttttttttttgagatggggtttcgccatgttgcctaggctgattttgaactcctggcctcaagcgatcctcctgcctcagcctaccaaagggctggggttacagatgtgagccaccacacctggctgcttcaccttaattacctggcatcacatgcttaaaataagggcatgccaaaaacacactgttcttgtcaatatacttcaaaataatgaataatacagcatcttaagatgtgtataaactcataaaaatcagaacaaaaaaatctattctttatatttttcc

SEQ ID NO: 238782 - DNA, 731 bp, Homo sapiens
tctcactatgttgtttgggctggtctcaaaatcctgggctcaagtgatcctcccattttggcctcccaaagtgctgggattacaggcatgaaccactacgcctggcctcactttctttaattggctacacagattttctgtttcatctatgtcagtcttggttgaatttttcaaggtatttttccatttcatataaattgtcaaatttcttttttttgttgttttttttgtgtttgtttttttgagacaggttctggctctattatctaggctggagtgcagcctaatctcagctcactgcaactttcccctcccaggatcaagccatcctcccacctcagcctcccaggtagttgggaccacaggcgtgcgcgaacacacccagctaatttttgtattttttgtagagatggcgtttagccatattggccaggctgtactccaactcctgagctcaagctgcccacccaccttggcctcccaaaattctgggattacaggtataagccaccacacacgcctggcccttaatatcttttaaacatctgtaggatccacaatgatgtcctctttctcattcttgagatttggggtttattttctctattgtctttttaatttttatttctgtttttgtttgtttttcagaccgagtttcgctcttattgcccaggctggagtgcaatggcgcgatctcggctcaccacaacattcacctcccagattcaagg

SEQ ID NO: 238783 - DNA, 445 bp, Homo sapiens
caggtcccaaaacacaaacccgaccccactttgttttcagcacagggacttggtatagaacttgtgagcatcaggtcccaaaacacaaggccaaggccatttccttgttttcagcatgcatcttagctatgtcaggcaatggttaaatagccaagcgtgatggctatttaaagatgtactagtatttaaaaaaaaaaattttctttgcccattttcaagaaagaaaaagacttccaatctgccttactttgctctattgtgtttacttatctggagctcttgtcacttcaatggactttttttatttatcacatgtattgtttagtatctatctactacaataatatataagctctttgaaaaaagtgtttctttcttctcttttcattaccagtttacccttaatgcagagaatagtggatggctcatagtaattgatttaaaa

SEQ ID NO: 238784 - DNA, 360 bp, Homo sapiens
taaaaatttttaaacagaaaagttaatagtcgtgtgaacaaccatattccttttctttttttatttttaagtttgtagctatctatctatttatttatttattttgagaccgggttataaggctggctaatttttgtatttttggtagagatagagtttcgccatgttgcccaggctggtcccgaactcccggactcaagcgatccaccagcctcagcctcccaaagtgctgggattacacctgagccactgcacctggccaacagccatattcctgattttaaaattgtgattgtgttttgtaattggtttatctatgcacatacacatacacaaatagattttgtttttgttctccta

SEQ ID NO: 238785 - DNA, 1991 bp, Homo sapiens
  misc_feature (246)..(246): n is a, c, g, or t
  misc_feature (1451)..(1451): n is a, c, g, or t
ttactttcttgcatcatacctcatttacctctttctcttctttatgtctgtctctgggatctcagggccccacactggcatgaaataaaggtgttttttatgcataactcatatgataataataacaacaacaagattttactgtctcctatccctttatgggagtacactatgcaatacctctatgaggtgccatcttaaattgtttagatgtaccatcttaaatggtttacccttagcaaaggncacctacacctttgattttatcttttcctgtgctaagagtgcacaaacttttcttatacagagtcaggaaaggctttggggtcctatatcttctctgtcacatttactcaaatgtgtctttctagggagaaggcatccaataaacaatatgtaaaccaaggagcatagttctgcttcaacaaaaccttctctgtacaaaagcaaaaggcagactagatttgctccatgggtcatagtttgctcttctccccaaactagtttatactttgagaatcccttatcatattgaaagacaagaactgaaggaaatacttttattttttaacccggtaagccctattttttaaattccattaaattatgatgataaaattagtaatttttgttgccattgttttgttttagctctctgtctctgcacattattatgagttattaaaataagtcagttaacactttcaacatcttgtctggaaaatatcctgccaatatccacaaatttattttgtgtgttttttaaattaatttgtcatgttatcgtaggcactttaccaattgttttgctactctatgactcagttgaccactttgccagtttgctatggcagttttgtcaccattatactacattatactaactaagaagctaatagtttccctgctgcttttccagcatttgctcaaagcttcctgacctcccaaagtcaatcttacatattttagactttaacccatctactcaccgaagattagttttctccagagaaaaacagataaaagcattctgcaaagtaatagaaatccactgttcttgttttgggagagggccttctacagactttcattaatattatttagcctgttatgacaggggaaatctcaaggaaaataagacctattctccttcaatgaaaacaaacaaatgaaaaaaaaaaaacccacaactctcttttagctggtgacatcaggacaaatctcaacacatacatacacacatacacagataaacacacatgcttttggtgtgtatgtgtgtagaaaagctccagcagtctcagcaaagtatatgcatactcttttcatactccctgaagagggaaattttaaaaaatagcaatataatagacatttttatacagctagatctgcaggaagaaatgcgtcaaactgcaataatgacgcgtagcaagagtgactaaaagaantatccagtggtcaggttcacaggcaaccacagacagaggtaaaaatctctgatgggagaatctttacaaaattggtcatcacgtttgcattagggcattgaaattcatgtcagcagagtgactctcataaaaacattgtattttttctctagatagataaactttcatcacaaattccctggttgtgtccccgttcatgccagttgttctagcattatggttggtaataatggcacttttattcccaaagtatttggatgataaattatatgggtacccaacccttaggctacatctgcttccttaacatagaaaatcactgactttctcacatattaataattttcaggtggataatgatgtatttcccctgcatatcacattattaatgtctaaataggaaaaaattcagcagctgtcaatgtctaataagttgatcacagtggccaggaaatgttgatggaatggttaaatacataaaagtcgtgcattattattactgctgttcagtgtattttcagtgtttgagccaagtactac

SEQ ID NO: 238786 - DNA, 375 bp, Homo sapiens
cgagtcagacttgagctcgggcgtagcggctagaccgggctgtggcgatagagtccaaaggtgaggctcccacccgcctctccatcttcctcccgcctcgcctcctctctgacagcccttttgtgattgccctgccgcagcttcgccctccacattcgccgggcgcggtactgactggtgcgccggcgggcggaagcgctgccagcaacgaggcggccgggaggagcgtccccagtccagcctgccctccgcctgcgtaaacgctagcgtttctctttttgtaattaaagtgaaattcacataacgtaatattgaccattttaaggtgaacaattcagtggcgtttagtaaatttacaatgttgtgcaagcacca

SEQ ID NO: 238787 - DNA, 349 bp, Homo sapiens
gagatattataaaactttgtgctcaataaaatgtttcactatacctgatgatttgaatacatacttggctgtatgtgctaagccatacaaatatttttggagtaaaaattataaaggaaagtcttaaaataatttcagcaagtctttgtcttcataggtataacataataagctaacaaccacaaggtattgaatgatttcagtatttagatggaatcacttactactgtccacttaaatcctgaagaatggatgctaaatgtaacaatatcatttaaatatgtaagctattctttgtgacaacagatagctaaataattaaccttattcttaaagccaagtctattca

SEQ ID NO: 238788 - DNA, 300 bp, Homo sapiens
aaaaaaagtctcagtgcttctcaaactgatttgcccatgggagcttttctccccccgaggagcaccagctacatcctgctgtgttagtggggccatacacaagtgggccctgtcgtgggcaccacggctgacacctgtataaactttacctcattttgagcttttatgtctgtgaataaaacacacgtcacagcttggatcacacacaggcgtaactctcaggtctgagctgttctctctcttggtcccaccgctgtggttcccagccccattcagcgaggaggtttccatctgtctgtg

SEQ ID NO: 238789 - DNA, 752 bp, Homo sapiens
gatcagtgtgtgtttatggttcctgatcacacacccgtctaggtgtgaccgtaaagtaacaagactggcttgactgtgtcctgtaaatggactcaggattgttcctaaaggggtgtctgtgtgtgggatggctggcagcagcctgcacacagccggggctcatttaggaacttcctaaaccatggtctgggctgaatcttgggagctgttggtggagtctagcgtcttctccaaaggcttgagaagtttcttactccctgtgccttagatccaggtggcgacctacttgctgccgtcctggctttcttgccctccctgctccatcttccttcctgtggtctggagtggtcttgccactccagtgctccgaaacccccatggcccccactgcctgcagagccccgagatcctgcccattcgtccagtcacacatgctcactcaagcagatacaggtgcaggacagcagacatagaccatgttcgccaacatgttgactgtgcatgtggtctctaagtgataggattactggtgagctttaggtttcctttttctaaattgtcttcagtgactgtgtatgtgctgcttttgaaatagaggggattctttttttttttttgagatagggtcttgctctgttgcacaggctggagtgcagtggcacgatcatagctcactacagcttccgcttccgggctcaagtggtcctccaacttaaacctctgggtagctgggaccataactcatgccacca

SEQ ID NO: 238790 - DNA, 699 bp, Homo sapiens
gatcagtgtgtgtttatggttcctgatcacacacccgtctaggtgtgaccgtaaagtaacaagactggcttgactgtgtcctgtaaatggactcaggattgttcctaaaggggtgtctgtgtgtgggatggctggcagcagcctgcacacagccggggctcatttaggaacttcctaaaccatggtctgggctgaatcttgggagctgttggtggagtctagcgtcttctccaaaggcttgagaagtttcttactccctgtgccttagatccaggtggcgacctacttgctgccgtcctggctttcttgccctccctgctccatcttccttcctgtggtctggagtggtcttgccactccagtgctccgaaacccccatggcccccactgcctgcagagccccgagatcctgcccattcgtccagtcacacatgctcactcaagcagatacaggtgcaggacagcagacatagaccatgttcgccaacatgttgactgtgcatgtggtctctaagtgataggattactggtgagctttaggtttcctttttctaaattgtcttcagtgactgtgtatgtgctgcttttgaggctggagtgcagtggcacgatcatagctcactacagcttccgcttccgggctcaagtggtcctccaacttaaacctctgggtagctgggaccataactcatgccacca

SEQ ID NO: 238791 - DNA, 543 bp, Homo sapiens
gaggtgggatgatcgcttgagcccaggagtttgagaacagcctgggcaagatggtgagagcccgtctctacaaaatgtttaaaaattagccagatgtggtggcctgcatctgtagtcccagccacttaggaggctgaggcaggacaatcacttgagcccaggaattcaagatggcaacgagctatgatcatgccactgcaactcagcctgagtgataaagagaaacctcaactcttaaaaaaaaagtttgtggctgggtacggtggctcacacctgtaatcccagcacttcgggaggccgaggcaggtggatcacctgaggtcagaagttcgagaccagcctgaccaatatggtgaaaccccgtctctactaaaaatacaaaaagtagcagggcgtggtggcgtgtgcctgtagtcccagctacttgggagtctgagacaggagaattgcctgaacctgggaggtggagattgcggtgagtcgagatcgcaccactgtcctccagtcctccagcttgagcaacagagcaagactccttctcaa

SEQ ID NO: 238792 - DNA, 654 bp, Homo sapiens
gaactgaagttctttagtttaatgaaatcaaatttatcaatattttcctttataagtaggactttttctgtcttgttaaagaaattcttccctaccctgagatcataaaattttttctatattatttttagtagtgttatattttgcctctcacatgtaggtatttaatctacctgcaagtaatttttatacataacacaaaacaggaaaacaattttctttttctccacatggatattctattgtttgaatttcattttttgaaaagagtttcctttccctgttgctctgcagtgtcatctacttcatgtgttaagtgtctgtgcttttctattcgtctacttggttatcctgtcaatactatgctgccttaattatttcacctttgaaaaatatgtcttgtcttggccctttgcaatcttacataatttttttttttttttttgagatggaatctctctctgtccccaggctggagtgcagtggcatgatctcagctcactgtcacctctgcctcccgggttcatgccattctcctgcctcagcctcccgaatagctgggactacaggcatgcaccaccacgcccagctaatttttgtattttcagtagagatggggtttcaccatgttggccagggtggtcttgatctcct

SEQ ID NO: 238793 - DNA, 206 bp, Homo sapiens
ttaggcaagaaataggaaatagaaggagaacgataagtcaaagaaaagggcttggccctacataaaaaagattattaaggctaggtgtagtggctcaggtctgtaattttagcacttggggagccaaggcgagaagatcacctgagctcaggagttccagacatacttgggcaacatagtgagaccttgtctctacaaaaaaatta

SEQ ID NO: 238794 - DNA, 1934 bp, Homo sapiens
  misc_feature (183)..(183): n is a, c, g, or t
  misc_feature (303)..(303): n is a, c, g, or t
  misc_feature (454)..(454): n is a, c, g, or t
  misc_feature (1349)..(1349): n is a, c, g, or t
aattttgtcagagccattctagccttctgagccataaacaggagttctgcattagaaacttgaaggccactacctgttctgttgaagctgatattagaacaagtggtctttattccaacacctgttcgtctctcaattctaagagccatgcacctgctaggattattgaagaagttggaaatncagaaaaatatacagtgaaatatttaaataattaggaagattataaaccaaagttaagtgcttctatttaattttttaaatgtacacatgcctatctatccatatgtagctatatatttnaatactttgaatcaaattcttagtcttattttacttaaattatacatgcacattttgcagttattaaaattacttaaatatacttttaattattataccgtatatactcttatttatgtaaatatttttactttttttttttttttttatngagacaagttttactatgttgcccaggctggcctcaaactcctgggctccaatgatcctcccacctcagcctcctgagtagctgggactacaggaatacacaaccatgcccagcttaattaatactttaaatgtttaacgtatataatttgatgataaaaaatacagacttagagtctacgaacatgtaacattattatagacctagtaggagttcctgtttgctatgctacattactttttgtaagatatgtaaaggcatataaatatattttacaaatggtagggccaaaactagggtgaggtaagcaaggtgtctcaggcacaaaatttcaggaggtcctcactctccattgcaaatgctgaccctgaccttccatgaacctgagagtgaatgtttcataaaaatttgcaccaggtgccttgtttgcctcaccctagtcctgaccctgacaaatgataatcctaagtttttgagtatcctaaaaatatactgtttaagatgtgttattatagtcaatatattctgttcctaaaatctaagcactaaattaacagtttgaaggcattctttgtaaataattatttcgcatttgaaaataatttaggatatttaaattatttttaagataatttaaaaattttaagatatttctgtgtatcttattttaacctgtaggggtagaacagtttcttctacattttggcactgattctaccaagtgtgttcttaattttaggtccttctgcttgcaccctcaatactgtaaccattagacaaatgtcttaggtagaatgatcaacactcattacctttacttcttaatctgccgctaatttctaaatgtgagtaatatccagttctcaaaaccaacataaaatgtgctgtcttgtcnttacctttcctctctgcaacactgggctgtttgatggtacctcttgcaatcccattcttcttgcctggcttctttctctaaggcagttccatcaagactgtctttgtatcgcgaagcccacatcctcttagttttttgtttgcttgtttgctttcctattttgtttattttgtgttcatttcttttgcttttcttgtagcagcaatagacatagagtgatatttgaaattgtgaagtggtatattgaaaggtttttttgtgtgtgtgtgggagaaatacttggtagtgaaaagtggaaaaagtaaagaaaaactagatgaactaagattacagaaaaatctttgggaggccgaggtgggcggattatgaggtcaggagatcaagaccatcctggctaacacggtgaatccccatctctactaaaaataaaaataaaaataaaaataaattagccaggtgtggtggcattcgcctgtagtcccagcaggagaatggtgtgaaccagggaggcggagtttgcagtgagccaagatcacaccactgcactccagcctgggcgacagagcgagactccatctcagaaag

SEQ ID NO: 238795 - DNA, 790 bp, Homo sapiens
  misc_feature (552)..(552): n is a, c, g, or t
  misc_feature (674)..(674): n is a, c, g, or t
  misc_feature (712)..(712): n is a, c, g, or t
taataatgaaagatttcaaaccacaaacagtgcaactgaaacttttgtattagcatactactgagaatatctaacatgttgttactaatcaatgtcattctgaccttgtgggtttcctgtgctaatggacaagtgaaaccttgtgattttccagacattaaacatggaggtctatttcatgagaatatgcgtagaccatactttccagtagctgtaggaaaatattactcctattactgtgatgaacattttgagactccttcaggaagttactgggattacattcattgcacacaaaatgggtggtcaccagcagtaccatgtctcagaaaatgttattttccttatttggaaaatggatataatcaaaattatggaagaaagtttgtacagggtaactctacagaagttgcctgccatcctggctacggtcttccaaaagcgcagaccacagttacatgtacggagaaaggctggtctcctactcccagatgcatccgtgtcagaacatgctcaaaatcagatatagaaattgaaaatggattcatttcngaatcttcctctatttatattttaaataaagaaatacaatataaatgtaaaccaggatatgcaacagcagatggaaattcttcaggatcaattacatgtttgcctcacgctcagaaaaagtngtacatgtcgggggagaaatgagtgcttaattctgaanttctgctagcgtcaggagaatcagaccttaataatgttgatcaatgatgctactgaggtttccaatcacaaattttca

SEQ ID NO: 238796 - DNA, 765 bp, Homo sapiens
  misc_feature (552)..(552): n is a, c, g, or t
taataatgaaagatttcaaaccacaaacagtgcaactgaaacttttgtattagcatactactgagaatatctaacatgttgttactaatcaatgtcattctgaccttgtgggtttcctgtgctaatggacaagtgaaaccttgtgattttccagacattaaacatggaggtctatttcatgagaatatgcgtagaccatactttccagtagctgtaggaaaatattactcctattactgtgatgaacattttgagactccttcaggaagttactgggattacattcattgcacacaaaatgggtggtcaccagcagtaccatgtctcagaaaatgttattttccttatttggaaaatggatataatcaaaattatggaagaaagtttgtacagggtaactctacagaagttgcctgccatcctggctacggtcttccaaaagcgcagaccacagttacatgtacggagaaaggctggtctcctactcccagatgcatccgtgtcagaacatgctcaaaatcagatatagaaattgaaaatggattcatttcngaatcttcctctatttatattttaaataaagaaatacaatataaatgtaaaccaggatatgcaacagcagatggaaattcttcaggatcaattacatgtttgcatttcttattaagttttgttcagatttttttgtcttttctcctgtttattgtgccttcatctctttctgttctgtacttttctttgtatataaggattttttgaaacgag

SEQ ID NO: 238797 - DNA, 848 bp, Homo sapiens
  misc_feature (552)..(552): n is a, c, g, or t
  misc_feature (659)..(659): n is a, c, g, or t
  misc_feature (668)..(669): n is a, c, g, or t
  misc_feature (682)..(682): n is a, c, g, or t
  misc_feature (688)..(688): n is a, c, g, or t
  misc_feature (732)..(732): n is a, c, g, or t
  misc_feature (770)..(770): n is a, c, g, or t
taataatgaaagatttcaaaccacaaacagtgcaactgaaacttttgtattagcatactactgagaatatctaacatgttgttactaatcaatgtcattctgaccttgtgggtttcctgtgctaatggacaagtgaaaccttgtgattttccagacattaaacatggaggtctatttcatgagaatatgcgtagaccatactttccagtagctgtaggaaaatattactcctattactgtgatgaacattttgagactccttcaggaagttactgggattacattcattgcacacaaaatgggtggtcaccagcagtaccatgtctcagaaaatgttattttccttatttggaaaatggatataatcaaaattatggaagaaagtttgtacagggtaactctacagaagttgcctgccatcctggctacggtcttccaaaagcgcagaccacagttacatgtacggagaaaggctggtctcctactcccagatgcatccgtgtcagaacatgctcaaaatcagatatagaaattgaaaatggattcatttcngaatcttcctctatttatattttaaataaagaaatacaatataaatgtaaaccaggatatgcaacagcagatggaaattcttcaggatcaattacatgtttgccaanatggatggnncagcacaaccaantttgcnttactgcttgtattgcattccggtgctcacgctcagaaaaagtngtacatgtcgggggagaaatgagtgcttaattctgaanttctgctagcgtcaggagaatcagaccttaataatgttgatcaatgatgctactgaggtttccaatcacaaattttca

SEQ ID NO: 238798 - DNA, 421 bp, Homo sapiens
aatgaggtagatgaagcaatatttagtatagcatcacacaatgagcttatgacttatgggactctttcatgaacctcattaacctcacaaatgttcaaaaataaggaaagatttgtacacagagcagaaaaataacagacgcagtaaacaatcttttgaatcaatcttctgtacttccacactctattatacagaaaatagaagactgcctctaataaaaagtgagctgggtttatagacatgttttgttttgtctttaatatgagataaaatgtttatgctgataggaatgctccagtaaaaagaaaaggatttttgatcagtgagaagaatctctagagtcatattccttggggaaaaattggtgggaataaatatattagatgacagcacagggaagtcatctataaaagaaaaggta

SEQ ID NO: 238799 - DNA, 333 bp, Homo sapiens
aaagcttcatcttagataaaccacaaaatataagaacaatgagtttcctcaagaaataaagccatgaggccctttcctgtaagtttctgaccccatgggagaccaactttatctctgacatctaaagatatacagtaattcctgcagatatgataatcatgtgagggagaacatcctttcaccaccaaggagaaaaatgaacacactgtaacttcctgagcattttgtattgctttgaatattggctccttcctctattcaggaaactcagtttttctgaaggctgagctcccctgaaaacattacaaataaaaatattgttcttaatgatca

SEQ ID NO: 238800 - DNA, 2348 bp, Homo sapiens
  misc_feature (95)..(95): n is a, c, g, or t
  misc_feature (1224)..(1224): n is a, c, g, or t
  misc_feature (1245)..(1245): n is a, c, g, or t
  misc_feature (1890)..(1890): n is a, c, g, or t
aagcctcagtatgtgagagaggcagagagcctccctctgtgactcaccattctattggagatccaagcaacccaggcctagggatagcactttgnttctcccaagcccttgaggtaatttggggagagtcttggagatgctgtgagggaaagacaccgggaaaagctgcaggcattttcccagaactgggaccaagaacatcatgccagttttaatctgggtgcatataaagtcagtcattctttgatgacccagaagtgtggctctgcaggcattttattctcaagccaaagactagagggcttgctcttgaggagagtagggacctccaaagccataattgtggaaagcaccttagcagtatggctggaattgcacactctccctaattgcaagcctgggacaggaggagagctgctacagctgtggtttcttctggctgaggagacttgcagccggggccagcttgacaacctggcactgttctgcatgtgtcattgctgggtgccccagcctgctcccctgaaattgtggtgcaggggggcctctctgatccactcctaggcagaactccaggaatttagagtacatactttcctggaccagaagcctcagtcaccccaccctttctgtgaagagatcggggtaaagcaggccctctccactctatgcctaggcagaactcatgacattcagagcacctgctcacccagcaccagtcaccccacccttcctgtgcagacattggcatgtagggggcacctctcagctgcacacccaggcagatctccaggcagtaggagcacctgctctcctggttcagcagcctgagtcacccacccttcctgcacaacgaatatggtgcagcagggccctctccagtccacatgctggtagatctccagtcatttggagcacctgcttgcccagattggcatcctgactcactccagccttcttgtgcagtgatcagcatgcaaggagcccttctcaattgcacactcaggcagatctctgtatagtaggagcacccacttgcctggtccagcagcctaagtcacccctacttcctgcacaaagatcatggtgcagtagggccctctctgcgccacatccaggcagatctccaggcagtcagagcactgaataaccttgattagcagcctgggctgcaccacccttcctgtgtagagattgtggtgcagtgggtccctcgacaatccntgcccaggctgatctttaggnttctggagcacccactttcctagattaggagtttaggttgtacctccttcctgtgtggtgaacttggggccaaggagctttcccagctccatgccaaggcacacttctgggtgcttggtggctatgcactgaattctccctcagaactggtgtttgtgcctgccatcaagggacttgtaggtgggcctgcccagtctgtcctcagccatcttttcccctaccttcctggggctgagcagggagctcacactactgtgtactccacagttcagtccattgcctgaggcaacagagagcctctcctggtaaaccaagatcaagtatatacccagccacattgactgcagccagctgttacctgtaagaatcatctactggcttgtaggtcaaactgcacagctcaatataaaatctgctgaaagaaacacatagggctatagaagtgaaggcaaaagaccttgaccaacattttctacattcatatcccccagggagaggggaaaagggaaaaggaaagaagaaaaccctccacaataatataggaaagaaagaaaaagaaaatatcctacccacaagaaaataattacaacaattagaaatgccagcatctccagatgagaagaaatcagcataaaaattctggcnctatgaaatatatgaatatagttacaagaccaaaggattacactagctctccagcaatggtccctaaccaaaatagaaacttagaaatgacaaataaaaaattcaaaacatggattgcaaagaagctcaatgagacccgagacctgattgaaaatctacacaaagaaacttctaaatgaatccaggaaattaaggaagcaataaacaccttaaaaagaaaccaaccagagcttctggaattgaaaaacttgcataagaaattttaaagcaaaattaatagctttatcaatagactagagcaagcagaagaaaaaatttcactccttaaagactggtcttttgaactaaccaagtcagacaaaaataaaaagaaagaattaggaaaaatgaaaaacgtcttgagaaatgtgggattatgtaaagcaacaaaacctacaaattattgacattcctgagag

SEQ ID NO: 238801 - DNA, 450 bp, Homo sapiens
aagaataacgagagagagagagaggtcgagcatggcagctcgtgacagtaatctcagcactttgggaggctgaggtgggaggatcacttgagtccaggagtttgaggccagcctgggcaacaatgtgtgagaccctgtctctacaaattaaaaaattagccaggcgtgctgggattacaggcatgagccaccgcgcccggtcagctgaaagtctctcatttcagaactcagacaacataaagatgtccattttcaccacttctactcaacacagcactgaaaatcctagcttgagcaatcaggcaagaaaataaaaggcatctgaattggaagatgggaagtcaaattgtccctttttgcaggtgacaaaaatctcatatctagaaaaatctaaagactccaccaaaaaactcctagatttgacaaacaaatttggtaaggtttcatgat

SEQ ID NO: 238802 - DNA, 470 bp, Homo sapiens
aggcttcattggtgagacccaggaggaggatggcactgcctattcagggacggctttccaggtagagagaggggctcctgggctgccccagaaaagcctggagtctcttggttatagacaggactccaagagttcagagctccagctacaagaagatgtcaaatgcaagcaaacaggtgaacttgcacctgaaaaacacagtatttatttacttatttatctagctcttggcttaaactcaggggggacccaggaatattttctccaatccgatatctggttgcttgtgggtccatctgttatcacttctgctgaaggcctaaaaggagcattaagagtgatctgagggctgggctcggtggctcacgcctgtaatcccagcactttgggaggctgaggcgggcggattatgaggtcaggagtttgagaccagactggccaacatggtgaaactaaaataaaactaaact

SEQ ID NO: 238803 - DNA, 387 bp, Homo sapiens
cttccaatattgatcaattttatatttgcaattttagctattattcggggtacataaacattgaccaggatcttcaaggaacttacagttaaatagaaaatttttattaatattgaaattttttttgatctttgaagatgagatttattcagcataaaaccacttgatagttctcataaaattaatttctattattttaaaacagatgtcttcttatcaaaatagtctttcttgatgttattagcataactaggcgcatgggagacaaatactattttgcaatgatttgccttgcatttatctgccttctggaggaaaatatttcttaatggcactggcctggtattatcagtcatgagagaaaagccaaaatttcacataagctac

SEQ ID NO: 238804 - DNA, 446 bp, Homo sapiens
ttttgtatgtattctgttgtctgtgttgaaaatgtcatggattgcccaaaaccacaattgatactttagataagcaatttagattcattttagtaaaatttctttttttgctattagattttctcactagagaatgccatccagaattacagctttaaagacagattatactcaaaatgcactgttaagtttttgaaaagaaagtacagaagagtctgtatcatatatttatataaaatatttgtatttgcctttctaaagcataatttaaaagaatatcaactatttgcgtccttgtgcgtaaaatatctctgaacaaatgtaaaagaaactggtatgtgtgttgcctccagacaaagagataaaaagcagacttttcattgtaaactctttttgtagtttttgaattcaaggtttggcttattcaaataaataagaataatagt

SEQ ID NO: 238805 - DNA, 1925 bp, Homo sapiens
  misc_feature (530)..(530): n is a, c, g, or t
  misc_feature (537)..(537): n is a, c, g, or t
  misc_feature (682)..(682): n is a, c, g, or t
  misc_feature (758)..(758): n is a, c, g, or t
  misc_feature (935)..(935): n is a, c, g, or t
  misc_feature (1404)..(1404): n is a, c, g, or t
  misc_feature (1759)..(1759): n is a, c, g, or t
  misc_feature (1844)..(1844): n is a, c, g, or t
gaaaaaggaccaaaatatgacataagaatattttagaagttttctcttgagcttttcagtacatcttgatagaggggaagatatgatgataaagtatttggcacttgggtcaacaatctagtttattcagtagttcagcaaatattttaaatatatctacttagcacgtagtccaaggggatgtagtctggagcaagacagacatggtctttggcctcctgggtttacaatttataattgctggattacagagtatagaatagtaacaaaatgatagaaaacttaaatgtaaaagataaaagggcaacgggagtcgtgtgagtttgagtgtgaggacagatagcatggccatgctatctgctctgcctccttaaaaggtcactggaagttggttacttccattctgatagaggcctcacccttccctggcaacccagtccactaacagctgtattttgctgaagcataaaactttaagccagtgttctcttcagagcccagacagtcctctgcagtttggagagttcttnctggacngcactaacaaaggccaacctgtttcgggaaactctcgacactttcctctgtgtcagcacagtcacctggaatgcgttccagccggagctgtgactatttaatctcactttgtctcttagccctgtcatcttccacacccctgaantgtcagtctctgtaggcctctgtcctttctggcgaggctatttcagcaaggctttaggcctacaaccccttctcangcattctccagattaacagggatgctcatcctggctaaggattccacaggttcaaaaccaagctcatgagagttcgatgtattaattctcataattagtcatatgtaagtttactgctgctgggagtgaagctgagtccaagatgcgaggtgccagatgcagaggcaaaatgattanatatagatgggggagaagaccttgagaaaatctgctccgtgggaccggacactcaggaaacaatttttccttctcatggaaagcagatcagatgcctagagatgattgtgacctgcagtgcttatgtgatgcagatgtggtcctttgtgccgcttcccacagatgggaacatgagaaaatgtggaagttctactcatgtcctgctaaaagctcttacatttcataatcatgattatttgctttatatatgtttccttcagtagcccacgtaaggtaggacaaaattacaattaggtacacagttggaatcataacttcttggctgagtgaaacagctaaagggatggggacactctcctctccctactcctacttccacctctgtcctgcctgcataagaccgtctggtcacacatacagatgcttaattgtcaaggtcaagcactgtccctctatcactcacccaagnaactcactgctgagggagtgtcgctgcctctcaaatccagggacatgtagatggtggtagaatctcacctttcaggtggaagtgtaggaaatgtgcaggcaaaactactaggccctgcatttggtaggaaataaaaagagtcaagtctttggacaaatttgatcacttatatataatttctgtttcactggcagcaaaacaactgacacaaaattgtggccagagaaagaagatattccaggaccgggcacgatggctcatgcctgtaatcccaacactttgggaggccgaggtgggcgcatcacctgaggtcaggagttggagaccagcctgccaacatggtgaaaccccgccnctactaaaatacaaaagttaacagggtgtggtagcctgcacctgtagtcccagctactcgggaggttgaggcaggagaattgctngaacccgggaggtggaggctgccatgagccgagatcgtgccactgcactccagcctgggtggtagagcgagagtccatctc

SEQ ID NO: 238806 - DNA, 466 bp, Homo sapiens
aatgaacatgggagtataggtatctctgacatactagttttatttcctttgaatatacccagaaatgggatttctggattatatggtagttctatttttaattttttgagaaatttccatactgttttccatcatagctgcactaattaatattccctaaaataatagattttgaaatcatactaaactagattttaatcctggctctctcatgtatttgctgtgcccatgggtaagttatgcaacttctctaaacttcagctgtcccctctgtaaaatgaggacaaatactacatacctcttaaaacttccgtgaagactgaggtaataaatacattttgcactgtagctggcatggagttaaatgtttaatatgttatttctatgtcttgcccaagctcaaccagctagtgagtagaaaggcaaatattctgcctaaaaatttcacacttttccacagccataa

SEQ ID NO: 238807 - DNA, 111 bp, Homo sapiens
attaatcaataccctctttggcaatgttctttccagtcatcgaagaaagttgaggtggtcaatgcagaatatatgtctcccatgtttttcaccacaagtttcttttctttt

SEQ ID NO: 238808 - DNA, 261 bp, Homo sapiens
gccggctccagccttggccagcccagagaggggctcccacagtgtagcagtgggctgaagggctcctcaagcgtggccagagcggatgccaaggccgaggaggcgctgagagcgagtgagggccaccagcacgttgtcacctctcaaaaccatccctctgaagtcaagctgcttgtctctgacatcagaccacagtctccaacgtccagctgcttctcctcttctccccttctctgctctctgccagtacggtaaggggtt

SEQ ID NO: 238809 - DNA, 718 bp, Homo sapiens
caaggttgcagggagccgagatcgcaccactgcactccagcctggcgacagagtgagtctcagtctcaaaaacaaaacgaaacaaaacaaaacaaaaaagtatttaaaccccatgacaagttaccatatgagatgttaacattgaagagtggctgcagattcaaaataatatatttggtatttttaaggtatgctctttttcatagagtaaatctaaacaactgagatatttgctgaaaagttgatcgattcaagagatataacacatgaagacagttttctaaaatcctcaatgtaattaagtgtaaagagaaacaaagaactttattctgtcacatgcatctagcaataggacaaaataaagacatatcaactgcagtgtattttaaaaaacatattctttccccgtaaacacattttacatatgtgaatgcatcagtcctgatcattacagaatcctaaagaggactgataagtacagggaggcagagaaggaggatattaaattcttaatttaaaatagctgtatatgttctcaaatttctattaacctgaatcaccagagagaagtgtcaagagaaagattacttagctgaaacccacagagaactgttatctattagtaacaaattacatttgctgaattaaatggagtataattatatgtaagcctaaaataagaattttcaagtcacataatggaaaatttttataggtg

SEQ ID NO: 238810 - DNA, 746 bp, Homo sapiens
gcttgatttaaagctgttttccctcaaaatcataactggcaagagcagtaaaggttgtgtgcttctttgttcagtcaaattatatatagagagaagtacagacaagacagtatgacagaatgcgtttccaaaaaagagcaaggaacttcctttccattagcccccagaatatctccttttaaatttcactggtctgaattaggttacatgcctacagttaaactcatcactctggctaaaggaatgggattactctgattgatttataccaattaggccccatccctggagctaaggggtcaggttcactttccctaaaaaaatggctacttgcatgaaagagaggtagataggggtgtcctgggcaggattggccaactaaaccaaatgggacagatttaccaccaccgaaaggagttctcccaaagacgggacaaacaatgctggcaggtctgaggaacatcctctgcctaacctccccacaccatctgccaacctcataggcataccttttgtatcagctatttccccctgagccaacaggacacccccgcagaagtaactgcagagccacatgactgagatagcaatttttgacatagaataattagtttgacatatctacttggatgtctcataagcagttcagttcagagtgtttaggaacatcctctgcctaacctccccacaccatctgccaacctcataggcgtaccttttgtatcagctatttccccctgagtcaa

SEQ ID NO: 238811 - DNA, 800 bp, Homo sapiens
gcttgatttaaagctgttttccctcaaaatcataactggcaagagcagtaaaggttgtgtgcttctttgttcagtcaaattatatatagagagaagtacagacaagacagtatgacagaatgcgtttccaaaaaagagcaaggaacttcctttccattagcccccagaatatctccttttaaatttcactggtctgaattaggttacatgcctacagttaaactcatcactctggctaaaggaatgggattactctgattgatttataccaattaggccccatccctggagctaaggggtcaggttcactttccctaaaaaaatggctacttgcatgaaagagaggtagataaaaatctgatcatgttaagaaagtgagtcccatgcctattccttgccttgaattggggtgtcctgggcaggattggccaactaaaccaaatgggacagatttaccaccaccgaaaggagttctcccaaagacgggacaaacaatgctggcaggtctgaggaacatcctctgcctaacctccccacaccatctgccaacctcataggcataccttttgtatcagctatttccccctgagccaacaggacacccccgcagaagtaactgcagagccacatgactgagatagcaatttttgacatagaataattagtttgacatatctacttggatgtctcataagcagttcagttcagagtgtttaggaacatcctctgcctaacctccccacaccatctgccaacctcataggcgtaccttttgtatcagctatttccccctgagtcaa

SEQ ID NO: 238812 - DNA, 2157 bp, Homo sapiens
  misc_feature (404)..(404): n is a, c, g, or t
  misc_feature (679)..(679): n is a, c, g, or t
aaaaaatgaatgaagaaaatatggcaaaacttaataaattcacattaagcaggagaaagacctaactaaattagtaatctgaattgtagaatatttttaaaaaattaatagtaacttaattactgtcagattcatggagttccttggagaaattgctttggcaaatagatagggaaaatttacaaatagcacaaaacttggtaaataaagcaatttctaaagaatccgccatggactagtatttttaagttattttctccataaagtgcatgtatgttatcaatttgccttgcaaaatcatttttataagaaagagagctatttctgtttttaccaattatttgtggtatttgaaagtcattcatttacaaaaacataagaatgatatccatttactcattcantcattcattgagcaaatatatattggaggtcactgtgctgggtacatagtggtgagttcaataaagtccttgccttttctagcatgggggatgggagttaactaaaaaataaaataaatgaataaatattttgtaatacattatgataagagcataatcaaggtgctgaataatttctttgggaagatgacatttggctgagtactgaaggatgcaaagaagtcattcatgcagagaagggaggaaagagccacccaggcagaagggagctatgnggacaaagcaaaaggctgggagatgtttagcatgggccagaaactagaaggtagtcagtgtggctacagtgtgttgagtggtatgggaagaaatcagagaggtatgtggcagatgaacctaccgaggcaaagctaaaatatgaaattttattccggatgtcatagggagccatatagtgttctttagattgtgagcatagtctgattcataattttgaaacatcccaatggctttttatgagggaaactgattacaaagtagttgtatcagccaaagtagttatatcagtagttatatcacaaattgattacaaagtagttatgtatcagtagttatatcagaaattgattacaaagtagttacgtatcagtagttatatcagaaattgattacaaagtagttacatcagccaaagtagttttatcagtagttgtatcagaaattgattacaaagtagttctatatcagtagttatatcagaaattgcactaggtacttcaaacagatgagatttagtataggggcttggttacacaggtgttggaagtagaagaaaaaggcaacacagggtaactggagataataactgcagaaggcagctcccacatcacagtgcagagtgtaaagggccaccttggagctcagagacagacagtaggtgaatatccagcacagtgggcagccttgaggcagggaagcctgtgtgagggagctgctgctgctcctgggacagaatcatggaggcttgcactaggaggtgggatgggatagaaataaatagacgagagagcgattttaaacctagagcctataggacctgatgcttattgggtaggaaataaaaaatgactggcaagattctgacttgaacaactaaatatctggggcactgctttttgagatgcagaaagcaagagaaacaggcttagagcattgtaagtgttgagtttagaacatgctgagtttgagatgtcaagcaaatggttagatatgtgaatatggtggacagagaagacatgtagactggagttatggatgtggaaatcaacatgcagatggtatttaaaaccatggaaatggacgatatcatcgagggagagaatggaagagagagaagggctagttctgagcccttgggaatctcctgtgttgagagatcagtacagaagcgacaaggagcaaaggaaactgagatggggtagcaggaataatagaaatcaagagaatgcagtcctatagaaaccaagacaggaaggaggcagcagtccactgtttctagcggacctaagagatgcttaagatgtaacagaatgatgtccatggatttagctacatgaggatatctggctacacgcctgatggggtagtaggctgaagagtttacgggaggcaagggcactccattctgacacggagagtccaagggaatgtaaaggccaaattgtttcctcagttcagggcctacttggagctaggc

SEQ ID NO: 238813 - DNA, 613 bp, Homo sapiens
atgataaatcataaccaatatatattttctatatgacattatataaaatataatatcaatcttcaaaacttgcctagaacataggtaaaggtggttagtaattccatctatgcatatccaaatgtattcccatctgtttgcaaatgtatacttttcccactaggaaatcactcctggctgcccaaacggaggcccggtgcctctggtcatgtccacatctcgtccagcgcttctgctgcctcaccaagtctggaaagagctgctcttatctcaggctacccacttccactccgcgcccctgcctgtcccatctcttggaatgagcgccagcttcctgggagtggagtgtacctctttcccaaacaggccctctgtctggaacgcgcctcttctcgctccctgagtcatcaataaatctgtctcactttgtcctgactcaagctttgcagtcatagagttgggtctgcggagttgccattttcacaggatgagggatccaagacactgtgcaatattctcacaggatgagggatccaagacactgtgcaatattctcacagtatttcttaaaggtcatttcacttttcgggcttatttttaaaaaggttttatt

SEQ ID NO: 238814 - DNA, 571 bp, Homo sapiens
ttgcagaggaggaagctgagctctggcacatggaacttgtccaaggtcacacagctgcaggcacactggcacagggcctggccaaccgtctgtggagttgatccaaaccaatgctgtgctggaaatcactcctggctgcccaaacggaggcccggtgcctctggtcatgtccacatctcgtccagcgcttctgctgcctcaccaagtctggaaagagctgctcttatctcaggctacccacttccactccgcgcccctgcctgtcccatctcttggaatgagcgccagcttcctgggagtggagtgtacctctttcccaaacaggccctctgtctggaacgcgcctcttctcgctccctgagtcatcaataaatctgtctcactttgtcctgactcaagctttgcagtcatagagttgggtctgcggagttgccattttcacaggatgagggatccaagacactgtgcaatattctcacaggatgagggatccaagacactgtgcaatattctcacagtatttcttaaaggtcatttcacttttcgggcttatttttaaaaaggttttatt

SEQ ID NO: 238815 - DNA, 543 bp, Homo sapiens
cgccatttacaactatctccagcaaggccctcacagttgggaacagggaaagagcagggaaaaagaaatgagaagacttggggtagaattcatgtattctcttggtttcctagttggaatatttgcaaatttttttcattcaaggagaaattgagcagtcaatgggctatcaaacccacattcattatccagttcaatttaattcagaacacattgattagacagcttctctatgctgagcatatgactaaacagaagaatcatagttctggtgaaaaaaaatgtctttttatgaacaattccggccaagatgggtcctcaatatgtatgagaaatagccagaagttaaggaaaggagatatttagaaggtgtaagatgggcatttagaaatatgtttgtattcagtgtaaatagaaaacgggtactgggtgcagtggcttgcatctgtaatctcagcactttgggaggctgaggtgggagaatcacttgagcccatgagttcaagactagcctgggcaatatagcaagaccccatgtctaca

SEQ ID NO: 238816 - DNA, 302 bp, Homo sapiens
gttaaggaaggtgacccactggggatggggatggggatagagggcaggcagttgaccatgactctcaggtttctggtgtggacaactggatgggtcatgagtgccatgaaccacaagctattcatggtcccactcaataccctcctcttggggggcctgagtcatggttggccaagggtgtcatggcatctctggggtctgcattgctaagctcagttccaacagaccttggactgaacttctgtgcagtcctctctggcaaagatgggctcagagacccttggagcaatgcagcagagacc

SEQ ID NO: 238817 - DNA, 482 bp, Homo sapiens
gatgcctgtgtgtctcaagagagttgtccagttctccctaacacagctggcatagatgcctcagggtgacccaatgacaatgactaccaagttcaccactgagcagctccatccacctcagttgcaggtccatcttgagggcactctagatgcaaaaccaggcccatcttctttattagacctgttctcctcttgttgtttcgccagccctggttgccctcatttgactcccaggctatccagggtctccagtgtttctcccatggaggcacaacctccatagaagcacctcatgctctgaatggtacatcctgcccaaacttataaaaatttacctggcctgtgttgccactacccaagggggcaccagatcactgagactataacggccaactaatgcatacctaggcattaatcgctagaaaatcttaaatgcagataggtatttctgcaagatcctttaacatcttagccccctccca

SEQ ID NO: 238818 - DNA, 411 bp, Homo sapiens
tgagaggtgaagcttattgtttctccctctccaaccctgccatccttgttgaactaaatatcctccaacaatatgattttcattaatctgatagatgtactgtggggtcatgttgccatttaacttgggaatttctatggttatgagagatgttgaacttttctcctaagctatttaaatttcccattctatgactcccctacttatgtcctttgatgacagagttggctttcttacctttttcttgttggtttgcaggagtactttgtatattctaggtattaatcccattcaaaaattctcctatttttttcattagattgtagctgtatgtttcacattgaagtctctaattatctaaaagttcctcccttgaccagcctggaaaacagagtgagacatcatctctac

SEQ ID NO: 238819 - DNA, 525 bp, Homo sapiens
tgcaattatttgaatttcatattccttcatctagtaaaagtcatttaaggaatgctttaaaaagccagttatttagcaacaagttgttcacttgcttcatatgcttcattggaaaccaagtgttgagaggtccagcctagttggggagagggatttatgcatatgtgaaatgaatagacatgaatttatatggtgatatgctaagtgatttttttttttaagagacggagtctcgctctgttgcccaggctggagtgcactggcatgatcttcgctcactgcaacctccacctcccgtgttcaagcaattctcctgtctcagcctcccgagtagctgggactacaggcacacactgctatacccagctaattttttctattttagtatagatggggtttcaccatgttgctcagcctgggctcaaactcctgagctcaggcaatctgcccatctcggcctctcaaagtgctaggattataggcatgagccccagcacctggccctcataagtgatattaaaggca

SEQ ID NO: 238820 - DNA, 288 bp, Homo sapiens
gagatggggtcttgctctgtcacccaggctggagtgcagtggcacaatcatagctcactgcagccttgaactcttgggctcaagtgatcctcctgattctcccaagtagctgggattacaggcattcaccaccacactcagctaatttttttgtagagacaggggtcttgctgtattgtccaggctggtctagaactcttgttggccactttgcaagttagtctccttctcacttgcctttctttcatactttgtttgccacttgtccccttttctccattctttctc

SEQ ID NO: 238821 - DNA, 709 bp, Homo sapiens
agcatatatcgattaagtttaccatcttgtgtgggcatgcattctggtaccccaaaacaattacagtagtaacattaatgaccaccgatcacagattgccatagcagataaaataatcataaaaagtttgaaatattgggagaattaccaaaatgtgccacagagacatgaagttgagcacacgctggtggaaattggctctgatagacatgcttgattcagtgttgctacaaaccttcaattggttaaaacaacaaaaacacaccacagtatctgcaaaagagcagtagagcaaaagacaataaaatgagatctgtctgctaggacagtgggcttaaactggaatggtcctgggcagccaggtcacatggtcactttactactccagtatacctcattgttaaaatgtggttgtagaggtttggaatttggtataggattaaatgaaaagttttaaccttgtggatacaaggatgtaaggatctgattaggctttgcaacttgagtttgactgatgtcttctgtgtggtgtccgctaaatcccacagcatataggatcagtcgcattggttataaggtttgcttctggctgggtgcggtggctcatgcctgtaatcccaacattgggaggccaaggcaggcggaccacctgaagtcgggagtttgagaccagcctgaccaacatggagaaaccttgtctctactaaaa

SEQ ID NO: 238822 - DNA, 451 bp, Homo sapiens
cactctttagcattttatacctcatttatttactccttcctccactgaagaacatttaggttgtttcaatttttccatattacatgaaagtgctgaataggcatcccttgatttctgtacgtatgtgtgaatgtttgtagatggtagatgtgttaataccacagggtatgcatatctgcagtgcagtgttgccaggcctcatcagattgccatcattcccacctgtcctgtatgagagtgctcattttcccacaccccgccacatacttgagatgggaagactgaagaatgcatgaaaggttcatccattgcttctgtaagttgtattttcctgattcatggaaaagttgagatactttcagacgtgtattagccatgagagtttttcttccttgtgactgtcctgttcataaatcctgatcattttttcattgagtttttgtcttttttc

SEQ ID NO: 238823 - DNA, 418 bp, Homo sapiens
gatttccctgacacctgacacacttgccaactggttccatttcattttttctacagaaacagaagtgaaaaggtcttgaaaattatctgacttttcacagcttctttcattctttctagtcctttcttcaaagataactgaaggtgactggtgattgttgaggactctggatgagaaagctgctttgtttttcctgagtgtgttctgtgggtatccctcccgctaagagactcagcgtaggaaagtctgcgtctcacaggaggccgatagaggcggaagcttccctgtttctctttgtcaaagaaacccctttagggtgtctttaaattaccatttccccaagtgcatttcagagtcagatttataataacataataatttatgtagatacagcttgttaagactacttctactgcca

SEQ ID NO: 238824 - DNA, 246 bp, Homo sapiens
tggagtaatctaccaccaataaaaacgtcctggagctactttctgagtcgtgggaatgagcttgttcacgtattcctaattgactggcacacatagcaaagcaggtgactcagattagtttcaaatactgagacaaatctctggtgtagtcattttaagtcttcatttttcatagatccagattttgtgcttttcaggttatcttgactaatgaatttttataaaataaaaatatgcaggtatttg

SEQ ID NO: 238825 - DNA, 716 bp, Homo sapiens
ggtatttctgccttaattgtaggttttgatgatgatggtatctcaagattgtatcagacagatccttctggtacttatcatgcttggaaggcaaatgcaataggccgaagtgctaaaactgttcgagaatttctagaaaagaattacacagaagatgccatagcaagtgacagtgaagctatcaagttagcaataaaagctttgctagaagttgtccagtctggtggaaaaaacattgaacttgctataataagaagaaatcaacctttgaagatgtttagtgcaaaagaagttgaattatatgtaactgaaatagaaaaggaaaaggaagaagcagagaagaaaaaatcaaagaaatctgtctaattcttaggatgaccactgggaggtcttaatgttttgttttattgtactgcctgaggttgtttagtgaaattttagaggaaaacagttattttgcagcattacatgcagtacttgtgtgatgttttgagaatgccagatctgtggctgtcttcattctattacatagtcaaacataggtttatgtgaagattttctttgaaaggggatttcagtaattgttgagagcagtcataattccacataagcctgagactctataatttgtccagtgtcttacttaccttcatatatgcaaatataattttaaaaaattttttaattaaaaaaatttaataatttggaaaaaaaaa

SEQ ID NO: 238826 - DNA, 283 bp, Homo sapiens
gaccaaatgctcaaaaactacaaagtgccaaaaactcaacctatagatatataacctgaatagtcttaaagcccttagagaaacttaatttgcagttaaaccctccccacttgatatcctggcagagatcatttgacttgagaaatttgccacacatttaaagaagaatttaaatcagttttacagggttttgtttattaaattaagagtaggaaacacttcccaattcatgttgtgaggccagtattattctgatacctggaacagccaaagacagcattta

SEQ ID NO: 238827 - DNA, 424 bp, Homo sapiens
taaaacaacctggggaaaataaaacaaaacaaaactcaggctggacctggacagataaacaaacaggatcccgcacaggagttctttattctttgtctaattagcaagctcccaggaaaaaattttctccctttttcagtcagatacatggtgagaacttgcacacggaggaggggggattacctaaaacaaactcacagtatacaaacaagagaagctgtgctttgtgcttacctaaaaacatacccacagctgcatgagataaggggcgtcgcacagacagccttactgataagagaagttactcaaactgctacagagatgagaggggtttctcagctgtaacctggcaatccactctgactcctctctctgctgcagagagctttatttctttcacttattaaactttccctccaacacc

SEQ ID NO: 238828 - DNA, 476 bp, Homo sapiens
tatcctgcacagtttttcttatagtgtttaccagttggtggtcagtgtgaagccagataaaaaccatttgctgagtttcctcatttgaccttgattttctgttagccttgccatgttgaatgatgtagaaatagacgtaggaaagtatctatagtagaagaagccaaatatgctgtctgtttttggaaaaaccacaaagaacctgtttgagatgagcaattgctaaacagaaacaactgcagggtcttattattattaaatctcacaataatttgtaaagacccgaactaggaatgaacttactgcctttgcgaaccagttcaaacttttggtaaatcagacattttacctacagcagttacttttgagaaatagaaaatttttgctacaacttcctgtccaataactttgttcctcacaaacttgaaacaattaaatagatgttttgcaaaaataaataatcatgaactaaaata

SEQ ID NO: 238829 - DNA, 2220 bp, Homo sapiens
  misc_feature (222)..(222): n is a, c, g, or t
  misc_feature (664)..(664): n is a, c, g, or t
  misc_feature (758)..(758): n is a, c, g, or t
  misc_feature (1947)..(1947): n is a, c, g, or t
  misc_feature (2157)..(2157): n is a, c, g, or t
cgatctcgattctcgagcatgttggcctatggaaacaaacaaacaaaaaacaaagttgggaagggccaagtaagaatattcagagaagctccttaacaccaacaggctttcctccactctaccttggccacagtctcaagtggacataccttatcttgtcagctctgatcacctcaagcctcccactctgaacatcacctcctgtacttccagctcaggtangtcctatgtcaccaccacaccatgccagcaattctctgagcccacccagccctctgaaccagcagtctttgcctgttggcagcgccatcaccatgtccttaaaccatccttacagtcactaccctgcatcctttaccccttttccccattcactgtgctcacccagagaaactccaaactccaaactccagttggatccaactatggctcaagaaccagcacccctgtgtgactagactcatttccaaatcaaaaccacacgtttcgcgcaggccctcggttcctccaatgtgctttcacagcttcacttccccgctcttgaaatgactcatttcaaatctcccacacccccaacctcaatttcagctggcaatgccaccacacgcttcagagaaagaaaggatgcacccacaccagcacacctacctccatgccccacacntgccacccagtatccacgcgtgcccccttcccccgccagagcacagtggaagctgcatcgtgctcctccagcctgcactgggccccagccctcntgctccttagggcctggccctgcagttgtctctgcagagcctttctccccttcccggatcattatcatccgcttataacatgcccacccttcctcctttagaaactctccctggaggcccccagcccttctggcatctgctgttccacctcccccctccccactttcattctgtgctgctccaagcagccgtttgtccccaccgttacaggagatgactctagtccagatcatcagtgacctacatgtcaccaaggccaaaggtcccttcccctgcctatctctcagtggcatttgacacgcttggccatggcctccttacctgttcttccaatgtctccgactccaccttcccctggtttccctcctccacatggccttctcctcaggagccttcacttccccctcctcctccgccctctctcagtgatggctgccccggaggtctgtcttggggtctccggtcttcatctttgttcattcccatagtggctgtcatcctgatctgcggcttcacagaccatctccggtctgatgaatctcaagacttaatctcccgccgagacttctccctgggactcagattcacatatttaactacctcacgcctcctcttggatgcctaatgagcatctcccagccaaaagcaggctcgaatttccctccaccaccccctcaaatccagtccttcccaaggtctcctatcataaatagatgtcgctccccattcgcccagctgtgtaggctaaaacactaagaaattattgtgatttctttttccctcactccatcatcctgacagcgctgcctgcaaaatagacctaggcccacttattcccatttcacggttacagccctcgaccaagccaccttcatccctagcccagcctatcctaatgaactacctgatttctgcctccaggcttgtctccatctcaccccctgcagtttatcccacacactgcacttagggagatctttctaaagcgcaaacaagacttgttattcccgtgcttaaaatcctccaatgaggcagaggttgcagtgagctgagatcgtgccactgcactccagcctgggtgacacagcgagactccgtctcaaaaaaaaaatcctccaatgggctgggcgccatgtctcactcctgtaataccagcactttgggaggccaaggtgggagggaagatcgnttgagcccaggagttcgagaccagcctgggcaacatagagagacctctgtctctacaaaaaaatacaaaaagtatgtttgtattttttggcttcactcatggtggtgtgagtctgtggtcccagctatccgatggcagggcggggtagtgcggaggtggggcagggggagactgaggtgggacgattgcttaagagatcaagaggttgangctgcagtgagctgtgatcgcaccactgtactccagcctgggtgacagagcgagaccctattc

SEQ ID NO: 238830 - DNA, 779 bp, Homo sapiens
agatgatccatctgtctcggcttcccaaagtgctgggattacaggcttgagccaccgtgcctggcctcaaactttacctttagacagtggctcttcagggcctttgtgtacatcctccaccaaaacggacctgacattgattgactaaatcaggatggaaatgatggcttgtgaaactaaccgttgtaaatttaaagatattcacatttgccaaatgtgttctcctctggtggctcactttgagtggctcacatgccttctatagaattgtgggattatggaagaggtccagtaatatcttatgaatctcatgggtcctttcctttaattattctataggtgtttcattataggagcgcatctttaattagacagtattttaataataacttatttgtctggaggacgttggttcagtatcttcgtaaatcaagaactggtaaaccacagcttagtagatctaggactaagacttaaaatgtggttggaatctcactcaaggcctacccacctaaaactgcgttctagcaattgcatgctgactgcacctatgagtcgtaagtctgtagttgcaaagtgtgtctagtttgatattctttctaaatgctggtaagagaaacagacataccagaacttgtggcttgctgaagatggtatgagtaatgtggaatctggggaaggggtgcatgtcacatggaaattgggagtctttgaaaaatatctctatcctgtaaattaaaaaataataaatctagtttcggagtgtgcagtgagtttgg

SEQ ID NO: 238831 - DNA, 456 bp, Homo sapiens
cagctttggaactaggtaatggacagaggttggaagagtttggagggctcaaaagaagacagatgagaaagtttggaccatcttagagactggttaaatggttgtgaccaaaatcctgacagaaacatggacagtgaaggctaggctgaggaggtctcagatagaaataagaagctttctggaaaatgtcttccttttggatatggaaagcttacacaatgcctgtaccacccctgtaccttagaagcagtgatcttgcattttatttcagaggcttataggcaaaagaggctgcagccttgactcagatgagactttggactttgtaacattgtgttaatgctgaaatgagttaagactcatgctgggaaggcatgattgtattttgcaatgtgaaaaggacaagagattcgtggggtcagggacagaataatatggtttgtctctatatcccta

SEQ ID NO: 238832 - DNA, 1932 bp, Homo sapiens
  misc_feature (7)..(7): n is a, c, g, or t
  misc_feature (200)..(200): n is a, c, g, or t
  misc_feature (1779)..(1779): n is a, c, g, or t
tattttncaacataggcacaaataactacacatctcttcatgcccactttcttcgtgtttaaggccaagtgatagaaatcaaatttgtcagtatgctaataaaacatttttgccaaggaattccctagcagcatttgcttgtatggtttgtcattctgtattctattggctcaattctgttcactctgtgcaatcttgtnagcctatcaagttaaattattcttcgagtagaaaacagcaaaagatacctgtgtcaaataaatttaacttgaacactagagcttggaaaaacaaccctgagctatctaacactctgcctactcagctagacctttgctgttatcatttatttttcttaattaaagttcttaagttcagtaatgaattaaagaagcttactttttggaattcctgtgcttagtattttgacttatactttttgtgtcttgttagctaaaatgtggtagactgaaaaatggaaatttaaatcgtttaatgagttaatttgcattcaggaataactgtccatgttaatttggccctaattattaactccattaaatatagtagtactgcatctgacctcaacctaattgtctctattgcttgtatgtttaaacatttcagtgaggattttatttaggccttttctgactcttacttctaccttctctctcttcacctttcttgacccgttgaagtagaataacaaaaagatggtaagtgaggttacacacatgctctgtttgttttccacttttgcttgatgggacagtagttgttgttttgtgtccctttagtattggggagggggggttatttccatatttttattttaagtactttgatttttaacctttttcattgcttcaatttgatagcaactaattaagtcctatactttcctgattgcgtacaatggaccaaacaagaactaattactaacatagttttgaattgttttccttgtttttcttgtagatgaatgttataattaaaatggaatgtgttgtgcataatattagaaaccagatggctttatataggatatgtgtgatccaaaaaattcaagtgaagttgttacatttgaataaattcactttattgaccagtattaaattgaacattgactgtcatagcctgtatatatatttgcatctagtgtggtatcatatgtgtacttaataaactgagtaaaattttaatatgtaaataaaccatagatagaaaaagagaattctttccatatcatccttactgatgagcagatttcacaacgttatctgaggataaataagaaaaaggtaaagcttttctataaacaacagatttcccccccaaacattgtacagtgtgtttttctttataactataagcttgctggtcttatctcagacatttaactcttcattgtatttttctgtgatagtctaagtgcttctgtagtagatacttttcaagtttgtttttaatattgtttgtaagaatctctgacaaaaatcaggcacttctaatatatattttaactagtaatagtaactttgtgaagttttcttttgaataaacaaaaacatttaaaagaggaaatttatcctaaataaaagatcataacatttgtgtttatattctaatgagattaagaaaagggtgtgcttgctgggcacggtggcttgtgcctgtactcccagcactttgggaggcccaggcgggtggatcacgaggtcacgagttcaagaccagcctgacgaacatggtgaagccccatctctactaaaaatngaaaaatcagccaggtgtggtggtgtgtgcctgtaattccagctactcaggaagctgaggcaggagaatcgcttgaacccgggaggcagaggttgcagtgagccgagatcacgccactgcattccagcctgggcaagagtgagactccatctc

SEQ ID NO: 238833 - DNA, 319 bp, Homo sapiens
agaggtatgaatgggttccatcatctgttgaggcctggctacttcagggggattgctgttgattgattggtgctctgaggcgtgtttttcagaggacctctgatcctgatcagctggttttaagaagtgaaggctgacattgattatactgcaaaagttatgttcactcaagcaagttgtcctggatctattaatcaggtttaaatctctctctggtggctacagaacaatgcacgtgctctgtaaaagcaaataaaagtggaattttagaagtcagtctttggtaaaaaacagaaataaaaagcagaaactattatat

SEQ ID NO: 238834 - DNA, 468 bp, Homo sapiens
tattctttttgataggacacacatccatatggctcagaaatcaaaatgtccaagaatttgtcaagtgaatagtggctctcttattcctgcccccccatctgcccagtcctcttgaagcacgtaaccaatgataatagtttctactgtgcacttgcagagattttccaggaaatttcaagcaccttgccttccaagtcactatataccagctactcatctcgtgcccagttcactttggtcaccctgtccccaccatccctgtgcttacatcaaccggtacttctctctctctgagctcaaacaccccagagagaagcctggccctgcccagccttttatgggtagatgaggtgggagcatgggtacgtgttcctttgcccacctcggagagtcatccagcttctggaaaaatgatagcagccaacttgacagaagaacccagcatacacattcaagttcattagatta

SEQ ID NO: 238835 - DNA, 606 bp, Homo sapiens
agaacaatgtgtatagtgtaacaaggaaagacgtgtccacacaggagatcaccacacaagcaaggggacaagttatagcagaaaacttggaattgacttgctcctgatcattgtgaacttcctcctgctcctcagctggttaaaagctgtcagccaaagctggcatcccggggtgtcacaggtgtattgataattgactcagtctgttttgtttacaattttctgcccaacaaattgcatgtttctgcagatgtctaacaaattcaggacatttaattcctcagctgccaccatcctgctgtttccaccctcctcatccattggttacgatggtgtccaaagacacattcaccagcattagaaaaggtcattaaaaagctcttacaaccatctgtacccagatggacaggtctccagccaaaacaggagagtttttaattattgtttgtgggtcctgaattatttacatttgagctgtaaatcttaatgacccatgccgtgatcttcttggcttactgatgatgaacaaagccaaggctgtttcgttctcctgattcaatgctgctgtaggatgagggccaaagaaaagtgcatcttcctaaatcg

SEQ ID NO: 238836 - DNA, 228 bp, Homo sapiens
cataattccattttcagatgaaatcagaggcagcttgaattctttagcattttttattcctgtaacagtatctggaaagactaaacatttaatggaaacaagcttccattctggactgcaaggacttgagcgtgtttacaagaggctggcatccatgtctagttaaggctgtatgtacccaagggggcataattttattccaaacctctaaaaaggttggctaaagca

SEQ ID NO: 238837 - DNA, 1791 bp, Homo sapiens
  misc_feature (758)..(758): n is a, c, g, or t
  misc_feature (1379)..(1379): n is a, c, g, or t
  misc_feature (1791)..(1791): n is a, c, g, or t
ttttttttatcctatttgattatcttgagggcttgattttggtataaggtggattcaactgactagcttcatttctggaagattttagagggccaacattcagctcccaactcctgcactgtgtactctaactctgggggacttctattgggccccagctttgttctttggctccccaaggttaggaatccactgcggtgaaggggcctgaggtgtggcagctgtggcagagtgctagcaggtgtcggggtgcctgcctccatgtgggtgttcaccacagtggcagaaacaatgcagctgttgggggagctcctgctggcaactatatgtatggttgtgctggacatggtgttggcttgggggtggggtgctggcagatgcaggcctgggtgccttctctgtgccccataagcaggagtgattggtcagcatgggggaggactgttgttctctgcaaaaatgtttaaaaaagaaattgtttcaaaaatctatataaagctttggattctgtaaatccaaaattcattactggtttattactttactggccagggattatggcaccagaagagagatctgtggttctgacaataagccatgaatgtggtttgcccagtacatggtttagctttgtttctgtatcagacacgctagtttaatttacaaatggagttttgatatactcaggactgtgaataagtattggggggtggtgtctggtgaaaggcagacaaaccacagtagctcatttccttttnttgatccgagcacaaagcattgttgttgcatcttagaaattaaaatcctcatttacagaatagtgtggtgcaatctggaaagatgttgttgtggtctctcaggagtgaataatatgagtttttaaacattctccaagaaaaatttacatgatttcaaacattctaaagcataaggatgtacagtatttcttacagtagaggaaactgccaaatattttggaaaaatataagaaaggaactgtacattggtaagaatgcattttcaaagactatttattttgtttgtttttaactgaacagttattcattgagaggggtgtgtgtgtgtgtgtgtgtgctgaagatagtattatcccaaataatcatattatatagaggctacaactcagtcttgcaaactgctcttacttgcaactgacagctacctcccacaccctcttggcatttctctagtgaagctattgatgtaattattgcttttagggttctgtattaaatttaaaaaacaacttcttttaattttgtgcttaatacagaaatcctaaaaaatcatagaaaaacacaaaggaaaaaaatccagcattaaccactaactaagtggataactaagatcagagaagnaactaaaacaagtaactaataactaagatcagggaagaattgatggtgatagagacgtgaaaaatcctccaaaaaaatcaatgaatccaggagctgttttttttttgaaaaaattaacgaatagatagaccattagctagactaataaggaagaagagggagaagaatcaaatagacacaataaaaaatgataaaggggatatcaccactgaccccacagaaatacaaactgccatcagagaatactataaacaactcgatgcaaataaactagaaaatttagaagaaatggataaattcctggacacatacaccctaccaagactaaaccaggaaaaagccgaatccctgaatagaccaataacaagctctgaaattgaggcagtaattaatagcctaccaaaacaacaan

SEQ ID NO: 238838 - DNA, 869 bp, Homo sapiens
ctttgatattaggagagcttggcatgtaaggagttggggagttgggcttgtctcatttaaatctgaggcaggcctctctctgggcagtcttgaggagagacctcagcctccccaagctatggctgcctgtctgtacagtgattatggtgctctttccttccttgcagggtgtgctaagggctgaaaatagcaagtgggccatgcacagtggctcacacctgtaatgccagcactttgggaggctaaggcgggaggattgctggagcccaggagtttaagaccagcctgggcaacatagtgagacccccgtctatacaaaaaaaaaattagccaggcatagtgccatgtgcctgtagtcccagctactggggagtctgaggtgggagaatcccttgaacccaggaggtcaagactgctgtgaaccatcattgtgctactgcactccagcctgatgatagagcaagacctcatctcaaaaaaaaaaaaaaaaagaaaataacaaatgtagagtacctaacacatgtagtaaatgcacagcaaacaggagctgtggcatcagccactatgataaattagaggccatgcacatgatgaaaacaacatctgtgaattgagtgggaaaaagcagaggtaacacaacaaacatacattcagtgcctgttacatacaggacatcatacttatcactgtgagggtcacacagatgaaggccctttcctgtcttccaggagctcctcacttattaagaggtggcagatagattggctgggtgtggtggctcactcttacaatcccagcactttgggaggctgagacaagaggacagaagtttgagaccagcctgggcaacatagcaagaccctgtctca

SEQ ID NO: 238839 - DNA, 225 bp, Homo sapiens
cagacacagaagggacactgtgatccagagacagaatcagaaaccagccacactaagctcggtggccacactctgccaccctgagtgtcttcaggctcattctcaggaggagttaaactgcaggaatgggccagggcctgcttgttctcctcccaagtctctggttctatttggctttttcagctctgtgcatccattaccttggtgaaaataaacattagttta

SEQ ID NO: 238840 - DNA, 297 bp, Homo sapiens
caagaagagctgaactccaaacttctgtgtccggaattggtgggttcttggtctcactgacttcaagaatgaagcggcagaccctcgcgcatacctgccatgcaagaaatgtgaaaagttcttcggagagaaggaaaattatataggtcagaaactgagacctacataaggaaagaagagcattggatgaagaagaaataaataaaggtaatatgaaattctttatttttcatatttttattagtctttattttcatatcgttaatatttttctttttaattaaactagttagttta

SEQ ID NO: 238841 - DNA, 401 bp, Homo sapiens
acaaaaagatctagagaagtctatagtaaagaaacctgttcaaatttacttaacctagcattactcacgtgaccacagatcatttttccccttttggagtacgctgttaagtggggggctgggaatgggtggaaatggttaatgggtacacaaaatagaaagaatgaataagacaacgggtgaatatagtcaataacttaactgtacattttaaaataatgtatggagtgtaactgaattgtttgcactcaacggataaacgcttgaggggacggataacccagttgccatggtatgcttattttacattgcatgcctgtttcaaaacatctcatgtactccataaatatatacacctactatgtgcctacaataattttttaaaagaaataaaatttgca

SEQ ID NO: 238842 - DNA, 410 bp, Homo sapiens
agctgctgcctggcttttgccatctttgaaaacaaactccaaacagcccacaggccccatcctcactgctgcggtgtcagtgggaggctgtgtcacgccactcgccgtcgctctctggtcggctccgtgagggtaggggctctgcccattcaggtggtatctgtagatcctaggttctagggcccagagcattccctggcccagagtacatgctcagaaatgcatgttgaaaatatcaacgatttagttgtttaaatgtgaactgaaagtcacttagaaaatattcacaaggctgggctccgtggctcactcctgtaaccccagcactttgggaggctgagatggccagattgcttgagcccaggagttcgagaccagcctgggaaacatagcaagaacccatttgtaca

SEQ ID NO: 238843 - DNA, 401 bp, Homo sapiens
taatttcccctgcttttaaagaattggatgaaatcttaagcttagcacatctaatagaagtagaccatcaagagcaagaaacagaaaactgaaccccatttgaacttgcttctccttaagtcctgtccaagacacaaaaggaacaaaaatggcattgagatcctggctgcttatgtccaagatgaagctaggaccttcagaagcaagctcaagagatgatgaatgaaggaaggtggagctccgaagaccatgaagacaacagctcttcggtgttaaagccacaagaccaagagcagacacagcatccagaagaaaacctctattggcaagcacaagacagtgatcacagatgtggccccagacgacggaaggacaggagtgcagcacgctgaaatgtcgga

SEQ ID NO: 238844 - DNA, 372 bp, Homo sapiens
ttagagaggaaagtgtcgccctggacttagaaatcttttttcatagatggtgcgtcctgtgttaggtattacttggaagaaaattgaagtaaaaaacagctttaagtaactgagtaattaggattaattagtagctgttgaatctaaatcccttaagactaaatttcattgcagctctgtaccctcagcaggacttcctttcttgattgttttttccatttaatataaaatttaaaagatgcccatattgtcagttgtttttagtcgccagactgtctttaatagcctctgatgttataaaactggagtcatgaaattgttttgcaggaagtagtgataattccttcaataaacgtctgctattcttataaa

SEQ ID NO: 238845 - DNA, 291 bp, Homo sapiens
ggtttaaaattaatcttctcaatcaggtataactgtaatcacatatacttttaatttttccatgtgtaatttaatcttagaccatagtcatttgtatatattttgtacatctattgatctattttccataactttttgacttggacttttttttttctcttaaaaatttgtggccaggcgtggtggcttacgcctgtaattccagcactttgggaagccaaggcggaaggatcacttgagcccaggaatttgagaccagcctaggcaatgtagggagacttcgtctctacc

SEQ ID NO: 238846 - DNA, 354 bp, Homo sapiens
cccttctttgctctactgtctgccaactaaatattagctatccttcaaagtgtgtctgaagtcctgtctcttatatgaagtcttgtctaattatctagatcacctgtattctctatttttcttacacttcaatttcactactgattatttacctttaattattatatatcttttattctccacaatatgtttgatgcttctgagggcagggatcctgacttttacttattttgtatcatggacagttctgggcataaatttaaaaaaaagttgctaatgattaattattaattggggttcctcatggggagaaataagtttggattgattggactgacagatgttgaaacaatt

SEQ ID NO: 238847 - DNA, 370 bp, Homo sapiens
actctggaaactactcaggttttcatcaacagatgaataaacaaaaggaagtttatacatacaagagaatattactgagtcttacaaagtaaggaaatttacaaatatgctgcaagatgaaccttgacgtgctaagtgaaatgggccattcatgtaaagacaatacggtatgattctacttatatcaggtatctagagtagtcatattgatagaaaaagtacaataccatttgccaaaggttagggaaattgggtaatggatagttatttcatgggcatagagtttcaattttgcaagataaaaagggttccagaggtggatggtggtgatggttgcacactagtatgaatgttcttaatggcactgaac

SEQ ID NO: 238848 - DNA, 578 bp, Homo sapiens
actaagactgagctccccctgagcaagaagaaattctgccagcagggtgcctttggactcagactacaactatttcttgggtctccagacagcctaccctgttttggatctgtacctctactattgcatgagccacttacccacacttgattgaaagacgttatttagatgagatttgggacttaagagttgatgctggaatgggttatgtctttggggctgttaggataaggatgaatgtattttgcaagtgagaagggcatgattttgggaacaaaggacaaaatgttatggtctgacttatgtcctcttcaaattcatatgctgaagccctaacctccagtaatgcgactgtatttggatatagagccttttaagaggtgactaagttaaaatgtggcccttaagagagactttaatccaatctgactgttttctttatgaggaaatttggacacacagagaaagacaccagggatgtacgggcagaggaaagagcatgtgagggcaaagtgaggaaagaccatgtgagggcagctacctgcaagccaagaagaaaggcctcagaagaaaccaaa

SEQ ID NO: 238849 - DNA, 544 bp, Homo sapiens
tctaccatgacattagttacttaggtgatagttattttaaaacaaacatctatcatctttccactgttgataaagtccaaatatatttaattccaattttttaagagatctcaatcttataatggggaacggcagcaatgtaatacaagctgccaacagtaacaattacttcctagaatgatagtaaaactgctttagaaagggtgaggggaggccgggtgaggtgacccacgcctgtaatcccagcactttgggaggctgaggcaggagaactgcttgaatccaggaggcggaggctgcggtgagccaagatccgcgccattgcattccagcctaggtgacagagcctccgtctctactaaaactacaaacaatagctgggcatggtggtgcgcgcctgtaatcccagctatttgggaggctgaggcaggagaatcacttgaacctgggaggcagaggttgcagtgagccaagatcgtgccactgccctccagccagggcaacagagtgagactcagtctcaaaaaaaaaaaaaaagaaaaga

SEQ ID NO: 238850 - DNA, 2073 bp, Homo sapiens
  misc_feature (232)..(232): n is a, c, g, or t
  misc_feature (298)..(298): n is a, c, g, or t
  misc_feature (343)..(343): n is a, c, g, or t
  misc_feature (1141)..(1141): n is a, c, g, or t
  misc_feature (1246)..(1246): n is a, c, g, or t
acagccccagcttgctggcttccgacctgggaggctgcacctggaagcctgggggtcctgctcctatggtaccgaggcaagctgggagattctgggagggtctcttcccctgagtctcgacttcaaccatacaatgaggacttacaataccattaatctgctctcagagctggggcaaaaatcagagcaggcagcgagggaccgtgcccatcttactaacggataccccagnctctgcctggcccagtccctggcacatagttgttagaccacagaaactgagaggattgagacccanataggggatgggaatcccagacagtatccccatctgatggttacnatacccctgttcccagtggattaagtaacttgcccaaggccacatgctcccaagcgatggagttagtcctcgaacctaccagacccacaagcccgagtctcaatcactctgcaccggtctcaaccaacatgtatatacacgcagattcaaaataagagagctggattgtatgaaaggagagaaggttagcactccccttgacaaggatggaagaggcccttgggcctgacgacacgcatatagttaaggtactgccacctacatcgtggcatctaaacatcatttttttaatttaaaataataatttaaggcagggcgtggtatttcacacctataatcacaatactttgggaggccaaggttgggggatcacttgaggccaagagttcaagaccagcctggcaacatgttaaaaccccatctctactaaaaatacaaaaaattagctgggcatggtggtacacgcctgtaatcccactgaggcaggagaatcacttgaacccaagaggcagaggtttcagtgagcagagaccataccactgcactccacctggatgacagagtgagaatctgtctcaaaaaaaaaaaaaaaaagaaagaaagaaaaaagaaaaaaaaaaagaaagaaagaaaaaagaaaaaaaaaagaaaaataaacaagccgagcacagtggctcacacctgtaatcctagcactttgggaggctgaggcaggcagatcatttgaggtcaggagttcgagaccagcctggccaacatggtgaaaccccatctctattaaaaatacaaaagttagcnggctgtggtggtaggcacctgtaatcacagctactcgggaggctgaggcaggagaatcgcttgaacatgggaggtggagactgcagtgagctgagatcgtgccantgcactccaacatgggcaatagagtgagaatctgtcccagaaaaaaaaaagaaagaaaagaaaaagaaataaaataataatttgaaaatctttattaaaaaaaaaagagccaggggacaaagactaccagtcggagatctactggtttgtgccagacaccctgacatacatctttcgtaagcttcgccacacacttacaaggtaggtatcataaccctcatcccgcaagagaagaaactggggcacagagaagtcactgggccaaagccatgcagctggtgagccgcagttggaacccaagcacatctggacgcaaagtgcgcctccatggccttcacactgggctgcttcaagaaaaaaacccttcacggaaaccaaaatgatcccttgcttctgagacaactctctttcagggacttatcacagattaggagtgctgttcttttgtgtaaaaagaactgagactggccaaatatttaccagcccgcgcagagggctgtagactggcccagcagcggaattaactcctcctgcagtatcaagggccaagctgttgctagacaaagtggaggagagaatcctcaccattcagacagctcagctttgggcaaagaggaaccaaaggaaacccagggaagcagccaggggctcggcagggatggccaccaacaaaaccccggagggatttcttctgaggttcagaacttccagagttgctaggagtgaagatgagaggactggcttctcccaatacttcctttgtcattccgatcctgctggacaaaaactgatcttcaatctttcataggttgggatttttctttttc

SEQ ID NO: 238851 - DNA, 357 bp, Homo sapiens
tattctgtctgcacactaaactggatctgctttttctctcccgttctcaagggcggcaccatgtacttaaccaccttttcttcctgactgtgtgaaaacatgcatgaattcaaactaaccacctgacgtttggatgccttttgctaatctttctttcctgggatctcaaataatacatgagactcatttgctgtttgtttctgaataacctgagattctaaccagggaaaggtagcagggcatatttagtaagactcctgaaagaagtaattgttgaaaaagacagtattgttcattgttaaaatgtaaagataaaatgtaaagaagaaataaataaaatgtaaagaagaaatagtt

SEQ ID NO: 238852 - DNA, 473 bp, Homo sapiens
atggaggccagaaagtgggataacattttcaaagtgagaaaaagatttcaactaataattctgttatcagcaaaaccattccttacaaatgaaggcaaaattaggacattcccagataaacaaataaagagacttcatcactaataaacatgccctgtatgaaatactaagaggagtccttggggcggacatgaaaggacactagacaaatccacatgaagacgtaaagattgccagtgaagtaactacataggcaaatataaacgatagtataaatgtatttttgtttgtgactcttttttttgtgctgatttaaaagacagcttcatagaaaaaaattataaatctgtgttgatgggcacacagtgcacaaagatgtaatattaatacaataacagcacaggaatggagagggaacagaggaatacaaaatctaactagacttataacaagcaaatggattgatttaatta

SEQ ID NO: 238853 - DNA, 446 bp, Homo sapiens
ctgcactgcgctggctgcagtagcttcttgtcctccccctccacgtccttctccagcctgcagccggagtgagctttgtagaaaaaccaaatgagttcactatcactgtcttcccttaaaatccttgattttcttccctttgcccttaggctaaagtctgtaaactttggtacttcccaggaggccctgtttgtctgtttggcccctggctgcctctgactcagctcctgggttcaagggagtctcctgcctcatcctcccgagtgggtgggattgcaggcgtgcgccaccatgcctggctaattgtgtatttttagtagagatggggtttctccatgttggtcaggctgcttgcgaactcccgacctctggtaatccgcccacctcggcctgccaaagtgctgggattacaagtgtgacccactgcactgcgctggctgcagtag

SEQ ID NO: 238854 - DNA, 474 bp, Homo sapiens
ctcggaagcatgatctctatgaccttttccccgccctcctgtctctcacctctctttctcccctgaagtgaggcatagaaaccaaaatttctcttccccaaggcgggccatagaaactagaacccctatcccccaaagcaagccaaaaaacctagaaaggtcattctctccctttgcccttcttccttgaagaccctcattccagaggggtcctgtcccacacccaggaggaaagaatgctacacagagaggccaagaagactctgaacagacaggccttgctgggttttcccctgcagtctactatcattcaatcgtaccctttttgtccaacacatttctatatggctgtccattcttcatcaaacataagcatacaaatagatcatttttcctgggtctttggtcttcatttctgaggctcctatgtaatgtaaaactttaaataaatttgttacgctttaacctgcctct

SEQ ID NO: 238855 - DNA, 458 bp, Homo sapiens
aagtctctggcccaatgtacgtggattagattctgcaagcaggcagcagtaagtataagctaatttctgtctataaaaagaatgattaaaaaaaatcattttgttgatgtgtggaatagagattatcacacacatcattaagtggtaatgtgatgaatgatcacaaaacgaacagtcttatacccagcacacagatcagaacaaagtaactatcaagcaccttcaatgcccccctcatgcctcttcggattattattgcatccttcctatagagaggtaagcacctcttgattatcagcaccatgggagatgtttgtctgattttgaacttctgtaaatgaaatcatatagtatatactctttggaatctgttgtcttttgtagagggaactttttcattataaatcttatagtagtgttgttccttcttcccatcaacagtgttcttttacttaaaa

SEQ ID NO: 238856 - DNA, 2770 bp, Homo sapiens
  misc_feature (129)..(129): n is a, c, g, or t
  misc_feature (241)..(241): n is a, c, g, or t
  misc_feature (303)..(303): n is a, c, g, or t
  misc_feature (753)..(753): n is a, c, g, or t
  misc_feature (1081)..(1081): n is a, c, g, or t
ttcaggtataccaatcagacctagatttggtcttttcacatagtcccatatttcttggaggctttgttcatttctttttactcttttttctctaaacttctcttctcgcttcatttcattcatttaatnttcaatcactcataccctttcttccgcttgatcgaatcgctactggagcttgtgcattcatcatgtatttcttgtgccatggttttcagctccatcaggtcatttaaggacntctctacactggttattctagttagccatttgtctaatcttttttcagggattttagcttcnttgcgatgggttcaaacttcctcctttagcttggagaagtttggtcatctgaagccttcttctctcaactcatcaaagtcattctctgtccagctttgttgcattgctggcaagtagctgcgttcctttggaggtggggaggcgctctgctttttagaattttcagcttttctgctctgttttttccccatctttgtggttttgtctacctttggtctttgatgatggtgacgtacagatggggttttggtgtggatgtcctttctgtttgttagttttccttctaacagtcaggaccctcagctgcaggtctgttggagtgtgccagaggtccactccagatgctgtttgcctgagtatcagcagcagaggctgcagaacagcgaatattgctcaacagcaaatgttgctgcctgatcgtttctttggctttgtctcagaggactaccnggctgtgtgaggtgtcagtctgatcctactgaggggtgccaccctgttaggctattcgggggtcagggacccacttgaggaggcagtctgtccgttctcagatctcaaactcctgctgggagaacaactactctcttcaaagctgtcagacagggacatttaagtctgtagaggtttctgctgccttttgtttggctatgccctgcccccagagatggagtctacagaggcaggcaggcctccttgagctgcagtgggctccacccagttcgagcttccaggctgctttgcttacctactcaagcctcagcaatggcgggtacccctnccccagcctcactgcctccttgcagttcgatctcagactgctgtgctagccatgagcgaggctccgtgggcatgggaccctccgagtcaggtgcaggatataatctcctggtgtgccatttgctaagaccattggaaaagtgcagtattagggtgggagtgacctgattttccaggtgccatctgtcacagcttcactttgctaggaaagggaattccctgaccccttgtgcttcccaggtgaggcgatgcctcaccctgcttcagctcactctcggtgggctgcacccactgtcctgcacccactgtcctacaagccccagtgagatgaacccagtatctcagttggaaatgcagaaatcacccatcttctgcatcgctcaagctgggagctatagactggagctgttcttgttcagccatcttggaactgcccctgtggttgttttttctttttttcttgtaagttcagttgaacaattctgcagacgttgtacttattctttcaggaacatgcttttatactatcatttctattagatgtttctagattcaggttttccagtcaggagggacagtagtccagaaactggtcgtctataaaggagaaactttatcctatacaacagtatggtgtggctgaaaagcccagtagacaagagagagagagagctggactccaggtctaactctgccacttactgacaagctatgtggtcttggaagctaatttttcatattcagtcttcagaatccacattgatgagtgaagggattagactaatgctgaggctatttttcagcttagaaatgctctgtaactcttaattatttgtagttacttccctattacccaaatatattacagctctatctgtcactgtgtttaacctccatctctctccctctttcccttcctttcctccctccttctgtcctttttctcccccttctttcttcctttccactgatattctccttttcacaaagaaagaaatttggggcacagattaaaatggcccagatgcctgtagagccactggcagtatatggatagggacaaactaagtacggcaaggttggaaatggagaaattactgatgccactaattggagtcagacattgagatgctgtccatgaagaaatcaggatctttggcaatggatgcagctcttagattgaaatttgacactggcccttggattccaaattctttaaaagtcagcacatattccctgggtatgtactgcaccagcaatgtgtcaggcttcggcttacagaggtgaataagatgcagccactatacttatgggtccattaccagttggggaatataaatagctcttacaagcttgacttttagttcatttgcaactcactcttggggagtatagaaactgttaagacgggccgggtgtggtggttcacgcctgtaatcccagcactttgggaggctgaggtgggcagatcacttgaggccaggagttcgataccagcctggctaatgtggtgagaccccatctctactaaaactacaaaaattagccaggtatggtggcacacacctgtaatcccagctacttgggaggctgaggcaggggaatcacttgaacccgggaggtggaggttgcagtgagccgggatcacaccactgcacttcagcctgggtgacagagcgagaccccgtct

SEQ ID NO: 238857 - DNA, 359 bp, Homo sapiens
gtgaagggagagaatgagctggtatactttggaagtgtgacagataatatagagaacatatagcatatacagacaaatccatcaactagccaataaatttttaaaaatcagccaccaagctggctgcagtggctcatgcctgtaatcccagcactttaggaggttgaggaaggaggatcgcttgggcccaggcggtcgaggttgcagtgagccatgttggctccactgcacttcggcgtgggtcacagagcgagacctcgtctcaggaaatgatgttcctgaagggatcaaggacaacgcctggtctgggtagttttctctgtcactgttttcagcttccatgcggtgctacctcccta

SEQ ID NO: 238858 - DNA, 717 bp, Homo sapiens
tgagcaacaaattatatactttaaaattataagagtaaaatttttaaagaaagaaagaaaaatagaaaaaaattgtttaatcaaaaacactttggaaatcttaaaacacacagaaattattgaggtctaaccaaagggggagagactctatgtttgccaagttcaccaaaaagtgatagttctttctcatatccccaccagttacagtgctctaaggatgttaaagaaatggcatgagcctacagattcacatctggaaacagcagcatataaagagctggttgtcttcccccatcccccgtccatgcctcagatacagctgagaaagaaagaagatgcaaaaaatttaaattgtgccttacatgaaggatagggtatggatttatgccttatatttccattatagcaaataaaaggcatttgggttggccaggcagaggagcatttgtggtgtacatgaccactctacttatcaaaaagacttccctttataaacaaagtaagaaggaatggttgcatcttgcctactacacacacacattttttttttaatggccactcctaatagtttaggaatagtacaaagaaactggaaaaaggatgtgttaggattagatttagttgcatattacagaaaggtcaaataaagtggctttaacaagttagggtttttatttttctttaatgtaaaatagcccagaagagatgtccagagca

SEQ ID NO: 238859 - DNA, 478 bp, Homo sapiens
actagagaatgagagagtaggaaggcatgcaggacagaaagtggtagccaaaaactgctgtgatgagcccatgagagctgagacgggactttgcttcgggatctattcaacttcttattctattatgacgctggaaggagggatggagagtcttcccaccacagaggaggccagatcagagtttggccatgcaggaggagcagctgcaggtgtgtggacccccacaactccaccccagccaggtgcctgtggtagctcccaggaaacgccctggggccggcacccagcagccagtggcgggcaccatcagtgactaacatggatccattctgtggccatctaaaacaacaggctgcattttgctcttaaaagtcagcccctcccagctactggggaggctgaagcaggaggatcacttgaacccaggagctggaggccagcctgggcaacatagggagatttagactcaaaaaaaaaa

SEQ ID NO: 238860 - DNA, 377 bp, Homo sapiens
ctcttgtcgcccaggctggagtgcaatggcacgatctcagttcactgcaacctctgcctccctggttcaagtgattctcctgcctcagcctcctgagtagctgggattacaggtgcacgccaccatgcccagctaatgtttgtatttttagtagagacgaggtttcaccatgttggccaggctggtcttgaactcctgacctcagatgacccgcccgcctcagcctcccaaagtgctaggattacaggcatgaaccaccgtggaagaccaggagtttcttttccttactccctttattttccttaaaatcaatgaacctaatttttcctggcttcttaattgaatctgtgggctgcatcatggtcatcgttttcatt

SEQ ID NO: 238861 - DNA, 768 bp, Homo sapiens
taatacagatacttaaaaaaacagcatttaagaatttactgatgtgaatatctactagttgattgtctactcttgaagtttaaagcatttttaggaatttcacatagctttcttttttccataaggaatgcaactataacaatttctatcatttacatttactttaaaaatgtagaaatcgctgccaacctgaaactctttggttgttcaaatttaaactaaggaaatatgaattaaaaaaactaattaaataaacaatacaagccagcaagattctgtgtgacttacccagttttttccttccctccaccttctgttgaaccaaagataaatcttacatttgaaaaacacttaatacatagtgataaatatcaatatcattcactattttcagaccttacttgtaatagggtaataacttgatttttagtaaatcagagaccatcaagtactgaaagccaaagttgttcttatgtcaacacaggccaagggtaatgaattaatctgtcttactctttgtaaataatttgctgattaataaaccttaacatcacacaatttataacatactgagcttgatttattaatgctttacttgaagaaaagactaatctctgtgactacatgtgggttgagtaggggtaaggtatgcaaaaaatcccttctgaaacatgaaaaaaaacatggcatatttatgactacatttacactagagcaatcaactagataattgttctattgtgaaccaaccattataatgaaggttaa

SEQ ID NO: 238862 - DNA, 408 bp, Homo sapiens
gatggagtgggaagatgatcttcccctggagttccatcattctatggcctatctcctctctgacagtccccagtcaaactcctcttgatgttcagatgctccttatcttctccccttctctgctgtgccactctgctgctctgtgctcttctgctcgtggagcctgaggtttggggtttatatgggtacaggatagtggggtgtgatgggccaaaaggcaacattagggcacaaaaacaggaatgcctgttcccatttagggccatgggttttcaggcttgagggtggggcttttgccagggaacctccctcttctacccagtgtttcccagcctcctgtccatatcggtcttattaaccaaaaagtgactgaggcaagtgtctccattgatagaggatttttagcca

SEQ ID NO: 238863 - DNA, 287 bp, Homo sapiens
aatggcaataatgaggtaagccaggcagatacctttgggcatctccaagtccttgcaattggccaagacaacagctaacaacatttgaggctttaagaaggttaccctgtgatccactcatctgatttagtggctttggctgaagctctttggatatagttgaaggtatggaaagggtccttacatgaggactttagggtcaagtctcttgctaacatcctatgtgaccttgggtaaattctttgacccttatttttcttacctgtaaaataaaagaattgggctag

SEQ ID NO: 238864 - DNA, 429 bp, Homo sapiens
cagcaaaacgtgttacccacctacataaagggactcgctgacaggcgtgcgtgctgtcagtgagctgtagctctcccggacagaccctgaacggtggcaggtgagcactatgctgcaggccagaatttaaataaacaaatgaataaaatgtcctcttcactaacacatttacagggagttcagccacttacacacagagagaggcggaaacttgatcctgagggctccacaaaatcaagctcacctggcagcacaaattattgggttgatggtctccagtgggtgaaaagttggcatataaaacatttgggccgggcgcggtggctcacgcctgtaatcccaacactttgggaggccgaggtgggcggatcacctgaggccgggagtttgagaccagcctgaccaacatggagaaaccctgtctctact

SEQ ID NO: 238865 - DNA, 979 bp, Homo sapiens
gagatggtgtctcactctgtcccccaggctggagtgcaatggcgcaatctcggctcactgcaacctccacctcccgggttcaagaaattctcttgcctcagcttcccaagtaactgggattacaggcgcacaccgccagcccagctaattttttatttttatttttttttattttttagtagagatggggtttcactgtgttgcccaggctggtggtgtgtgcctgtagtaccagctacacaggagactgaggcaggagaattgcttgaacctgggaggtggagtttgcagagagccaagatcgtgacactgcactccagcctggatgacagactgagactccatctgaaaaaataaaaaagaaggggatactggtgtggtgacactggtgaagtgaagtattcttttcccaagggggaaacaatatgtaaaagggagagataacatagtacttagaaaatatggccaggcatggggctcacgcctatgggaggccaaggtgggcaaatctcttgagcccaggaacttgacaccaccctggacaacatggtgaaaccctgtctctacaaaaactacaaaaattggccagacatggtggcgcatgcctgtggtggcatatgcctgtggtaccagctatttgggaggctgaggtgggaggatcgcttgagcgcaggagggcaaggctgcagtgagccatgaccatgccactgtactcaggcatgggtgacagcaaaccgtgtcaaaaaaaaaattaaggaaggaaggaagatgaaattaagctagctatttggggaaaaataaatttagagctttgtggcacagtgtataccaaagctaattccaagtagattaaagggttaactattataataataataatgcaacaaaatactagagaaaaagattggcaagtgtttatctcatctttggatatggaaaatttttctaagcaaaaaagtaacagaagaaatcataatgg

SEQ ID NO: 238866 - DNA, 935 bp, Homo sapiens
gagatggtgtctcactctgtcccccaggctggagtgcaatggcgcaatctcggctcactgcaacctccacctcccgggttcaagaaattctcttgcctcagcttcccaagtaactgggattacaggcgcacaccgccagcccagctaattttttatttttatttttttttattttttagtagagatggggtttcactgtgttgcccaggctggtggtgtgtgcctgtagtaccagctacacaggagactgaggcaggagaattgcttgaacctgggaggtggagtttgcagagagccaagatcgtgacactgcactccagcctggatgacagactgagactccatctgaaaaaataaaaaagaaggggatggggaaacaatatgtaaaagggagagataacatagtacttagaaaatatggccaggcatggggctcacgcctatgggaggccaaggtgggcaaatctcttgagcccaggaacttgacaccaccctggacaacatggtgaaaccctgtctctacaaaaactacaaaaattggccagacatggtggcgcatgcctgtggtggcatatgcctgtggtaccagctatttgggaggctgaggtgggaggatcgcttgagcgcaggagggcaaggctgcagtgagccatgaccatgccactgtactcaggcatgggtgacagcaaaccgtgtcaaaaaaaaaattaaggaaggaaggaagatgaaattaagctagctatttggggaaaaataaatttagagctttgtggcacagtgtataccaaagctaattccaagtagattaaagggttaactattataataataataatgcaacaaaatactagagaaaaagattggcaagtgtttatctcatctttggatatggaaaatttttctaagcaaaaaagtaacagaagaaatcataatgg

SEQ ID NO: 238867 - DNA, 717 bp, Homo sapiens
gagaatccagctgtctgaagtcagacattaaagagatttacaaaaatataaactaatgccactattctcgctattttttttgctttgaaaataattatttttatataaatatattatttatgtttaagtttatgattaagtaaactagcacatatttttaaagtttctcagcttcttttccaatgtagtaaatattgatatatatagtccacataaatggaaagttctttggaattctcagtaacttttagagttcaaaggcattctaaaattaagaaggttgagaatttctgcattaagccaatgtccatttgtcatttgagttattggaacctgaactataaagttttccaaacacacgatttggctcaagacagtaaattacagtcaagggtcctttttcaggacatctatttttcacttttccttccttgaggtaaaaagtgtgctatattgggtaattatagcatataaaaagtggggatgttgactgtgttttatctctcttccaaggcccattttatttccacaccactgaaaatgctttaagtcttggagaggagcccatggctgcatgctgcccatttttaactgctgccctcgaaggccaatttcgcaggatggctggggactctggtgtacagcagacggtattaatatgtcacaaccattccctgggtcacaaatatttttaattaaagttgtcctataaatagc

SEQ ID NO: 238868 - DNA, 663 bp, Homo sapiens
gagaatccagctgtctgaagtcagacattaaagagatttacaaaaatataaactaatgccactattctcgctattttttttgctttgaaaataattatttttatataaatatattatttatgtttaagtttatgattaagtaaactagcacatatttttaaagtttctcagcttcttttccaatgtagtaaatattgatatatatagtccacataaatggaaagttctttggaattctcagtaacttttagagttcaaaggcattctaaaattaagaaggttgagaatttctgcattaagccaatgtccatttgtcatttgagttattggaacctgaactataaagttttccaaacacacgatttggctcaagacagtaaattacagtcaagggtcctttttcaggacatctatttttcacttttccttccttgaggtaaaaagtgtgctatattgggtaattatagcatataaaaagtggggatgttgactgtgttttatctctcttccaaggcccattttatttccacaccactgatgctgccctcgaaggccaatttcgcaggatggctggggactctggtgtacagcagacggtattaatatgtcacaaccattccctgggtcacaaatatttttaattaaagttgtcctataaatagc

SEQ ID NO: 238869 - DNA, 377 bp, Homo sapiens
ggagacaaggtctcactctgtcttccaagctagagtgctgtggcacagttatggctcactgcagcctcgacccccaggctcaagtgatcctcccacctcagcctcctaagttactgggactaccggaatgcaacaccaggcctggttaattttttattttttgtagagatggggtcttgccatgttgcccaggctggtctcaaactcctgagctcaaataatcctcccacctccacctctcaaagtgctgagattaaaagcatgagccactgcactcagccttagttttttgtttttgttttttttttattttagctatgtagcatatgtgacagtctttctaaagtctgccagtctccttctgtcagcactgctac

SEQ ID NO: 238870 - DNA, 436 bp, Homo sapiens
gttagatcatttggttcacttaagtatatacagtttgcctaaaaaataagatagaggatatgtcagaaactctgcatgaggtagcgacaagcattcatttgcatattttttaggataaatagataatacaagtggattgtggatttggattttggtgttataacaagtgtgaaacaatggtaaaacaatctgatttctgtgtcggaatctgaggaatgaatatagatcttcctatttgcttaaatgttatttgttcctggtgctacacagaggtataagaatgcacgtttatatgaattttgcattgctgaagaagtcaaagctgatctgagctagaataaccagggtaataataatgacaaataatcaccaggcttgtaaaggataatagtgcttacgtgttcctattagaaagatgaaattgcagcgtttcatg

SEQ ID NO: 238871 - DNA, 438 bp, Homo sapiens
aaactaaagtgttgggggaattactgtaccaggttttcttgagtttcaagatatatcagatgaaacatctacagaaatatcagatgagaaaatgatgcctcccaaagaagatagtgttctggctttccaattatctgaggggaaataaacagcaaaattaatatcctgaactcagtctgaaccaaaaacggagccaaaagaaaccttcccctagcattttaactaacacagcctttcagagtagagatgaatggaggagctggatcagaaataatgcaggatgaagagattagatgaggctggtaaaataattataggctggtaaattttttgtaccgtgctgttgatcaactttgtagatagcttatgtacaccaagcttctttcttgcctgagaacagaatagtgtggtatttgggagcaaaatgttagaatcaga

SEQ ID NO: 238872 - DNA, 513 bp, Homo sapiens
acaccaacattctagtagattttaaataaaggtttaacttctgcttctgcttatactgcttgtccaacaagtgtgagtagagacacagcctgatggagacttaatcttaacattctcaactatgattaccaaagcagaaaaataaaacacattaaatcacatgctggcttatgaaagcctccatctttaagtgacatgtgcactctcgttcatagttcattggccaaagaaagtcacctggcatgcctaatttcaaagtggtaaaaaaatgcaattcttccatgtgcctagatgaatgaactacagcacatatgtggtgaatagcatggtgagtgtcacagtgaatcagtgtaaaatatacaactcagtggtttttagcatatttgcagagctgtgccaccataatcacagtcaattttagaatatttttatcacccccaaaagaaacccatacccattaattgtcattctctacacttttgatttaatgaaaactaatcagataaaaaaaga

SEQ ID NO: 238873 - DNA, 1032 bp, Homo sapiens
aatattggccggggcggtggctcacacctgtaatcccaacacttcgggagggtgaggtgggcagattgcttgaactcaggagttcaaaaccagcctgggtaacatggcaaaacccctctctacacaaaatacaaaaattagccaagcgtgatggcatggcctgtagtcccagttactcaggaggctgaggtgggaggatcacttgagcctgggaggttgaggctgcagtgagccatgatctcgccactgcactcccacctgggagatagagtgagaccctgtctaaaaaaaaaacaaagaaatataaatattgtattagggtttaccaaagaaacagaaccaatacgatatatgtatgtatacgggtatatatataaggagattcatataaggaactgactcacaagatcactgaggctggcaagtctacaggatgagccagcaagctggagacccaggagaactgatggcatagttcctgtccagaggctagcaggcttgaaatccaggaagagtcagtgtttcaatctgagtctgaaggcaagaaacaagctgatgtcccagtcaaaagatcagaaggcaggagagattctttcttactcagggaggatcagtttttttgttttattcaggcctctaactgattggatgagactcactcatatgttagggaggtcaatttgctttactcaggctatccatttaaatgttaatctcatcccaaaacaccctcatacacacacccaggataatgtttcagcaagtatctgggcactctatggcccagtcaagttgacacataaaattaatcacaaatatgttccagtaacttagtttttaaacaactagattcttatgagaataaactcaggataggataggggaaatgctttctggctttccacttgcatattcttggaatgtcactttttcttaaatgttaaaaattgaaggccaggcatggtggctcatgcctgtaatcccagcactttgggaggctgaggtgggtggatcacgatgtcaggagttcca

SEQ ID NO: 238874 - DNA, 166 bp, Homo sapiens
ctgctcctatactgatgaatcaatcttgcaccccctccctcctgttacatatggtatctgttcatgttcctcactgaggcctctcttaagcactgggctccatcctcacttccctgttcacaaaggagatgggtttttgccatgttgcccaggctggtctcaaact

SEQ ID NO: 238875 - DNA, 566 bp, Homo sapiens
tcatgaccacactgtccgggagtgtccctcactgctcaaaatggctcctcaggctctcatcagttgtttcaaagctcaaccctccaatgaagagcttcctcagttgttctggctctttaggagactctgacttagataagacggccaggagaagagagactttaatgatgcttcttccgtggcatccatgggcagaaaggcataaataaattattaataagtttctagaacattcactgactcgcataaaaaataaagacctgagaaaaaagtttttacatgactctaaagaatgttaggaactttccatgcagaaggaaaaaaaatgacagaaaaatgatatagatccatttctgctttctagataagtcatctatacaggcaattagtcagttatttatttgtttctctgtggtgcatttatcaaagtccactgatgtctattggaacttgagttgcaacatggaacttgaagttctattttctcagccttttgtttttccattatccagaattcaaccagctgataattagttttctggaaatttctagtgcctttgatttaa

SEQ ID NO: 238876 - DNA, 516 bp, Homo sapiens
agctctacttcccccagtttggtagtaatccagctcacaaatccatccttacagcctactaatccatgttacatcctactagttaacgattgtcttctaaatgaggaatgccttccaattatttttatgtgcaaatacaatactgcaggtgcttaaacatcaataatggtaaaaacaacatggtaattgctctagactgaatgtttgtatttctctcaaattcatatgttgaagccctcaaccccaatgtggctgtattttgagatagagcatttacaggagtaattaaggttaaatgagtccacaagggtagggctctgatccaaaagaaatagtgtccttataacgggaggaaccagagagctctctctctctgccatgtaagaatacagtaagaaggttgctgtctacaaactaagaagagggccctcaccagaattcaatcatgctggcaccttatcttggactttcaacctccagaattgcaagaaaataaatttctgttctttaagccac

SEQ ID NO: 238877 - DNA, 406 bp, Homo sapiens
agagggcgtattgagattatttatgtcatcttttctaagaagacagttttattcctgccatgggataggaaaggtatcctttgatgtggtaaaccatggctggcattctcctcgatggctgctctaaagttgaaagaattggtggactcctggccaggcacagtggctcacacctataatcccagcactttgggaggctgaggcgggcggattgcttgaggtcaggagttcaagaccagcctggccaacatggcgaaaccctgtgtctactaaaaatataaaaattagctgggcatggtggtgggcacctgtaatcccagctactccagaggctgaggcgggagagttgcctgaaccactgcacactagcctgtgcaacagagccagagccagactccgtctccaa

SEQ ID NO: 238878 - DNA, 364 bp, Homo sapiens
ctacctcagcctaccaaagtgctgggattacaggcatgagccaacgcgcccagcctagaatacattttctaactttggatattcctggacacacatttgtgtggctagtgcatgtggttaagaaaaagggactgttcaggaaagatacttgggagtggggagaattatctactgggatgtacttagcatcatatcttattaaaattcttctggaagggcttttttgttacttagaatcttattttaacattaagctgatttgatttggtttggacatttctatattttttccctttagaagtgatttttaaatagctatcacaaaggttgagactaataaaaattgcttccactctaactcacc

SEQ ID NO: 238879 - DNA, 493 bp, Homo sapiens
taccttacacaaatactgtcatgaacctggcctcttatgtccccactcagtgcctcagattccttcactgctataaaataaggggttaaacagatgaccttcaggaccccctacctgtgccattttataatttctaagttgattccatgaggcagccgctgatacctgggccagagatatgggcttaggtcaaggacaagacccagtctttccagatttcatctctccaagctgacacccaattcaaaaaaaggagaaaaccaacagagaaggaggagacagggaatagcagaagaaatcagggcagccaaaaaagatattacaaattccatatattttatacgctgcgaagctttactcacgctacttactatttattttatatacaagcttagttatctggtatccaaatcatagaagataaaagctgcaaataagaacagagaggaaggagccagctagtacagaaacaccaaacaaagatgtgacagca

SEQ ID NO: 238880 - DNA, 421 bp, Homo sapiens
ataacaaggcccatacttgttatgtgtttgatagtagtgagcagcaggaaccagaggcagtacagagccctgagttatttggagacctcatgaaaagccttttgagcccagtctgacttcttaaaatcacaaccggccaggagcagtggctcacgcctgtaatcccagcactttgggaggccgaggcgggcggaggtcaggagtccaagaccagcctggccaacatggtgaaaccccatctcttctaaaaatacaaacattagccaggtgtggtggtgcatgcctgtaatctcagctgttcgggaggctgaggcacgagaatcgcttgaacccaggaggtagtggttccaatgagctgagatcgtgccattgcactccagcctgggcaacaaaatgagactctgtctcacaaataaaaact

SEQ ID NO: 238881 - DNA, 504 bp, Homo sapiens
tgttaagcgatgcgtgacggtacttgttgaatgaatgaatctgaacacatctgttgatgttctggtttgggactataatttgttgtctaagtttgagtagaatttgtgactccaaggaggtgggcttaaaaattgtttttggagatagttaattgttgtgctgatgagaagcagctttttctttcattttgatatttcatatgaggcgtattcttacgtcattaaaaagtcttcacacacaccctgcttggatatgcctcagatgcacacaccacaacatgctgagccagtcttccctcccctccagctccctcccctcaagccagctgctccccttgcccctgcccagttcgttttgatggttacagaaatgcctctcacccccagcagctttgaattcttgttatttttaattaatctttgctgcctttctatacaagacataagccaaacaatacaattaaatgacagtccctgcttaaaaaaacccaaagggcggccgct

SEQ ID NO: 238882 - DNA, 415 bp, Homo sapiens
catgagatgcagattctgtccaagccagaattcatctagaccctagggcagtgccagtgctaggctgagcaccatcagctctcccaggtccttgtcacctgcttgggcacgtgcatggaacccgagccaacttcaccccaccctcgtcattacctgggagatgcacaagacaaatgttctaatgactgcatgcactgcttaagtattggccaacacgaactccccagttattcatgccagccaggaaggaaacgccttccttccccaccattcccagccctccttcccactggccagcacctgaacccagtgaacacaggcattagtggtccagggtcctggcttggagccagtgagtagacaggcaagcagaggggacaaaggtagctgggttatacatgaatattctcattac

SEQ ID NO: 238883 - DNA, 1645 bp, Homo sapiens
  misc_feature (1449)..(1449): n is a, c, g, or t
atatatgtaaaactgattgaaaagcattaagaacaactaattgccaatttgtatttgggctgtttagttgatcgttgtagccttgtgtggcaccaggcaaagactaagccacaattctgttggttgaggaaatatttaactggaagatgcttttgaatgaatgatcagctacccaggtactatttgacatacagcagtcttggggcttccatgacttattctcctatcatctgtttgcatgataaaattacaggtttccatgtaatctttagcagatgtatttgctatgatcttggaagacagggcatagcttctctggaattaagggaatggcccaggaaaaagaagaggtgcccacagataaaatggtcagttatttttatatatgtgtgcattcttctgtggtgtgcagaacaccaaattgcttggacctgtttattcccacagactcacagtcaaactggtcctgaatattaaatctgatggtttcattctcctgataaaaatcctttgtcgataaaaaatcctttgtcaagtctcctgaatgctagctaggcatacgagatccagcattattgcccctgtctacctctgataccattccgtgctatccctcaccattcatcctgtgttctagcaggtgcatctgcacacgcttgtttgaattctatggaaccagagatgtttgagcatagagaatgaccagattttaggcagttaatactgtatatatacaatataatgcataacactgccagtgaagtttggagcagcacctgtaatcgtgcatactaatatctctacagtaaaacatatgaatattcacaccaaacaggttaagtcagctttaaatggcttgatccattcagatcagattttaccatcaaatgaattgtgaaaagacttttggtatttgaaatgctttgggttgaagaagtgtggtagacctgtacttgcttttcttgaaaagagcctgtgctctcttattcatctggcctttgggcatgttgttttccctgcctggaatggccacatctccctctgcctgttgagtagcatcattactagaatcatcattgcatatactgaggatttactatgttgttactcccagcaaattctatggtcgggggggcgggggggggtgttcttattgtattacatccccccagtgtttagatgaggaaactgaagcttggagaggtcacagagctaggaagaggtagagctgaggttgaaccaaaaagtatggagacaacaaaccttgggttcttagttactacactgtccgtgtgtgcgtcttccccaaaggtccagttcaggtgtcaccttcctaaggccctcttcccttcctccaccacgtttaatagattatgactcctctgggccttcacagctgtttatgcatagctgtggtgcactgcttctcattctctgtctttcccatgngcctaaactccttgagtagttggggaaaaatgtctacttcagtgttctatctctagggcatacagtaggtagtcaacacatagtttataattaagttagtttaaagtgatacggtaacagataacaatttgtatcatcattaaaataaatagtaaacaccaaatcacaagttcaaggatataaaatttggatttac

SEQ ID NO: 238884 - DNA, 577 bp, Homo sapiens
agactgatttttccatgatggtgtcggtaatcaagggtcctgtgtgaagttctttagtgtctcttaaacaagaactaaattcatttgtctcattgctgcaatttgccatctgttctgctacaacgaaggaattgcattcatgagaaatcttacattaccaaaaatcatgacatcaaaacaattgtttgactagaaaaaataattagggattggataatatcagactcataataacaatgttatttttcttatagaattttttctagtaaaagtttttcttaaaaatagctatgaaggtattagcaaaatttttcagtgaaaataatctagttttggactatatatagcatttgctctggaatagtagtctttgtttttctttacggcctacactatcattagcagagaaccttttacaccatcctatttccattgtcaccataatgaaacaccaagtctaccagacaaacccactgttacagacaacagcttctctcatgctaaggggctagttacagatctagtataatgtattcctaatactaattaaattccctaattttatccaaattgctcc

SEQ ID NO: 238885 - DNA, 476 bp, Homo sapiens
cactccagcctggtcaacagagtgagactccatctcaaaaaaaattattggctggtttaatagtagtaggttatcagaacttactaacattagtatcactaaagtaggtatacaacccctgctgctcaatttggctttagaaaaaacatttttaaaaactgctttatcataatccttttttccagtgcatttttgtgtttggtagattaaatgactgatttctttcttaaattacttggactgagttctagttactggacatgagaattaaccatgtccagtagtaagttcattttcctacagtgtgcctgtgagtggagaaggaaataggctgcaaaagagcccgatggaactttggggtgatggatatatttccatctagattggtgatggttctaggaccgtatgtattttcagagctcatctatttgtacttgtgtataaatacttcaataaacctaactttttaaaaagct

SEQ ID NO: 238886 - DNA, 643 bp, Homo sapiens
ggcaggcaagggggagtctctctgtgttgcccaggctggtcttgaactcctgggctcaggctgtcctccaaccttggcctcccaaagtgctagaattacaggcatgagctgctatacgtgggccacaggtaagattgtaaaagatccatttaggccttctttatcccttggtgatactcatatatctttttgaaaatcaaaaacgtagatataagtatatagattatatataaaagtccaccatttctgaggggaacggatcactcttacactacttttttttttttttttttttgagacagagtcttgctgtgtcgcccaggctggagtgcagtgtcgtgatctccgctcactgcaagctccgcctcctgggttcacgccattctcttacctcagcctcccaagtggctgggactacaggcacccgccaccatgcgtggctaatttttttttttttttgtatttttagtagagacggggtttcactgtgttagccaggatggtctcaatctcctgacctcatgatccgccctccttggcctcccaaagtgctgggattacaggcgtgagccactgcgcccggcctacttttgtttaaaaaatatatgtgtgtgtaaccacattcaggtaaaaaattattgcc

SEQ ID NO: 238887 - DNA, 310 bp, Homo sapiens
tcctttcacctgccccaaggcaggactctaatcttctatctttctgattgtgggttttaagacttttcccagaaagaatctgccctgtaccctgggggaaggaatgctgatgtcaggaagcctccataaaaacccaagggaactgggttcacagagcttccagatagctgaacacatggaggttcctggagagtggcgggcccagggagggcatggaggtttcacatccctccccctgtatcttgccctatgtgtctcttcatctgtatccttcgcaatatcctttataataaaccagtaaacacaggta

SEQ ID NO: 238888 - DNA, 478 bp, Homo sapiens
agtctatgtattatctatacctgctttcgtgctaccagagcagaattgagtcattacaacagagactgtgtggcacatcaagcctaaaatgtttgccctctggttccttatagaaaaacttgccaacccctgctctagataattcatactttactagctaattgttgaatgtgtgataatcttggcctaacaagattacaatatttttaatggcaaagaccatctctgtctctctatttttcagaccatctcttggaactcttctataccctacaatctctaacaaggtcctggaaagggagaggcttaaatgcatcagttggtttgctggttgcgatgaaagtttactagaccaggaaagaaactccttcatacctgtaaagagaggcagtcaagccctaggttcctggaatcagattgcatgggctcaaaccttggctctgctatttacttactgtggccttagcctcataatctt

SEQ ID NO: 238889 - DNA, 691 bp, Homo sapiens
cttagaaatcctctcctcccagctcctcacaccctctgacacgtgcacaccctgcatccacaaaagtggagcctgttgcttcccctggcattcaccgaatgtagggaaagaatgaaagcaatggcaaagcctcgctacatgggcagcagttacgtctatcatcctaacatgtatcgtgtctgtatcccctagagcacagtgcagtgcccccagagggtgtgggggactgaatggccagaaatgaggcactcagcagattcccctgagcaacccactcccaccagaacgcaccccgggcgaggaaaccctctgaaaacatctggagttttaattccacacctgcagcttgacaaggtccctccttggtgcagaggaaaagctgctgcaattttcctagtacaagaaaaagagcaagcaagccctaggttgcaaccggtagggttgtggagtacagtgggcacaccaaggtggggtgagaggaaaacttcagttctaagtcccctcccagtgccaccgttacctggagtgtggctggaggaagagaggaagagaacaggggttgggagagatgcacaccacatatgaatgacatgcagactggtttaaagtaatgatggccactccttgcctctttgaagttgcatgtctatcactatttgatttcatggcactcttgaaaaacctctcaagt

SEQ ID NO: 238890 - DNA, 422 bp, Homo sapiens
tcagactagccactcagggttaaaggaggcactgcctatggagtagaagccatttgttcctctgtgtaagtctagctgggccccataggaatcagacccatggtttgacctccttaaggccactgccaaccagctgagctatggcgtagggcctcaggaaacatgtgcagtacatcaggaggcagctgggtggttacaagactacgtcaggagtctctcaaactgtgtcttcacatcctagtcaggcctcaccagtcctctgcccaagccatgcacccagaacccagagcagttcatcaggataactggtgagtggctcccctggccagcatagctgccccagagcctctctgaaaaagtgagtgtgtgttgtgaacaggcacctcctacctgctgtgccctcctgctcgcttctcaattct

SEQ ID NO: 238891 - DNA, 475 bp, Homo sapiens
cctactccatctttgtgtccttgtttgtcctaagcagcatggtggcagccgtggcattcatcaggctaaagtgacaagatgccatttggcacttgggctagagatggcagggaagcagcatcatttgtctagggaaatgtcagaagtttgttgtctcacactatggaaattgaagatgtggacgcaaaaggagtgggtttaagagtggaagtttaataggcaaaagaatgaagagtttcctcgtgcattgaaagggtatctgagcaggtttccgggtttggggcgagttgcggttagttttatagatgagcttgaggaggcagtgtctgatttacatagggctcagaggattggttgtgccaggtgtgccatttaggtgatgcatgaagaggctggccattccaccccaaacttttattatgcagatggggtctctacctggcaggtgccatgtcgcctgcacaggtgaagacag

SEQ ID NO: 238892 - DNA, 412 bp, Homo sapiens
caggctcgtaaattaaacactggtttatattccagctcactgagtgaacttggtcaggttatttaacctctgtgagcctaagttcctttgtctgaaaatggaaataataatagtataagagtagcttatggctgggtgcggtggctcacgcctgtaatgccagcactttgggaggccgaggagggcagatcacgaggtcagaagatcgagaccagtctggctaacatggtgaaaccccgtctctactaaaaatacaaaaaattagccgggcatgctggtgggcacctgtagtcccagctactcaggaagctgaggcaggagaatggtgtgaacccaggaggcaaggcttgcagtgagccgagttcgcacactgcactccagcgtgggacacagagcgggactccatgtcaaa

SEQ ID NO: 238893 - DNA, 378 bp, Homo sapiens
agctggaaggtactatggagcagaactgccacagcctgagtacctacctctggaactttctgtgagaaatgaaatgggcccaacagttccataaacagttgttttgggataaacatagaaatggcccctagcttgaaatttgcatttgttttatctgagttccctcctcaggaaaggaccttcaggcctctcaaaaaagtatcaagagaactgacaccagatgcctccttgcccctccctagttcctgttttcttaaacattgttacatatcttccctgctatgtaagcccctagatttagtcagtcagggagatggatttgagactgagctctcataacttggctgcagcacccgattaaagccttcttccttggca

SEQ ID NO: 238894 - DNA, 499 bp, Homo sapiens
agccctccctgacccccaagcatgagccaagcatccactaggctctcccactccagccttgcccattctgggtcatcaccgtgggggacttgtttgtcatccccagtggactgtgagccccaagatagcagacctgaggctgtcactgtcatgactgtgtccccaggaccgcctaccactgggccgggcataaaagaggcactcgaggaagtgtttgctgagtgattcaatgtgtcagctccagagccagactgcctgtatctgggccctaaagctactgcttgattagtgatgtcaccataggcaaatagcttaagctgtatgactcagtttcctcatctgtaaaatggggtgatggtacctaataatacagtagagcacttaacacagtaggtggcacatggtaagccacatactgagtatgtatttgctatgattgttattgctattattactattattgttattattaacataaactgcacaagagcaggctttt

SEQ ID NO: 238895 - DNA, 454 bp, Homo sapiens
tcagaagcatttgcattttagcagggcacttttgaatagtgaaaagccattaagtcataaaggaacaaatttctaatggaattgcagtgggtaacataaaatatagtaagatggcgttcagatgtgtataaaatgaaaagaataaggtggggagggagttcagaagagttattgcaatacattcttccatgccacttttgaaggcttttagttctaatccactgacaaatttttgctctgccatttttgttgtagtaatacaaaacagatgtatgacttagaaaggggaaaggacctctccctactacacagtatattacgaacttggaaacagattaaatctcttcgacatgggcaagggtttacaagcaccccaataaagttacaggttcagaggattaaaatgaataaatgtgatgaacaagagcaaatctcagaaatgtctgaaactgag

SEQ ID NO: 238896 - DNA, 579 bp, Homo sapiens
ggttcaagcgattctcctgcctcagcctcccgagtagctgggattacaggcgtccatcaccacgcccagcctatttttgtatttttagtagaggcagggtttcaccatgttggccaggctggtctcgaactccttacctcaggtgacctgctctcctgggcctcccaaaatgctgggtttacaggcgtgagccactgcactcagcccaaaatctttaactttttaaagtaagtgatacgttaacatgattaaaagccaaaagtggccaggtgcagtgggtcacacctgtaatcccaacactttttgggagactgaggtgggagaatggcttgaggccaggagttcaagtctagcctggataacatagcaagattccatcttgacaaaaaacaattaggcgtggtggtatacatgtatagtcctaggtacttgggaggctgaagcaggaagatcgctttgtctgggagtttgaggctgcagtgagctgtgattacacgactgcactccagcctggacaggtaatgtctgtcaaaaaataaataaataaagtcaaaagtatgaaaaagttatacagtaaaa

SEQ ID NO: 238897 - DNA, 222 bp, Homo sapiens
cctttaaaacttaattcttttattgtttcctttttcttctaatgcttatgtaaagaaattttgatattatagaactgtagaattgtagaagtgcaaacttcctgtattctttcctttcccagaaactgttatttttgttgtatattctccagcctggacaggtaatgtctgtcaaaaaataaataaataaagtcaaaagtatgaaaaagttatacagtaaaa

SEQ ID NO: 238898 - DNA, 724 bp, Homo sapiens
ggcagaggccttgctgtgttgctcaggctggtctcaaactcctgagatcaagtgatcctccctcctgccttggccttgcaaggtcccaaagtgctgggattataggcgcactcagcttaaacttctttgttaaaatgtgtgtgctttagtagattccttatccatatcctttgcccgttatttcccttcagtggttgtcaccttcttattccttttcattgttcaggaatcacatttttacaaaggatttacaaacatatttgaccataccttacagttccttggctttcatactttattcctagcagtcttttcttacctttgaacctctttgtttccatcttttaatggcttctacttttttcctagcctttatgtattaccagaaatctataatgggaggtagcactgtgcaatttataacatattcccttctccagtttagggtaccccttttctgtcgaggaaatacctagggaaaagaagttagaacagaaggagataggcctttatagaaaaataatttcttatcagaaaataaatacactttttttttgtttttgtttttgtttttgagacggagtctcgctctttcgcccaggccgaagtgcagtggcgcgatcacggctaactgcaagctccgcctctccggttcacgccattctcctgcctcagcctcccgagtagctgggactacaggcgcccgccaccgcgcccggctaat

SEQ ID NO: 238899 - DNA, 350 bp, Homo sapiens
cctgctgaatgtgaatgaaaggggatcctccaacccacccacacctgccctctgtctctacctggccctaacagttacagggggtggaggaagacttgctctatcccaggggcaactcagcattggaatgagacagtgggaactggcaaacacatgacttggttcaggctcttggaacctcgcagatcttggtttgacttcctgggctgctacttgcttacttgttttgggccagaaggccctgggtttgaatctcaggttgacccttggacaaacatctacaggtgtggaagtgagcaccacgcctctggctggacaggcttctgaagctggcaggctatgtacttcct

SEQ ID NO: 238900 - DNA, 646 bp, Homo sapiens
cggaaatctggccactgggccaaggaatgcccgcagcccaggattcctcctaagccgcgtcccatctgtgtgggaccccactgaaaatcggactgttcaactcacctggcagccactcccagagcccctggaactctggcccaaggctctctgactgactccttcccagatcttctcggcttagcggctgaagactgacactgcccgatcgcctcggaagccccctggaccatcacggatgccaagcttccgtaactctcacagtggaaggaaactgaagcatatgttacctgggcatccttgttcttagagcttccaagatggtggcaagcctcttgttctctgacctggggttcttggcctcacggatttcaaagaatggattcttgacccatgcggtgaggtgttatccctctattcagctcgattaggacgaactcggggcacttagccctcgcaggaacaatggcgagcctctagcccgattgggagcggcagtgggcgctgcctcactgggtcagaagtgcagcagacaccctgccggatctagaggggtgaagtcagccgcgggtctgcgacagcggcaaacagcagtggtggacagcgagcaaaagctcagctcgagcagtaataaatatgggccaga

SEQ ID NO: 238901 - DNA, 87 bp, Homo sapiens
caaggaatccccagtaagtgttttggcagattcctcagccgaagtttgaagaccacaaggcagtgggatgatatatttaaagtgtta

SEQ ID NO: 238902 - DNA, 572 bp, Homo sapiens
caaactgatgggattacaggcatgagccattgtgcccaccctaaatttagactttaaaaataaatgtatattttactcatttcaacagcatctacatattgttgaaaacatcttcatttagacttgcttatttaagcattcaacaaacacttattgaacatcaacaatgtactgtcagataggtttctgatttcatggagtttaccttgtagtgaaggaggggcaaagaaaaggtaagataatctcagataatgacaagtactctgaagaaattaaaataggatatgatagaaaacattacttaagatgggtgttcagggaagacctctctgaggggattgcctttaagctgagacttgagtgacaaggagtaagtgaaagtatcatctgcctacagtcaaggagtgacacatatacacataaatttaagtccccagattaagaaccactgtcagccaggagcagtgactcatgcctgtagtctcagcactttgggaggctaaggtgggaggattgcttgaacccaggagtttgagaccagcctgcataagagggtgagactccatctctac

SEQ ID NO: 238903 - DNA, 687 bp, Homo sapiens
atgtgatctcggcgcaccacagcctcctcctcccaggctcaagcgattcttgtgccttagcctctcaagctacaggcacacaccaccacgtccagctaatttttgtatttttattagagacgagtttttgccatgttgcccaggctggtcttgaactcctggccttaagtgatcctcctgcctcggcctccttaagggctgggattacaggcatgagccaccacagccggcctagtgtgaaagcagtttttaaggacagttgaacaggaaagctcctggattcctgcacatagatcttgtgcccctccaaagtgccgtaagtaccgatttctgctgtcttgatttaactcagtgtctggagcttacgatccttcctctctgtttccttcagtggcgtagcttgggggtgtcaattaaagagttattgcaagatctcagcctctgaaagtttagcttattcatcagcaaaactttaagcaagtctcacctcttctaaattagaattgtaaccttgactttagtctcagagttaacattgtgcagaaaaagaaaacactgcgcagtgttgaagcagtttgcaaactgaaatgatacaaatgaaaaatgctatgatgtttctcagtagtctctgtatttgcaaatgagtcagttaggattagttttacccacaaataacaacaacagtaa

SEQ ID NO: 238904 - DNA, 549 bp, Homo sapiens
catagtgtaggagatagcaggcatgaaccatcactcctgagcctcatttaaaaattttctaaccttgattgagcatgagccaccacagccggcctagtgtgaaagcagtttttaaggacagttgaacaggaaagctcctggattcctgcacatagatcttgtgcccctccaaagtgccgtaagtaccgatttctgctgtcttgatttaactcagtgtctggagcttacgatccttcctctctgtttccttcagtggcgtagcttgggggtgtcaattaaagagttattgcaagatctcagcctctgaaagtttagcttattcatcagcaaaactttaagcaagtctcacctcttctaaattagaattgtaaccttgactttagtctcagagttaacattgtgcagaaaaagaaaacactgcgcagtgttgaagcagtttgcaaactgaaatgatacaaatgaaaaatgctatgatgtttctcagtagtctctgtatttgcaaatgagtcagttaggattagttttacccacaaataacaacaacagtaa

SEQ ID NO: 238905 - DNA, 506 bp, Homo sapiens
acctctatgttctcagtctgctcagcctgtgttagtggagaagagggaaggaaactggctggaggccgctggacccacagaggacaatagacaatctcctgctgatgcccactggatccaaagagagaaactctatagaattatgatctaggtttgactgactcctggcaagaagccctacccgccagccaatttggatgaggtcacaggggtcatccatctttccttctatgtgactggtttgctcttgcatatcatgttttccgctcttatgctccagatccatcatgagaagacatgccctggattcctgctatccctttagccatggctccagaattaacacacacaaggaagacctgaggtcaatccacagcctggattcaagtcacctattacgtaggagaatcagagctacccagccaaactcaatctacgttaactgaacctcagctgacctgcagatttatgagtatgagaataaaggcttgttaatgtatatcatt

SEQ ID NO: 238906 - DNA, 390 bp, Homo sapiens
ataggattgtacattcatacctttgtctggtaactttgctgtgccctcctgctgggtttgtttcctcaccccatgtgacttgctttggcaatgaaatatgagtagatgttgcaagagcaaaggtcttacctgtgtttttttatgatttggctcagctcttatgctccagatccatcatgagaagacatgccctggattcctgctatccctttagccatggctccagaattaacacacacaaggaagacctgaggtcaatccacagcctggattcaagtcacctattacgtaggagaatcagagctacccagccaaactcaatctacgttaactgaacctcagctgacctgcagatttatgagtatgagaataaaggcttgttaatgtata

SEQ ID NO: 238907 - DNA, 272 bp, Homo sapiens
taaaaggttaagaaagagggaatcctccctaactcattctatgaagccaatatcaccccaataatgaagctaggaaagaccataaccaaaaaagaaagaaagaaagaaagagagagagagagaaaaaaagaaaaggaaggaaggaaggaaggaagaaagaaagaaagaaagaaagaaagaaagaaagaaaactacagatcattatcattgatgaacatagatgcaaaaatcctcaacaaaatgctggcaaactgaatccaacagcacatttt

SEQ ID NO: 238908 - DNA, 674 bp, Homo sapiens
tctctactgaaacgccaggtacgaagggacaggccctccacagtcaccttgtcacattcctttggggagcgaagagttcagacccaacatgtcacccaaattaccctggccagccaccacgtaaagatgctgcggctgtgcatggtggctcacgcctgtaatcccaacacgttgggaggccaaggcgggcggatcacctgaggtcaggagttcgagaccagcctggccaacatggcgaaatcctgtctctattaaaaatacaaaaattagccgggtgtggtggcacacacctgtggtaccagctactcctactggggaagctgaggcaggagaatcgcttgaccccaggaggctggagtgcagtgagtcgagatcacgccattgcactccagccggggtgacagagcaagatgccatctcaaaaataaataaataaagatgcttaacatcactcagatagtagtggggtgattctaagaacatgtcctattgtctacagggctcatgggtgcacagaaggatagacggggtagccactgcaacagggctttgtagaaaagtcagacaggaaccaacattgatgcccatatgtgaaacatcatgatgcagccataaaatggaataaagatggaatcccgtctgcatagacgggcatggtccaaaatccaagtgaa

SEQ ID NO: 238909 - DNA, 357 bp, Homo sapiens
agagcatggtcctcagcagttttaatttattatataaagaaaataaatgtgtagtttactgagcacaaggtatgtgccaagtaccattttaggggctcattatgtctaggaatactgattgtcatcaagtactctctaatactggtgagagaggttgctgtttgcctcctaatccagtttctcctcctctctgctaaaaatacaaaaattagctgggcgtggtggtgggtgcctgtaatcccagctactccagaggctgaggcaggagaatcgcttgatcccaggaggtggaggttgcagtgagctgagatcatgccactgcaccctagcctgggggacagagtgagactccgactc

SEQ ID NO: 238910 - DNA, 164 bp, Homo sapiens
ggacggcctcatttgtgtgggtggtggtttgtgaggtgggaaagctaaaatgaagaaatgcgtgctcatactgacgttcttgaaaatgcgtagtgacatttttttaaagctttattgagatataattcacataccataaaattcacctgttttaagtgtgcacc

SEQ ID NO: 238911 - DNA, 648 bp, Homo sapiens
actgaaggctgcactgtcagcttccctacttttgaggtttttggacttggactgacttccctgctcctcagcttgcagacagcctactgtgggacttcaacttgtgatcgcatgagtcaatacttgttaataaactccccttcatatatacatctatcctattagtcctgtccctctagtgaaccctgtgcccaaatggatgatgacaccatcccctgttgatatggacaggaaacagggaaacactaggtagaagagggtggttccctggcaaaggcccctatctcaagcctgaagtcctgtggtcctaaatggggacaggcatttctgttttcatgtgaagaagttgccttttggcccaccatgccctctatcctgtattcatataagccccaggctccagaagcagatgagaagatgaggagacaagcagatggattgcaaaatggtgcaatagagaaagagaaaagaagaggaatgtctgaacactgagagatttccagctggggtggtcagagaagggttcagccacaagatggccaaaatccagggaagatcttcttcccactccattccctgcttcttgttccccatccatcccactgagagccacctctaccactcaataaaacctctcattcatccttc

SEQ ID NO: 238912 - DNA, 395 bp, Homo sapiens
tgaaaagcagctctgtcctcattagcagtcactccccacttgttactcccccagcccctggtaaccactaaccccctctatcttgcatttgcattcattcattcatttattcattgtgagacagggtcttgttctgtcacccaggctggagtgcagtggtgcagtcacagctcactgcattccttgacctcctgggctcaagcgatcctgcctcctaagcctccagcatagctgggactacaggcatgtgccaccatgcccagctaattttttatgttcattattatttatttattttgagaatcacttgaacctgggaggtggaggttgcagagagccaagatcgagccacttcactccagcctgggcgacagagggggaatccatctcaaaaa

SEQ ID NO: 238913 - DNA, 410 bp, Homo sapiens
ttttggctctatcaaaacttaggtctcaattataacattactaaagtgcttgtaaaaattatcccagatttctggctacagcttgtataaaggcctatttttttttttttacagttttattttggttgaagatttttctccaaaatagctattccagatggcttaacagtcccagaagtgaaaaatcttaagatatttcatttataaccattagagtcttaataaaaccctagtaaatactctcccttctggatggtttaaaggtcccttcaggcaagctggctgcgtaaacaccagagccctcttcataagataagtttgctcaaaaggtcaacttttacagagaaattcctacctcattagtgtaagggaaaattaacatgacctgttttcattacttaaaatgcaaa

SEQ ID NO: 238914 - DNA, 448 bp, Homo sapiens
ccttaactctctgtgttggtgtctgagatttagacaaagcaggtacctctcccaatcttcatggaccggtcctgtacaggaggagactctcaccaatcagccacagattctggtgctttaccaaccctttctctcctgagggaaaagcaggcagctgttatttttgtctgttcattctgtgctgggaagggggtgagtagggggaagttatggtatctatcaccccagactaccacctctgttctctcctggccagactgtacaagacctatcaagagatccaggggagagatagaggcttgttcttcaggcagccccataaaagttggggcagtggtcacactgactctttctctccccagagagaagcttagagctgagattcttcatcagttcactctatgctgagcaggggaaagggtcagtgatgtctgccagctctagctgt

SEQ ID NO: 238915 - DNA, 396 bp, Homo sapiens
gagacagagtttcgttcttggtgtccatgatggagtgcagtggtgcgatctcggctcactacaacctccacctcccaggttcaagccattctcctgcctcagcctcctgagtagctgggattacaggcgcccaccaccacgcccggctaatttttttgtatttttagtagagacggggtttcaccatgttggtcaggctagtctcgaatacctgacctcaagtgatcccacccacttctgcctcccaaagtgctgggattacaggcgtaagctaccacgcccggcctgtattttgctatttttttatttttatttttaagaaataaaacagtatagatacaattaaagttcattgtttatctgtcctcaatcccgttcccttctgtcgtcttctct

SEQ ID NO: 238916 - DNA, 419 bp, Homo sapiens
aaagtccggggttacactggagttttgttatagttgccactgtgagcccagacaaagtgttttatttttttcgagacagagttttcttcttgtcactccagcctgagtgacagagcgagacttcgtctcaaaaaaaaaaaaaaggccaggcgtgatgggtcacacctctaaacccagcaatttgggaggcagagacaggatgatcacttgaacccaggagctcaggttcagcctgggcaacatggtgaaaccccatctctacaaaaaaatacaaaagttggcatggtggcacatacccgtagtcccagctactcaggagactggggtgggagccttgcttgagtccaggaggttgaggctgtagtgggctgtgatcacaccactgcactccagcctgggcaacagtgagaccctgtctt

SEQ ID NO: 238917 - DNA, 495 bp, Homo sapiens
gtaaatgctttggtttttatgactgtagcaactattttttaagaaaaacacctttagcaatttttaaataactttaatactcacagttgcaatttattaaatatctaaactgttcttagtgccgggatgaataactataaataagcatttttctataccacactctttgaaattccctaaacatgttctgctgttttacaaaaatgcacaccatataaaaacacctataattatttcttccttgtatgaaatgcctacacttccatccacatctccactttgctcccttggtgattgtccacacagtactcaaaccttattttattatttatttatttatttgagacagaatctcactctgttacccaggctggaatgcatgagccaagattgcaccactgcactctagcctgggggacagaacaagactccatttaaaaaaacaaacaaacaacaaaagtatccattcctctgagtcaataaaagatgtatgtt

SEQ ID NO: 238918 - DNA, 720 bp, Homo sapiens
ccgcttggtctgcctctgcttttctaaacttttcatcacgccatcagcaagactgtgagcctagaaggtggccaggtaaacatgaacatcacttcccttcacaggatctgcttattcacattctttgtctcttaagagagtggcccagtgaccttacccctaccagaagacaactgacaaaaaggggctgtggcagtccccagacgctgagatcaacacagaactcaaattctacacgtggagaacagcttggagaaaaaaacaatatgtgtaatcctgttatttaaacagtgctcaacagaagacacgattaattttatcgagctgtaatacagaatgtaagaagcctgagggaaattccttgttcttcaaatacagcctgttgttacctaagaccgggtgttcagggaggatgagagattcagcacgacacagaaactttccttcttgctataggagggcttcatatttagagggaagaaaaagataaaccatggtcattttctgtttgtgaagacttattccccaaaaggtagacatggaaaaaaatatggttatcaaaacaagtaagtgaaaatacgcaatataaatgaacccgaggttttaagtgagattctggacctactgggtgatctttggccaagtcagctaacatctgcctgtgacccagttctctttatcaatactgataatctctttattagtgctaatttctttcaa

SEQ ID NO: 238919 - DNA, 539 bp, Homo sapiens
atggctaagagaatatggacatttcatttttcagagctttcacagaaataggcagtttgtattggaaaattagagcaattcttccttccatattagaaatgttccattgctctctctgtaatgtttctctcacagaaggctcaggcacattaagtagcttgccaggatcagccagttcaccactgcccttttcctaatgtgaaatcgtatgaagtaaaggaaatcagcttaaattaaatgtttttgtatttatgctgcaaagatgacgactatgaaagcagtcttcagtctttgttgctcttgtgtctttcactgcaggtgtcacttgctcccactccccctttctgggtagatttctttttctctcacctttacaataagctatttttattaaaagagaaaaaaggaaataatgatatctatagggtcgatcattaagtttttgtcatctttcttggtcacacccctgaggggtgcagttctttgagggtcatggagtgtcttttctcagtgtattaccaggaatagttcatcttttt

SEQ ID NO: 238920 - DNA, 450 bp, Homo sapiens
aagacccaagtttttgcagttgagtgtggttgggatctggaggatgagaatgccgggcgttccctagacaaacaacagggacagactcacatagacactcacgcaggcactcaacacacataagtgcattctccctcttacagaagtatccagatgttagatgtgcatttgtgagcacacatacataagccacagaagaggccgaggtaggaggatcacttaagcccaggagtttgaaccagcctaagcaacaaagcaacaccctgtatctaccaaaaaaaaaaaaaagaaattattaataaattacctgggtgtggtggcatacacctgtattctcatctacttgggaggctgaggctggaaggttgaagctgcagtgagctgtgatttgtacactccagcctggacaacagagcaagaccctatcttaaaaaacaacaaccaccacca

SEQ ID NO: 238921 - DNA, 369 bp, Homo sapiens
tgccagtgcaccaggtagggccccagggaggagactgggcttggttctgatttaactcatgagaaataccaggaagttctgaggaagatgaaagaggaaaaggagacgctgcttcttgaaaaacaaatatccaaagcccaggatgactcctctcaaacagtgaaaccgggatcaattttggcagacaccacccaaagaaacatggagaggaccaccattaagaaacaggagagaaggtgttggtacaagtaagcggaagaatcttgcttttacctagcctagaccacatttcactctacacattacctgataagggccaaaagaacaagaataaacacatcatccactgatcagaatacataaggcagc

SEQ ID NO: 238922 - DNA, 457 bp, Homo sapiens
attcaataagtgattttggttacatagtccttgtaattcccttatcccttggttttgtttagtcataaaaggagacaactttctctcctgatgcaaattgtgatataaacttaaactgacacaattccactcacccactcaaaggtgtgtgtacaacatttaacttctgaaaatgtactttgtgttttaaacttttgagtgttcagtctcacctagaaattgatgaatctggtttcttgattctactcaaatctttctagaaactcttaactccttttttgaagaagttcatctcaaaagagcaccaatgaaggtttaaattcttcataatgacccccattaatgtaagcagcattggcccccaacactgcaacttatatgtgattatctgattatttttcctaatttatgatgtgtggcgataggaacagtaactgctgatcttctagtttattgg

SEQ ID NO: 238923 - DNA, 419 bp, Homo sapiens
gaaacatcatacttgcaatataatgaagatattttaagacagtttagattataatttgactaatttagattcataaccaaacactatcattttcttacaagaagacaactggagtacaaatggccacagattttcctattaaccgagtaaattggttaaaaggaaaatgaaattggcaaatttagtttggacttggcttccttgcgcttcgctttttgccttttactaaataaagattggtcatctaaactaatgagttttctcgattgtctgatgaatccaggatggagcagagtgattgacgctacacacctaaaaggatacggtaagaagagttgccaccagcagaagggaaaactcatctgcactctctttagtatgcctgtgagatttctttccaagtatagccaacaaatgac

SEQ ID NO: 238924 - DNA, 470 bp, Homo sapiens
gaggaagaaaagagttggatcacatatttaacgtttcaatttttccagggattgcctgaggaactggcttctgtctcacttgtcttagaatgcagatgagtcccagcatattctagacatctgggagctactaagaacatagctgatggttttgcctagcatacagatttgagaagcccccagaatctctggtcaggctgataggtgaaggtcttcttttgtttgaggccagtccatgaaggctggaagaggtagctgttttgtttaacatccagatatactaaaatgaagaaccaagggaaaaacaaccaggtaaatatgtccaaaacaaagtacaagattaatctccagaaatcaaacttaatgcaatggagatatattatgtctctgatggaaaattcaaaataaccatcagaaagatgctcaatgaggtcaatagaacatgcatgaacaaagtgagaatttcaaca

SEQ ID NO: 238925 - DNA, 333 bp, Homo sapiens
ataaacaaacaaacagacaaacaggcaaaatacccattacaaaatctaaaacccttctttcttgaaaacgatactcctgctattgctgttcaaggaccacctgcgtgccccttggggcccactgagcacctgccttcattctctccttcatttacggactcggtccacccacacagctcacaaacccaggtcatctagggccctggatgatggagtccacagaataaaccccacattctcctagttgccaccactcaccacaccctcccgtccttatctttattcgactcaagagaccagcagttatcgggcaaggtgcagaggttggtaccg

SEQ ID NO: 238926 - DNA, 638 bp, Homo sapiens
gtagggccaacataaccatggcaaccctcagtagtatgtgaatggttgcaggccccttgctggtctgtgagaagtctaatttcaagtacaacaagaaatgaagccagcatctaatggagaagtaatgtcgcctacactaacatacgatacaaatattgataaaactgttgccctcctaccaaatgggaaattaattactggatacatacagctatgaaaaaactggacatcaagattgtccatctctacctctgtgccaaactctagactttcattaataagaatgtatcaatattatttcagtcattgtaacatttaccacactcatgtaagatgtgattacaaaaaggatgctgaggtgggggaagggtgtatgagaactttctgtactacttcatcagtttttatgttaattcaaaacagtttcatataatgtccattaatttaaaaaatatggcagcattgttcaggaagtgtttcattttagttaatgtttaacaagcagctaaatatctaaatactacattgagatattctatgctattaaaactgaaacaattttgaagttgtaaatgtatcttctgtagttgtagcactagtgattgacttaataaacttaaatttgcacacatgaaata

SEQ ID NO: 238927 - DNA, 199 bp, Homo sapiens
tgtatatactctgacttagttctggctgctataacaaaataccatagacgtagtaacttatatacaaacaacataaatttatttctcaaagttctagggtctgggaatttcaagatcaagtctttggcagatttgatgtctggtaaggttatgcttccttgtatgtagatggccaagttctcccttctgtcgtcttctc

SEQ ID NO: 238928 - DNA, 405 bp, Homo sapiens
gccagaccccacatgatacgtggggcaagtagctctgagatgttctgattaatgtttccagaagtgtcacgaagaaagaacagtgtgctccctactcccaagcctttcaatggagagcaataaaggcaagggttacagaaatacggaaatctgacgacggtttagggagacatcaagcctctcccctgacgaatacaatcagaatccttcaccgggacccttactgagattaacaactcctgttcccatgtgcactgcttctaggatgaattaagggaaatggaaaatgcttcctttgctttctttcccatcaagcccagtttgtcaggctcacttgccatggcctctaaaacactccagaccagacaggtattgagtattccaatccaacagctggctcaccat

SEQ ID NO: 238929 - DNA, 693 bp, Homo sapiens
cccggatatcccggcgacgcgctgcagcctttcccgggcggctcgggttggcgaggtccgggagccctcggtgccgcgatgggaagtgcttgcccacggccggcctggggacacactcccgcgccctccaggcccctgagctgttcctgggaaagggcgtgaacgaagctcccgcacaacccctttctttctcttggcacttcccagtaaaccctccaggtgtccaggtggggcactttccactgccgggctcagccctgggtctgggtctgcggcccgtcccttcgctgcagagcgcggtgcaatcgcggtggggttggaaggggtcagggctcctgccgagccaagtctcctcctctgcctgggcagctacacgactggacctcagtgcccactacatggacaagccttgaaactcatccatccaaacatcagataaacctaaactgagagacatttcacaaaactacacaaagatgaagaagggctgaggaactgcaccagaccgaaggaaaggaaagagacagaacaactagatgcagtgcgtgatcccagcttgcatcttggatgggggggaaattgctgttaaggacataattggcaaaatttgcatgtggattatataacagtaatattgtatcaatgttaaatttcctgaattggatcattgaaacgtggttatgaaaaagaatg

SEQ ID NO: 238930 - DNA, 496 bp, Homo sapiens
aattataaattacttaataaggatatattcttaacaagactacattttgatgttaaaaagtatgtttacatgtgttttactaatacagggaattaattctcagtatgtggatagctataatgtctccaaagtgttcattatgccaggtttgtcagatttatatcattgagggcaaagctcaagagagtatatatttgcttttaactgcccctcactgttcatggccagtgtagtacatcctagtgaaaggaagaccatgcatcagaatgtttgttttgagcatttatttttagcagcagatctagaaattatattttcattttagggtatatattttttatttattatgaacattccaagactaaataattttagacatgcgtatgtgagtgcatgtgtacattgcatgcacgtgtgtatgtgtatgtgagagagtgagagactgagtctgagactgtgtgtgagagagaaggagagggagagagagggagagaaa

SEQ ID NO: 238931 - DNA, 477 bp, Homo sapiens
atgacccgcaccatggcagggacagaaggcattgccaggtggagtggtgagcagcgggcgaacttgcggagttgggaagggcccatcccagcatcaacactgagcatgtatcaatgtgggacaacgcaggaggagatgctacagatgctgctctgcctgccaagcacgccttccccttccccttcccttttcatgtagaaaagtgattctaagcaagctaactacagttcatcccagggcttccccagacaccactagaacagggtgcctgcttcagtccgcaagtgctaggtagtgcccatgccgcctcccagagaggagccgggagtgggggcgcagagctggaggcagcagcatccctggctctccacatttcagtcaggataccaaaatgtaccctatttttgtttcagccaaattgacctttgtttctgtttcttgcaacccaaagttccaactaacataatccccgaaaga

SEQ ID NO: 238932 - DNA, 423 bp, Homo sapiens
atgacccgcaccatggcagggacagaaggcattgccaggtggagtggtgagcagcgggcgaacttgcggagttgggaagggcccatcccagcatcaacactgagcatgtatcaatgtgggacaacgcaggaggagatcatgtagaaaagtgattctaagcaagctaactacagttcatcccagggcttccccagacaccactagaacagggtgcctgcttcagtccgcaagtgctaggtagtgcccatgccgcctcccagagaggagccgggagtgggggcgcagagctggaggcagcagcatccctggctctccacatttcagtcaggataccaaaatgtaccctatttttgtttcagccaaattgacctttgtttctgtttcttgcaacccaaagttccaactaacataatccccgaaaga

SEQ ID NO: 238933 - DNA, 280 bp, Homo sapiens
caaaaaaacccctgagttattattcacatagtataaaatacacagattttaagtgtacaattttgatgagtttatttatttatttatttttttgagactccatctcaaaaaaaaaaaaaagaaaaggaaagaaaagaaaatagctgggcgtggagcacacgcctgtgggtcccagctactcaggaggctgcggtagtaggattacttgggcccaggaagtggagactcagtaagccatgatcataccacagcctgggcgacagagtgagactccatctca

SEQ ID NO: 238934 - DNA, 451 bp, Homo sapiens
ttcatttttagtttagttctggctctgtcgagccaattattctcatattttttcagctgtaacatgcatgtgtgtgcacacacaaacacatagcatggctacttccacactcacttcatacccctaggttatattcagggatacctacaattcccagcattccagttacaacttcatctcccttctcattccactcaagaaaatacatggaataagaatgagtaagagtggcattatcatgagggttattttgaatgggcatatttacattcataaatatatatgcatgtatatatagaaaatcattcccatacttgctactaaaacacttattaatggcagttattaatgagacttctcttagaccaagggtttatgacctgtaactcccaccagccaaatctggcctgctgcctgttttgcaaataaagtttcattgaaactcagccat

SEQ ID NO: 238935 - DNA, 386 bp, Homo sapiens
gtaaagttcaagaccctttattttaagaaacactatagatttgtgcataaaataatttctctctaggttcacagatgtgttttcatgaactctgattgccacgtgccttcagaatgttcactctctgaactgacgtttgattacaaaattttacttttgttttgcatccaatttgaattctcaaaacaattttaatcatgctttgaattttggaaagatagcttcacttaaacatgaaaatcagatcactatagtagaatctacaactcagttctttagggaagaacttcagaaggggcaaacacttgagttatgacagcagtagagctgagccgatatgaggatcaatacaagaagcaagactaaattgtgctgaaagttatact

SEQ ID NO: 238936 - DNA, 375 bp, Homo sapiens
gcagtaaacaaattcctcacaaaatctgactttcttaaaactcacgactaaaaatagtattgcttcatattaaaagaaacctgagttactgtgaagaaatgctctctataaatcccacatacttaagcttcccagttggtttcctttccaaagagccaataaatatgtcctaggtgttcttggcaagtgagagcaccaaggcccattccacagaggaacagctcagagcagaaacccaggaaatatgcaaatcatattaagaacaaagggcaatgctgatcactaggaagttagtgttttacatgactaattatgccaagttgacgatagatcaactgaagagaacctccaaaaagaagagggctcaaatctaaa

SEQ ID NO: 238937 - DNA, 158 bp, Homo sapiens
ggccgtgtgattatcccatacaatttacagtgacaacatagccaagattcattttcttttaaaagtaaaattattaaagtaaatgtcaattccaaagccagtcaaatttggcaaagtttttaattaataggattattaaagatcatagtgaagtgttt

SEQ ID NO: 238938 - DNA, 455 bp, Homo sapiens
tgagcatggaactctaatcctcattctgccacactcatttctcctttgttcttatccatacctagaatcgacatgcagatagaattcatttaggtggtttcttatattctaggcttcatgcaatcatggagatggtaagtacaggtatatgaaataaaagaaatgtggcaggcacagtggttcatgcctgtatttcagcactttgagagactgaggcatgtggatcgcttgagcccaggagtttgagaccagctggggcaacacggtgaaaccccatctctacgaaaaatacaaaatacaaaaattagctgggcatggtggcacacagctgtgatcccagccgtgcagagggctgaggtggaaggattgcttgagcccaggagtttgaggccgcagtgagctatgatcactccgctgtgctccagcctgggtggcagagggagaccctctctcaa

SEQ ID NO: 238939 - DNA, 788 bp, Homo sapiens
gtgtttcaaaccttttatgaggagttaaatctgccagcaccagaacttctgaaaaagataaaaaatttgtttctccaattagcagaaaatgtagctcattcccttaatgttacttcttgttatatatgcgggggaaccactatcagagaccgatggccttgggaagcctgagagttggtgcccactgatccagctcctgatataatgggggcttgtccaggatctcatcaggactggatggctctcgctggactatactggatatgtgggcagagagcctacattcagttacctaatgaatgggcagacagttgtgttattggcactattaagccatcctttttcttattaccgataaaaactactggtactatctgtaaattccagacattgtatgagaaagcactgtaaaactttttgttctgttagctgatatatgtagcctccagtcacattcctcatgcttacttgatctatcatgaccctttcacgtggaccccttagagttgtaagcccttaaaagggctaggaatttctttttgggggagcttggctcttaagacatgagtctgccaatgctaccggccaaataaaaacctcttccttctttaatccagtgtctcaagagttttgtctgcagctcatcctgctacattctcttcatcaataaggatgtatggtagtgtagatgttcattggcttgatttagccattccacagtgcagacagacatacttgcaaaacttcatgctatacaccatatgtgttcaatatgtatttgtcaatta

SEQ ID NO: 238940 - DNA, 415 bp, Homo sapiens
agtacaatcttcctgggaatgtgatgtgtttttcactggttctaattctgtcttcctaacaattgaagacaccaaattatgattaaaaaatccctctggagaccaggtcttaccacaagccagcaatcagacctgggaaggttatgcactctctttggatctttcctgtaaaatgaaagggccatgattaggagacgtctaagacctatccaagtcctgatgtgctgtgatatacacacacatatatttgtgtaatatacatatgatatacacacatatgtgtgtatgtatatatcacagcatattacacgtgtgtgtgtgtatcacagcatatcaagacttttttttcagatgaggtcttgctgtcacccaggctagagccctgtgacaagatctaagctcactgcagcattga

SEQ ID NO: 238941 - DNA, 311 bp, Homo sapiens
cactctctattcaacactttggttttccacacttcctaccagttaaatttcttcttcagccatcacctgcttggtcttccttcctccagcgttccttctcctctctgaaccctttcttagaatgtgtgtggtctgcagatgtttaatgtagttagtatttcacgcatgttaataaggtcaaattggttggtagtgctgttcaaatcttctatagcctttctgatttttcattgtctaccagttttatctagaagtgttaaatctccaactatgactgtgattaatcaatttctgcctttacggatgattgg

SEQ ID NO: 238942 - DNA, 288 bp, Homo sapiens
ctaatgcctacacccaatagatcaagcaataacaatataagcatgttatttagaaaaaccaaagtaattgccaaaggaatcagctcaaagagttgaaggtgattgcacatgaagacgtagggggaggtggactacggcttgctctttttcttaacacatgttacacgactatttgttaaactctgggcatagagttttgttacaaaaataatttataaattttaaaatcaatcaataccttttttaataaataaaagggctggatgacatgatggccaaagttccctc

SEQ ID NO: 238943 - DNA, 409 bp, Homo sapiens
cccagatgagaaagaattagcacaagaactctggcaatccaaaaagtcagagtgtaccctcacttccaaatgatccactagctccccagcaatggtttctaaccagtctgaaatgactgacataacagacacagaatgcagaatctgtggccaggaaacccattgagattcaggagaaagtgaaattcagtgcaaggaattcaaataatttagtaaagcaatccaagagctgaatgataaaatagccattttcagaaataaccaaacttaaattctagagctgaaaaactcactatcagaattttatcaaataatcagtagtattagcagcagaatagaccaagctgaggaaataatctcaaaacttgaagacttgttctttaagtcaactcagacaaaaataaggaaa

SEQ ID NO: 238944 - DNA, 232 bp, Homo sapiens
tttgaggaaatgatgacttgtaaattcaggctccaagtaatacaggcaagctggggaaacctgatgaagtaggttaccaaggggaaaattgtaaagatactttggacttttgggaaagtgtaggaaatatgcaattcagattagggcaattttatgggcacaacccagaggatttgaagacaatagaaaaagagaagttttgacccagctcctatggggtcctagcccagac

SEQ ID NO: 238945 - DNA, 1556 bp, Homo sapiens
ctttcaatagaaatgtcttcttgccttaggaaaataaagggctaggaaaggtcactgcgttgataaaaaccaatagacgacagggacaaaagtgagatcagataggaggagaacaaccagactgaagactcaacataagctgttattggtaagtgactcaaaggggagttttgaaaattaccaggatgtttaatagtcaggtctcaaagactgagtatgttgtatgggctaaaggaagcctaaagaatcatttcgttgtatggaagagatgaatgaacctggacagtagggataagtaagacaggagcctaatcttttggagatgaaagctcctgcttctgcaaaaatcccttctgaagtgtggaaacgcatctaggaccagggttctcaacacctagaccatgacttctaggtcactgatgccatggtaacaaaaccaagtaaatctaagctcatttgagaattttagatcctcttatgttaacaatgtgactttgaaaaataaaagcagaccatgggaatgagtccagatgggcagctttgcaggagtgtagacatgtggtattctgttgaagaaagagagggtcgttgagggagagttgaatgtcttgcaaaggcagagttccacacaatggatttagggtttctcagtgagtcctttctaaatgcttgttatatcctggtcataatgcatatgggttcactgagtcctctggtcactttccactggggatttttatctgagctcccgagtcagagctgggcatagactctggttcttcatgaggagtgctgtatttgctctgtaacctgggagacatttgttccctagtcgtgcagcacatggtattgtgtttcctgacctaggcaagtgcccatgctcagtacagaaccataagttggtagcagcttctcctttctggccaaatgatgggccctgtccctctgatgagtgcatttcatgttgtgtttccaattttcatcagcaatgttcgtcattccctggtcctttgaaagactgtgtagcccgcggttatggagccgggatgaatctgatgatcatcatcttctccaataaccagatgccatttttaacttcaatatgctgtctggacatagtgagaactaatggcaataaacgtccagctgcatggtgcacctcttttttataggggtgctctgctgtctttgtaaaccctctctggcctctgagcatctattataattgtgtagaaagtacatctctatattgtaaataagagtgtcgagtgttgcgtgtcatgcctcatttgaaaaggtcttttttatgtctctttctattgaaatatagatatcgaatatataaatatatatacataaaatatatataaatatatattatgtaaaacagggacattctattattgattgtaaaaattataaacaaaatgcctgccaagataatggtcttgtatgtcttcattctctgcgtaatttttgtttttgtttttatgatttgttgtttcccaaaatgagttagaaataaaaatgcccaatattgagattaattggaattt

SEQ ID NO: 238946 - DNA, 2605 bp, Homo sapiens
  misc_feature (939)..(939): n is a, c, g, or t
  misc_feature (965)..(965): n is a, c, g, or t
tgagacggagtctcactctgtcacccaggctggagtgcagtggtgcgatgtcggctcactgcaagctccgcctcctgagttcacaccattctcccgcctcagcctcccaagtagctgggactacagaagtatgccaccatgcctggcttggttttttttgttttgttttgttttgtttttgtttttgttttgtgtgtgtgtgtgtgtgtgtttgagatggggtcttgctgtgttgcccaggctggtctctaactcctgacctcaagcgatcctcccttctcagcctccctagtctctgggattgcaggcatgagctcctaagcccagcttcacatttattttcaaaagctctttgctggagggtctgcagagccccaccttggggtatcattgcctgcacttaggagactgtaatgtaaatggtgccttctttatttgccttccaggggcacttccttgatggacacataatcaggtcaactttgacctcttgtccctggttgagtggggaaatcccagagagaggatcacgtggttgtaggaagacaaacttccagataactctttaatagctttaagcttaattcacttaccatcttttttgtgggggtggatggcagatcttgttcattaaatgagtatttattgactttatattaattaagcacctactatatgctaggcactgttttgaactcagatagcccccatgtgtctgggcgtgggggagatagatataatcacatgaatgcataattcttcagacaaggaatgttattggattttaaaattattggggaataaaataacacacaggacccagtgttggtgaggatatggagcaattagaatcctcacattgccgaagggagtgtaaaagggcagagtcactttggaaaactctttggcagtttattaaaaagttaaatagatcctttnatagttcataagtgtgatgatggggngtacagggaaaaactccaaccccatttttcctctagcctcacaccaccacaacaatcaccaacacagaagacttatgtgaccaaatgtgtggggtgctttccccacacaccaggcaccagacaccagctgggtgtcctccggttcaattccaaaaccgtctacctagagatagtgtcagatcctgcaggttgggggctcagcacccaagactgccctccacatccccagacaccagttgcaagtgcaggcctctggaacttctgactgaccggcttcaagctggggttcccatgaccccctctttgggttcagttaatttctggagcagttcacagaacttagggaaacacttgcttatatttactggtttattataaagaatattacatgggatacagatgaagagatgtgggtagggcgaggtacaggggaaggtcgtgcagcttccatgccctccctgggcaccaggaacctccagtgttcagttatctggaagctctctgaaccctgtcctcttgggttttatggaagttttatgacatcagcattccttcccccagggtatagggtgggaccctcgcaggggagggtcttaagactcacagttggaaggtgggggaagattagagtcctgccttgtggcaggtgaaaggaggacaggagagagattgtgtttcccgatacctgcccttggggcctaacacacccaacattataacaaaaaactataacaagggctgtgggagttaggaaacaagaactgtagacaaaaacctatgtatcatatcacattgggttttcatgctcatgtgtgagaagtgcctctttcaaaccttgttctgacacattatcttacatgcaaggaaaaaaagctaaacatacacttaccatcccacttctaggtatttgcccaagaaaaatgaaaacatacgttcacactaagacttgtactcagctgtttctagcagctttgttcatgacagccccaaactaggagccacccagatgtccaccaccaggtgaatagaccagtaggtccatccatctgatggaatacttctcattcattaaagggaataagtacgctgtgtgtaacaacagtgggatctcaaaattatgcttctgagagtgatggaagccagacacacaagaccatgaaccgcggttccctttctagaaagttctggaaaatgcacactaacctactaatgtgaagccaaccagtggtagcctggaagctgggatggcaagaagaatcgattgcaaagagacaatagaaaacttttgtgggtggtggaagtattccatattttaattgtgatcatttcactcatgtattacatatttcaaaattatcgggccaggcgcggtggctcacgcctgtaatcccaaaactttgggaggccgaggcaggtggatcacaaggtcaggagatcaagaccatcctggctaacacagtgaaaccccgtccttactaaaaatacaaaaaattagccaggagtggtggcgggcgcttgtagtcccagctactcgggaggctgaggtagaagaatggcgtgaacccgggaggcggagcttgtagccagccaagatcgtgccactgcactccagcctgggcaacagagcaagactgcgtctc

SEQ ID NO: 238947 - DNA, 425 bp, Homo sapiens
gagaaagaggccacttgtgtatattgtcatagtgaccattcatgggacactcttcctggcaccagtacagtgctttttcttgccgttttgtgtctcttcataacaatcctaggaaagacctgtgactagcctgacttataaatgaaggcacaaaggcctcaggagagaaacgacctggccagagtcacatagctggtaattggcagagcaaagactggaacccaatgctgtttgaccccaaaatctgtgcttttagtgccatgatatactagttttaaagaggaacctttgagtattgataactgatgaatctatgattacatggaggttttattatttctctgaaaaagtaacttttaagacttggtgatacaaagatctataaatatatacagaaataaattcttaaaaaagtgttaggagtg

SEQ ID NO: 238948 - DNA, 622 bp, Homo sapiens
tagaggatcccccccaaatgatccctctactacttttttttgtttagagaaaatttaggaaaagtgaatgtacatcttgaattttagttaagtaattacagttatatagtcaattataaaggctggttacatagcttattatagactgaacacattttatacaacagccctatttgaatattttccctagttattaaaataatgaaaacattaataaaaactaaaggcaatatgatattaaaagcattaataaaaatggaaggcaagttaggctaaagttactatcagagactggcttctgaaggaacaggttttggctttccaagtggcagggccttaagaatcacatccccagctctggcttagggttccagcattgctcatggcatattcagctgttgccttgcatctccaaatctatcttcagagtccttttacctcttccttttaggtcatagtggagagttggcgttccgctttgtatttatgtttttttaagtagtatttgtatttctttctttcctttctccctaacaactacaggatcacatggacctaatttgttttattgtcacaagagtcccttttcttgacaggatatgcctaattaaaaccagggtgt

SEQ ID NO: 238949 - DNA, 859 bp, Homo sapiens
gtgaaaaaagttacacataaaatgaattacagaaatgtgggattaagctaattgaaaactagaatcttttatatgcatatgtattgtataaatattaggagaggaatataacattcagtgttttccatacttatttgataacagaacccttttgggtgcaggggtgagggggattatcttctaggactgatgttttatagaacatcattgaggttaccttgccccatagctgtgtctcctcacagtctggttgaacctgaaagcatttgttaccggagaagtagattttaggtggaaataccagatgcagttggcagaatcagaagtgtctctccctttgctgaattcacaatgactttgtattcactaattctttctcctaccccctcccgcaatgtttctcacatttggcaacatatgataacatttgtacattttcccgcacttttgtattaatatatttattacgggtctgagtatttaaacatgaacttttttctcaagtcatttaaaatgactacaattcctaacccagaatgaaatgtttcttctaatataactatttttaatttcagaatacattgcaaaaatgttttttgtgtaaatgttttaaaacataagatattatcatgaaaaggtaatttcttagaaaaattggaatttatctctactacttttttttgtttagagaaaatttaggaaaagtgaatgtacatcttgaattttagttaagtaattacagttatatagtcaattataaaggctggttacatagcttattatagactgaacacattttatacaacagccctatttgaatattttccctagttattaaaataatgaaaacattaataaa

SEQ ID NO: 238950 - DNA, 309 bp, Homo sapiens
ctccctcattgctcctcaggtccagctcaactttggatgttgtgaaactcataaagctgcaatagcccacaacatgactgacagcataatgtagtataaagaacatcagatggggagtcagaagagctgggttccagccctaacatctggtggaatcctggccaagtgtcttccctctctgaacctaagcgtcttcctgtcaacaaagaagacctcaagttgcatgttgttcaaaagccctttctgattccgaatgtctgtatgtctctgtagcaatgttctcatattgaaatttctctgtgcctatgg

SEQ ID NO: 238951 - DNA, 567 bp, Homo sapiens
caaggaattagtggaccaatgccaatgttaattttgaaaacctcaagaagaagaaaattaagatatggttgataggttctctacaatatagcaagaaaactctgcccaaattctaaaggatacaaagtctactcaatttaaaaacaaatggcacgtttctgtttcttaaaagacatacgcataatctgtgagtgcattttctactttagagaccatttgaattaaaatccttaagttcttatgaatgttttcaaaatatgtacagtaaatgaataaagcccacagttatttaaggataacatttaaaattatttactaaatctttaatattaaaataatagtacatgccatccagtcataatcaaaaaagccaaggtgattatggagtattgaggctgaaaagagcaagatctaaaccaacctattctggacttcactgtcaaggaaaaaaattgagaggaaaattttcaaaaaatacttatacttgtgagattggtgatgagaaacaatctgtgaaatattgccatttctctggagtaaaaattttaaatgattggttatcacgat

SEQ ID NO: 238952 - DNA, 300 bp, Homo sapiens
cccacaaacagcactagaaaaagacatctgattatacctaggtggtacaggttttaaggattggacctttgactttgtgctcatccttctgtgtggaccagctttgctctttgattccagttattttaattccagttgtaatgatgggttttggacactctcagtctgtattatgaccaacagcatgtatccgtaagatagctaggtcactaatagtctgtggcatggaaaaaaatttgttttgttttaatatggtgctaactaagcatatagagattgactctgtaactttaactccag

SEQ ID NO: 238953 - DNA, 397 bp, Homo sapiens
gactcaggagaagagctctctgtaaatccacaatactcaccagctggccagagaatagcagaaacgaaggctagcccagtgcccaaacacaggaacatgaggggaactatctcagcccaaggcagttcctatgaacagccctagggtagggaagcaatatgaaaaagaagacagatcccactctgcaaggaactaagaggttctactcaggaaaagaaaggtccatatatgctactgaaggttgccaactttggggaattcttaagactgataagtggcggggcacagtggctcacacctgtaatcctaggagaccgaggctggaggactgcttgagctcaggaggttgaaaccagcctgagaaacatagtgagaccccatctatacaataaatttt

SEQ ID NO: 238954 - DNA, 468 bp, Homo sapiens
ctgagaaactgcagccctctagcctttaccaggttcacccctaccaagtgtttcctggtatccagagagtacctggccaaaagaacctggagcttcacacatgtgtggttgtgtgtgtgtgtgtgcacgtgtggatgcatgtgtgtgtagagcccagggtctttggtattaagaactcaggctctggccgggcatggtagctcatgcctgtaatcccagcactttgggagcccgaggcaggtggatcacctgaggtcaggagttcaagaccagcctgggcaacatggagaaatctcgtctctactacaaagacaaaaattaggtggttgtggtggcacacgcctgtaatcccagcttcttgggaggctgaggcatgggaatcatttgaacccagaaggcggaggctgcagtgagctgagatctcaccactgcactccagcctgggcaacagagcaagactctgtctca

SEQ ID NO: 238955 - DNA, 1759 bp, Homo sapiens
aattttatatgatggtactgtgatctggagagggaatattcatacactaactttctgctattactttaggaatatctctgaagtaaagaagtatggaataaagagataatattatgacttattattttccaagctggatagataagatgaaaagggaaacaaagaatactccaaatgcttctataatgcactttcaaaaatatacatctccagctaaaatttaatgtaaatgcttaatttgcttgattataggtattatgcagttatttacactatactgcgtaagctatagtgctctatagttttagctcatctataatgcattgataatgtaaatgtattcatacttttatcaccacaattatttgaaaaaatcttgcttttgtaaaatgaactgtttagatagaagtatccattacacttggcattgtaagaatgtattgactgcttagaaagggccaaaataaatatccctagatatgcataatttatatatgagattaagttatatgtattatgcgtctataaaacatgtatgtttttgctgtcgcagatttaatgtaagtatagattggtattggtctgtgcctacatgtatgtgctccatgagtacagaatcagggagttgtatataaaggcctcattgatgatagtgggaacaaagctgaaaagagagcaattgagagagaaagagggagaaggaaagagaatagtagtgattaagctagcattgttctatacagatcgctagctgcctgctattgttttccagcatttgaagatgaaacatattcatttagctttcagaacgaatggctttaataagggcagagcgggagaggtggggtaacactgatgactagagagacccatcaaggctccccctaaggccattccgtcagtgctgaggaccacatgaccattaactctgcaatcaggacaagttttcaacattccggggtatccttcaatggcagaaagagtcatttggagtcaagagaagatgtatatcagcagtaattggattctggccaaggctcttaagacagtattatctatggtgagggaacagggaggggctggacaaagcatgaggcatgtgattcaagccatagctgagagagcagtagccactacaggccacaggctgccggcacaaagagcaagcagtttgtttgctcaggagtcattgtggcttgtctatggatgtgagcaatcctccatctccagcagaaactggcttctgaatatcctgcaagtcaaaacgttgggctcaaaagatgaggccatcctggttgcacttgactagacaaagctattgaaggcctgaaagtgccccatccagcctcttcccactgcagcccctctcccctcccttcaccctgactacttcattacaatctgccttcaggccggaattgccctgcttaagcctcaaatcattataattaccattattagaaatagctgcgggggaggcattggaacaccaagtaaaaatgtgtgagtgtgtccgctggccctggaatcactctttttgagctcgggggaaccacaaggcatgagggttccaccaaagccagctaatgcgacggctgtcagctccactcaccccacctgtcaagagggggatgcagtggggttcatttttttaattgacaccttcctctctcattccacgctctctcgtctcaacctaattcctcctttcatcttccttcttttctctgagaaaaattcattcctctgttatttgaat

SEQ ID NO: 238956 - DNA, 660 bp, Homo sapiens
ggtgggcaggataaagcatttgccaggtcaatagtggcccaggtgccagggactgtgtggatttgctccagtaaaaataccgtctctgcaattctggttgtgattcacctcaccactggattagtccgtgatgatctgtggtcattttctatgacctacttgatttgtacactgatcaaacaagtgagttaattgtggatttggtaggaatcactaccttgtatctttcaagtctttggtggtggcattaagctcatgtgaggagcagaaaaaaagtttgtgagaaggctggcacactgtaggagcttgataaatgatagctatcatcattgttgttgtcatgtgttattgtcttagccaagtcagggtcaaaatttacattatcttttttctttttgaaatatcatatttcattgctcctaagaagcatactgttgtgtactttaacatctctgaagtcaggatatgataatagttgatggtatgttgtgattgctgttgtttcgattaaaattgtgttcatttgtagaggatttttctttgcttctgcctgtcacttggggcacaggctgagttaccaatgagagtaaagcttcaggacacctcatttgcatggcccttccaaggtcctgaaagggttccacctcacagcttcatggg

SEQ ID NO: 238957 - DNA, 562 bp, Homo sapiens
agtagtttgtaagctgtaaagcaccagttcatgtaagaacttattatagcatttccatgatattcatcatctggaaatatgttgttcactgtaaattgaagcaaggataaagaggcatcatattcaaatcagctgtttcaaaattagtatttatgctagaaaaagaaatgttttaatttaaaagatgcttaaatgttccgtattttaaattattggacggctacttctggataagaaaaatttgttttggtttctcacgactggctgttgttcatcatgtgacttgtttaggcacacgattacaacactctgtctagaggtttgctgccagaaacctatagctgactcttcctgggaatcaatttttgatttccctgttattgatctgataacactctccccaaaatataaagtaaaacaaaatgtattctgaagcataatatgtgtttagtttagtattgttttaattttagatgctatttactttgttgttatttgaagatatgcaagccttctaattgaaatcagcaattgatataattgaataaaaatgttaccaaat

SEQ ID NO: 238958 - DNA, 422 bp, Homo sapiens
aatgtgaactagagggagaataagaggaagactttgtggacagagagtactttacacaaaggtggagagtgcaaggaggggtcacaggacattagtgctaggtagtgtttacggtttgtttttagagacgtttctactctgttgcccaggctagaatgcagtggccattaacagctatgatgatggcctgctgcacccttgaactcctgggctcaagtgatcctcctgcttcgccctcccaaggtgctgggattacagacatgagccaccatgcctgcacaagaacagcaggtttaaaaaactaggcaagctcacgcctgtaatcccagcacttttgggagggcgaggtgggcggatcacaaggtcaggagatcgagaccatcctggctgacacggtgaaaccccgtctctactaaaaatac

SEQ ID NO: 238959 - DNA, 431 bp, Homo sapiens
cactataatttaaatgctaccagtgctgcatctgtgtctcaataaatgtatgaaagctttttctgtcttaaatgtgaaaatattatattatgtagatttgaggatcctggctttgacttgtcaaattctggggtagcaagaaactttacctttggcatatgcccgtaacactgaatatctattaaaataggtacaatatttcactcacttaagtacacattatttgaggtttctgtgatgaaagcaaagcaccctttagtgcaaagagcacagacttggagccagaagaccagaatgtgagtcctgcctttgctagcccagtgactttgaggtaatctttttgagcctctgaactagtttccatatcgtaaattgtaagtatcatcactcatatattatacacctagtttaataaaacatatggaaaagta

SEQ ID NO: 238960 - DNA, 415 bp, Homo sapiens
aaatattccagattatctaataattcacttcacttgtttcatcaactttatttttttcatattctgaatttttagatcccatctttttgtgtattatttttcttttccccacttagacatttaatttactctgcaaataggatttttgtgacttttttatataatacatagttttatagttttattttagcaatgcttgtgtggattattttcaaaccgtatactttaattaatgaccacattcttttgaatattggaaagcaaatttggcctcagattttaaataaattattatgttttgtcaaattaattatccttcaatctgagttactgttggtgttgtagtagtagtagtagtagtacgtgaatgtttttagtgttttgatgtgcacattttcccttctgtctaaatgta

SEQ ID NO: 238961 - DNA, 342 bp, Homo sapiens
cagaacccacattcttccgtcatatcctgcccactccatgagactaaggattcaataactcactatacattatctgttgctactggttgtatgttgtgtgcagtgctgtattaagccgtgtggagaccccaaaagaaccagaaaataggttcctaccagcaaggaattggaagtctaagtgaggagacagaatgacacccactacccaattatagtccattacactagactgtagggacccatgcagtcaggggccattactcttcgttcattactgccccaccaggccccacacataataagacctagataaatacatgctaatggaggaatggatcaatt

SEQ ID NO: 238962 - DNA, 492 bp, Homo sapiens
tgtgactttgttagtggtcagtggtagatgggtaaatgtaccatcatgtatcacgcagttgtatgatactggagctgtgggtggttttccagttttttattatgataaagaatgctgtgataaacatctttgcatggtccatttttgcacacttggccatttatgtccagttgcaggaaatgctgggggaaagagaacatgtatataaaaatgtgatgagccaggcatggtggcacgcgcctgtaattccagctgctctggagcgagaggagatcctgaccagggttccggctttcctggttcacaagttggcactagtgcttcctggagcaggagaccaccaggttacctaaggagaggtgaactggcctaggttggaaacagaacaggtcaaaactcctgtgctgatcagtagtgggattgcgcctatgaatagccattgcaccattgcactccagccttggcaacctagcaagacccaatctcttttaa

SEQ ID NO: 238963 - DNA, 605 bp, Homo sapiens
tcaagtgctgaaagaaaaggactgtcaactgcaaatcctgtatctagcaaaacaatcttttaggaatgaaggggaaatgaagccattctcgaatgaagaaaaactaagataatttgttgcctgcagaccaaccctaaaataatagctaaaggaaattctataaacagaaataaagtgacttaaaaaggaatcttgggacattgggaagaaagaaagagcaacaggaagagaaaatactggtaaatacaagatattcttcttctctgtagcggtgaacattgtgtttcaacttgactaggtcatgatacccagctactccatcaaacattattatgtttctgtaaagctatctttatatgagattaacatctaaattagtagactttgagtaaagcatattacactccataaggagggtgggcctcgtctcgtcagctgagggccttaagaaaacaagattgaccttcctggaggaacagggaattctgtcacctgatagatggcctgtggacttgaactgcagctttgcctcttcttgggtctccaacctgccagcctacactgcagatttgggacacaccagcctccataaccatgtgcgtcaa

SEQ ID NO: 238964 - DNA, 467 bp, Homo sapiens
caaatgaagtacaggacttttgggtaaactgctaccactgtttataagatcttccaaaagtttcatttagagtttagtagttggtaacttgatgggatataaggaagtggcaaattttccttattgaggttggtagcagagtttcgtttgtcctaggaacagaatattcccagtctgttcacatgtgttcagaatgatcatttaaaaataagcaaatttcactttgggaggccgaggcgggcggatcacgaggtcaggagatcgagaccaccccggctagaatggtgaaaccccgtctctactaaaaatacaaaaaattagccgggcgtagtggcgggcgcctgtagtcccagctacttgggaggctgaggcaggagaatggcgtgaacccgggaggcggagcttgcagtgagccgagatcccgccactgcactccagcctgggcgacagagcgagactccgtctca

SEQ ID NO: 238965 - DNA, 303 bp, Homo sapiens
ctccatttcctgctccataaactcagaagctaatctataccatttctttttgtttgtttgtttttgtttttgtttttgagactccctctctcaaaaaataataatgaggctgatattgttgtttgagtcattaattgagtttgaggaaatgtatttatccagctcacattcatgcagtcccaccatgggtcagaccccgggctcactgctgggtacaatgatgagggacaaggttcccacccttggggaacatctgcagtggtggcactgccaacatgcatttctagaggagctgttctttaa

SEQ ID NO: 238966 - DNA, 3342 bp, Homo sapiens
  misc_feature (43)..(43): n is a, c, g, or t
  misc_feature (390)..(390): n is a, c, g, or t
  misc_feature (498)..(498): n is a, c, g, or t
  misc_feature (579)..(579): n is a, c, g, or t
  misc_feature (778)..(778): n is a, c, g, or t
  misc_feature (1043)..(1043): n is a, c, g, or t
  misc_feature (1366)..(1366): n is a, c, g, or t
  misc_feature (1395)..(1395): n is a, c, g, or t
  misc_feature (1484)..(1484): n is a, c, g, or t
  misc_feature (1516)..(1516): n is a, c, g, or t
  misc_feature (2312)..(2312): n is a, c, g, or t
  misc_feature (2329)..(2329): n is a, c, g, or t
  misc_feature (2393)..(2393): n is a, c, g, or t
  misc_feature (2726)..(2726): n is a, c, g, or t
  misc_feature (3045)..(3045): n is a, c, g, or t
  misc_feature (3080)..(3080): n is a, c, g, or t
  misc_feature (3147)..(3147): n is a, c, g, or t
  misc_feature (3152)..(3152): n is a, c, g, or t
  misc_feature (3206)..(3206): n is a, c, g, or t
ggaatctttttttctgagcagtaggtctcattagtgagcttanaatactccataaaccatgctgtaaacagatgcactgtcatccaggctttgttattccatttccaacacaggcagagtggatttagcatcattcttaagggtcctagaatttttggaatgggaaatgaccattggcttcacgtcaccagctgcattcgcccctaacgagagtcagcctgtccttttcaatctttgaagccaggcattgacttctctctagctgcgaaagtcctagatgccatcttcttccaatagaaagcggttttatccacactgaaaatctttttagagtagccaccttagtcaaccatcttagctagatctggagaacttgcttcagtttctccngtaaagcttgcagcttcaccttgcacttctatgtgtggaagtgacttctttccttaaacctcatgaaccaacctctgctggttttctgcttttcttccgcagcttccntcacccgtctcggccttcatagaattgaggacggttaggaccttgctgtggattcagctttggttgccagtcacaccagcngtcgggcaaagttgttgttttaatctctccagaccactcagacttcttccacatcagcaataaggctgtcttgctatcctgtcatttgtgtgttcactggagcagctcgtttaatttccttctggggcttttcctttgcattgccgctcagccgtttgatgcaagaggcccggctttctgactgagttttagacatgcnttcctcacaaagcttaatcatttctagcttttggtttaaagtgagagatgtgggattcctcctttcacgtgagaggccatggtaaggttactaattagcctaatctcaatattgttatatccagggaagggggaggctggaggaaagggagagatggggaacagccggttggtggggatgtaggaaacacacattgataattcagcttcttatatgggtgcggttcatggtgccccaaacagtgacagtagttttagattcctgntacctgccgggcacctggcatgggtgtggagggcagagttctgaggtggtctcttagattcctggcccctaatgtacacaccccttcttccagttactcattcagacactcatctggtactgtcatgaagagacttgcagatgtcgggaggtcccaggtcagtgaggtgagaagggaggtcgtctgggagagcctgacctaatcacacagaccctgggaagcagaggttcctccatctggttggagaacagaggctgagattagatgcgtgagaaaaatgtgatgtgctgtgcctgccttgagattcaggtggcccctagggncggctcctgctcacagccagtaagcacanagggttcttagtcctacagttgcagggaactggattctgccacgaaatctgaatgagtttggaaaccagttttccccagggcctccagntgagagctcagcccgatgacatacagttgcanctttgcgtgaccctgcgtggagatcccagctggcctggcctggatgtgtgacctgcagaactgtagggtaacaaatgcatgctgctttaagctgctgagtttgtgtaaattgtttttggagcagtggataactgggagagggcttggcactgggcgggtggagtccccttcttggaagcagttcccagagtgaggattcccagactgcaggctggcattgccctccacagcggggttggatagagcatcccagtgcctgcgtgaggtcgcataattccgggtccagtcagcttttccaaagtgagcacctgtgtgactcagggcaccaccatgtgcccctgccagtgacagtgtctcctgaacaccattgcagcttacatccttccaccagggattggctctctgttttctagctttatgtaaatggagtcgtacaatatgagctcttttgtgcctggctgcttttgctcagcacttcgtctgttgtgaggtccacctgtgcttttatgtgtggcagttttttttctgtgcattattgtttgtgtgagtcttctgttgctagatatttagggtgttagaatgttgctaagaacactctagctacagacttctgcagggtaggcttgcagtttctccagcaacctaattcccttgaaaatatcctcactgttggggctgcttgctgccagtgcatcccacgtcacagctctggttttggtttttgttttttattttttgagatggagtctcactttgtcacccaagctggagtacggtgttgtgatctctgcttacngcaacctctgcctcccnggttcaagtgattctcctgtctcagcctcccgagtagctgggattacaggtgcatgccaccacncctggataatttttgtatttttagtagagatgaggtttcaccatagccaggctggtctcgaactcctgacctcaagtgatccacccaccttagcctcccaaagtgttgggattacaggcatgagccgctgtacctggtgcagctctggtttttaaacgagcagaacctccagttttatttactggcttctgggctgggctgatcccccctccctcattatattggcagtggccttgaggtattgaagacagtagtagtggatgggaaggcaacattactgatcttcgcagtggcccggctcccactgcccagcaagaaccccaaagagaaggntcttgaggcgagacagtcagccttctcatcctgagagccacattaatgggtcctcagtgcataagcagaatatatatggaaattaagcaaatacatggctgggtgtggtggctcactcctgtaaccccagcactttgggaggccaaggtggctggactgcttgaggccaggagtttgagaccagcctggccaatatggagaagccccatctctactaaaaatacacaagaattgcttgaacccaggaggcggaggttgcagtgagctgagatcacgccaccatgcaatcagcctgtgcgagagagcaagactatctttnaaaaaaaaaaaaaaagcccgggcgcagttgctcangcctgtaatcccagcactttgggaggccaaggtgggctgatcacctgagtttgggagttcgagaccngcctnaccaacacggagaaaccccatctctactaaaaatacaaaattagctgggtgtgntggcgcaagcctataatcccagctacttgggaggctgaggcaggagaatcgctggaacccgggagctggagattttgatgagccgagatcgtgccattgcactccagcctgggcaataagagcaaaactccatctc

SEQ ID NO: 238967 - DNA, 2995 bp, Homo sapiens
  misc_feature (459)..(459): n is a, c, g, or t
  misc_feature (1165)..(1165): n is a, c, g, or t
  misc_feature (1668)..(1668): n is a, c, g, or t
  misc_feature (1671)..(1671): n is a, c, g, or t
  misc_feature (1680)..(1680): n is a, c, g, or t
  misc_feature (1687)..(1687): n is a, c, g, or t
tgccaaccctcagagcagacaatctatctataaagtcagatttgagtggagaattaaaggaattatctgaataattaaaacaagaacactaatatctttgaaaaggctatttaagacttaatgatgcctacaaccatttacttgttaaagtctacttaaatatttattctacattgctagcgctccagacatacatgcatatcttattagtggattcattcaaaatattcacacacatggaataaactcaagaacataataactcctaaataggctttgatcagaaaaaataccattttcaaggaacagaaaaccagtttgaatataacaatcataaatttggttcctacctgacacatactctgtgaggagcttctgcaacagtggtacattttcaagataaagttctaagttctagttctaagaggcagtgtccatccactcaggtctacaggctcntatataaatgacgtagacctaaactccaaagtttacatacacaggagaagtgcccaaaataattggtgcagataataaattggaagaagggatgtaaatgtgggttggagttaggaaggttttgtgaaggaactgtgagtcttgtgttagactttaaagaacagataggtttggcaggggtgatgacaaagcagtgggcaataagcaaatcatgtgaaaggttattgagagttccaaacactgaaacagaaggctttgttggcccataggctaaaccattagagaaatgttgggatgcaccatagcaagggatttcacacccagtaggctcacagcaggcaaaagagaatccctggccatttctgtaaggctttgagattttctgagcactttcacttttcttccttgagtattactgtggatggaggcagacaagataggctgtattgtcgctaatttacagatgaagaaatggagatgagagaagataaatgactttctcaacttcccagagccaggatgagaagccacatctagtgaataactgactctctccactacgtcttcttctctgctacatattcaatgtcaggggtctcagcccctacccccaagagagacaaggtaaaagaacaaggtgaggcaccatcagggtccttgcttttgagcatgaaagcctcacactcctacactcaatatccacaanacaaaacatgagcctggtggcctggggacaaatctccttgaggtgacttgctttattcttccccttgcttctcaacaaagtgacacagaggctagaggagcctcttctcttctctttggagaatcaaagacctttattgtagagaagcaccagactgtgttattacatatttattcttgtaattgaaaaatattcattctcattttctgaacgattttgtttcttagtcgaatatgagctgtttaggaggtattaaacatttgttcatttctttatatacttacttattcccttatccagagggagaaggcaaagtatgtattgtgttaccccatttttcttgtttctgaaatcaaattagttgcttcctaaattttcattaggaataatccttggccggatggggtggcacatgcctgtaatcctagcactttgggagactgaggtgggaggatcacctgaggtcaggagttcgagaccagcctggccaacatggcgaaacnccntctctactnaaaatanaaaaacttagctgggcatggtaacgggtgcctgtagtcccagctactcgggaggctgaagcaagagaatcacttgaacccagaaggtggagtttgcagtgaaatgaaatcgcgccactgcactccagcctccaccctgggcgacagagcaagactctgtctcaaaaaaagaaaagaaaagaaaagaaaattgatggcttgaatcactggcttatagcaaacatagttaagatatggcaaggcaaggatttgaaacctggtgtgcttagttgccaaagtctcactcttttctgttgtacctcccgattaatttaggtttgacttccttcttcagcatcttgggcaatgtagtaatagaattgatgaaaaatagtagtaacaattattgcccacctcagcctttgaccccttctgagctctcttaatcaacctcagtgctgagacccctcccctccattcaccactccagccctctcccattctgatgccatcatctccctgcttctatccagcctcacgctaaccagaatgtggagctttttgtgagcttgatttctgattcctctggctgccgatggagatccctctgaaggtgctcactggagcaattattctgcttgttcccccatctctcacccactcccccaagtatagttatcaggacgctgctgtatttcccattgtccaaggactaattcatgaaatagggctggcttacctctggttttgcactgactggctcagagatattttgagatccatgaggtgagttgtgttttcagcagatttcaggcacagtgtggcattttcagtgatgtctctatcgaaggccttcctcagcttgaacagctataaaggggtgatgctgctaggagctgccttgtccaagagtggaggcatctaatgtgactgcggaggggctgggaagtgttctgcacccttgcttgtctgctggtttcaaatgaccgctaattaaaggcaaatcctagcaccgctcatcagcatcttggttcaaattagttgtttcccagcaaaaagggcagacctctgaaagactaaaacacagaatagataaacactgagtggaaaggtcagggccaaaagacacttctcagcagagcggggcaggcagagtggaggttctcgtaactggaggccagtctgcaggttggaaatgggtggaacttgaagtggtggggaggtatgtacatgacaatccctagaaatatcaaaaagttattaatacatgggaatagttaaactgagaaactgaacttcagaaattaatcccaggattaaatttctgctc

SEQ ID NO: 238968 - DNA, 353 bp, Homo sapiens
gattgcttgaacccaggaggttgaggctacagtaagctgtgatggagccactgcaattcagcctggcaacagagcaagaccctgtctcccaggctggagtgcagtggcacatacctgtaatctcacctgttcgggaggctgaggtagggtgatcgcttgggcccaggagtttgagatcagtctgggcaacgtagtgagaccttgtgtcttaaaaaaaaaaaaaaaaaaaaagattacaggtgcttaaaatatttatgaagattttatataaggcattttttaatcattttattttgcactatatttaaatgtgatcagtttgtatgtatgttataccgatgaagaatacaggc

SEQ ID NO: 238969 - DNA, 441 bp, Homo sapiens
gtctatttacctctcatctgggtttttcattcttatgtggaagaacaacagaataatatagccctagaccttctcctatccataccacacccttcggaatgttgcgattcttgcctgttgatgggatccttctgttttccagtaatagtttaaatttttatttttatatttatgtgattattttaattaacaggagtgttcagtgcagcattgctcttttatagtgaacagtcgaaaactagcaaaaagttaaatagtttgtatccactaaatacgagaccattcaaattaatgtaaatccacacttgtttctaagtgaagaaaaagttacaacatttattggatagcatgataaccattttataaaattaaattacatgtaagcagagaaagaaagatcttgccgtccgttgaagtcattctagcatttaggatttgaaa

SEQ ID NO: 238970 - DNA, 503 bp, Homo sapiens
gctgcttccaatttttacaattaataagaatgctgccattaacatcttgcacttctgcacaagtatgcaagttcctttgttggacatatagcaagaaatggagctgccagatcataggatatgtgcacactaatcattgttttatattattcttcagaattgttgcagtgtttaatcactattcctcagtatttctcaagattaagaattgatttctggctgggctcagtggctcacacatgtaatcacagcactttgggaggccaaggcaggtgaatcctctcaggtcgggagttcgagactagcctgcccaacatggtaaaaccaagtctctaccaaaattacaaaaattagccaggcgtggtggcgcatgcctgtaatcccagctacttgggaggctgaggcaggagaattgcttgaacctaggaggaggaggttgcagtgagccgagatcgcacgactgcactccagcctgggcgacaagagcaagactccatctcaaa

SEQ ID NO: 238971 - DNA, 427 bp, Homo sapiens
atgtgtatgcacaaaacaacagagcttcaaaatatacaaagccaaaactgataaagacaaagactaaacaacccacaattaacagctggagacttcattctcattaatcaataaaacaaatagaaaaccagtaagtcatgatgaactcttgccgtgatggaaaaaagaaaagaaaaccagtaaggatatagaagacctcaacaacattattaatcaacatcattaaaacatacaccaagatggatcatactctgggccatgtaattcactgcaccaatttaaaagaattgaaaccacacaaagtatattctcatatcacaacaaaattaaatgagaatcaataacaaaacaatctcaggaaaatcccccactacccttagaaattaaataacccatgggtcaaaaaaaaccccatgagttagaagag

SEQ ID NO: 238972 - DNA, 475 bp, Homo sapiens
agcagttttcacttgcattcaatgctttgtaaaatagattccaactagtcagtttctataaggcgaacccttcaaatatactccttgaaaagaacagttcaccggacattatgaagttagcactaatgtttgtggggcaggaaaagctgttgtagtgtggaacaatgaattaagaatcagaaagcctgatgtcgggttctagctgtagcataaatgcacttgaccttgatcgctgctctctaatctctggtccttagtttactttagaatgcgtgagttggaggatctccagtatctcttccaggatgaaaaagtaaaggattctggtgaggcctcatggttgcaaaacatgagagtgaatatacttagatatatagagaagttcatagtggatagatatacttggatttttaaattctattgccttactcaatgtcttacctttttcattcaataaatattgaatatatctact

SEQ ID NO: 238973 - DNA, 256 bp, Homo sapiens
caaaatggagatggagactaaagcaaatgttatgtgttacttttcccctggcccttttatttcaactttctctcaagagttgagtggatgaaatcaattgcagaaaattcataattttcaaaggaaagcgcaacataaaacattgtaaataatacctatctcagtacagttgactagaaataacctaatgccgacgtaaggagctgtttaaatcatgttgctgcatccaaatgaagtaaaatcaattttgttttca

SEQ ID NO: 238974 - DNA, 1806 bp, Homo sapiens
  misc_feature (1049)..(1049): n is a, c, g, or t
  misc_feature (1059)..(1059): n is a, c, g, or t
  misc_feature (1069)..(1069): n is a, c, g, or t
  misc_feature (1092)..(1092): n is a, c, g, or t
agtgaaagggaagattgggagggaaggggtaggagataagaatatctaagcaaggctgacattgtggggaccatcaaatactatacttagttcagttacagatagctatggaattgaaagtttctcagggaaaagggaaaaagatgtaccaaaggaaataaccaaagtatagaaaagaatgttctttgaaatgaggagaaaaaagatgagtttttgagagtgtatagaaagaaaagtagcaaggttttaggcaaggttaaatactagaagttagaaataaatcaaaatctaaaaaggcatatataaagtataagtgtaatgagaaaattgagcagtttcatttttgttgtttattagtgtcaacagaatttgaaataattttcaagctgattttattcattgtttacctccttaattatataatagaaataagtagcttgtgtttcttatgaaaatttacctgctacttgatgtatcttttttcagtgcacggtagtaaaatcagttgtatatatcctgtctaacatcagtatgcatattatactatactgtacatttaattaggagtttattagctgttggcttaaatgagtttaaaactactttatgatcacatttggctcaatgaatttggatttgagactaatctttacatacccaagatgataatgttacttgtctgtcttagaagtaaagacaccaatattcttcttaccttccttttttatatcctatttccttatctaacatctctaatatgtaccctagtacaattttcaagtattttgtttttttttaatgttcagtgtacttactttttcgtaaatactgctttctttctattaaatatagtccttatctgacaaaaagtccgtcagaagtagagcttatctttaggccaggcacggtagctcacaactgtaatcccagcacattgggaggctaaggcgggcggatggctttgagcccaagagttcgagactagcctgagcaacatggcgaaaacccatctctactaaaaatacaaaaactagctgggcatggtggcncgtgtctgtngtctcagctnctcgggaggctgaggtaggagtntggcttgagcccaggagacggaggttacagtgagttgagatcacgccattgcactccagcctgggtgacagagccagaccttgtctcaaaaaaaaaaaaaaaaaaaaaaaaacagtagagctcatcttttcttgaagagtcatttaaaatcagtaagtaaaaacttgctagatttgatgattgtgtgccatgagttacacacagactcctaaatcagtttcacctgtggtgtcctcattctgtttactttgagcattttgcattctatatctgcttagttatatggatttattcgtcccatataatatgtgtggccacatggacacatgttctaaaaggttttaaattctgcaagatagtgacgatgatgtaaacacaagaaaagggcaaatggatacattttcctactctgtgctcatcaaacatattacaggataaaattattggctatctaataaaaacacagactaataagacctgataagttggacaaaatgtttaaaaattaacatgaagatgataggaagtatgaatctatattcactgtcattaatgtcaaacctttaccttatggtatattgtactttgagaaattatggccaggcatggtggctcacacctataatcctagcactttgggaggctgagacaggaggatctcttgagcccaggagttcgagaccagcctgggcaacacagggagacactgtcttt

SEQ ID NO: 238975 - DNA, 526 bp, Homo sapiens
aggtaaatggtgcaagattatgggtcagttttaaatgcttaagtaaattttctttgtaagacattttaggatgccatgttaagaatctctttataactgtcatttaaaaaaaaaccacatattttcttagcataatttcccatagtaacattactatgtcaaaggctatgaacatttgaatgactttagataaatactgtaattgctttccaaaaatattgtgcttattatgtcaccagaaatgtttgaattctgtctacaattcagtcttgccagtatagtacatttcatttagaaaaattttttactatgtagatggaaaaaataatattttagctgggagtggggggactatggggaataactttccttcatttaatattttattgtgagttagtttaagttactttattttatcgtagtttcctaaggctacaaattagtaaccttggtaacttatgtacctaatttaaaagtttacttttttgaaaggctggaaatactaattaaaaacgtaacaccttca

SEQ ID NO: 238976 - DNA, 423 bp, Homo sapiens
ctctgcattgctttgaggctaagaaaaacaccttgtttaaaccagagatttgtccaagcagaataaaaagcatgaatcagtatttactccttgaaatttgcccaattatctctatcacacctactctagtttggaatagcatactcagccccactggacagctccaattctgtgtaaagacaccagctggagaaacaactgcctggatctctgttttcctataatgacaaacatttgaaaactaaaacttgacagtatttgaaaaattaggtttcctatttttcatcacttgaatggataaatcacaaatttctaattcaatcataatgattcttctgttttgattgtgttgtttaaatacataatcaaaattataagaactgtatctaaaataagaataaaggtacatgcgacatgttaagg

SEQ ID NO: 238977 - DNA, 424 bp, Homo sapiens
ttctgacaattgtcattaagccagtgggtggcttcaaaaacaaccctcaatcttaaagctatcttccccaaaaagctttcctctccccttctttttttctgtataagctctagtaacttttcgtgttctgccatcaagctgatgaggtatttccagaggaaaaaaattaaaacacttgcaatactcttcgagagaggtaccttgctttaatccactatctcctaaggtgaggtctcctcctcagctcatatagcttcttatatctttttacctctcatattgaaactgacccaatagtcccatagatgttgttttttttttttgatagacatagaaatccacccttctgttcttaaagcttgaaacttaatgtttgatttatctgagttccttcctcaggaaatggtcttcagtcctctcaaaa

SEQ ID NO: 238978 - DNA, 707 bp, Homo sapiens
agcggagcttgcagtgtgccgagatcgcaccactgcactccagcctgggtgacagagtgagactctatctcaaaaagaaaaaaaagaagatattcattagccccatgagagaatgaaaagtacgtaggaacagctccagacacaaggctcggaggcagctacccaccgcaggcctgtgggtcctgggacctcaaggaagagagcagccaggcctgccctgagcacccaggtctgccagctgctttctgagtgacagcaatgacagcagtacccaggcagacaaggaacttatgtttcttgcagactcttatagaggcctgagccagcgttcctgagctacctcaaggttgcaagcaactcagctggacgctcgatgactctggagggtccagtggcttcctggagaaggaacaggatgtggaggggtcctctgcagacccttcgcaaaaagaggttcaggaatcagggcacttgctcaagctgtcatcaggagactcagaccattaatctgcttaatcttttatttctagtcatcagaatcaaggctgggcatggtggctcacacctgtaatcccaggactttgggaggccgaggcgagtggaccacctgaggtcaatagttcgagatcagcctggccaacatggtgaaacctcatctctacaaaacatacaaaaattagccaggcatggtggcggacacctgtaat

SEQ ID NO: 238979 - DNA, 760 bp, Homo sapiens
agcggagcttgcagtgtgccgagatcgcaccactgcactccagcctgggtgacagagtgagactctatctcaaaaagaaaaaaaagaagatattcattagccccatgagagaatgaaaagtacgtaggaacagctccagacacaaggctcggaggcagctacccaccgcaggcctgtgggtcctgggacctcaaggaagagagcagccaggcctgccctgagcacccaggtctgccagctgctttctgagtgacagcaatgacagcagtacccaggcagacaaggaacctggcaggcgtcccagccaggcatgcttctgctaaaatgactgggaacttttattatgtttcttgcagactcttatagaggcctgagccagcgttcctgagctacctcaaggttgcaagcaactcagctggacgctcgatgactctggagggtccagtggcttcctggagaaggaacaggatgtggaggggtcctctgcagacccttcgcaaaaagaggttcaggaatcagggcacttgctcaagctgtcatcaggagactcagaccattaatctgcttaatcttttatttctagtcatcagaatcaaggctgggcatggtggctcacacctgtaatcccaggactttgggaggccgaggcgagtggaccacctgaggtcaatagttcgagatcagcctggccaacatggtgaaacctcatctctacaaaacatacaaaaattagccaggcatggtggcggacacctgtaat

SEQ ID NO: 238980 - DNA, 1118 bp, Homo sapiens
cttactccaggtttgttttccactttggatgccggacattgagaatgtcacgcatgctgtgctcttccacattctgcaggctcctcctcagctctcttctgggatgaggttgggttccatggatctgttcagtctggcgtttgtgcttatgctcccagcagtgcagggggcagccagggcgccctctcacggctccttcccgccctcaggcacagctgtcactggctggcacggctgtcagtcattggccgggcccagtgttgtggaaaccaccctgtgatgtgtgagggtgtgtgttttgttctttcccttagttacttaaggtgtgagggcgaatcaggcccctattactgtttttgttagaagtagaagtaactttaacactttaaaaaaaaacaatagcatctctttttgacgctgagggcagaaactatttttttaatgtaagatactgaaagcactcataaagcaaaagattaaggcattcatattcatgaaaagtcttttcatcaagaaactccagaagaaaataaaaaacatgccattaactgagagatacttgcctcacaaaaaacctgcagtggtttagtatctagaagttataaagaactactatgaataggaaaaagataccatgatagaaaaacttagccaaaagcatggtggcgcccacctgtagtcctacctactcaggaggctgaggcaggagaattgcttgaatccaggaggcggaggttgccgtgagccgagatggtgccactgcactccagcctgggtgacagcgagacctcgtctcaaaacaataaaataatgaaacaattttttaaatgaattgaatttccctagtggtaccaaaacttgctttaagactaaactaaaaatctgtcttgccatggaaggacataaaaggtttatccaggccgttcacaagccgtatgtgtgtagagccatgtgtatagttgcggatccagtgctgtgaaaacataccgaagagacatgttcttgtggatatgagaaaaaaaaataggaccaaaggacgtattttgggggtggcattttgagaaacccacctgttgctgcagcatttgaatttgactgtggcgtgaggctgcggtgca

SEQ ID NO: 238981 - DNA, 1175 bp, Homo sapiens
cttactccaggtttgttttccactttggatgccggacattgagaatgtcacgcatgctgtgctcttccacattctgcaggctcctcctcagctctcttctgggatgaggttgggttccatggatctgttcagtctggcgtttgtgcttatgctcccagcagtgcagggggcagccagggcgccctctcacggctccttcccgccctcaggcacagctgtcactggctggcacggctgtcagtcattggccgggcccagtgttgtggaaaccaccctgtgatgtgtgagggtgtgtgttttgttctttcccttagttacttaaggtgtgagggcgaatcaggcccctattactgtttttgttagaagtagaagtaactttaacactttaaaaaaaaacaatagcatctctttttgacgctgagggcagaaactatttttttaatgtaagatactgaaagcactcataaagcaaaagattaaggcattcatattcatgaaaagtcttttcatcaagaaactccagaagaaaataaaaaacatgccattaactgagagatacttgcctcacaaaaaacctgcagtggtttagtatctagaagttataaagaactactatgaataggaaaaagataccatgatagaaaaacttagccaaaaaaaaaaatacatgccttcagaggagaggcgatacatgtggccagtaaaatgagctgggcatggtggcgcccacctgtagtcctacctactcaggaggctgaggcaggagaattgcttgaatccaggaggcggaggttgccgtgagccgagatggtgccactgcactccagcctgggtgacagcgagacctcgtctcaaaacaataaaataatgaaacaattttttaaatgaattgaatttccctagtggtaccaaaacttgctttaagactaaactaaaaatctgtcttgccatggaaggacataaaaggtttatccaggccgttcacaagccgtatgtgtgtagagccatgtgtatagttgcggatccagtgctgtgaaaacataccgaagagacatgttcttgtggatatgagaaaaaaaaataggaccaaaggacgtattttgggggtggcattttgagaaacccacctgttgctgcagcatttgaatttgactgtggcgtgaggctgcggtgca

SEQ ID NO: 238982 - DNA, 588 bp, Homo sapiens
actatttaatcattcagttatgacaaactaattttaatatctggggccgggcgtggtggctcatgcctgtgattcctcacactttgggagactgaggtgggcagatcacttgagcccaggaggtcaaaaccagctgggcaacatggcaaaaccccatctttacaaaaagtagctgggcctggtggtgtgtgcctgtagtcccagctactctggaggttgaggtgggaggatcacctgagcccaggaggtcgaggctacagtgagccatgattgcatcactgccctccagcctgggcagcagagtgagaccctgtctcaaaacaaatcccaaaaaatataaaaaaaaattttaatatttggatgaccaggctagcattacaccatttgtttgtgtgacattaggcatgacatctgtgcaaagtacagcagccagaaggggaaatattttctgttttataggaaaaaccacttagcaaaagtaaataaaggcagacatcagagcatatgggaaaatgcacaaagtgggtcagtgcatttctttcctttcggagtgcccaaccagcttcctgggcatctactaccaaaaaa

SEQ ID NO: 238983 - DNA, 478 bp, Homo sapiens
aaattaattttgtggatttggttgaggtgggaaattgtactgctggcgtggatgtctgggaagcacataccaggttggcagctgcagcttagcttcgagatcatcccgtgctgtgatagcacctgagtgaagatgtggcaggtggagaaggcactttggaactcctgagtgacagccagaagccagagtgttactttggcaagtgtgctaccaggtgctgagtcttgggcctgagcattcctcacgataacaggtagatcataactgtttatttcctactttgatagcaaatgaatgtgcattttactagattggatacttacttgatggtatacacctaatgtgagcaggacagttaaacatggatttacatatgatcaaaatcctgaaataatttataaacctacatacagtgtatagaattctcatatccttcaatatgtgatagattcttactcaactttttttgttatctcaa

SEQ ID NO: 238984 - DNA, 665 bp, Homo sapiens
gaccagtaaaaggaggaaaaatgcttttgaaatcagtatgattttatttcatttaatcaaaggctaatcattacaaaagcaaatgatttgattgtttggttgttcagaaaataattgtaaatggtgtccatttcattaagcttttaaaaataaaggcaactacaataaatagttacagcctgtttatgtccactttcctaagttttaatacactacaaaattcagctgacttactgttcatataaccagcttaagagtgtaagtggtaacttggaagatgacatttggaaaaatagactgctctctcagccccatgaggctcactgagcatgaaacgaccactggcaccatggtggccttgtattatcaagtaactggagtgaagttgatataccagcagtggctggagtcaggttctgactcataaaatagaccttttcatgctctgctacgttctcgttcaggaaagctaccatatgtagagaactgtgtacataaaatttggaatatgatttcttgtagcttttggataactgttatgaaactcacacggcaaaaaatattcttagtatttcaacaaaattatttttattttattttgaaaaatgcaatttaaaaaaaatctcagttgtttataaatatcatttcaatcagtcttttatatc

SEQ ID NO: 238985 - DNA, 674 bp, Homo sapiens
atttaaggagcaaatgacatggacggggggagtcaaaatgataaagggagcctccttgcatttgttgtatcttacttctgtgtgagttctggcaaaaagcaagcatgactagaaccctagaaaaacaaccattaggtagatactagttatagtcaatcagagaaagccagtatgtgcgaagagagaagagaagaaaaccacatggtaaaaatgtaatcaaccagtgggattcttttagttcataattgtaatcatagatggcattccactacctttgtcttccatctggaccaagtatggctgtgtctagaggttctgttgtactatttctgtggtccttgaactctgatggcaacctaccttgacaaggccaaaaacctacacaactctgagcctttcttggtagtggcattatctaaacgtatgcatttgtaccttatcaggcttaatgagggaaaagaaacggcttttgaagacactaatgggaaattattataagtcaatgaagtaaaaatgcaaatagatttgtatcttaaaacaggaatactgctagaagctaaaactgagtaagatcttgctctgtgccaagcacatgctattttgcattgaggtttagagacgtaaagtaaagtaactcacctaaagttacatagctcatgagcaatgtggcagat

SEQ ID NO: 238986 - DNA, 1929 bp, Homo sapiens
aagtaaaatggactaaaattttgcctagatttacctaaaggcaaaatataaaaattaatttctaaatacataagatgcacactgaaagaagagtaagtcagtccagatttagactataaattcaaatgtgaaaattcaagcatctgaaatgagagagggagcacagccttttgaagaaaaataaagcactaaatttaaaaagtattatttttatttcaggaaagaagaagcctgagcttccaaaataactttttcagactgtttattaacccagtcaaaccaagaaaacaaatgtacaattagcttattaaaaatagggactccaatatgggcaacaaagcaagaccctgtctctacaaaaaattaaataagtagctgggcatggtcgtgggcgccaataattctagctactcaggaagctgaggtgggaggaccgcttgagcctgggagattgaggctgcagtgagctatgattgagtgcacttcagcctgggcaacagagtgagaccccgagtcaaaaaaaaaaagggggggggaggggactactattaattaaaatctggaaggagaaaggatacaaaaaaattaacttttgctgaacacttacatgccaagtgttttcgaatatgatatgtgacttaatcctgaacaaactagagtaatacaaactattattgctttttaagaattcagtatttatttatttattaaacagataaggaaatagggttttaaaactgcagaagtgttagaacaagatagaaactttcatttttcctttgttaaaagattttttttttttttttgagacggggtctcactctgtcatccaggctgaagtgcagcggtgcgatctcagctcactgtaaccttcacctcctgggttcaagcaattctcatgcctcagcctccccagttgctggggctacagacatgcaccaccatgcccagctaatttttgtatttttagtacagacagggtttcgtcatggtggccaggctcgtcttggactcctgacctcaggtgatccacctgcctcggcctctcagagtgctaggattacaggcgtgagcgacctcacccagccctaaacaactttttagaagtagaatcaacatacaataatttaaaggcacatttgataaattttcgtgtgtgtgtgtgtgtgtgtgtgtgtgtttatacccccttgaaataatcacataatcaacatactgaatgtattcatcacctcagaaatttccttatgcccattatttttggaatgtttatcaagagtgaatggataaacaaacttgtatatccatgcaagggaatacgactaaacctaaaaatgtgcatgaactattgatacatacaatacgtgtgaatctcaagataattatgctgaaagaatgcacacaaaaaatgttattccatttgcataaaattctagaatgcgcaaattaatctattactgttttttaagatgagaaaaacaaggctcagaaaggaaacatagcttgtattagcaatgctgttaataaatggtgatgcaggatattaatccagttctgctacatcctaaaacccaggtctatacaagacctcaataccaactgcattcgccatagcaagattagaacaaatattcatttggagtcaggggcggtggctcaagcctgtaatcccagcagtttgggaggcctaggcgagcagatcacttgaggtcaggagttcaagaccagcctgaccaaaatggtgaaatcccatttctattaaaaatacaaaaattagtcaggcttagtggcgggcacctgtaatcccagctactcaggaggctgaggcacaagaatcacttgaactcagcaggcagaagttgcagtgagacaagatcatgatcgcaccactgcactccagccctgggtgacagagcaagaccttgtctc

SEQ ID NO: 238987 - DNA, 2600 bp, Homo sapiens
acatgcgccctgacagcccaacaatggcggcgcccgcggagtcgctgaggaggcggaagactgggtactcggatccggagcctgagtcgccgcccgcgccggggcgtggccccgcaggctctccggcccatctccacacgggcaccttctggctgacccggatcgtgctcctgaaggccctagccttcgtgtacttcgtggcattcctggtggctttccatcagaacaagcagctcatcggtgacagggggctgcttccctgcagagtgttcctgaagaacttccagcagtacttccaggacaggacaagctgggaagtcttcagctacatgcccaccatcctctggctgatggactggtcagacatgaactccaacctggacttgctggctcttctcggactgggcatctcgtctttcgtactgatcacgggctgcgccaacatgcttctcatggctgccctgtggggcctctacatgtccctggttaatgtgggccatgtctggtactctttcggatgggagtcccagcttctggagacgggattcctggggatcttcctgtgccctctgtggacgctgtcaaggctgccccagcatacccccacatcccggattgtcctgtggggcttccggtggctgatcttcaggatcatgcttggagcaggcctgatcaagatccggggggaccggtgctggcgagacctcacctgcatggacttccactatgagacccagccgatgcccaatcctgtggcgtactacctgcaccactcaccctggtggttccatcgcttcgagacgctcagcaaccacttcatcgagctcctggtgcccttcttcctcttcctcggccggcgggcgtgcatcatccacggggtgctgcagatcctgttccaggccgtcctcatcgtcagcgggaacctcagcttcctgaactggctgactatggtgcccagcctggcctgctttgatgacgccaccctgggattcttgttcccctctgggccaggcagcctgaaggaccgagttctgcagatgcagagggacatccgaggggcccggcccgagcccagattcggctccgtggtgcggcgtgcagccaacgtctcgctgggcgtcctgctggcctggctcagcgtgcccgtggtcctcaacttgctgagctccaggcaggtcatgaacacccacttcaactctcttcacatcgtcaacacttacggggccttcggaagcatcaccaaggagcgggcggaggtgatcctgcagggcacagccagctccaacgccagcgcccccgatgccatgtgggaggactacgagttcaagtgcaagccaggtgaccccagcagacggccctgcctcatctccccgtaccactaccgcctggactggctgatgtggttcgcggccttccagacctacgagcacaacgactggatcatccacctggctggcaagctcctggccagcgacgccgaggccttgtccctgctggcacacaaccccttcgcgggcaggcccccgcccaggtgggtccgaggagagcactacaggtacaagttcagccgtcctgggggcaggcacgccgccgagggcaagtggtgggtgcggaagaggatcggagcctacttccctccgctcagcctggaggagctgaggccctacttcagggaccgtgggtggcctctgcccgggcccctctagacgtgcaccagaaataaaggcgaagacccagcccctcggcggctcagcaacgtttgcccttccctgcgcccagcccaagctgggcatcgccaagagagacgtggagaggagagcggtgggacccagcccccagcacgggggtccagggtggggtctgttgtcacatactgtggcggctcccaggccctgcccacctggggccccacatccaggccaacccttgtcccaggcgccaggggctctgatctcccatccatcccaccctcctcccagaggcccagcctggggctgtgccgcccacaggagttgagacaatggcaatcctgacaccttcctccactacagccctgaccatagacccagccaggtagctcttggggtctctagcgtcccagggcctggtttctgttccctcttcaatggtgtgttcccagccaggtcctgaccctcagagccaagtccctgtcacgtctggggcagccaaaccctcgccccacagggacctggacacgcccggccaggatgtggggttggatgggccattttctgtcctatccctcatctccacccccgccacagcctacacgcatcccacacatgcaggcacacacagcctgtgcacacatgtgttcttggcccggtttcatccccccatgactggtgtctgtgaggtgcagatggacacagcgcacacccagaccctccaccaggctgtgacctcgctgcctctgaggccttgacaaggcccctcaatcggaggacagccggccgtgcacactttcatcatcgtcggacaaacagcgtctactgcacatttttcttattcctattcttgagccatagctatggcatattcttctactattcctattataccacttaccagcttactcg

SEQ ID NO: 238988 - DNA, 1754 bp, Homo sapiens
acatgcgccctgacagcccaacaatggcggcgcccgcggagtcgctgaggaggcggaagactgggtactcggatccggagcctgagtcgccgcccgcgccggggcgtggccccgcaggctctccggcccatctccacacgggcaccttctggctgacccggatcgtgctcctgaaggccctagccttcgtgtacttcgtggcattcctggtggctttccatcagaacaagcagctcatcggtgacagggggctgcttccctgcagagtgttcctgaagaacttccagcagtacttccaggacaggacaagctgggaagtcttcagctacatgcccaccatcctctggctgatggactggtcagacatgaactccaacctggacttgctggctcttctcggactgggcatctcgtctttcgtactgatcacgggctgcgccaacatgcttctcatggctgccctgtggggcctctacatgtccctggttaatgtgggccatgtctggtactctttcggatgggagtcccagcttctggagacgggattcctggggatcttcctgtgccctctgtggacgctgtcaaggctgccccagcatacccccacatcccggattgtcctgtggggcttccggtggctgatcttcaggatcatgcttggagcaggcctgatcaagatccggggggaccggtgctggcgagacctcacctgcatggacttccactatgagacccagccgatgcccaatcctgtggcgtactacctgcaccactcaccctggtggttccatcgcttcgagacgctcagcaaccacttcatcgagctcctggtgcccttcttcctcttcctcggccggcgggcgtgcatcatccacggggtgctgcagatcctgttccaggccgtcctcatcgtcagcgggaacctcagcttcctgaactggctgactatggtgcccagcctggcctgctttgatgacgccaccctgggattcttgttcccctctgggccaggcagcctgaaggaccgagttctgcagatgcagagggacatccgaggggcccggcccgagcccagattcggctccgtggtgcggcgtgcagccaacgtctcgctgggcgtcctgctggcctggctcagcgtgcccgtggtcctcaacttgctgagctccaggcaggtcatgaacacccacttcaactctcttcacatcgtcaacacttacggggccttcggaagcatcaccaaggagcgggcggaggtgatcctgcagggcacagccagctccaacgccagcgcccccgatgccatgtgggaggactacgagttcaagtgcaagccaggtgaccccagcagacggccctgcctcatctccccgtaccactaccgcctggactggctgatgtggttcgcggccttccagacctacgagcacaacgactggatcatccacctggctggcaagctcctggccagcgacgccgaggccttgtccctgctggcacacaaccccttcgcgggcaggcccccgcccaggtgggtccgaggagagcactacaggtacaagttcagccgtcctgggggcaggcacgccgccgagggcaagtggtgggtgcggaagaggatcggagcctacttccctccgctcagcctggaggagctgaggccctacttcagggaccgtgggtggcctctgcccgggcccctctagacgtgcaccagaaataaaggcgaagacccagcccctcggcggctcagc

SEQ ID NO: 238989 - DNA, 2829 bp, Homo sapiens
ccacgcctggagctcccctctctggagcccccgggaaaggaagcggggcagggaggccgggtgggagcaggggggtctccggcgcttcctctcctctgcgggcgccgcgcggctcctgagagtccgccccccgtcctgacgctcagctaggaagcgggtcctcgggcccctcccccgacacacacacacacacacacacacacacacacacacacacacactctctctctctctctctctctctctctctctctctctctctctcacacacacacacacacacacagcccgtctcgcgcctgaggtctcgcccgcaggccggtggcgcggggtcagctgctgcctgcggtccaggacagggtcggttccgccgcgcagcgcccaggcccagctcgtccagagtctgcggacagcgcacgtccagtcgtggcattcctggtggctttccatcagaacaagcagctcatcggtgacagggggctgcttccctgcagagtgttcctgaagaacttccagcagtacttccaggacaggacaagctgggaagtcttcagctacatgcccaccatcctctggctgatggactggtcagacatgaactccaacctggacttgctggctcttctcggactgggcatctcgtctttcgtactgatcacgggctgcgccaacatgcttctcatggctgccctgtggggcctctacatgtccctggttaatgtgggccatgtctggtactctttcggatgggagtcccagcttctggagacgggattcctggggatcttcctgtgccctctgtggacgctgtcaaggctgccccagcatacccccacatcccggattgtcctgtggggcttccggtggctgatcttcaggatcatgcttggagcaggcctgatcaagatccggggggaccggtgctggcgagacctcacctgcatggacttccactatgagacccagccgatgcccaatcctgtggcgtactacctgcaccactcaccctggtggttccatcgcttcgagacgctcagcaaccacttcatcgagctcctggtgcccttcttcctcttcctcggccggcgggcgtgcatcatccacggggtgctgcagatcctgttccaggccgtcctcatcgtcagcgggaacctcagcttcctgaactggctgactatggtgcccagcctggcctgctttgatgacgccaccctgggattcttgttcccctctgggccaggcagcctgaaggaccgagttctgcagatgcagagggacatccgaggggcccggcccgagcccagattcggctccgtggtgcggcgtgcagccaacgtctcgctgggcgtcctgctggcctggctcagcgtgcccgtggtcctcaacttgctgagctccaggcaggtcatgaacacccacttcaactctcttcacatcgtcaacacttacggggccttcggaagcatcaccaaggagcgggcggaggtgatcctgcagggcacagccagctccaacgccagcgcccccgatgccatgtgggaggactacgagttcaagtgcaagccaggtgaccccagcagacggccctgcctcatctccccgtaccactaccgcctggactggctgatgtggttcgcggccttccagacctacgagcacaacgactggatcatccacctggctggcaagctcctggccagcgacgccgaggccttgtccctgctggcacacaaccccttcgcgggcaggcccccgcccaggtgggtccgaggagagcactacaggtacaagttcagccgtcctgggggcaggcacgccgccgagggcaagtggtgggtgcggaagaggatcggagcctacttccctccgctcagcctggaggagctgaggccctacttcagggaccgtgggtggcctctgcccgggcccctctagacgtgcaccagaaataaaggcgaagacccagcccctcggcggctcagcaacgtttgcccttccctgcgcccagcccaagctgggcatcgccaagagagacgtggagaggagagcggtgggacccagcccccagcacgggggtccagggtggggtctgttgtcacatactgtggcggctcccaggccctgcccacctggggccccacatccaggccaacccttgtcccaggcgccaggggctctgatctcccatccatcccaccctcctcccagaggcccagcctggggctgtgccgcccacaggagttgagacaatggcaatcctgacaccttcctccactacagccctgaccatagacccagccaggtagctcttggggtctctagcgtcccagggcctggtttctgttccctcttcaatggtgtgttcccagccaggtcctgaccctcagagccaagtccctgtcacgtctggggcagccaaaccctcgccccacagggacctggacacgcccggccaggatgtggggttggatgggccattttctgtcctatccctcatctccacccccgccacagcctacacgcatcccacacatgcaggcacacacagcctgtgcacacatgtgttcttggcccggtttcatccccccatgactggtgtctgtgaggtgcagatggacacagcgcacacccagaccctccaccaggctgtgacctcgctgcctctgaggccttgacaaggcccctcaatcggaggacagccggccgtgcacactttcatcatcgtcggacaaacagcgtctactgcacatttttcttattcctattcttgagccatagctatggcatattcttctactattcctattataccacttaccagcttactcg

SEQ ID NO: 238990 - DNA, 482 bp, Homo sapiens
cagtcatcactgtactttttctaattctgagattcaatgtctaaatgaaggggagtttagattagataaagtattgttaaaaatctaactactgtcaagtatgtgtactgataagggctatgcagaaatcacgtggaagtgaaaggcagaagtgtgaaatttcagttcacttttttccccatttggtaatgctaataatactgggtgcgattgaataaaatgatactttgcaccacatttaggttctcttcacactacatttgcaacttttgaaattgtgtcagtacaattatctgattttacaaaagaaacctaaagagaagatgctgtaagtaaggtaacctgtaattagaatatgagcatctgttaaactaaagctaaagtcttcttgagtgttgcagtgggaaagtttattttcacattagttttgatgaaataaacacttataaaatattaagttttatggtttagtttataccccc

SEQ ID NO: 238991 - DNA, 271 bp, Homo sapiens
ctctacttctgtgactaatggtcctatgacatgggatcattatgaatgcaaactaaactgcagatggcttggttaagcgttctaaaatgcatatttcaggtaattcagaagcttaaaatatttaaaacaatatgccaattacaaataaatcaaatgtgttcattaaaattgattctggaatacttttattttcttagtacaggccagaaatcctttacatctgtaagagtaattgagttgtatgaattcacatcacctttcccccaattaa

SEQ ID NO: 238992 - DNA, 437 bp, Homo sapiens
  misc_feature (1)..(1): n is a, c, g, or t
ngtgtatactgactgggagacacctcccagttggggctgacagacacctcatacagaagagctctggctggcatctggcaggttccctgctgggtcgaagcttccagaggaaagaacaagcagcaatctttgctgctttgcagcctccactggtgatacccaggaaaacagggtcaggaggggacctccagcaaacaccagcagactggcagcagaggggccccaggcacatgcagcagaagtcaggaaatggctgtgtggcagagttcacaagggaggcagggtagtctcaaccctggggcacagctgcagagtcctgttcttcccaggcacttccttggcacacccggtgaagctggggaacagatgactctgcccagccagctctcctaggaccctctcaggtacggatggcaggaatcaaagctcgtgcagta

SEQ ID NO: 238993 - DNA, 485 bp, Homo sapiens
gggcatccttccactttaatgaaaataattccctatagattgagttttaattatacgaataatacatcaatccataaagatgtatgtaatcctgctctcctctacggaagtaacttttgctcaaagtttgatatggaaatccacaagccatttttttatgcatttgaaaatacctttttgacatcaaaatattccttctcaaaagagttttgtgtatgatctaaaacaaactttcaatacatttacaaaaatttaaaatgaaaaagggacacaatagaagttgttttatatataggtatttattaaaacttattcaattttttaaaaaagtaagcatttctttgggatataggaaattcaaagtgacatgaattaaaatgacaggaaataaaaacaaatgtattttagcacaaagtatcttcattggtgaaaagtaagcaaaccaaatcaagtcttaagcttaaataaacttatttatattttca

SEQ ID NO: 238994 - DNA, 580 bp, Homo sapiens
ctgctcagaagaccgaggcaaagaatcccttgaacccaggaggtggagattgcagtgaggcaagatcgtgccactgcactccagcctgggtaacagagcaagattctgtctcaaaaaaaaaaaaggaacaaactagttcagctctcaactcactgcttttcctcatgacactgatccctggtacacagcagaagtgttttatacatacttcccatttcatcatacagattaaagttgtgtagtcacaggttgaaattcaataaatattttttactccctcatcaacaacactcttcaatgaaactgtctttaactctaagtgtgtaacagtgaagaatacagtacacttttgtgccacagccttgatttctattaaggcaccagcagttttaccatccattgcttttgtaccatcattgtaaaatttacagtgaaaaaggcaagttatgtcttagtatgttatggggccatagggttcccagattaaacattatatttctgggtttctctgtgagggtgtttctggataagattagcatttgaatcagaggacagtatcctgccatccccaatgtgagtg

SEQ ID NO: 238995 - DNA, 448 bp, Homo sapiens
taggtttgctggagtttggatttactactgagtcatatttggagcatgctggaatcttacaactgagattaccgagtcagaaacttgcaaacatgagtaacatggccctgctctggagactactgggaacacaaacacagccatttaagacatctacctgcttctcctttgccttccatcatgactgaaagttgtctgaggtctcccagccacgtgtcctgtacagcctgtggaactatgtagaaaggaaaaagggagagaaatggagacatttattgaatccaggcaccatgctgtggattgctaaatacagcttcgtaatttgcatctagttatctggtcttccaagctagctttttcaagtatttttacctttacacataaagttctattggagatgtacttcacccttttctgcactaaagagtttaatttttcaagactcagt

SEQ ID NO: 238996 - DNA, 774 bp, Homo sapiens
agacaaggtaataatatcagatctctgtctatatatatgtggagttgattgaaggactcaaagttttatacagaccaagtaaaggcactggacccctggaagacacactctgatgccagcagaacaggcttgcactcatatccagagtttgaagaccacttccatggaccactgctggcagaaatgcccccagagtggtcgaccaactgtgcacccatgctcctagccagagtaatagcttcatagccccacccccagccagccagaccccaagttggctgatccaccatgtgcatgcatgtgcctctgaactgaaaaacagcctgtgcaaacatgagtaacatggccctgctctggagactactgggaacacaaacacagccatttaagacatctacctgcttctcctttgccttccatcatgactgaaagttgtctgaggtctcccagccacgtgtcctgtacagcctgtggaactggagtatacagccatatgagaatcactgttataggtgatgaggctccatgagagggcattaacttctaaaagcatgagaaaccatcatcttcttctgcaatgagagaatcaatgtgcctcatgaagttacataccatgatgaaataaaccataatccatccaaagtttaccagcctcttatccctgcagcgccacatttaacttgactctgaagttacagttaaattaaaagggtttgcatattttattctctctagtgattttattgctcactagagatttgctgtattaaaaag

SEQ ID NO: 238997 - DNA, 458 bp, Homo sapiens
aatctgcgaatagggaaaccgcaggcgccatttaagacatctacctgcttctcctttgccttccatcatgactgaaagttgtctgaggtctcccagccacgtgtcctgtacagcctgtggaactactttaaagaagaatcagaaaatggagactgggattggaagcagagatccgatggccaaattacagtctgccactgaagctaacacacctatggataacccaacctgtaaactcaatgtggaacacagtttgagaaaagaagtgagaagattcaattttgaagttggatcactctcctacaggcaatgaagaccacatcactgatgaactctgactaatacatcatgaacttgcagaattttggatatttgacaaatctgaggaattgaagagacgggcacctcaccttttctgagcagaagagttcatttgatgaaacctgaagtagagagca

SEQ ID NO: 238998 - DNA, 796 bp, Homo sapiens
taggtttgctggagtttggatttactactgagtcatatttggagcatgctggaatcttacaactgagattaccgagtcagaaacttgcaaacatgagtaacatggccctgctctggagactactgggaacacaaacacagccatttaagacatctacctgcttctcctttgccttccatcatgactgaaagttgtctgaggtctcccagccacgtgtcctgtacagcctgtggaactgtggtacagttgaagaaagagctcaactctggcaaagggagaccaagagtaacctctggtgtggaagttggctgagcactcagtgcctgactgtgctatactcctgttggacatgagctgtctctcagaacaccaattcagacaaggttactccaagactatgatacaataaagcaaagcaaggatacttcgtaattttgtggaagcacagacaaaatcaatatcagtatgccacctacaaaagaccaaacagcccttctcttggccaaaatgagtgatgtctacttctttactaatgaagttttatttttgttctagtcagctctccatccagatgagatttttttgagatacccaatcttataattgcctccagctttctgacagcatctaattttggcaaactctcccctccttctgtcctctcccaaatgacctaacctaaaccccaaatctacagaaagttatttctattaccattttactgagacaccccatgattcctcatgatatgtgttatttgtctgtgcaacaggtaataaattgaacttgttcacta

SEQ ID NO: 238999 - DNA, 569 bp, Homo sapiens
taggtttgctggagtttggatttactactgagtcatatttggagcatgctggaatcttacaactgagattaccgagtcagaaacttgcaaacatgagtaacatggccctgctctggagactactgggaacacaaacacagccatttaagacatctacctgcttctcctttgccttccatcatgactgaaagttgtctgaggtctcccagccacgtgtcctgtacagcctgtggaactgtcacactgaatttggacactggagaagagaaaggagaaggccattctggctaccctaggactcagagacgactttaaagaagaatcagaaaatggagactgggattggaagcagagatccgatggccaaattacagtctgccactgaagctaacacacctatggtttcagagtattctttagtctcttccaccatgtgagggcacagtgaaaggaaggacttctatggagcagaatgtgggcccttaccaacactgagtcttccattgccttgacctttaacttcccggccttcacaacagtgagaaataaatttctgtagtttataagcc

SEQ ID NO: 239000 - DNA, 175 bp, Homo sapiens
tcctcccattccaggcctatttcacctccctgatttcttaaccctcagacttcaagaggccacgcgagccttcatacactgcgcatctttctgcagcaggactctatgggggccagagaagcctggggagaggtggctccacgtgctttacccagaacagcattccttcaggttg

SEQ ID NO: 239001 - DNA, 1424 bp, Homo sapiens
  misc_feature (491)..(491): n is a, c, g, or t
  misc_feature (562)..(562): n is a, c, g, or t
  misc_feature (888)..(888): n is a, c, g, or t
tcgcatcactacacacttcgagctgaagcacctctccagcggggacctgctccgggacaacatgctgcggggcacagaaattggcgtgttagccaaggctttcattgaccaagggaaactcatcccagatgatgtcatgactcggctggcccttcatgagctgaaaaatctcacccagtatagctggctgttggatggttttccaaggacacttccacaggcagaagccctagatagagcttatcagatcgacacagtgattaacctgaatgtgccctttgaggtcattaaacaacgccttactgctcgctggattcatcccgccagtggccgagtctataacattgaattcaaccctcccaaaactgtgggcattgatgacctgactggggagcctctcattcagcgtgaggatgataaaccagagacggttatcaagagactaaaggcttatgaagaccaaacaaagccagtcctggaatattaccagnatgtatatgctttcctacaaactaaagttccacaaagaagccagaaagcttcagttactccatgaggaganatgtgtgaactattaatagtaagatgggcaaacctctagtccttgcatttagaagctgcttatcctaagacttctagtatgtatgaattctttgaaaattatattacttttatttctacatgattaataaggatactaaggatgtgccaaatgatacggatactaagatgcatcgtttgaaatcatctagatgtgttgtatgcaagttatcatcaaaaacattcatggagtctgaacgtttaacacatctgttagagcacattacacagagcattgggagctcaacaaaactaaggggtccgctcacctacaggggctgaacacangtacaccaactacgccgggcaaggtcccacacgcgtcaccatgccacgggaagaaaacacggaaccgcacatcggccccgactggatccgcaaaaacaaacaccatggggcacgggcgcgtcaggcacacacggcacccacccgaagcaacaagaagacggacaaaaaatacagcaggcaccaaggaggagtacacaagccagagagacggcgaaacaccagggacaacaagagaaacaaagacagacaaacaagaacagcgagacaagcgcgaaggagagagagagaggggcagagaagaacagttagagctggcaccgtactgtgcatggggcgcggggaggaggaaggggcgagcggcggcagacggacacagacagcgggaggaagcgcgaggcggcgaaaggcagggtacacgagcgagaggaagggagcgaaagaagcacgaggcatgaaggaaggaagaggcaaggcaggccagacgaggcaggggggcagacaaagaacgagagcacagaggacgacggacagtggac

SEQ ID NO: 239002 - DNA, 1478 bp, Homo sapiens
  misc_feature (545)..(545): n is a, c, g, or t
  misc_feature (616)..(616): n is a, c, g, or t
  misc_feature (942)..(942): n is a, c, g, or t
tcgcatcactacacacttcgagctgaagcacctctccagcggggacctgctccgggacaacatgctgcggggcacagaaattggcgtgttagccaaggctttcattgaccaagggaaactcatcccagatgatgtcatgactcggctggcccttcatgagctgaaaaatctcacccagtatagctggctgttggatggttttccaaggacacttccacaggcagaagccctagatagagcttatcagatcgacacagtgattaacctgaatgtgccctttgaggtcattaaacaacgccttactgctcgctggattcatcccgccagtggccgagtctataacattgaattcaaccctcccaaaactgtgggcattgatgacctgactggggagcctctcattcagcgtgaggatgataaaccagagacggttatcaagagactaaaggcttatgaagaccaaacaaagccagtcctggaatattaccagaaaaaaggggtgctggaaacattctccggaacagaaaccaacaagattaggcccnatgtatatgctttcctacaaactaaagttccacaaagaagccagaaagcttcagttactccatgaggaganatgtgtgaactattaatagtaagatgggcaaacctctagtccttgcatttagaagctgcttatcctaagacttctagtatgtatgaattctttgaaaattatattacttttatttctacatgattaataaggatactaaggatgtgccaaatgatacggatactaagatgcatcgtttgaaatcatctagatgtgttgtatgcaagttatcatcaaaaacattcatggagtctgaacgtttaacacatctgttagagcacattacacagagcattgggagctcaacaaaactaaggggtccgctcacctacaggggctgaacacangtacaccaactacgccgggcaaggtcccacacgcgtcaccatgccacgggaagaaaacacggaaccgcacatcggccccgactggatccgcaaaaacaaacaccatggggcacgggcgcgtcaggcacacacggcacccacccgaagcaacaagaagacggacaaaaaatacagcaggcaccaaggaggagtacacaagccagagagacggcgaaacaccagggacaacaagagaaacaaagacagacaaacaagaacagcgagacaagcgcgaaggagagagagagaggggcagagaagaacagttagagctggcaccgtactgtgcatggggcgcggggaggaggaaggggcgagcggcggcagacggacacagacagcgggaggaagcgcgaggcggcgaaaggcagggtacacgagcgagaggaagggagcgaaagaagcacgaggcatgaaggaaggaagaggcaaggcaggccagacgaggcaggggggcagacaaagaacgagagcacagaggacgacggacagtggac

SEQ ID NO: 239003 - DNA, 302 bp, Homo sapiens
gtcattttctatttgtggactcttctaggaaatcttcattcccatttagctggagcggtgatggaaagctattccttctctgatggacttaacaatgctatttctgtatctcatttgtgaggctgggcagccattcatttgtggttaatactgtaattcttaaaatgtatttttaagaagtggatagaaatatctgatgctccattttagtttgaatgctatcactgctgaagcacacacaaaactgtcagcaaaatgctgtttgtattggacaactcctgtgaattgaaagtagctaagct

SEQ ID NO: 239004 - DNA, 213 bp, Homo sapiens
ctttaattatattttatcctcacaaattccctttgaagtaaatactattattttacagataagcaaactgaagctcagagaggttatgtcacttgatcaacatcacacagtggcagagcaaggattcagactcaggcagcatggctccacttcattatattttaaatataaacatgtttatgttataaatataaatgtaaacataaaaatata

SEQ ID NO: 239005 - DNA, 615 bp, Homo sapiens
agtcatcttaagtaaatttaagccagaacagggacattttgagtggaacaacttctgaacacaaatgaaagggtaatatgaccaaatctcacatttcaataaaattctggtaatttatttggattaatcaaaatatagaaacaccagcattgtctctttgccctggggttgcaatcatttctaaggaataaagaaatggataaacagggacacagctctcacccctgaaggcatttagaatgcaaagtgtcctcttaccctctctttattcatcttctcttccctctctgcaatagtagtctatcgtttcccttccaaacatcattctctccttgacataaacaacaaaaagaaaaaaatcttacagctctgttctttttctcatccatcaggattgccatcctctctcagctgccggtctgttttttgagggaacaatgtgttccttgaacctgaaaagcaaacaaagactggacacactggctcacacctgtaatcccagctactttggaggctgaggtgcaagaatcgcttgaacccaggaggtggagattgcggtgagccaagacagggccattgcactccagcctgggcaacagagtgagactctgtcta

SEQ ID NO: 239006 - DNA, 512 bp, Homo sapiens
ccatctaagtttcacttctcagggaccattctcagcagctcctgatgaggctggatgaaaagcattcttgagtctgttatttggaaggttaagatttgcacgctcactgcctggccatggaggttggggccggaggcaggggtgccttctaggatatgtgcaaacacaactaagatcccagctctgagtgtgggagaccccacatatagtctgctgttttctcagtgtgtcaggaatcacagcagcaagcccggtgtgctaggctgtccagacactttccagaaccactgagtgtctcatgatggcagccactacccgcatggagtaaaacggggttcagcttccagcttagcaagttttcgaaaactttttggtttctaaaatctttattgttgtttttgttgttttgtttttggcactgggggtgaatgggtctcccaaccaagagaacatcaagactggatgtgaatggacttcacgtggagcctgaactctcctccatcgccagcggc

SEQ ID NO: 239007 - DNA, 754 bp, Homo sapiens
ggaaacacagtagggctatcttatagtattattatttttctagatcttacagattcaaggttcacataaagctagtgtattttaggaagagctattgtaaaattataaaagagttccagccgggcgcggtagctcacgcctgtaatcccagcactttgggaggctgaggcaggtggatcatgaggtcaggagatccagaccatcctggctaaaacggtgaaaccctggctaaaacggtgaaaccctgtctctactaaaaatacaaaaaaaaaaaaaaaaaaattagccgggcatggtggcgggcacctgtagtcccagctactcgggaggctgaggcaggagaatggcgtgaacccgggaggcagagcttgcagtgagccaagatcgcgccactgcactccagcctgggcaacagagcaagacgctgtctcaaaaaaaggaaaaaaaaaaaaaagacttcctcccctcccgtatcaagttcattaaacatatttgtgagcttgatatttaaagagaggctgtgtgctggtgtgatgttagcagtcaccagggtggggctggtcacacatgggagcctgggtggagggttgtgcctggattttttatggtggcccccaaccttggatctctgagacctagatgagcagcactgcacccgtaccctgctgtatggctgtgtctgtgttttgcagaagcagattttataggtgtagctttgatgattgaaatatcacccgagggaagtggctacctg

SEQ ID NO: 239008 - DNA, 1001 bp, Homo sapiens
agcccgggtgacagaatgagactccatctcaaaaaaaaaaaaaaaaaaaaagacgagacacagacacatgtgcaggggagagcaccgtgtgagtgtgagggcaggggttggagtgatggctctgcaagcctaggaacagcaaggattctgacatcaccagagagggtcgtagaacagattctgtctcccagcttctagaagggaccagccctgctgacacctggattttaggcttcaagcctcccgaacagtgaggaaatacatttctattgttggggccatccggcttgtggcacttggttacagcagccctgggaacagagcaacagaaagaagtagcagtgagttatgagtttctgcctacactgagagacttcaggaataaaacctaatggaaggtacttaggaatatgcagtgggattgtgtccttttacagaggagggaacgatccagagaggtgctcacagccacgcagtgggggctggtgatagatttggatccagaactcaggtctcctgggcttagaacttctctccctcctaatgctgcctatgggaacatatttgaaacctaactgggttcacattaaagaaatgccataaagttagggggcagatggtttgggtttttttcctctccattttttgatggggaatgaagggatcacagatcttgacaacaaaatggaaagagtttatagggttccaggttggattgcagtggtgccatctcagctcactgcaacttccacctcctgggttcaagcaattctcccgcctcagcctcctgagtagctgggaatatgggcacatgccgccatgcctggctaatttctactaaaaatacaaaaattagccgggcgtggtggtacgtgcctgtagtcccagctactcgggaggctgaggcagaagaatctcttgaaccttgggggcggaggttgcactgaactgatatcatgctgctgcactccagcctgggtgacagagcgagatgctgtctc

SEQ ID NO: 239009 - DNA, 383 bp, Homo sapiens
cgatcatggctcactacagccttgacttcctgggctcaagcagtcctcccacctcatcctccccagtagctgggaccataggtccacaccattgtgcctggcttttttttttttttggtagtaacccgggtctcactatgttgcccaggctggtcttgaactcctagttcaagcagtcctctcaccttggcctcccaaagtgctgagattacaggcatgagccacccagccctgcactgaaagttttttaaaattaaactgaaggctgagcctactcaagatcatgtacctagtcactgggaaggtgactggttcagtgtatgcattttgaggatcaaagcatcagcacagagtacccaataggctgtttaaaaaaataaaaa

SEQ ID NO: 239010 - DNA, 147 bp, Homo sapiens
ccttcggtttgcactttgtgtctgaagatttatcctttcatgactgccttttttggcttcatttctgcttttgtaggagcaggtttagatgacaattgcaagaatctcctcttgggctcttccttcacttccccttctgctgagctg

SEQ ID NO: 239011 - DNA, 370 bp, Homo sapiens
ggactttagagggtcccctgctaggtctgccagctgcctctcccttgacttcatgtccctccttcagcggactgggactgagtccgctctcctcagctgcagccgctgatccacatcactgatgtccttgctctgagggccgtctccaccgccagctgccctttgatgccagagcccttttgtaaaggaccctgcaggagaaagatggaagactcagagcaactgaagggagtttcacgaaggactggttacaggtggagtgggcagggtacagtgacaccaacaagagaggtgacatgaccacacactggccaggcagagagttatcaccacccttaagcctaagggaacaagcaaagggaagcccata

SEQ ID NO: 239012 - DNA, 1204 bp, Homo sapiens
ttctgtcatatttcaaaatacacttaaaactcaaaggtcataaaggtttaccttgtgttttcttctaagagttacatactttagtccttacatttaagtcttttattaatttagaattaatttttgtgtatactgcaaggtaggggtctaacttctctcttgtgcactgacatccagctgttggagagactgttctttcctcccttgactagacttggacagcttgttgaacagtcattgaccatatatgtgagcactaatttgtaggatctcaaatctgttctattttattggtctaaaagtctattagtcttatgccagtaccacactctcttgattactgtagatttgtagtaggctgtgaaactgaaaaatgtgagttttctaatattctttttcaagactgttttgtctgtcagatcctttgaatttttgtatgaattgtagaatgagtttctttctttctgcagaaatgcctttgggattttgatggtactgcattgaatctgtagattactttagatggtattgtcatcttaacaatattgtcttacaacccatgaacacagaatgtctttccagttatttccactctctttcgtttttttcagcaaagttttgtgtataccaccatggttagatttatgcctgaataacttattctttgatgctattataaatggaatttttaaaatgttttcatagttctttacaactatatagaaatatagctcatttgcctatgtttgttttgcatcctgcctcttttattagttataatcggttttgtgttttatttggagctttatacacataagatcatgtgtagatataattttacttctgttttttatttctaatttagatgccttttatttctttgtcttgcctaattgctctggctaaaattgccagtggtacattgaacacaagtggcaaatgcaccatgcttgtcttgttctagatgttaggaaaacagctttcagtgtttcatcattgatcatgatattaactgttgggtttttgtacatcctattgtcatgttgcagatttcatcaatgttttctctgcatcaattgaaataatcacgtgcttattcattttactgttagagtatattacactgattgattttttatatgttgagccactcttgcattttggggataaatctcacagggtgatagtttacaatcctttgatt

SEQ ID NO: 239013 - DNA, 468 bp, Homo sapiens
gttttttcgaagtgtacttttaaacattgaatttagaaaaagatgattttgtgagcaaagccagttctacccccaaaacatttttatattcctgaactgacacggtaaagttagatttgcatgaggtacagaagctaaaaagttgcatttaaaattcagcagagtatatcgtgcagagagtcctggagtgggaattgggagtcctgccaggccacattactgaagccctttctagacctttgttttcttacgtataaatatggaggttgaatttagagatctttaaagttgccttcagccccaagtttcattatagtccctctgttattaaacattgattgatagccctgtactgtgaaggttacaaaggtaaagagagttcctgccctcccaaggcagggattatcctctaattgcaagggtaaaccaattaggcaaagagttgtactataagattgcacagggtgg

SEQ ID NO: 239014 - DNA, 421 bp, Homo sapiens
ccaaagatagctgttaatattttgatatgaagccctatatagatgtatttatatgaagtacatgtgtgcaggtttgttgggggcttttgtgtgtgtgtgtgtgtgtgtgtgtgtgtgtgtgtatgtgtgtttcttaacatgaaaggaggtcacactctaatactatgtaacaacttgccttttataccagcagtgttctggaagagcttttctttttacacatacagatcgatcgtatttctgttagccattctattgtttcttgctgcggtacataatgttggctggagtgaagagattggggttcagatcacaagtctgccacttatgagtcatgggatcttgggcaaattactttctctatgcttcattttctcttctgaaaaatgaattaatatgaataaaaatgaaccttatttta

SEQ ID NO: 239015 - DNA, 456 bp, Homo sapiens
ggggtggtcagctggggctacggctgtaccctgcgggactttcccggcgtctacacccacgtccagatctacgtgctctggatcctgcagcaagtcggggagttgccctgagcaggctgggctgggctcccacctgggtcggctgaggagggaccaggaccttcctcctcccagcgatctccgcttcggcctccgctgcaggccaccgtcttgagcccggcttctctggctcctcagcgcccaggacctccctgatgccggggtggggaaggggccggggaagggagggtgggggcctcgctgcgtctctgtctgattaaagagcaagagcagagtgtgtggcgtctctgtgggatggatttgcattccaagctgcagccaggtgcggtttgctcagccacctcctgttggaggcctccacattttggctatggtaataaagatgctgagaacatt

SEQ ID NO: 239016 - DNA, 231 bp, Homo sapiens
tggatagaaatcgggcacaatcatgcccacgcacgttgtgcaaactcaacaaatggtgacaggacctcagtgggtgctaagttgactgggcacatccgattcctcttcaaataaataaatattccatgtaaatgtctcttccagggaatcgtgtactcctgatgcctgaaaatcgttaagtgaagacttatcacattaccgatttgttcaaaaccacagcattcaaagaga

SEQ ID NO: 239017 - DNA, 228 bp, Homo sapiens
agagtaagtggtgtcaattagtgttctaatgattaaatattattgagttatttaatgtccaatggtgttttatccacaggttataatcgcatatgaagttgccttcattcttgtgaaactgtttggtttaaacttttgaatcagtgagagaatgtcaaagaggtacaataaaattatcacctgaaaattgtttctctttcaacagtaatttaatttcaaagttcattt

SEQ ID NO: 239018 - DNA, 447 bp, Homo sapiens
cagggccagctttctggcctggatgctggggctgttctgtccttggaccatccatgggacgtgatgttgaaccgtccccctaggacccactagctgctgtcagattttacagcctcccccatgcaaccacctggggtgttcgctgctcagaaactctcagaaagatcacacagggccaggtgcggtggctcgggcctgtaatcccagcactttgggaggcagaggtgggcagattgcttgaggccaggaattcaagtccagcctggccaacatgatgaaaccacgtctctactaaaaatacaaaaattagctgggcatggtggcgcatgtctgcattttttggaggctgaggcatgagaatcacttgaacacaggaggcagaggttgcaatgagccaagatcgcgccactgtactccagcctgggtggcagagcaagacccttcctc

SEQ ID NO: 239019 - DNA, 274 bp, Homo sapiens
tgcttcctgtgacaccatgtggaggagctgagatggagaagcagaaggacttctaattctggtttttgcatttctgacaatcaaccgatggctccacctggacctgccaaccccgccaagcagtcgtggacccagaagcagactccctggcctgccaaactatccttacaaaaccctagcctccaacttttcaggaagattgatttgagtaataactccatttaccacgtggcacggctggcctcaatgattaaactctattgcaatgctgtgg

SEQ ID NO: 239020 - DNA, 490 bp, Homo sapiens
gcctgccagttgcctgggagtctctactttgaatttcctacatgggctgtatgaggacttccccgcatgcccaggctggaggtggacagccacccttccatttgacctccccagcgcagtgaaatcaggatgaaggaaggggaagttccagggtgggcttagattggcttacgtgaaagagaaaaagtaaaggagaaaatcacctttagttctcatctctaaatcctaaaactctctgattatgtattccttcttttcttggaaatccaaagttcttctggtctattgcaaaagttatttttttgaccctctattcatttattactttgtatcagagtcttcttcactttgaagataacatgtatactacccttgaccacaagacttgaaggtggcttgtgttcccctggaagaatccaagtgtcttatagtttcttttttgctgttggctacaattagaacaacctctgtgcagttgtagtcaacagca

SEQ ID NO: 239021 - DNA, 453 bp, Homo sapiens
tttcagcatttaaaggtagcatttagaatgcctgtggtttaatttctaaaatctaattagcttaccaccttaatcttaaataatttaaaaatatatttaagctactgatgttaaaaaatgtttttctttaagcaacttaaggaaaaaaccaccattgttagttgcttctgagagaggtgttgggagggttgaaattatacagtaaatttcaggaaagctgttcaattaatagagtgatcactacccaattgcttacatctggtgatttatagaggtttgtttttactgagggcccaggtcagctaagtcacgggtgcagccgctgtgtctgctttcctctgtttgaataagagctaagtgacatttgatactgatgtggtttttccaaagatcagaaacagaaaggagtgaaagaaaaagcagtcggtatttgacaaataaacactgtattta

SEQ ID NO: 239022 - DNA, 402 bp, Homo sapiens
actaaatcagcttccccaaaaatttggaggcggggtttttcaaggatagtttggggaaaggggagggtggctaggcaacgggtgcttgctgctgattggttgaggtgcaatcataggggtgtgggaaacggtcctgcttactgagtcacttctggctggggctgcggggagctctttttggtttcaggtagagccattgatcagacatgcaaaaacctgttatctgcaggagtcactggggaagtcgcatatcttgtgacctccagaagaatagctggcagttgtttatgtctaccccttagcagaattcaggttcctccatcctcctatcctcgtggaccctcattagctttacaaaggcagttgagttttacggaaggagtattatcatttaaattacaa

SEQ ID NO: 239023 - DNA, 407 bp, Homo sapiens
gtatttttagtgattccttatcctggttcatcagaatttgggaagcttttacaaaatacacattcctcgctgggcaggatggctcatgctgtaatcccagcacttgagatgccaaggcaggtagattgtcttgaactcctgatctcgtgatctgcccacctcagcctcccaaagtgtcttttattctttataagttgtctgtgttaacatcctgtatctgaacaggtccttggtaatatttcaaaaagtaacgttaaaaagagaaaatacagtgctacccagtattgctttttatttttggagaccagagactgttcatacttggaatgtgttatttgaagtgtttgtagatgccgttttgaagccacttttagcttatcacgtagtaacaaaatacaaaaattgtt

SEQ ID NO: 239024 - DNA, 357 bp, Homo sapiens
ggatccctttcgtcgaagaacaacggcaatttttgtatttttagtagagatgggatttcaccattttggccaggctggtcttgaactcctgatctcgtgatctgcccacctcagcctcccaaagtgtcttttattctttataagttgtctgtgttaacatcctgtatctgaacaggtccttggtaatatttcaaaaagtaacgttaaaaagagaaaatacagtgctacccagtattgctttttatttttggagaccagagactgttcatacttggaatgtgttatttgaagtgtttgtagatgccgttttgaagccacttttagcttatcacgtagtaacaaaatacaaaaattgtt

SEQ ID NO: 239025 - DNA, 383 bp, Homo sapiens
atgaacttctagttctgggcttgactgtatagaaaaatcttaagtcatctctttgacttcctaccaatcaaaaaattaacaggaaaaaattaaaatagctagcttgaataaatgaattcaagatagaaatacactaatttgtcatgaaagtgctgatgacagatgacttattcattttcctaccagttccttggtcataattggcattgttgataaaaataaaatatacaactgcactccagtctgggtgacagagtgagaccctgtctcaaaaaaagaatcaaataaaatagaattaaaaaacatacaaaaacttcattactgtatacactgaaggacaatgccatttttccctatatgagggtgcaatggaaaccataacc

SEQ ID NO: 239026 - DNA, 338 bp, Homo sapiens
gcctcacaatgaaaatttttaaacagtttacaccaatcaactcatttaggggctaaagccctccaagacttaatatggtcactgtttatcggtaaaggaatagcataaactttaagatccatctcacagccttgccccacctgctgccaaaccagtcctgaaggggcccacaaacttccccctctcctccaactcattcaaagattagggatcctaccaggagaagtctggcagctagattttacacacatgcctccatgcaagggacttaaatatttgataatctttgtagataccttcgccaggtggatagaagcctttcgcatcaaaactgaaca

SEQ ID NO: 239027 - DNA, 431 bp, Homo sapiens
atatgtttcatcatctgaaaaggtctattttaaattctaaatgtttgctaatttctggttaaggttgtcatggagttttctccttcttcatctaaatcatctggcagtgaagttattgccttaaatcaccatatctagctaacagtatagtgctggtataagtcatctcttacttagaaaaaaaaaaacgtgttaaaaatgttaactgcaaagcacaaagtggtaatgtcatactgcccctctattttggtgcacgataaacacaaaacagcaggtgttgattttctctgatattcgagattgacagcttgtctctttcttactccactgacccccattatgtttaatctacattcatccatgacacattgcaacctgctgattttatatgattttatagccactctgtatgtaaataaaatgagtacaaa

SEQ ID NO: 239028 - DNA, 667 bp, Homo sapiens
atgtaccagcatcttagatcaattctggcacattattttaaaagttttttgttcctgagttccttggtacctgatcattccaatattttctgccttacaaagtcacaggaaaacaggtttggagctgagtattttcaatcaccactgacttggtgacagacactaaactcatttcacttaggattataggttgaactcaaattgggatccctgaagagaaagaccagtcctttatccagtaccttaaggaaaacatttcttatttccattaacaaccagaaaaggaaagacagtgcaacagctggaagagcactgcaaatatcagggttacaaagagtaacccagaaacctttaaaataatttaaagtggtgataaaaccagtaacacactgcacttctattaatgcagtaatccttaacccttgaacctaacttgtacttacactaagaagtcagaagaactgtttttacttgatctaccaaggcaatttcccatagtttgattggaaatagtgctgatgattttctcatttaagttatctacaaagcactaaaaaaaagtgactctgctggaattatccttctaagaaaataagaaaaaaatagaaatttcttacaactaagaaatggatcaagataacattggtctgtgagatttaaatctatc

SEQ ID NO: 239029 - DNA, 972 bp, Homo sapiens
ctgtctgcctcggcctcccaaagtgctgggattacaggcttgaaccaccaagcccggcctgacatttttcttttaaatcttttatcaaccagctttcatttcttgtcagatgtcacttttcagcaacctgttgctatattctctgttaggagaactttttttttttttttctggccagactgagagaaaggaatgaaaggatggaagaattacaagatcaggcactgctgtctgtctgttccacggatgtaaccacagcacacgcgtggctcacggtactagtgtgataaatgcttgttacatgaaggcgtgaacagggatgagaagagacttcctggagaaacaaaaggactaacaatcaggaaggggaggtgatcggggcaggagtaaagtggacacctcagcaaagccattcgctgtgatctctgattgtgcagtgtcatgtcctgtcaccagagccccctcgtgtttgatgttggccaatgccgccagcatgatctagcaggccaaatcctaatctaccattctctgacaccagctggtcccctgggtcgtccacccgatgtcccccattctccccacttggcctcccccacaggctctcggcaaaggaccgtgggaggcacctgtgacactgcccttttcctgtgcagctgtttttcttcttcattcttttcactcctcgttactcttttttttttcactctcagcccacacaaaactaggaactttgttattctacttatttttctgtactctgtctgtttgcacacagatggatatctgagagccagcgaactttctttacctcctagtatcatttcatgaaaattagtagcacctgcacaatggggccttggagacaggaataaaaggaaaaatctggaatggaatcacatgacgcaacaggctatgaagactccctgcccggctgctatatgtctggtaaacagaataaatagtacttgagca

SEQ ID NO: 239030 - DNA, 799 bp, Homo sapiens
  misc_feature (799)..(799): n is a, c, g, or t
tacagccaaacaatgcgcaggcaatccacagcagctgcccctgcaaatgtcagcgccagcccagtcaaaagagcttgaaacctaccaagccggaggactgtgctgtgcctctctcgcccacattttccccaagcactctcaggaacctggcaacagtgtccccttgtggccaagcctggaacatcacatctgtacgttgcaatctgtggatcagctacgagatggatatctgagagccagcgaactttctttacctcctagtatcatttcatgaaaattagtagcacctgcacaatggggccttggagacaggaataaaaggaaaaatctggaatggaatcacatgacgcaacaggctatgaagactccctgcccggctgctatatgtctggtaaacagaataaatagtacttgagcaaaaaaaaaaaaaaaaaaaaaaaaaaaacaaacaaaaaaaaaaatacaaaaaaaaaaaaaaaaaaaaacaaaaaaaaaagaaaaaaaaaaaaagaagaagaagaggagaaacagagagagagagcgaggaagaaagagaaagagaggaaaaagaaaaaaaagagagcagaagaaagcagacgggggcggaggagacagcaagaaggagaggagaggaggaggaagggcagaaccggagagaagaggggggacggaagaagaagagaagaagtgaggacggagcaggaagggaggggagccggacgacagagagaaaagagggaacgagagagagggcggacgaagggagacaagacggggaaggagagcgagcgacgggggn

SEQ ID NO: 239031 - DNA, 1015 bp, Homo sapiens
tacagccaaacaatgcgcaggcaatccacagcagctgcccctgcaaatgtcagcgccagcccagtcaaaagagcttgaaacctaccaagccggaggactgtgctgtgcctctctcgcccacattttccccaagcactctcaggaacctggcaacagtgtccccttgtggccaagcctggaacatcacatctgtacgttgcaatctgtggatcagctacgagactgagagaaaggaatgaaaggatggaagaattacaagatcaggcactgctgtctgtctgttccacggatgtaaccacagcacacgcgtggctcacggtactagtgtgataaatgcttgttacatgaaggcgtgaacagggatgagaagagacttcctggagaaacaaaaggactaacaatcaggaaggggaggtgatcggggcaggagtaaagtggacacctcagcaaagccattcgctgtgatctctgattgtgcagtgtcatgtcctgtcaccagagccccctcgtgtttgatgttggccaatgccgccagcatgatctagcaggccaaatcctaatctaccattctctgacaccagctggtcccctgggtcgtccacccgatgtcccccattctccccacttggcctcccccacaggctctcggcaaaggaccgtgggaggcacctgtgacactgcccttttcctgtgcagctgtttttcttcttcattcttttcactcctcgttactcttttttttttcactctcagcccacacaaaactaggaactttgttattctacttatttttctgtactctgtctgtttgcacacagatggatatctgagagccagcgaactttctttacctcctagtatcatttcatgaaaattagtagcacctgcacaatggggccttggagacaggaataaaaggaaaaatctggaatggaatcacatgacgcaacaggctatgaagactccctgcccggctgctatatgtctggtaaacagaataaatagtacttgagca

SEQ ID NO: 239032 - DNA, 595 bp, Homo sapiens
ctgtctgcctcggcctcccaaagtgctgggattacaggcttgaaccaccaagcccggcctgacatttttcttttaaatcttttatcaaccagctttcatttcttgtcagatgtcacttttcagcaacctgttgctatattctctgttaggagaactttttttttttttttctggccagactgagagaaaggaatgaaaggatggaagaattacaagatcaggcactgctgtctgtctgttccacggatgtaaccacagcacacgcgtggctcacggtactagtgtgataaatgcttgttacatgaaggcgtgaacagggatgagaagagacttcctggagaaacaaaaggactaacaatcaggaaggggaggtgatcggggcaggagtaaagtggacacctcagcaaagccattcgctgtgatctctgattgtgcagtgtcatgtcctgtcaccagagccccctcgtgtttgatgttggccaatgccgccagcatgatctagcaggccaaatcctaatctaccattctctctccactcccgggagtggagagagaacggaaggggcacagtacttcatatgaaactcataaatac

SEQ ID NO: 239033 - DNA, 418 bp, Homo sapiens
tacagccaaacaatgcgcaggcaatccacagcagctgcccctgcaaatgtcagcgccagcccagtcaaaagagcttgaaacctaccaagccggaggactgtgctgtgcctctctcgcccacattttccccaagcactctcaggaacctggcaacagtgtccccttgtggccaagcctggaacatcacatctgtacgttgcaatctgtggatcagctacgagatggatatctgagagccagcgaactttctttacctcctagtatcatttcatgaaaattagtagcacctgcacaatggggccttggagacaggaataaaaggaaaaatctggaatggaatcacatgacgcaacaggctatgaagactccctgcccggctgctatatgtctggtaaacagaataaatagtacttgagca

SEQ ID NO: 239034 - DNA, 148 bp, Homo sapiens
ggactgtgctgtgcctctctcgcccacattttccccaagcactctcaggaacctggcaacaggtaacgtggcaacctttgacttataaaagggcaagtggcacaatctcagggaacaaatggacttttttttaaagccagcatctccc

SEQ ID NO: 239035 - DNA, 353 bp, Homo sapiens
tacagccaaacaatgcgcaggcaatccacagcagctgcccctgcaaatgtcagcgccagcccagtcaaaagagcttgaaacctaccaagccggaggactgtgctgtgcctctctcgcccacattttccccaagcactctcaggaacctggcaacagatggatatctgagagccagcgaactttctttacctcctagtatcatttcatgaaaattagtagcacctgcacaatggggccttggagacaggaataaaaggaaaaatctggaatggaatcacatgacgcaacaggctatgaagactccctgcccggctgctatatgtctggtaaacagaataaatagtacttgagca

SEQ ID NO: 239036 - DNA, 1520 bp, Homo sapiens
tacagccaaacaatgcgcaggcaatccacagcagctgcccctgcaaatgtcagcgccagcccagtcaaaagagcttgaaacctaccaagccggaggactgtgctgtgcctctctcgcccacattttccccaagcactctcaggaacctggcaacagtgtccccttgtggccaagcctggaacatcacatctgtacgttgcaatctgtggatcagctacgaggtaagtcgctctttggaaggggtggaggtctttgctggacttgtcttccgaaaagtatgaagagtggaagtcaaggctcagaatggcgtccttttttaccttatcaccttaacaaaaacttcaccttagctgcagggttaaacctctgggttggggctggggattttcgttgttgttgttttaaagcagcagccaaggccatgttttttaaggtggtgagttaaacggagcaagagctgcggtagccttttccacccaatctctttcttcacatcctagtcacagccaagggtagggtggatggcagtgaggataaacagcccagaaacaggattcctgcggggtgggactggcattttccatttttatctgaagttgtactttgaatgcagacacctttctctcaggccagaagcactgctcatttgtattgctggcttccagttagcctatttgcaaggattacttaggatttccagactgcaggcccagctacccagagagtgtgcctcaaagccccacctcaaagcttttatctctatgtggcgggaaacacccacgaaaatgccaacggcggtatttgtaacttgccttcttccttttgggaactgctttctgcagctctctctgcgttagaggaatagctacagctgggagctgctccagccacgcaggaggagagggcacccattgagaggcgggcaccccttctgtctccctctggctatgttaactggaaactaggaaaggggttcagatcaaagtaactgctgtcttcagaaagttccattcattaactaagttagcggaaattaaatggtgtttggaggaaggtcatttcagaaggcccagggccagaggctgaggtctaaaacttctaatctggacttctattgaagtttggcagtaagttaaacaggaagttgaaggctaccatatgtaaatccagttgttgcctgaaatcagtcatttcaagggagtatcttgaaaggacacagactgggaaacaggcatgagaaaaaaaaaaggaagtagacagacatttggctagtatgtgcctggaccacttaacactaaagattagaaacctagggctctgagtaagaatcatttgaccagtagctaaagtgagtcatggcctgcacagaactagggcacacatgttgaagtcaggatgttgagaacatcaggcttactaatttgcaaggcaggagtgctgcttccagtagggaatgtgatcaggatttcacggctcattttcccagcctttccaacaggtgcaatcaagtcatccgtgta

SEQ ID NO: 239037 - DNA, 455 bp, Homo sapiens
gaggttgctgtgagccgaaattgcaccactgcactccagcctgggcaacacagtgagactccctctcaaaaaaaaaagagaaagttccactttattttgtctggttccctttatcctgccctcattgaatgaccgaatgcattaacttaggcacttaaaacgaaggataggctgggcgtggtggctcatgcctgtaataccagcactttgggaggcccaggtgggtggatcacttgaggccaggagttcaagaccagcctggccaacatggcaaaacccagtctctactaaaaatacaaaacattagctgggtgtggtggtgcgtgcctgtaatcccagctacttgggaggctgaggcaggagaattgcttgaacccagaaggcagaagttgcagtgagctgagatcatgccattgcactccagcctgggcaacagagtgagactctgtctcaaa

SEQ ID NO: 239038 - DNA, 222 bp, Homo sapiens
tggtgcaataatagactcccatgagaagttgaaaataggcaaactgcttacaaactacctttatcatacaccccgaggataattccaaggcaacattgaagtaatcaaagcgacatgacaccaccttgtatagatacagtttcacagtagaaagaaagttcgctgtagggaataggagttaaggagatgaatcttgagctggggcttgacgggagtgtggag

SEQ ID NO: 239039 - DNA, 1633 bp, Homo sapiens
actgggctgaggtggggagggtcccacagcagccttgttcaccagagagcctcagggctccagtggctactggtgctccaacaggaagggaagcagccacacctctgtgttccaaatcccccacaggaaactcttctccatggctgagtctgggccagaaagcccaagcacttgcaggtgagtctctgctaacctcccatgcctgacctcacactcagcacctggactctcatctcaggggcttctgaactgagggtgagaaaatcaagagggtctgtgacctgagctgggaatgaggagcgggggaggtctgtggaccccagcctgtggtttcttccagggaccctccccaaacccagcctctgggctgagccaggctctgtgattacctgggagagccccatgaccctctggtgccaggggaccctggatacccagggttactatctcaccaaggaaggaaaccccatgacctggtaccaacagagcccaccagagcccaggaacaagaccaacttcttcatcccatccatgagagagcaccatgcagggagataccactgtcactatctcagccctgcaggctggtcagagcgcagcgagcccctggagctggtggtgacaggcgtgtctaggaagccctccctcctgaccctgcagggccctgtcgtggcccctggggagaatctgaccctccagtgtggctctgatgtcggctatgacaaattcactctgtacaaggaggggggacatgacctcgtccagggctctggccggcagccccaggctgggctctcccaggccaacttcaccctgggccctgtgagggtctcccacgggggccagtacagatgctacggtgcacacaacctctcctccgagtggtcggcccccagtgaccccctgagcatcctgatcgcaggacagatccgtggcagaccctccctctcggtgcagccgggccccacggtggcctcaggagagaacgtgaccctgctgtgtcagtcacgggagcagttggacactttccttctgaccaaggagggggcagcccatcacccactgcgtctgagatcagagcaccaagctcagcagcaccaggctgaattccccatgagtcctgtgacctcagcccacgcggggacctacaggtgctacagctcacgcagattcttcccctacctgctgtctcaccccagtgaccccctggagctcgtggtctcaggagcagctgagaccctcagcccatcgcaaaacaagacagactccaagactgcctcacacccccaggattacacagtggagaatctcatccgcgtggctgtggctggcttggtcctggtggtcctcgggattctgctgctttaggattggcacagctagagaagtccccaagatgcagcaaggaggtaaatacatgagagaacaatgcacccttcagagtgccagagccttggcaatgagtctgatagtcctaggaggttctggaagaaagtctggaccatcattcgggaaaccgtctactgagaaagtcgagaaggggaggcttgggtcaggttcagggagatgtctgggtgcctgtagagaacgcttcctccattaaacttccattaaatggcagtgctttcagtcc

SEQ ID NO: 239040 - DNA, 1363 bp, Homo sapiens
atggtgtccatcctcactgttcttctgtgcctcaggctgagtctgggccagaaagcccaagcacttgcagggaccctccccaaacccagcctctgggctgagccaggctctgtgattacctgggagagccccatgaccctctggtgccaggggaccctggatacccagggttactatctcaccaaggaaggaaaccccatgacctggtaccaacagagcccaccagagcccaggaacaagaccaacttcttcatcccatccatgagagagcaccatgcagggagataccactgtcactatctcagccctgcaggctggtcagagcgcagcgagcccctggagctggtggtgacaggcgtgtctaggaagccctccctcctgaccctgcagggccctgtcgtggcccctggggagaatctgaccctccagtgtggctctgatgtcggctatgacaaattcactctgtacaaggaggggggacatgacctcgtccagggctctggccggcagccccaggctgggctctcccaggccaacttcaccctgggccctgtgagggtctcccacgggggccagtacagatgctacggtgcacacaacctctcctccgagtggtcggcccccagtgaccccctgagcatcctgatcgcaggacagatccgtggcagaccctccctctcggtgcagccgggccccacggtggcctcaggagagaacgtgaccctgctgtgtcagtcacgggagcagttggacactttccttctgaccaaggagggggcagcccatcacccactgcgtctgagatcagagcaccaagctcagcagcaccaggctgaattccccatgagtcctgtgacctcagcccacgcggggacctacaggtgctacagctcacgcagattcttcccctacctgctgtctcaccccagtgaccccctggagctcgtggtctcaggagcagctgagaccctcagcccatcgcaaaacaagacagactccaagactgcctcacacccccaggattacacagtggagaatctcatccgcgtggctgtggctggcttggtcctggtggtcctcgggattctgctgctttaggattggcacagctagagaagtccccaagatgcagcaaggaggtaaatacatgagagaacaatgcacccttcagagtgccagagccttggcaatgagtctgatagtcctaggaggttctggaagaaagtctggaccatcattcgggaaaccgtctactgagaaagtcgagaaggggaggcttgggtcaggttcagggagatgtctgggtgcctgtagagaacgcttcctccattaaacttccattaaatggcagtgctttcagtcc

SEQ ID NO: 239041 - DNA, 1956 bp, Homo sapiens
  misc_feature (150)..(150): n is a, c, g, or t
  misc_feature (1906)..(1906): n is a, c, g, or t
attgaatgtgttttatttagaccataacatttagtgccactttggatttccaattaggcttcaatcagatgccgagagtctgattcgttttgttgttttgatcaacacgaaagatggcaacatcagaggagccgtcatgaaaagttactnccatccactgatgactaggacggtttctgtagtgtgaagatgcaggttcagaggtgtcgagagcggcaccatgcatcaggaagaggggcagaggcaaaggggaagtcagtgaacccctggagacaagcgcaattggaagtcctggggtgcgtggccgggacttggcaaggtccctctgtatgtgggccagggctctgggtgcccctgagggaggggaaaggtgttggtctccaccccagcagatttctcatacaaatggttcaggcttgaacagctcctctcaggccttttatccagggacatctttgtgaacacagggttcccatgaagtgggaagctgaccaccactttttgatttctttagtgaaggcctctgaactcctcagccagaagtgaccagctgtactcatttacagaaatatgtggggggctttttctcaccacctgtgagttctggccagccactggcacatgctgtctgtcagataaggtttctcaatggggttgatcctagggacaaaatttggaatccaactttgaactgccagggagtttgttgcgggagggaggtggcaggatggcagaggggtgatgggagagtggccggggaggagtaggtaagagtctgcctgtgccaatcatcaagagtcactcaccacacatctgagtcaaggtcaactggagcctcattttccccattgataaaatgtgtttgaatgccccttgcggcaatgacattgggtgcattccttctagccatgaatgtgtatggaatggaggctgtgtgcacagcgctcggaggctgacctgggttcgagtatgcatgtgcttgtgagaacagaagttggtggggttggtgagtgagatgagagcaaacgttcctgtgtgttctgggggtgttagtgtctacactatgttagtgttagtgtcttcactatgttagtgttaggctctttcatatgccattgcatgtacccactgggggaaatgtgtgttcaagcccttctcctcccagctttacactgtttttagagcccagcttggctgcatttccagctggccctttgatctttctgtagcaggccagctcagggactcagcttttcagccgcaatctccacttcatagagtgcatgccttgtggttaagttccctgagcctttgccactgtgcctcaagttacctccctcacctcaccttgttccccccagttatgactggtccccaccttgcaaacaggttggggtttgaaactcccaccaggtgatgagaaggctgactgtgtcatcagctgttggtgacttagcaaacagtctgggttcagcctctgtccctcaactaatatttaattataagaaagaggtgggcagagatgcaagccaggtagaaggaagacaggagagggaagaatgaactgagatgaaaaaaatgttctagccacttagccattaaatagctcatcaaacagcctttgaggaccaactgtgctcacagcaaagagcttatccttgcactatcacacatacatatggaaaatagacaagtaagtagtgagttacaatacacactttgcgaggctgaggcgggtggatcacgaggtcaggagaccatcctggctaacacggtgaaaccccgtctctactaaaaatacaaaaaattagccaggcatggtggcggtcacctgtagtcccagctactcgggaggctgaggcaggagaatggtgtgaaccctggagatggagcttgcagggagccnagatcgctccactgcactccagcctgggggacagagagagactccatccc

SEQ ID NO: 239042 - DNA, 2672 bp, Homo sapiens
  misc_feature (1441)..(1441): n is a, c, g, or t
  misc_feature (2237)..(2237): n is a, c, g, or t
aataggaaacaggattgggcctgtttgataaaggatgtgcttgtgtgtgtgcatgtgcgtgtgtgtgtgtgtgtgtatgtgtgtgtgtattggaggtctttaggaggagagaagcgtggaaggacagcatcaacacctggcatgggagccaggctttggcactggtggtagtggggaggcaaggtgtgttatggggcatgcaagcacccttactccttgggacactcatcattccccagacattgcttgcctgtgacatctctgtggcaggggtgagacgtgatgctgacaggggcagtagagtaggggttaagagcaggacgtttgaggttgcacagacctggaatttcagcgtcaacttttactgtgcccttggatgagctactgatcctttctggggtgtttttttttattattattatactttaagttttagggtacatatgtacaacttgcaggtttgttacatatgtatacatgtgccatgtttgtgtgctgcacccattaactcgtcgtttaacattaggtatatctcttaatgctatccctccccactgcccccaccccacaacaggccccggtgtgtgatgttccccttcctgtgtccatgtgttctcattgttcaattcccacctatgagtgagaacatgcagtgtttggttttttgtccttgtgatagtttgctgagaatgatggtttccggcttcatccatgtccctacaaaggacatgaactcatcattttttatggctgcatagtattctatggtgtacatgtgccacattttcttaatccagtctatcattgatggacatttgggttggttccaggtctttgctattgtgaatagtgccacaataaacatacgtgtgcatgtgtctttatagcagcatgatttataatcctttgggtatatatccagtaatgggatggctgggtcaaatggtatttctagttctacatccatggggaatcgccacactgacttccacaatggttgaactagtttacagtcccaccaacagtgtaaaagtgttcctatttctccacatcctctccagcacctgttgctctgtcactcaggctggagtgcagtggtgtgatctctgctcactgcaacctctgcctcccaggttcaagcaattctcctgcttcagcctcctgagtagctgatactacaggaatgcaccaccatgcccggcaaatttttgtagttttagtagagatggggtttcaccttgttggccaggctggtctcaaacttctgacctcaggtgatccaccacctcggcctcccaaactgctgggattacaggcgtgaaccactgcacccagcctgctgatcctttctgaacactggaaaatggggataataccacccttaaagggttgtgtgagaataaaatacaatgatgtctgcaaggagcttagcacatggtangcatactcctaccctagggtaatcctccaccgcctggattgttctttctccaaatgtctgcagggctacttcctctctctgacttaagtctctgccattctaaaaagagcaaaccctccctagtcctgggcaattcctggtcctattctctgctttattttttcccatagtacttgtcaccatttaacatagcatatattttactaatttgttattcccccgactaggatgtaagtttcatgaaggcaggaatttttgtctatttattatatcctgaatgtctgatatgtaataagcatgccatagatatttgttgaatgattgactcacaaaatatatcataaattttaattatacatattagttgttggacacttttgccatgtcatagccttggaataattaagtctcatgaacctccttatccaagagtccaggtctcattatcataggggaccctcctttcttaagcattagagaccagacagaaggaaggtgggattcacacaaaaactttaatcctcagcagttctcaaccctggctgcatgttagaatcaccttggtggctttctgaaaatagcaatgattgaaccacttctagaaactctgatttaactgctctgggatgtggcttggacttaaaatttccttttaagctgccctgttgattctactgttgaggatcaataaactatgtgaactcgaagctactgaaggctagagaatgagggtcttgcacaacagcctgccattgaggttggaggagacattgttcccagaccaaactgagggtcnggctgcttattcttgcagcccaatatggagatgcagatgaactgggaaagaagagagttatttttgtaaccgggtacagggagaagacctggaaaaaatcgccagaccaactcaaaattacaaagttttccagagcttatataccttctaagctatatgtctatgtgtaagtgtgcaggcatctaaagatataagtgattaacttcttctaatctataactaaggtctgagtcctgaagacattcctctggaacctaagtaaatttacttaatctacatggatcccagtgctggggtgattacccttatcttgtctcctgctaaatcatggaggtttggggagttcagacctccaaaccttcagacctccaataaacttgtttgtggaggtctggagagtctcttcagacctccaataaaaatttgtttaatcct

SEQ ID NO: 239043 - DNA, 373 bp, Homo sapiens
tacttgaaaaaaactctttctagaaacatatttattaactattgaatagacttaatacagcaaagacaagtagagatgaccgatcatcaacagccagatttgggcagatttaagtgtcctggtcctaagacaatcttaatagctctgagatctttaaaagattaaagtttgtttttcaatatccttaggaagaaaagagagaaagaaaatcatcatggacaatagaggacacaacctaaatactatctggaagcagccttttgctactaactgttcaggaccgtaattaccctcctccatcggctatggcaaactggtaacacatttccgactacactttcatctgcgtggcaaccagatcaatgttctttac

SEQ ID NO: 239044 - DNA, 359 bp, Homo sapiens
ttttagttctgagcatcacatttatatacaacaacataaaaaggaagaaggctgggtagtctagtgactacttaaagggagaaaaatctttccagaaactttctggcagacatctgctcatatctcatcggctcaaactcattcacatgcctatcttaaaccaatcactgacaaaggaatgggatatccatggctggcttatataaatcaagagttactcctagagttctgtccccattttcccctcttagttaatctaatgtaactttacatatatgcaaattaaacacttttttttcactacaaagtctgtgggtttgtgtttggtttgtgcgtttgtgtgtgtgtgtgtgttgtgg

SEQ ID NO: 239045 - DNA, 425 bp, Homo sapiens
tgatttcatgcaagtactcaagccttgtgtaaaagcagaaagcatacagagatatgtaggtgtcgtgggctaaattgtgccctcccattaacgtgttgaagccctaacccccggtacctcagagtgtgactgcatttggagatatggtctttaaagaggtgattaaattataaggagggtgtgagagtggccttgatctaatctgactgatgtctttaaagaagatgacatttggacacagagagagataccagggatgtacaggcacagaggaaagaccatgtgaagacacaggcagaagacagccatctctaagtcaaggaaaggggcttcagaagaagccatccccatcaacaccttgatcttgtactcccagattccagaactatgagaaaataaatttctgttgtttaagccaaaaaaaa

SEQ ID NO: 239046 - DNA, 483 bp, Homo sapiens
ctgtcacttggagcccgctgtcaccgcctgggaacggggggtggggagcgctgggacgtggagtccgggatcccgaagaggaagcaagagcgagatggagagggggaaggggaggtgtggagagcgcgagggatggcaaggagaggagagggtcaggaggggccaggctcggacccaggcttccggattcccagccaccgggcccgggaagaggcgaacgctcggaggaccgcggccagggagaaagggagggaatccccggagaccgagggcgctcccggcaccccctcctgggcagccggtccccaaagggatcagagatgctcccgtttgatgtgtatgcgcggggagagggagggatgccgcggtccagactgacggcgggttcggggcttccagttcccgggatcccgggaggaaaaaggggaggcagcggggatggaactggggacccccgacgtctcagctcccaccctgcggccg

SEQ ID NO: 239047 - DNA, 358 bp, Homo sapiens
aaaaaaaaaaaaaaagaagaagaagaattctaaaattgttcagtgtcatgcttataatcctggcaatttgggaagccaagtggtgggaggatcgcttgagcccaggagtttgagaccatcctgggcaacatagcaagactctgtcgctgcaaaaaatacagaaatttttgtagcctgagtagcctaagtagctaagatgacaggtgcactgggcgtggtagagtgcccctgtaatcccagctactcaggctgggctgggaggctggcttgagcccaggaggtgaagcctagtgagctatgatcataactgcactctagcttgagtgacagagcgagatcctgtctcaaaaaataaaaa

SEQ ID NO: 239048 - DNA, 2063 bp, Homo sapiens
  misc_feature (1366)..(1366): n is a, c, g, or t
caaacatggcaaaaactatctgataacagccaggcatatagaaagcacaatctaatatatgagtctgaattttactgtgtcccttgctgaaaaaaattcagccattaaaataaccaaaaaattcataatcaagaaatatgtttctgtcatgaatagttgttttttactttagagtgtaaagcatgagatgattatttggagtggataattattaactaatactgacttggggtggattatttggggtggattattgttaactaatactgagttcttgctctgacaatcaagaatttcaaatacacattagcaccacagaaattaccaaagttgaggaaatatatgttacgtgaaatgtatctttgaaattttaataagtgtgtgaacttaacttccttacacatatttgctataattttgacctaagcatattttctactaaggcatgatgctgttaactgacatgatagtatactgtaaaacatggctgtataattagccaaatgtatgaaaaataaacactactttactgacaagtgtaattaaaggaaattggtaaattaagtacattgtaattatattgtaagtagttaatattaaaaatagtcattcttcagctgggcgtggtggctcacgcctgtaatcccagcactttgggaggccaaggcaggtggatcacgaggtaaggagatcgacaccatcctggctaacacggtgaaaccccgtgtctctactaaaaaaatagccgggcgtgatggagggcgcctgtagtcccagctactggggaggctgaggcaggagaatggcgtgaacccaggaggcggagcttgcagtgagaggagatctcgccactgcactccagcctgggcgacagagcgagactccgtctcaaaaaaaaaaaaaagaaagttataaaaggaacttaagtgctttctaacaaaatattattcagaatcacagtgtaaaaaacaaagacccattttattaacagacattttcaaataaattaatacaaacaaaaagcgtttcgaggcacacaacaatttttgatattagtttgtggatggctttggcattgttatactagcttatgaatgatttttgtcatgttatattagcttcattatctaacttttattgtattttgttgtagatacatagttgtgagaaaatcctaacccacacaaataggtcattggatattataaccatgttttcacagttcccatatagtctcaggttgaatttcaacaaaacagagatggcggtgaagctttattttgagataaaatctacattaaaacaaataaagaaacaaataacaacaaccaccacaatcccagcaggtattacaagttgtttccancacatttaattttggtctataaaacttggaatgtgcaatttattatatatcataattattccaaataattaagacatgaaaattgatataaaaagtgtgtggaatccttcaaacagatgaggaaaattttaaggtgtcatttgttagttctgtcaaaaatatgcattgagcacctgtgaatctgtgaaggttctagcagaaaacagatggtaaatgtgagattatttaactgaaaaataaatcagtgaagtgattatttaacaggtgtaaacagcgttaagaaaacaagtaggaatgtgagaaattctgagtttttaaggaccgtaaacagggaaaaccctttgctacccctaagtcggaagggacaaggggaagacaagtttgtgaaagcacagatgatagtgtgagctgtggaggtaggtccattatgaaactcgtagagttggaggaagcagagcaaagccagagggttgggaactgttgacacaacctctctcctcctgctttatgatcttctgccagggaattaattaccatcgccaactggaagcaaaggaatacaatgaaatctagagctgtcagccttctacacacacacaatagaacaggaaaaaagggggacagaaaagagaacaaaaatacagctacctatttactacattccagacattattccaagccctatagacgtagcagg

SEQ ID NO: 239049 - DNA, 647 bp, Homo sapiens
gccaccacagtcaggaaggggtaaggaaggattctccccttacatgtttagagggaccatggccctgccaatattaatccacttaagtttgtggtaatttcttatgaacagactgtgcaaggaaattaatacacagcctagttcttaaaactgtcaccagtggcaaatggagatggtatagtagcagaaggaaatgcagtggctggtataaagtattagatatttgaaaacattggaagaatcagtgcctataatgacaatggaatccaattctactgccttaacgtagtctgacactttagaaaataaaatgaaaacctgacagcaatttacaggccatgggaaatcaaatgtggagaagccagtgggccttcttgcagcatagaaagaggctctcctctcctaggtgaaggcagagaaagctgaccaccagtcttaggacctaattgtcagaacagcagggctccaaggaaagctaaactcccagccaagatagatctgctctggcaaggtcaggaccctggtgtgaaagaacagtactctgatactaggatggggacatccaggttgattccagagccttcctttcctcaatcttggaactcctaattctctaaaccctctgggcctgcagaggtgggccaccc

SEQ ID NO: 239050 - DNA, 460 bp, Homo sapiens
gaatctagttaagcttaaattgtttcaaactaaagcaggccatgagatgaacccttttcatcttcccagttctcaaacacactgagatcttccccacatttcactcctttctgtcagttgcttgaggtcatgtaaccagagtgagcccatttgccctggctgactgctgatctggccttggacacctgccctggcctcttctacccaagctgcaggtttggccctgtctctcccttactgcggtggtgaggggggtgcaggggggagttgacaaccttcttaaccacttcagtcacatgaaagaagcagacaagtgagctcgcatctgtgtactgaccttttaacagtgatgctgcccagtacactcagacccaatcagtgttctcatatctgccttcctccttcctgagaattaggagaaagaagagctcagccttgatttcttacctcaaaagacagc

SEQ ID NO: 239051 - DNA, 360 bp, Homo sapiens
ggataatccaggataatcccctatctcaagatccttaattttatcatatttgcaaatcttgccatgtaaggtaacacatacacaggttccagggatcaggacatggacatcttggggggtacaggtcaatattgtgtctgtcacagtacctgacatagtttcttgcacacaacaggtgcttatcaatttcagtaatgtgtggcgaatgcagtatatgtgagtgttaacatacactgatttggagcatcagccaatttttggctgatgcctcagacttaaatttcagaagccttatggcaaaaatcttaaggaaagctcaatttgagattcgtttacttttccatttaatttaaaaaaaaa

SEQ ID NO: 239052 - DNA, 635 bp, Homo sapiens
caccacacccagctaattatttatttttctagagacagggtctcactgtgttgcccagagggtctcgaactcctagcctcaagcagtccccttgcctcagcctcccaaagtgctgggactacaggcgtgaaccaccgcgcccggcctgatctcttatttttaaaatgtcagcatgaattcacctgaaaaccaaacacacaagaacactttgggacatgcattacacacctcccgaggtggctgtcattgtcctcacttgcagataacatcaggtgagatgaactcttacgtggtgctgatgtatcagaccaggattcactttgcagaaagacctaagacctgttacattttggcaatgtcgtaacccacttcctacagcctcatttgagagcttttgatttatgccacctcgtgccgaattcggcacgaggcccctcagtcccttcctacttcccaacaaggggctcactatcctcaaagaaggagctgttggggacccacgacgcagcccctgtactggaatacagcatattctcatctcttgccccgatgctgcctgtggggcgagtggagacctcccatcactgagacagatcacagaccacgagtgccttttcccggacctggacgttgct

SEQ ID NO: 239053 - DNA, 217 bp, Homo sapiens
gccacagccactacataaacaagtgggtatagctgtgttccaataaaacttaagtaacaaaaacaggttgtgggatggatttgacctgtgggctatagtttaccatgtgtttagaatatggactgtgttctggctgttacaggttcatgtgtgttacagggttgggtgtaggggactcattcatagtttttacattaatagcccctaaaaagctaaa

SEQ ID NO: 239054 - DNA, 371 bp, Homo sapiens
agcaaggaatcctgatagaagattgctaaattacatacaaaattggttaatattctaaagggcatttatttttaaaatcccataacccgggctggtcacagtggctcacacctgtaatcccagcactttgggagcccgaggtgggcagatcacctgaggtcaggagtttgagaccagtgtggccaacatgggaaaacctggtctctactaaaaatacaaaaagtagccaggtgtggtggcacgtgcctgtaatcccagctacttgggaggctgaggcacgagaatcacttgaatctgggaggctgaggtttcagcgcaccaaggtggcaccactgtactccagcctggacgacagagcaagacactatctc

SEQ ID NO: 239055 - DNA, 737 bp, Homo sapiens
acctcgctgaagactgcagaagcccttggtcagactactctcaaggttgaatctccctggcttgactgagattcagactttatggaacctgattcaacaactgatgagactggaattgaagcactactttaagatttattgtctcctcttctacaaggatatacattcaacaaggaaagagattctttgttcaccacttttcctccagcacatgtcatgtagtcaattaatattaattgataaaaggaataaattattgcattaggttttggtatcaagatgatgctggcctcacagaatgagttgaggagaagttccccctccataattttttggaagttactgttggaatggcaccagctcttcattgtacatctggtagaactcagctatgaatccatcaggtcctgggcttttttgaatgctgatcaacgtcaagaattcttccagtcatgtataatgaagacggcatttgattatcattctgaatgacttcaacctatcaggacaacttctcccagagactactttgttcaataatataaagcaccaccaccattattaagagtcaaaaagcactgaaccggagaaagcagttacatacaaattttgtcatttgatagaatcaaccaaatatataaacaagaatcctgacatcttaaagataaagaaatcagtaaacaaataaaagaagtaccaaagtaccactcatgatcataccattctctctgtccatt

SEQ ID NO: 239056 - DNA, 441 bp, Homo sapiens
aagtgcagaaagcaagttgataaggaacctgggtagtgctggcagtggggcacaactcaggacccccaggcaggactgactgctcctctgttggggctctagggttcctggatacggcacagaggccaaaggtgggggctctagagacacgaccagagagtcccctcttccacaggcaaagactaagggtgagagtatcaccagaagctgagaaggagtggtcaagtacacaaaagcactgttcctcccagatgagtgcaggaagggctgctgaccagaaggggaaggcactgtggagttttacttctgtgtccagccagctaagtactgtgatctgcctgaactcagtataggaaaagacacagatgcccccttaaataggcaagaggctgtgttaggacaaagaaaggaggaagatcacgaaccaagacatgaatttag

SEQ ID NO: 239057 - DNA, 621 bp, Homo sapiens
ttaaccatttatggcaactcagaaaactgcatctggtacttcttatatgtttcctctaaaatcaccacttctgccaaaaacatctataaagaaatctctcaaaaggtttgggtaacaaagcgtctgggaatgtatttggcctgtgttcaacaggacattatatgttttcttgtataaatcatgtcctggaaaacggaatgtctttatttaaaataaaaactttaccatccagcaccgtaaaggtagttccacgaaaaatattttaagcttcttttatatctgtagctttaaaacatgtttttatgcttcatattacagtaagttttactgggactcattttatacattcttctagattttcttttaaaaaatggtccaaggaaattttccattctcaactcttaggagacttttaaaagtagtcattcaaccttcttaaaaaaaaaatcagttatgctgccctttcagatacaggtataaactagcagacagaccaaaagatcttcctgatgttagaactaaatttgtattgcttatgaaaactcacttttctttgcacaccataaaattcaccacctttctgaatcatagttatcaaaataacaatatcttgtgcttttt

SEQ ID NO: 239058 - DNA, 485 bp, Homo sapiens
agtctgtttataataatcagaatcaaatgttgtttgtttcttctaaacgttaatggagaaaattgaaggtggtaaaatgtcatgtttattcaggctgggaactgtattcacagtagaagtttcagtggtcaacatatctatgactctttaggctgctgtagttttacagtcaattatttaaaagtgagtagttacatttataagagcctgagaatacttagactcagtcatttgttagtatttttaccaaaatctcttagtttcagacatgtcagaagcagctatatagcatatcttattctatgatatacatcaggctatctcaagttcctgtctcacagttaattcaaagaaggattaggatttctgtattttttctcatttgaatctttatgtgcatttggtttgtgtacatgctttttgtagtgtaagatatgaaattttatattttttcagaaaataaaaaccctttgaatacagttaaa

SEQ ID NO: 239059 - DNA, 275 bp, Homo sapiens
tctggcctcaagcaatcctcccatctgagccccacacataatatctaatatgattctttctcctacctttctttcaatgtgtgcactaatatttttctagaaggcttgagcatattaaaaaataacatttatattattttattcaagctatttagaataattgggagatttttctttatgattcaaacttaacatttgccaatatacaataatggagatttggcatggaatgattttgttattcatacattgagaaactaagagctctgcactta

SEQ ID NO: 239060 - DNA, 353 bp, Homo sapiens
tgggagagataggctgggtattcagagaaaaatacccctcattaaatgttaatgcaagaaacaggtggaaggccgagcatggtggctcaggcctgtaattcctacactttgggaggctgaggcaggtggatcacctgaggtcagcagtttgagatcagtctggcaaacatgatggaaccccatctctactaaaaatataaaaaattagctgggtggggtggcaggtgcctttaatcccagctatttaggaggctgagacaggagaatcacttgaacccaggaggtggaagttgtagtgagccaagatcgtgccactgcaccccaacctgggcaacaacagtgaaactccatct

SEQ ID NO: 239061 - DNA, 1122 bp, Homo sapiens
gaaagactttaaacaaaatatcaataccatgctcaccctttaaaaagtaatttctaaattatatatgcagtttatttagaagtataaagaaaaaagtaaaaactacctttaattttcgtacacagaaataattgcttttagtgatgggatgtattttgtgtgtgtaagtttaaagaattgtgattgtctgaatatattgtttatatgctgcattttcagattcccagtaattcttaacagattattctgcttgcatatcttttaatacatttccatgaatgtaccattatctatttaatgccttgttgttggacatgttcatttcttccagatttttgctattataggtagtattttgaataacaggccagtacacaagtctttgtgtaactctcaggctcattttataattagataggatatttctttcttattaagtttgtaccaaattacacttgccccaacacatatggtagtacccattccagttttgttgttactagtttcctgtatattatctctgcagatcagggtgttttttctgtaaagagctagatagtacatattttaggccttgccatacagtctcgtcataactattcaactctgctgctgtagggcgaaagcagccgtagacaactgggtatggctgtgtaccaataaaactttacttaccaaaacaggcagtggtggaacatagtggctcatgcttgtaatcccagcactctgagaggctaaggtggacagattgcttgaccccaggagttcaagaccagccggggcaacatagtgaaaccccacctctactacaaatacaaaaaaaaattagccaggcatgatggtgcatgcctgtattctcagctacttgggaggctgaggcaggagggaaaaaaaagaacaacaaacaacaggcagttggctagattctgtccacaagccatagtttgataaccccttcagtggatactagttattaaagcaaaacaaacaaaataagtcttaaggaggcccctaaagttgttgaagatttaagtcaaccgaatagtttataatcaaagatcaccagattgacaatgaagcaagctctatggctgagggttgaaacaataaaaaataaaaaaa

SEQ ID NO: 239062 - DNA, 349 bp, Homo sapiens
tatagaagtacaattgatttttaccatgttgctcttgtatcctaaaaccttgctaaactcacttatgagttctaatgactttttttaatagattcagtaagattttctgcatagatgatcatgttgtctgtaaataaagataatcttagttcttcctttttctttttcttgccttattactctgactagaactagtacaatgttgagtagaaacaaagagagcggaaattcttgctttttcttggtcttaggtggaaagctttcagtctttcaccattagctatgtcaatatgttctccatagatgttccatatcagattaaggaagttctttgctgttgttagtttgt

SEQ ID NO: 239063 - DNA, 194 bp, Homo sapiens
acccaacattttgtttctctgaatttgaggtccagggcctggaaatgggcactgccaccactcaaaatggcccgagcaggggcccacaggtggtggcatggccttcatggggagtggccatttcggtgagtagggaaggaggggtaggcttctaggtttcatctgcaaagatacttgttcctgaaagccacaaa

SEQ ID NO: 239064 - DNA, 385 bp, Homo sapiens
cttatgattgtgccactgcattccagcctgggctacagagtgacaacctgtctctaaaataaataaacaagtaaaaactgaaaacaaacaaataaaaaatacacttagtaaaagcatatttcttaaggatacactcagattgggtaggttaaatatggccaggtctgatattgttggataaagctgtatttatattgggccaaaacatctgaaaaactaaacatcctattttcattgatgtttcaggaaatatgctatcatgtctaataagccttacattgaaaataaaataaacttggtaattgtttgtttgttttaggcatgatattttaaaactgaagttgtcaaaaaggacagtagagctgggcacggtggctcatgcctg

SEQ ID NO: 239065 - DNA, 290 bp, Homo sapiens
tatttgcttaatagaaagtccccactgggggccgggcatggtattcttacgcctgtaatcccagcactttgggaggctgaggcgggtggatcacttgaggtcaggaatttgaggccagcctggccaacatggtgaaaccccacctctactaaaaatacaaaaattagctgggcatggtggcgcacacctgtaatcccagctacttgggaggctgaggcaggagaatggcttgaacccgggaggtggaggttgcagtaagctgagatcacgccattgcactccagcctgag

SEQ ID NO: 239066 - DNA, 381 bp, Homo sapiens
tagccatttagaaacaggcagaatggatcaagtttggaagaaatttatatcatagccatgagatgtacaaatataattgaatccatctcgtttccacaatgctgtatgtaccttaaatgaaatgcattactatttgagctagaagccccagttgtatctttttataggctgaaacacttaggataatcacaatgttgtgaatatttcaccactatacaatagtggaattgttcgatatcatgcataaaatcactgcaggaagggttaagcctgagagcctatcagctcccagtctgtggaatcattgtacattgtaaatattttgccgcatcacttggcatcagtggcctcacattttcatattggtttgaagctattttg

SEQ ID NO: 239067 - DNA, 590 bp, Homo sapiens
tcctatgtgttctcaacacatgtaaaggaagagtgaccagattgatcttaatcagaaatgtccagttacatgtcggccgacagcattgatttcacattttagtattctagttaaaatttgctaatgaatagctaatataatacctcgaactgtaggtggttcaggttacttgtttttgaccagccttgtttcttcagttactgtaggccttttgagacctgtctccatctcaaaaaaaaaaaaaaaccaaaaaaagaaaaagaaaagaaatagccaccttttacaaacccagttagtcatgagtggcatactgtcccaggagatgtacgtggaccttgagaggttgttagggatgaggtgctggttcgcccagattctttatgcatattatctaaccttcatatcaactcaataggatgatactataattatctccatgttacaaatgaggaaaccgaggcagggcattgcggctcggcctcccaaagtgctgagattacaggcatgagccaccgcgcccaaccgaatgtgatatttttatgaccatgagaaaagaagggctgcattctttggtgggtcagcaaaattaa

SEQ ID NO: 239068 - DNA, 304 bp, Homo sapiens
tcctatgtgttctcaacacatgtaaaggaagagtgaccagattgatcttaatcagaaatgtccagttacatgtcggccgacagcattgatttcacattttagtattctagttaaaatttgctaatgaatagctaatataatacctcgaactgtaggtggttcaggttacttgtttttgaccagccttgtttcttcagttactgtaggccttttgagacctgtctccatctagtattttactgagaaacaaattggtgtggcatttgctatgtaaattactcatctaggaagatcttcctgttcc

SEQ ID NO: 239069 - DNA, 649 bp, Homo sapiens
gtatgattagttctcttctattagtcaatataactgatttccaaggtatattttccatttagtggaatcctgagattgttggagccttcatatttttttccttcagtcatcttgccgattgacactaaaatgagcttaataagatttttatctattattggaggattccaggcctatttattttccctaggaaggctataatatttaacaaacaagtttattgaaatattttagaactttaaatcttttgaagttacccaaattggagggtcttacaactttgaattactttctaagacctctttccttccagtaatgagaaacatttattcaactttttaaaagacagaaatcatctttttaaaatgtactgttttctaattgtctgaaatgacaagagatcacttacccagcagtgcacaagacttccaaaatagctgagcagcgggtgaggggctagaaggcggggggtggtggtggtatctttttttaaaaaagtatgtttactagaaagggtataagatactttgcttttgttataggtgcacttgcacaaaactcattttaacctgtagtcacaatttcttctgtatgacccacccaaagtaaccaggctgcaaagcattataccacatataaaagcaacatt

SEQ ID NO: 239070 - DNA, 264 bp, Homo sapiens
tttttgtgtgtgtgtgctggggcctgtatcaggtgctagggacaccacagaagttaaaacagacctggttcttgccttcatagagctcacagcccagcgtcacccctttacaactctctttccaccccacgaccacgcatcgttggaatgcactccggttcatgtctgccttcgctgctggacgtttatgttgagcaggtaaggcctaggttccagcattcagtcatcaagtcttgttacagaaataaatgaatgaatggctga

SEQ ID NO: 239071 - DNA, 391 bp, Homo sapiens
gtaatcttccagagctccaaagccatgtctgtctgtgtgcgtatacccaactcacattatctctctctctttctttctctctctctctttctctctgacacacacacacacacacacacggaaacacaatatttttctcttttcttccttttcctctgttttctcttatgcctggagccatgatcaatgaagtcattaagggttgggagcaggcagtgagagcttcagcttagtagatagatgtccctccaccacccttgtggaaggtagctcagaatacacaggttccccctgtggtagctggagcctgcctgaacagcccccaggtagaagcttctgggggccagccttgtgccctccatagctcccagcatctgatgttgcactatta

SEQ ID NO: 239072 - DNA, 558 bp, Homo sapiens
cagaccaaggtgcttcctgctgcctgtttcacaagtgggtttctcaataatttattattttttaaagaaagtgctagccttaaaaatattgtttgttcatgcatatcaacagcatcactgaaatgattcaactactccatactgcttggtgttctctgttattcctagatgctataacaagtttttttcttttaagtttatatttctttgggcttttctaaatagaaaatagtggacttcattgtataattatattccaaaaaagcactaaatttcataaaatacaaaaggtagactttgcgagttacctgcagtgaaataggttttttgtcatttatgtatgtgcaatatgcttatgggtaattatgggcaagagaaatggaaacaaatacatttttaaagaacttttagtagagacatccttttactgaaaatgtgcaaatcaagttgcaactgcagtattataatgtttaaaacatcattatgactaaattctaattgaagaaagccattttgcttttggccagcatgcacttaagattggcataagcaaaaaca

SEQ ID NO: 239073 - DNA, 495 bp, Homo sapiens
  misc_feature (7)..(7): n is a, c, g, or t
  misc_feature (27)..(27): n is a, c, g, or t
acgcggnggtttggcgactagacctgnggatcccccgggctgtaggaattcggcactaggtggctcatgcctgtaatcccagcactttgggaggccaagggaggaggaacacttaagcccaggagttcgacaccagcctgggcaacataataagatccctgtctctacaaaaaaaataaaaaatagatttttaaaaaactgaagagtcttgagtgtttctgtccatgtgatctcattaggtcttccttggtactcccatgcatatcacaactattttggagcatgcccactaccagttaggacatgttgtgtctttgtacccagtgtccatttgtctgtgctgataagaaagtaaatagagcctaccaaaagcaaaacggtgaaataattcatttgtattgaccttctctagcctccacttctgctgcttcttgttgcttcaactgtgggaaattgtctatctctttttgcattcaggctttctctccctatcca

SEQ ID NO: 239074 - DNA, 466 bp, Homo sapiens
ggagcaaagggggtctgtggagcccagcaggggcctccgttcatcagggattctgaaggagcccagatgttccctcaaactcaccagagacactttcttcaccaaactcctagtcctttctgaagcttgtgcagacttagaacaaatgtttgctgagaacctaccaggggccaggcactttgagaggcactaaagaaacatgaagaagtaagagaattgtcttcaagcaaccatttttcagagacagaaagtgagtcacagagaggcctcaaattttactaaagacaacacagctaagaattcaacccccaggctgcctgatccctgcaggttatctcccagggctccaggccgggtgagactagcactgggatgtgaataccaccaaaatcccttccagacacagggtatggtcagctctatgaaactgggatctattaaaaacaggcaatcagaatccagggca

SEQ ID NO: 239075 - DNA, 1124 bp, Homo sapiens
caatgcttgccatctggatgataaacagaagatccactaaaacatccacaggattaacagagcttccttgcagactaagcgatgacaccacactttggacatttaaattcactctactgaataggaggaagcctttattttccttttcctgggaaagtaactgtctcttggaattatctgaccgtgaacttcctcttctagcaaactcacatgaaagccctcactgttgagaatcccagctccactgtcaagcctgtttggggattttgcctcagctgtgggcttccctagagtaggttcaggggaatactcagcctgattatcttaaaattgaagaagtgccaccaaggccttcagatctaatgcagatccacagaccttgctcctggtacttgttcagcctgtgctggggagccatggtcctgagttcccggggaggctggcagggtcaagccaccctgcccaccaccctcccacttcccctcccctttcctctccagcattgggatccaaggaaaatctgcatgaagccaattttgagggtagatttgtgtggaaaataaatcattatacagtaagacctggggcttgaggggtggggaatggggagggaagggcatagcctgctcctccatgagtctgacatctcagaaactgtgcagctgccggacgcctgggtcaggactccaagaccccacctcttaaggacaagaaaatgcctggttcctcagaaaagaccctcagggaagaaggtgaaaacattacatccaaggattctcctgccacaactggattggaagaaaaggctgccgcatcatctcagcgaggagtgaaggaaccatgtcccggggaccgcgctcctccacctgcactcaccccctcacattctcttaagcaccctgtggcccttcgaggcctggcagaatggtggtgcccaccgggttgggccagggctcaacgggcaaagttgtgcacactaaaatatcaaatcaaggtgcttggttttaaagtaaatgtttttctaaagaaagctgtgctcttctgctgacccagatgagtagggcacagccctgtaactgcacttgccttctgtcatttggaatgaaataaattatgagaaaggg

SEQ ID NO: 239076 - DNA, 2010 bp, Homo sapiens
  misc_feature (744)..(744): n is a, c, g, or t
  misc_feature (1784)..(1784): n is a, c, g, or t
attaagctccagaaccgagggagggagccacagtgtgggaggaaggagcctgggaaaatcgcctctggatgcagatctggggcttctattcccctgcgcactgaggcctctcccggcccagccacagccctgctccaggccctgccagaaaggcaaatgctttgaaagttttggtgttggaccagccagccatgcgctgagagcttctctgaggccttcatcagctgccagctcagcctggctgcttggctcctgctgccccagcttcccacgggccacctccaaccatggttcaccctagtcactccacaccctgcagcctcacaactcagtgcccacccactgggggccaccctgcatccaagaaacctgattgccaggaacccctgaccctcatggcagctcatgcacccttactcagggtgcagccgcctgcccaggtcaaaaccaaagttttctgggcgtatatagtttggctgtccctggtcctgctcagggagaagccaatcgcaaagctcactttagcaccgtgcagtggccagcaccaagtgccatcgcccatgcaaaggatgacgtcagccccctccagcccacacagtgcctgctggacaacatcaagaagaaagtagtgcccctgtgttagcggggctccggctggaacactgcccctgagaaggagtatttcccctgactcttaaaacttttctctgggtgcttgaggtcctctgcctctcagacctgccntcagagtttgagagtccctagcctggtactttcctggtcatgcatctccagaaaacagattgtttaggattgatgagggtgggggtccaacaggacagagtgttccaactccactgcttcagccttggacaagaagcacagacccagggagatccgattccctcacttggtcaccccaccagcctagagtatcgtcagggaccaggctccataaagacagtccctcagccccttgaactaagaccagactgcctcatctctatctgcctactgagggagggcagcttgcagcctgcctgggctaggtgctgccctggagaaaatggaatcctggagtcctccaacctagacccttgtcagttcattgttgccagcaccttggcatgcctgggcaagggcttggtcctgccctgccctcacaccagcctgcctgcctaggctttggccacctcttgcctccagtagataatgcagggggcggggggcagtgttcttggacgaagtggcctaggcctatcagcaggggctcctacccagagagcaaggagaaactggcaggggagctagggaaatacagtgcccccgcctggcagggggcagtgctgcgcaggcgggagggtgctggtggagtacggtagcggcatgtagggccagccagaaaacagcactgcctccctccctcgcattcctgtcacactcctgtcctctcatcgtccctggctcagctggtcgcccgggaaacacagactcaacgtgccaggagtcacgtagcatctacctgaagagccaagcacttgctgtcaccttcacccactttcttactgcaactgctgaacaggctgagcccagccagctgctgtcaccgcctccaggactcggggaaaagccccctgcagacttggtgctgcaggttcacagcccccgctctctcttctctccccaaatccctcctgccccctagcagccactcttctccagaagctgtgttttgaggatgtgatgggtacaggttggtaaatcaggaggggttcctcctgggnttcctgggcccacagggtctcacccaccttgctagtatggaaacctcaggctagggcgtacttactctaattacattctcctgccatcctggaagaaaggcagctctgggattaagatcgagggacagtaggccaggctggggaccagggctgtccaggggcaacagatggctcaaaccctctcagatgagcaccaacaaaatttttgtcacatacaaaaaaaaaa

SEQ ID NO: 239077 - DNA, 451 bp, Homo sapiens
attaagctccagaaccgagggagggagccacagtgtgggaggaaggagcctgggaaaatcgcctctggatgcagatctggggcttctattcccctgcgcactgaggcctctcccggcccagccacagccctgctccaggccctgccagaaaggcaaatgctttgaaagttttggtgttggaccagccagccatgcgctgagagcttctctgaggccttcatcagctgccagctcagcctggctgcttggctcctgctgccccagcttcccacgggccacctccaaccatggttcaccctagtcactccacaccctgcagcctcacaactcagtgcccacccactgggggccaccctgcatccgaagcagttgccgcatccgaagcagttgccgacatccgaagcagttgccgacatccgaagcagttgccgacatccgaagcagttgccga

SEQ ID NO: 239078 - DNA, 427 bp, Homo sapiens
gtcacagatgcccacctttgctctccaccagcatcctgggccgtgtgctctgccctcatttttccatagcacctgctacattccagcatgccatacaccctttaaaggtgtgccattgtcactaatgtagcacaggtgcctgcagtaggaactggaatgtagtaggtgttgaggaaatgggttaagtactgtcttcagattttgtggaggtttgctgtacttctttcttgaagtatgttctcagtgctttaatacattttaggaattcatccatttgaattcgcttctgtggagtgttttacagcctagagtagtaatgccatctacatcataagataaattgtaactttttgttcaactagaatttttaccagtatttatgtttattaggtaagaaattttagaattagctagaagatagcagtaa

SEQ ID NO: 239079 - DNA, 2113 bp, Homo sapiens
cctgctgctcctgggaggggctcaggccatttgattctgcctggtgggttcagggctgcctggctagccaccaagacacgggagagcaaagcccggccaaacccaggggcagtggtgtccagcaggcatcaggacatgccgtggcccacacatgcccttctccacaggtgccatcatctcctttcttctcctgttagtgatggcttcattggcctcaggtgacaccgccttctagcccaggccactggatccagccagagcgtctgtgcatcgccccagggaggtgtggggaggctcggccccacctggcaagtttataggctgcttgaggacataagatgggtacagaagaggcttcagggctcagcagatgttgtgctgggagtgagcccaggcaaggtggcccatggacagaagatggaaggtcagtcgtggcctccttccagaaggaaagagattttagcaggaagagacaggcaaggaaaggaattggtttttcaggcagagcggtacttttttaaattgacaaattttaagcatacagaaaagtagagaggacgaacctccaaacatcagcccttagattccagtacatcctgccttggtagctgacgtcacgaacgctgtgacctgtccctctgcactccatcatagcatctctaaaacggaggacatttcctacctcagcacaacttcattatcacaaaagagaacattttgagcaaaagtttggaagcaggcaaaagtatggtttgttctggaatggcatgaatgaatgagtcatgggctggacccggccccgcagaaagagcagaggaggccgtctctggtgtaggagttgaagccaagactcagcatgcaggacaaggagcccagcctggtggcatgggctgtggcttctccagtgggcccataggaatggccctggggctgggacttgtggggacggcggccacaagaggaggatcttcagcatggcctgacagcacctgtaatgtaggcaggcaatgggctcctccaggtggcaggaacaccgtgaggagcatgcaacgtgctggagaccatggggcatgtgacctccgggcacaccctggacagacctgggtgagaggtgggctgggacgccaggacggtgaggggcttcaaggtgtgtttgtcctttgtccttatacaggtgacctgcatgggcgggtgaggtccatcagaatgctctagaacaggacaactgaggtcccggctgccccgctcaacacgccatgattcctagactgccctgagaggtcaggttttaaatagggtgtggcccggcaaggaccctgagggatgtgaggccagacagctccttggtggccgcctgcacgggaagctgagtggccctttggaacaggaagtgccttgtccaagttaacccgggcccgggcccaccttggactccctctggagagaacggctggcctgttcgcctcctttctccttccttccaaaataacatgtccaggtcccttggtaagaatgctgcagctggggtcagtctccaaactggagtttggtggctaaaatgcccgcctttctgcccccaatttcacacatggatgatggtcctggttcagcagggaagattctcttggacccgtgtctgctggttgggaagtggagaaagccgccctgttctgcctccattttgaaacgtcttttctgttcggaggactaaaggaagccagagctggttcagatgttcatgagcacctgtgccagcccctgcccgtcacacttgaggacaccaaggctgtggtctgtgcagtgaatcggggcagtggggggacttcatggttagaaacacaagctggaggccggatgcggtggctcatgcctgtaatccctgcactttgggatgcctgaggtcaggagttcaagaccagcctggccaacatggtgaaaccctgtctctactacaaatacgaaaattagctgggcgtggtggtgggcacctgtaatcccagctactcgggaggctgaggcaggagaatcgcttgaacccgggaggtggaggttgcagtgagccgagatcacaccattgcactccagcctgggcgacaagagcaaaactccgtct

SEQ ID NO: 239080 - DNA, 159 bp, Homo sapiens
ttagtcagctttttgtgtaactttatttatggaaactgaaggtcattatagtagtttaaaaagctgttgtgaagtgaccaaaaaaaatagcatgttatgtgtcatagggaaaattatttgaaatgtcacgtgttgattaatgtttgtaatttcatttgg

SEQ ID NO: 239081 - DNA, 449 bp, Homo sapiens
caggaggatctcctgagcccaggagttcgaggctgcagtaagctatgatcacgccactgtacccagcctgggcaacagagctagaccctgtctattaaaggaggaggccgggtacagtggcttacgcctgtaatcccagcacattgggaggccgaggcaggaggatcacttgagggcaggagtttgagaccagcctggccagcattgtgaaaccctatctctactaaaaatacaaaaattagccaggtgtggtggtgtgcacttgcagtcctagctactctggaggcttaggcagaattgcttgaacccagaaggcagaggttgcagtgagctgagattgtgccactgcactccagcttgagcgacagagtaagactccatctcaaaaaaaaaaagaagagagatgaaggaggaggaggaagagaaagaggtgggggaggggaaggaag

SEQ ID NO: 239082 - DNA, 153 bp, Homo sapiens
cttcctgatagggatgtttaatgtaagtaggatattaatttcagaacattgatttcttatctgtgtgtctgacgtgccatctttaatgttaaaattaaggtgttaaaattaagcctagttatatagacgaaataaaatgctaagtcactacac

SEQ ID NO: 239083 - DNA, 541 bp, Homo sapiens
acacaattcagtccccagcacattctcccctgggagtaaggaggtctttccaatagctctttctgtctccagattcaagcaacaggtccctcctcccactcttccaagcctaggtatgtgacgagcaatgccccaccttgtcaccgcctcaagaacatgtcctcaaattatccaatccacatcagcctccaagaattcaggctgtgcatacagaccaaaaagtcaaatccatctccagccaattctcttgggtcaagaaagaaatagtaggccaggtgcggtgactcacatctgtagtcccagcactttagggcactaagatggcttgaggccaggagtttcagaccagctggggtgacatagcgagaccctgcctccgcataacatttaaataattaggtgtggtgacacgtgcctatagtcccacctacttgggaggctgaggcgggaggatcacttgagcctttggcctcccaaagtgtccaaggctacactgagctgtgatcgtgccactgggcgacagggcgagacctcatctcta

SEQ ID NO: 239084 - DNA, 452 bp, Homo sapiens
gtcaagtcacctgattttgctgaccgttcatttccttgcctatcccatgtgtaatctatgagaaaagaaagggagtgctaggaaaaaataatggcagaaaaaaaaaactggttctgaataattttcttttggataactttaatacatcagtataattttaactggaggctgagaggtcagaaaacgtgtttttgcaataagtttctttaatatatttgcatccccatgtttttttttatagaagttttgtaaggtaatataaaaatgctatgtcaccaaggccacataatgataaatatttcaaatgtgaataccaattagtagacataaagtcctatttgttcctgttaaaggagcagtgaggaaaaataaagacatcttaataaactatttttgatgtaattataatagtttggtttcccaccccatctgcctttgaaaataaattaaaa

SEQ ID NO: 239085 - DNA, 1700 bp, Homo sapiens
  misc_feature (2)..(2): n is a, c, g, or t
  misc_feature (9)..(9): n is a, c, g, or t
  misc_feature (11)..(11): n is a, c, g, or t
  misc_feature (20)..(20): n is a, c, g, or t
  misc_feature (22)..(22): n is a, c, g, or t
  misc_feature (42)..(42): n is a, c, g, or t
  misc_feature (1599)..(1599): n is a, c, g, or t
  misc_feature (1616)..(1616): n is a, c, g, or t
tnagtagananggggtttcncnatgttggtcaggctggtctngaactcccgacctcatgatctgcccacctcggcttcccaaagtgctggcaggtagatcacaaggtcaggtgatctgcctgcctcggcctcccaaagtgctggaattacaggcgtgagccaccgtgcccagcccaaaagtactttttcaaacagcatcaaagtctgatattattacaaaaatttaagaatatttaataccacatttagaacataataggcactagataaattacatctattaatagcatctaaatgtgaggtggtattagttaggtttcagagaattacttggagtgagcaaaggaagccattttttccaagaggagggaagagaatgaggatgattaagccaagaagaaagaaaaataatagatcagtggaccccatcttacacatttcccaagtgggttgaccacttgtttttctaccatcttagcacttggggaaagctctcttggagatgggcttactacagcaggggtgaagagaggggcacactatctcccttgggggtttctaagaatagcccccagtgggggagaagggaaggggggcaaaccaggcaacttcccttcctggccccaggagcccaagaggaaaatgtgagtcacggtggagggaaggggaagggggacgagactgaaataactctgtacacacacatccctatctgactatgagaaaaaatggatgccaggggaccggaggagactccaagctgggcctgggtcactgggtgacactgttcagtatgtctaaatgagtgggtcggtaggggacaaagtctccttcctgtgattgtgagtaggggtggatctgggaaggggctgcccaagtagacgaggaaggaggccacaaaccccacctgtctagaaacccacatacccaaatgggcacagggaatgtttctcagcccagaggaagttgtatgggcagctctggccccaaggactggcacaggggcagcagtgaatttcgccactgccccaagaatgtgcctatcgagatccactacatgaagctgtagccagacactcctggggagacgggcacagtcctggcctccctgggactgcacctccccagtcaggcactgggcctggctctgggcaccatgccagtcgagagcagggaacagatgcccacccagcccatgcctggccagagaggaagggggaaaggagacaccacctctaagctccttccccaggagggcagtccagccataaagccctggttgagagccaccctggaagagaagctttggggcagaaggacctggccctttaagatgtctgacagtgccctaagggcacgtgctccacaaacaaacgggctataaagttacttttaaaaaggtacgttctggcattctggcattctggccaggtgcggtggctcacgcttgtaatcccagcactttgggaggccaaggcgggtggatcatgaggtcaagagatcgagaccatcctggccaacatggtgaaacttgtctctactaaaaatacaaaaattagctgggcatggtggcgcgctcctgtagtcccagctactcangaggccgaggcaggagnattgcttgggccctggtggtggaggctgcagtgagccaggattgtgcaccactgaactctagcctgggcaatagccatagcctg

SEQ ID NO: 239086 - DNA, 519 bp, Homo sapiens
atcaaaacacccacattcaacatcaccttgatgtctgaacaggtgatacgtatcaggagctgtgtcaaacccccttacatgctgttggttggaaatataattatcattcccaatacacaaaatatagaatgtgataattgtaagctgttcatgtgcattgatgctacttttaatcccacaacaagtattctattcgtaagggctagggagggggtatggataccagtttctttacatcatccatgggagtcttccccctctatacacatagtcaatgaagttcttaaaggtatcctgaaaagaacaaagtgatttatttttactgttattgtagtcattgcaggtctaattgcggtttctgcaacagtggcaaccgctggagttgagatccacagttctgttcaaaccactcaatatgttgaagcatggcaaaaaaactcctccagactttggaattctcagactcaaattgatcaaaagttagctaatcaaattaattatctccaccaaagtgtaata

SEQ ID NO: 239087 - DNA, 2147 bp, Homo sapiens
  misc_feature (1522)..(1522): n is a, c, g, or t
cgatatcatgactcaagcacgagggtcgtcttggccacgttccccctggtttatccatattccacgtaaactgtgttcatcatactgaaaacagacccctggaggaattctgaggtccaaggatttgggcaaggtcattacctcctttttcctggaccatcttcttcaattaatgcaacctaagactgcaataagctcttttacaggtatataattttgtatcatttggagcatattcttagaattgtttggtgttctttcccccatgtatgcagctgatttttaaaaacagatctgtgatctatagcaagttgctcaatctctttaagccccacatttttggtgagtaaaataataatagcacagacttcatggcattgtggtggtgaacagatgagcacctacgcttctcaatacagcgtcttctacataataacttcaataaatatgaactagtataattattgtgttattggaaaattagaaattgcaggtgagcaaaaggcctttcttccaaacatttttttttgtgtatttcaatgtaattaattttttttatttaaatgattcccacaatgctgatttaggcattttacattttgatatgcatttttagctggttttcaaagtcacaaggctctaaggaaaagaactaatccttagttggcaggaaagtccctccccaaatccttggattaaaatagaatctgccgccagggctttccttgtcttctgtgattgagatctgtctcaggtgggaaggcatccagtacctgtgcatggcaagttcattctttagagatagaatgtgcaactttaatatttattgataggcacactaattctcttgctgatggtaattaatgaggtgcttatatcttattttgcggtagtttaacgagcttcgggctataggagagatccggtgcttgctgtaaatgctgagaatcaaagatgctggaggaaaatgcagaaaatggagcagaaaaaataaggttttagcagataaaatatctcagattaaaaacactctcaaaacaaaccttggtaaggcagaagcatttaaaaatcagggagagcttgccagggaggaaagtcgcaggttccctattccttgttccctaagcatgctgttaattttgaccacccatttgtctttctacccctttggcttcgtctgtgttagcagtgtgaagtgaaaaattgataggaaaatgtattttttttcttaaggcttagatagttacagccaaaacattttgtcatattgggttttgaataattgtgtcaaatctacacttaattttgccttagacagctagccttatgaccctagttaacctgtattttctcttattctttcatcctttggaaatgaggttcacagaatacaaattcagaagagcataaattctaactccttagaagacaggaatagaagtcaaagtgacctcaataaatcaaaagcaagttgaagttcaatagggacaaatgtaaggtaggatacttatgcctaataganggactcacaattttaaaatcatctgggcatgattgtgatggaaaagtgtctctctgtcaaggacatgaggaagccacatccgcagccttgtctaaggacctactatgtgccaggcattttgcataagtcagcttgcttacaaatacactgtaataatctcaacagtaactctcaaagctgtgtataatttgtgctctcattttatagatgtggaagctgaggccgagagagggtaaataatttgctcaaatgttcacagttagtgatttaactggttttggatcctgctgtatctacttgaccaagagtacttcattacagagctgttatttaaaaagccaacccggccgggtgcggtggctcacgcctgtgatcccagcactttgggaggccgaggcgggcagatcacaatgtcaggagatcgagaccatcctggctaatatgatgaagccctgtctctactaaaaatacaaaaaattagcctggcgtggtggcgggcgcctgtagacgcagctactcgggaggctgaggcaggataatggcgtgaacccgggaggcagagcttgcagtgagccgaaattgcgccactgcactccagcctgggcaaccgagcgagacaccctcc

SEQ ID NO: 239088 - DNA, 2201 bp, Homo sapiens
  misc_feature (1576)..(1576): n is a, c, g, or t
cgatatcatgactcaagcacgagggtcgtcttggccacgttccccctggtttatccatattccacgtaaactgtgttcatcatactgaaaacagacccctggaggaattctgaggtccaaggatttgggcaaggtcattacctcctttttcctggaccatcttcttcaattaatgcaacctaagactgcaataagctcttttacaggtatataattttgtatcatttggagcatattcttagaattgtttggtgttctttcccccatgtatgcagctgatttttaaaaacagatctgtgatctatagcaagttgctcaatctctttaagccccacatttttggtgagtaaaataataatagcacagacttcatggcattgtggtggtgaacagatgagcacctacgcttctcaatacagcgtcttctacataataacttcaataaatatgaactagtataattattgtgttattggaaaattagaaattgcaggtgagcaaaaggcctttcttccaaacatttttttttgtgtatttcaatgtaattaattttttttacttaaaaattttgaattaatatctcaacttataagagcagctttgtcagtatattttaaatgattcccacaatgctgatttaggcattttacattttgatatgcatttttagctggttttcaaagtcacaaggctctaaggaaaagaactaatccttagttggcaggaaagtccctccccaaatccttggattaaaatagaatctgccgccagggctttccttgtcttctgtgattgagatctgtctcaggtgggaaggcatccagtacctgtgcatggcaagttcattctttagagatagaatgtgcaactttaatatttattgataggcacactaattctcttgctgatggtaattaatgaggtgcttatatcttattttgcggtagtttaacgagcttcgggctataggagagatccggtgcttgctgtaaatgctgagaatcaaagatgctggaggaaaatgcagaaaatggagcagaaaaaataaggttttagcagataaaatatctcagattaaaaacactctcaaaacaaaccttggtaaggcagaagcatttaaaaatcagggagagcttgccagggaggaaagtcgcaggttccctattccttgttccctaagcatgctgttaattttgaccacccatttgtctttctacccctttggcttcgtctgtgttagcagtgtgaagtgaaaaattgataggaaaatgtattttttttcttaaggcttagatagttacagccaaaacattttgtcatattgggttttgaataattgtgtcaaatctacacttaattttgccttagacagctagccttatgaccctagttaacctgtattttctcttattctttcatcctttggaaatgaggttcacagaatacaaattcagaagagcataaattctaactccttagaagacaggaatagaagtcaaagtgacctcaataaatcaaaagcaagttgaagttcaatagggacaaatgtaaggtaggatacttatgcctaataganggactcacaattttaaaatcatctgggcatgattgtgatggaaaagtgtctctctgtcaaggacatgaggaagccacatccgcagccttgtctaaggacctactatgtgccaggcattttgcataagtcagcttgcttacaaatacactgtaataatctcaacagtaactctcaaagctgtgtataatttgtgctctcattttatagatgtggaagctgaggccgagagagggtaaataatttgctcaaatgttcacagttagtgatttaactggttttggatcctgctgtatctacttgaccaagagtacttcattacagagctgttatttaaaaagccaacccggccgggtgcggtggctcacgcctgtgatcccagcactttgggaggccgaggcgggcagatcacaatgtcaggagatcgagaccatcctggctaatatgatgaagccctgtctctactaaaaatacaaaaaattagcctggcgtggtggcgggcgcctgtagacgcagctactcgggaggctgaggcaggataatggcgtgaacccgggaggcagagcttgcagtgagccgaaattgcgccactgcactccagcctgggcaaccgagcgagacaccctcc

SEQ ID NO: 239089 - DNA, 391 bp, Homo sapiens
agttatttttataaaaaaattctttcttctttaccgactccattccaaatcaagcaaaaaatgttagtatattaaatcaagtaccagtagagaaaatattatatgcaaaggattattcgaggcactgtggtagttaaaatataaattccaatattctaggaatgtgcaatcaggaagtgaagcaaaatatactactttacatttttatttaataaaatctaaatgtgcagacactatggtgctagaaaattcagatgggaaataaaataaaatatacttcctcttctgagttcatccctttggtgaccccagctgacacccaacctctccccggcaacctgcatcccacatttttttgcttggttaactctattcactctttaggtctcag

SEQ ID NO: 239090 - DNA, 479 bp, Homo sapiens
tctgtagaccaggctggagtgcagtggtgcgatcttggcctcggcgtacctctgcctccccggtcctggttcaagcaattctcctgcctcagcctcccgagtagccgggtttacatgcacgtgccaccatgcccagctaatttttgtatttttagtagagacagggtttcaccatgttggccaggctggtcttgaactcctgacctcatgatctgcccacctcggtctcccaaagtgctgggattacaggtgtgagcaacggcgcccggccggaacatgcccatttctacagagaattaacagaggtcttggagagagagtaagagtggctcggataaagggttctgggagcagccctggtgcccagctcctcaggtcaggagagcttcctggcccagggtggacccaggctcacagggctggtcctggaatgatggaagctgatggagctgccccaggtccccgcgcagcctccagac

SEQ ID NO: 239091 - DNA, 425 bp, Homo sapiens
tctgtagaccaggctggagtgcagtggtgcgatcttggcctcggcgtacctctgcctccccggtcctggttcaagcaattctcctgcctctgtatttttagtagagacagggtttcaccatgttggccaggctggtcttgaactcctgacctcatgatctgcccacctcggtctcccaaagtgctgggattacaggtgtgagcaacggcgcccggccggaacatgcccatttctacagagaattaacagaggtcttggagagagagtaagagtggctcggataaagggttctgggagcagccctggtgcccagctcctcaggtcaggagagcttcctggcccagggtggacccaggctcacagggctggtcctggaatgatggaagctgatggagctgccccaggtccccgcgcagcctccagac

SEQ ID NO: 239092 - DNA, 683 bp, Homo sapiens
cacacactggggcctgtcatagggtgggggaataggggagggatagcattaggagagatacctaatgtaaatgacgagttaatgggtgcagcagaacaacatggcacatgtatacatatgtaacaaacctgcacgttgttaacatgtaccctagaacctaaagtatacttttaaaaaattgaagttgattatttaatactagttgatctaatcaggcatttaattgtgtggataagggcataaaaagacagaaactggtcattatgaattatgtagaaattatcttctgtatttttagagtatctttttcttgaggataaaagataaaagtaatccttcaaaccatttatactatatttcttttgtcctttttgagcaataaacacacacacaaaattatgtgctatgtagtctgacaaaacatatggtataagacttagaattgtggttcaagactctagtcattaaacatatgtagaatttgtactatgtgtcagttactgtactagtccttggggaaatttagctgaaaaagactgtttcccaactcactttctttttgggaaagtttgtatacataaaaccattatatgatcaattataaaaagtacaaccatagactaaggagaaaagtataaaaggagcaaatggagaaggccatgaattcttactgaaggattaag

SEQ ID NO: 239093 - DNA, 559 bp, Homo sapiens
ttcttagaatcattcaatgacttcccattttacactaacaataaaacctacactccttactgcagcttgtaagtccttatgtgtctgacctttgatcctctttctaaccccattttatacctttttctctttactcagtactctgtagccattctggcattttcctgttgtttggccccatcaggatgttttttcagtttggggcctttgcacatgctgttccttcctcctcgcttgctcttccctgactctacatggcagatttcatcttatccttcaccccttggctcaaatgtcacctttacatagggagttttccttaattactatacataactagctccttcccactactctatccccctatttatttcctgcatagtacttactgaattggaaattattttatttgcttattgctcattttctgtttttcactattggaatgatcaggtttatagatctgcccaggcatagtagctcatacctatcatcccaacactttgggaggccagaagtttgagactagcctaggcaatatagctagacccttctctac

SEQ ID NO: 239094 - DNA, 350 bp, Homo sapiens
actcctggactccaaaattgtgagataatttctgctgcttatgccactcagttggtggcattttgttatgacagccccagcaaactaatatgggcagccaagactcacagcacaagctgagttggcatcaggacactcactgcttctctcacaagtgactgactgctgctgatacctggaccaccccactccgttcaatccctcttctaacagaaatttagctcagtacctatggtggtctaaatcactggttgcaaacctctgtcggattaatgatggtattcttccaggggaagtatataaatttcttgcttatgaaaaataaacataatttttagttcaaacattta

SEQ ID NO: 239095 - DNA, 230 bp, Homo sapiens
tagatctctgtttgaccaagggaatacttacgtacggtaggagacagcacaaagctttctgtactcttaaattctacatttctgtcctctcaaccctacttgtggttttacactgttaattacactatttgctctgttttgtattgcactcagatcatttacctcagatctagttaaaaacatctctttaccagtaattcagcatttaaaaattaaattattcagaatta

SEQ ID NO: 239096 - DNA, 358 bp, Homo sapiens
tctggatctcacacaatcagcatcagtgtaaaagccgcagagcacccagcaacaggtagtgtcccatgatgatgttacttttcttttcttttgacagagttttgctcttgtcgcctaggctggtgtgcagtggcaagatttctgctcactgcaacctccgcctcccaggctccagcgattctcttgcctcagcctcctgagtagctgggattacagccacctgccaccatgcctggcaaatttttgtatttttagtagagatggggtttcaccatgttgaccaggctggtctcaaactcctgacctcaggtcatccacccgtcttgacctcccaaagtgctgggattacagggataag

SEQ ID NO: 239097 - DNA, 329 bp, Homo sapiens
aacatttccttaagaaaacaaagcaaaagacaaaggcacaggctattaagtaattacaagaaaagggatggcagtgctcggggcgcacccagcccgcggaggcctcctgcgttttccagaactccaggggcaccttcgcttgggtcagacttgggtaatttgagtcatgagtgggctcactttttaaaattcattgtattgtggaaacaacaaacaaacaaacaaccattgaatttctcagcagcttcatctcccactgaaaacgacatgaactgtaagtgcttcacttaaaagtgtttcccttccctctcaaaaaacacagcgctttt

SEQ ID NO: 239098 - DNA, 4309 bp, Homo sapiens
  misc_feature (163)..(163): n is a, c, g, or t
  misc_feature (2204)..(2204): n is a, c, g, or t
  misc_feature (2743)..(2743): n is a, c, g, or t
tatgttgatgctattcctttctgtttgttagttttccttctaacagtcaggcccctctgctgcaggtctgttggagtttgctggaggtccactccagaccctgttttcctgggtatcaccagcggagactgcagaacggcaaagattgctgcttgttccttcntctggaatttttgtcccagaggggcacccacaagatgccagccggagctctcctgtatgaagtgtctgtcgacccctgctgggaggtgtctcccagtcaggaggcatgggggtcagggacacacttgaggaggcagtctgtccctcagcagagcttgagcactatgctgggagatccgctgctctcttcagagtcagcaggcaggaatgtttaagtctgctgaagctgtgcccacagctgccccttctaccaggtgctctgtctgtcccagggagatgggagttttatctataagcccctgactggggctactgcctttctttcagagataccctgcccagagaggaggaatctagagaggcagtctggctacagcagctttgcggagctgcagtggactccacccagtttgaacttcctggtggctttgtttacactgtgaggtgaaaaccacctactcaagcctcagtaatggcaaacgcccctccccccaccaagctcaagtgtcccagcttgacttcagactgctgtgctggcagtgagaatttcaagccagtgcatctcagcttgctgggctctgtgggggtgggatccactgagctagaccacttggctccctggcttcagcaccctttccagaggagtgaatggttctgtctcgctggcatgccagacgccactggggtatgaaaaaaaaaactgcagctagctcagtgtctgcccaaacagctgcccagttttgtgcttgaaacccaaggccctggtggcataggcacctgagggaatctcctgttctgtgggttgtgaagaggatgggaaaagcgtagtatctgggtcagagtgcaccgtccctcaaggcacagtccctcacagtcccttggctaggagagggagttccccaaccccttgcacttcccgggtaaggcaatgccccaccctgctttggctcaccctccgtgggctgcacccactgtctaaccagtcccagtgagatgagctgggtacctcagttggaaatgcagaaatcacccactttctgtgttgatctctcttggagctacagaccagagctattcctatttggccatcttgccagccaccgttttgagattttttttatgtttaaatctttgctccatctagcatttactttggcataaatatgtcttcaatatagaagtttaactttctttagtgaaatctacgtatcttttcttttatgatttctggcttagatattctggtttgtttcttggaatgaaatttcttgggaagaacgtgaggagtgagctggagtaggacacacccaggtggctggcaagaaacccctctgaagaagtctctctctcagggaaaggtccataattttccattccagttcagctcagtcaacatctactaagaacctactctgttccagagactgtgttaagtgccaggggcacagagatgaggaacatctctgcttgcaagtgggagtgacaaatttagaaacagaatgacgacacagtgtggtaggtgcaatgagcaaaaagcataaggatcagtgagcacacataagggtgcctatcccaggctggaagggaaaagcctatctgagaaggcctcctggaggagatgaatcctgggccgagtttgtttttcccatttgaataactagaatattagaataagaccattcaataaagacaattctgaaatcaccttccaattaaaacaactcttactttgtaacttcatgttgcttatatgacataatgcacagcatattacctgctaagatacacactttcaatatcattggaaagacagaactggaacagaaagctgccttaatcaacaacagaatatagctcccagaccaagggcgagaggtctccagtgtagggacaacctggtgcacagcgattacgagagaaggctaaagtggaaccctaatttctccatgcagctaaaagcagtttactatttctgaaactcaatctagaaggtagggaactttaagataggagactggttgctttctatgacagtcagggcnagattgtaaaggggcttatgctttatgtaaagaatgggacatgagaaacactgaggtgttgtaagttgaggggtgtctgatctgacaaaacaacttggaaatcatcagcatgagatgagattgcccagggatatcaggttgcagaggatttaacctttgcagatccttgatccctttgaggatgtgataaaagctacagatgctctttccagaaaaacaaacatactgaaaaccacaccaacatatacacaatttcaggggatcctcagattaagaatatttgatatatagaggactgagaagtagcctgaggaagcggatattcaaaggatgggaagaagatgaggggagcaggaaaagggccaaagaaaaatgacccaagaggtactggaagagccaggagacaagtgttgggaagctgtgggagcacagagatccaaggaggatgtgatcagcagtgttgaatgctgtagagatgtcagctaaggtcaggactgaaacatgtcttttgcacttacagttaagaaatcacagccganagaagtggctcacatctgtaatcccagcactttgggaggccaaggtgggaggacgacttgagcccaggagtttgagaccagtctgggcaaaaaagcgagacgccatctctataaaaattttaaaaattagctgggtgtggtggtgtatgccgtagtcccagctacttggaaggttgaggcaggagtccagaagttcaagtttgcagtgagctataatcgtgccactgcactccagtctgggtgaaagagcgagaccccatctctaaaactaaaaagaaagaaagaaaaatcactggtaatggtattgagaaaagtctctgcggagtaactagtaatgttagctccagatatactttttcaagcccgagaattatataggtggcatctaggtggaagtaagggtaggggacttgtcttgaccctgcatttgcagagaactaatacgtcaaataattgtcaattgtccagaaaaagtgttgaaggggcttatggagattatgtctgtttgtccctgttgccaccactataatggagtcaaaagccagaaagcaacagttgaaggaatgatgtgaggaaatggagaagtttggtttgttaggtaggagagacctgaagggcagttaaaataagaaacaaaaacaagacagggatttgtctccaagaagtggacacatcctgatatttctatcctatacactaagaaaaagaaaggggaaaacagagaggctcaagacacagagaaaagtggctgaagggccaagcatccaggaagagagtctggacttgaagaggaggagagccccccacctggaagtgcaaggtggggggcctgtggctgtgtataatttcctccaagtatgaattgaagtggatcagccccaatggcctctattttccccataacataagaggtgaggttgactgctgagagtagagatgggagttgtatggaagactggaggaggacaatgcctattttttagaatcactgatgagggatgtatgggaaaggcagctaaacaaggacaaattaaagaacagctcagcaggctggtgatggagcagtgtcagtcatggtcccgacaagaagcagatggcacattcaagtggtgtaactgaggagcatgtcaggaagagaatattcaccaaggtgtgaacagggtgaagggaaactcataaaggccagtgaagcaccctggaactagcaagagtggggagcctttcccacccccagacctcaggggcaagaggagggagcagatcccagatccagagggaattggggtaatttaggagagggctgccacactggaactcatacagcacagatgctgacattatctgaagccaggcagccctctctgtctccaggttctggtgactgctccatcctcttgtcccagtcccaggggattctgctattacttgtggtttcactatactctttctatacttttataaatataactttattagattatccagtttgaatacaccatctatttcctgaaggaaacctgacatacatggttctttaaaaagactaataaaatagacaaactctag

SEQ ID NO: 239099 - DNA, 411 bp, Homo sapiens
agaaatgagtggggctaagctttgatagtttaacatctatttgacttgagtagccttgtaaacttattaattctcacctcagcctcagggatgtatgtagggaaggagcataaaagatctgcagttgccctaatacagatatttttcccttcacttattttgtaaaattatattttattttcatggtagttttagactcaaggttataaaggcctgcttataatagttctcctaccagcctctgaaactcatctttaatttttttctgtcaggattttctccatcatgcatattaatcacattcctttccaaatttgtatcaatacccataacagcagttaaaatgctcctaacaaaaaatagatagatagatagatagatagatagatagatagatagatagattaaaaa

SEQ ID NO: 239100 - DNA, 545 bp, Homo sapiens
cttacaagaagaaaatatctatattctcaaggttgagaaggcttcttaagatccagaaggcaaaaatataagcgaaaggattgatgaatttgatcattacaaaatgtaaaatttctttatgacctacttttggtataagataaagcaacagactgaggaaagatatgtgacttatgcgtaatgtatgaatgttaaaatctagaacataagaactatcatttaataaaaaagcaaacaagttatacaaaaggaaagcagacaaaagatatgaacagttaattcacagaaaagaaaataaagatggtcagtaaagctacagtaatcaagaaaatgtggtattggcaccaatttcaacaaatagatccatagatcagaataaagagtccagatggagactcagacacatatggtcagttgattttagtcagagatatttcaatgaagaggcaattcaaaatgcagagataatttgatggagaaaagatatatttttaacaagtggcgcaaaaacaattgggtattcatttttgcctttgtagtagcct

SEQ ID NO: 239101 - DNA, 1018 bp, Homo sapiens
tttcccaccttggcctcccaaagtgctgggattatagaggtgagacactgtgcctggcctaattgtcttaaatacactagggttgattctgtcacataaaagaaatcagaataggccatttagggctgatgtgccactccacagtcttcaaggaccaaatttccctcttgctgcttgttctgccttccttagtgggctgactcatggcccaagatggctgctcaagctctggccatctcgtctgaattccagccagcaggaaagaggacatgagggaagaagagcactcctcctcttaaagagaattccaaggaacaccacatcacactaccgcttcaactcatgggccaaaactagtcacagtgctattcctagctgcaaggaagcctggggagtgtgcccagctataaatgtgagtccttgtgactaaagaataaacggcagagtgagttgtagccagcaccttgcagtctatgctgtagctttctttccaatttgaggacttttccagggaaaatcctcacagccaacctctggtgaaactacccttgtgttcccctttttacagcggaggaagttgagagccagaggggtagaggggtagaggggcttgaccaaggtgtcacaactagtgaacagcagagcccttctggagtagcctagagctgcaggcatcagctgggcacagtgcctcaggcctgtaatcccagcactttgggaggctgagacagcaggatttcttgaggccaagagttcaagacctgggcaacataggagaccccatctctacaacatttaaaaattagccagtcatggtagcatgcacgtgtaatcccagctactcaggaggctgaggtgggagaatcactagagcccaagaggtcaaggctgcagtgagctatggttgtaccactgcactccagcctggacgagagagagagaacccatctctctctctctctgttttcatttttcttttttctcatgctattttaacaaaaagcccatcccttaaaaa

SEQ ID NO: 239102 - DNA, 3088 bp, Homo sapiens
  misc_feature (161)..(161): n is a, c, g, or t
  misc_feature (310)..(310): n is a, c, g, or t
  misc_feature (312)..(312): n is a, c, g, or t
  misc_feature (399)..(399): n is a, c, g, or t
  misc_feature (448)..(448): n is a, c, g, or t
  misc_feature (896)..(896): n is a, c, g, or t
  misc_feature (954)..(954): n is a, c, g, or t
gctttttgcagagaggggatgagtggatggttcccctacccaaaggcaggaaagtccccacaatgtggctgagtctggggcttttatgggctcagaataggggaagtgtgggcaaacaggaacagaagttctcactctgggtcacaggtttcatgtgggancagcagtccagtctttcagccttcaggctgtttttttggcttgaaggtggggtttcaccagggacccaccccgtctgcctaggcatttggctgcctcctgtcaccatcaacagggctcagagctgatgcctcctgacccatgtccaggngnctccctttgccagaagaatcagagataaaaagcatctgctgaagaaagtagcttttaatgctgcaaagccctcacaagatctgattnctactgggaatgggatatggtaggaagagcacagcctttggcaccaganaggcatggcttagaatcctggctctgccactggtttactggctgtgtgaccttgggccagttacttaacctctctgtgtctcagtgtcctcatctaggaaatggtggaaacgcctaacttccagggcagcgcatgtaagatgcttggtgcatagtaggccctcctttaatcctagtccctcccggcctgcccctgccaccacccccagtttgtttgcctctgggaccagcagttttggagactccgctccctcctcaggctgtcttcgtggcagcttcccagctcctgcctaataatagctctttatcacattaggagtacatcacaaaaaacagtgctttcctcttctgggtaattagaggtaattagcactgcctttgtgctggcctcctgttttccttgaaaatgctttgctggagaagttgctggcaagggaggtttcattacngctgttggggaaatgctggccaccctctgctcccaacagagacccacaggacctgtcntctccctgctgggccaaccacgcagcagggccctttgtgatcatcccactgggctggccctgttgcaggcagggcgcatctctggggtgaatgaagctgccctcctgcccctcagtctctcctcacagggacaaggttacagtgggtgggggatttgccaccccagggaccaactcatgaggcttctggggcacagagatccaacccacggcaagattctccatgtcccagcagaaatgccaggtggcctagaacttagcaaaaggcttggcacaaagtagatacttgataataaccgcagtagccaacaactcacatgttttacggggtaagtcatttgatcctcatagaggtcctgcatagtggtagtaacccgttgtacaggtgtgaaaactgaggctgcaggcggtgccacggcatgtgagtggtagagccggatgaacctgggctgttaaccactgcttcagtactgcctgcattcacacatctctgtagcttctggtagtggcctctaaccctgtgccaataagcctgttacatgtattatcaaagccacacagccagcccacgtggtataggtctctttattagcctcattttatacatgaggaaattgaggtccaagaagtgaaagaacccaaaggggcctgatgggcttggaaggagtcactggggcagatggaggtgggtgatggcagcctctgtttgggtaagttggggtgtcttttgaggcaggaaacaggaagggctgggccccatttgtacctgcagggatctggttcccacggaaaccccacgatgtgcggggctggctgtggggcacagaggtgagtgagaagtggtctctgctcccctgcgctcagtttatcagggaacgcaacctcatgagcatgtgacgatgacaggttatgagtgccatcacagggtgtccacagaggcccctgccaacacgggaagccacggaaggcttctgcacgccagtcacatccggcgtgtatccaggcagctggcagattcaatcaagacagcctgggagatggtcaggggctgaatcttcacgcagtatcggctacaccagaactttctggtgctgagaagaggctctttcccgacctgcctcacccctcttctctcatctctccagctaactgtaaaaccagagctctgcccagcaactgctcccctgggtctttgcagaggggtggctcagggactagggttgcctgagacccagaccaacttgtagtcgaggagggccagagctgtgtgttctaggacagctctcagtggaatttccatctggtatcagctgcagccagtgggtaccaacacctcccttccttcctggccatctcgtctgaattccagccagcaggaaagaggacatgagggaagaagagcactcctcctcttaaagagaattccaaggaacaccacatcacactaccgcttcaactcatgggccaaaactagtcacagtgctattcctagctgcaaggaagcctggggagtgtgcccagctataaatgtgagtccttgtgactaaagaataaacggcagagtgagttgtagccagcaccttgcagtctatgctgtagctttctttccaatttgaggacttttccagggaaaatcctcacagccaacctctggtgaaactacccttgtgttcccctttttacagcggaggaagttgagagccagaggggtagaggggtagaggggcttgaccaaggtgtcacaactagtgaacagcagagcccttctggagtagcctagagctgcaggcatcagctgggcacagtgcctcaggcctgtaatcccagcactttgggaggctgagacagcaggatttcttgaggccaagagttcaagacctgggcaacataggagaccccatctctacaacatttaaaaattagccagtcatggtagcatgcacgtgtaatcccagctactcaggaggctgaggtgggagaatcactagagcccaagaggtcaaggctgcagtgagctatggttgtaccactgcactccagcctggacgagagagagagaacccatctctctctctctctgttttcatttttcttttttctcatgctattttaacaaaaagcccatcccttaaaaa

SEQ ID NO: 239103 - DNA, 493 bp, Homo sapiens
aagagtctggatttgaatcctgactctgctggttggttattcacaagctttgagataatctctccgggcctcaaatctcttcatctgtaaaattggctagtaagacgaattccttattgtcaggattaaatacaagaataaaatacgaggctcagaacaggtgttagttcatgtgagaaaggaagaactggccgggcgcggtggctcactcctgttatcccagcactttaggaggccaaggtggattggattgcttgagctcaggagttggagaccagcctgggctacagctatttcggaggctgagatgggaggatcatttgagcctgggaggtggaggttgcagtgcactgagattgtgccactgcactccagcctgggcaatagagcaagaccctgtcttacaaaaacaaaaaaacagaagaacctaggatcaagatttttaagatttgagcttcaaccattaggaattgagaagagggaaggatctagg

SEQ ID NO: 239104 - DNA, 1082 bp, Homo sapiens
atcatttgctcccaggcttcccccatcatcaccctcaccacatatcctgctaatatccaacaacaaacaaatatttaatattgaaatagcccattgcctgagaatgaacacaagctaaaatacatgcaagggtacttaatggaagccaaaccatgttctatacctaaggagaaaacatggacatgtagaatgcttttattcatgtattcaaaatcagaacaaatcagtgtatatcactagaacatcagatggaggataacacaagaagtgatacagatcagggttcacttctcttaccctctctctgttaggaccacattcctattttagccaaatgtttctggtacgggccatcttttcaccataaatggcattatgtttcaaatggctaaaagcatattatgggtatgctcaaaggagtaaaacccaattcacagagatgtggcttttctaaagaaccaaattaagggaatacttagtatctacaactaaagtattagtcattctgaggattatttgttgctttaagtattagctccctactacatccataacaccctacttactaaatttaattacacacaacttttcaagaattcgtattttatttgaagggaggtacctgtctactttatctacaataaaaacaaagggtattggctttctctaatccatgcaaactacaaattccatcgggagtcctacatcactaacagtggtatgaacaaaactaagaaagtacttcctatccacatgtgaatgttttaaaaaagtttttgccataaaacctaagtgtaatttagcataccacagtgctctgaagatgggtcattgacgatgtaccatttgtatataggtaatacacatgtaaatcactaattgttaattaaatataagaagtaggtttttatctttttaaaaaaaaaacaaaaaaggtgactccctttctcattctgttctgttgtattgcgtccaaaagttgtgtgtaatttttttaaggtccaagaaatgtaaagaaatttgttggaatacctgaatttctgtaaaaaaataaaaataaaaataagattttgttacttaaa

SEQ ID NO: 239105 - DNA, 442 bp, Homo sapiens
acagggaaagagaggtctgctgttgcaaaaccaaagctggaggctctccgaagcccacttatgttagtcaattgatatttcatgaaactctagaatgtgcaaatcactttccacggggattgggggggtgagaaatacagagatgaaggagatgcaaacactttaatcaaagaaatccgtctggttgggaagagaaggttctgcattatataagttgcaaggtcttatccaagaggttagtctgtcaagagtaatagcaataattacacaacaatatgtcagagaggctgggagctccagcttcaaagccaccttgcctggggggaaactcatttccatttttaaccatattgggcctgagcctcagttacctacctcttctgtaaatgtaaactacctcttggggtccttgtgaggattaaatcaaacttgagcctaaagg

SEQ ID NO: 239106 - DNA, 579 bp, Homo sapiens
gtttattttctttctttttttcccccgaatattttcagtcctcggttagttcaagacatggaacctgtgaatacagggctggctgtggcatatgatggcatgggacgcgtgcgtaaggcccttgtgctgcacactgaagtaccattgctggctcaaggaaaagcacttgagagactgagctgcacgctgaactagctgctctttttgtgggatgctatttttacttgaaagaacaacagaaagacttgagtattaaagagagtttaaaaaatgtaaaacagtgtcactctttactaattttttgttttgaaagttttttcataaaaatgtataataggtttattggtatttttgaatgaattatttatatttttctcagtatttctaattcagtatcagtaatctaacccatataaacaagtagtttgagaaccttatatgttcagccctacctcatggttccgtcttcctcacattgtgtgggcttctgtgccacagctggtttgatcttcctctctgatagcaagctcttatctacgtatatttcagttaaattcctggccaggcatggtggctcac

SEQ ID NO: 239107 - DNA, 375 bp, Homo sapiens
ctgattgaatttaatatccagtgaatagtctgtgcctacttttgcatatattagtctttgggatctcaattttcctatctatgtgtatttcttatataatacaaagattaatacatttattgcaaacatttttcccaatctattttttgtctttttatattatgttccacaaagtttttagttttttatgcagtatttacttttatatccatatgctttttaaaagatgattttaattatttacagtacctaaaccaaaagtggaactcagatatttgctggtggttaaatacttgtaaatagaaattctttgaaagcacaatgataactgccattagctaggtcacttttgtagcagttatgacctgagtttct

SEQ ID NO: 239108 - DNA, 478 bp, Homo sapiens
tgttccattactttatatgaagtgatttctactgctgagtcagacagaacacttcctcttagacctagggacttttttcaacatttttaacaatgtgtgtgtttttcaaaatgtgtcccaaccaggtctgcaggtcttcctgggttgaatggactgtttacagaaggggaagattcaggcccaaggtcagggttacagaattatataaggtttcctgtttgggcagctggtctagcaacacctctggttggggcagactgggtcttgttgagagatagcatgcccaggaggctagggcagggagagtgccaggagcaggaaagaacatttttcttttctttttttttttaagaccgtgtcttactctgtcacccaggctggggttgcagtgagccgagatcacgccattgttctccagcctgggcaacaagagcaaaactctgtctcaaaaataaaataaaaaattgctttaaaaaat

SEQ ID NO: 239109 - DNA, 324 bp, Homo sapiens
caaggtttcaggcatgcttgtaaggaccacaaggtaaaactgttctgccactgtgtgtgtgtgtgtgcacgcacatgcacatatctgagatgggtggcctgattgatgtgttgcatctcatgcattttaaattaaagtgtgtcagctgagtggacataccaaggagctccaaggcacatgtcccactcaagggagagacgttgggagtgagaataagagacctatgcccagtaaaggaatcccataccaatcttccctctataatatgaatggatggcccagaagcaccaggccaacaagaaggatcaccagtatggataagga

SEQ ID NO: 239110 - DNA, 589 bp, Homo sapiens
aagtcagctttgaggggacctgctcagttctgtcgggagagtttgcgtgttttacatacatctgagatgtttcagtagctggttagatatgtgagtctggagctgaaaatagcattattattttctcttttttaactttataaaacttagtaataaaagtcatacatgtctagtggaactagtgaaaaataagagaaagttaacagcccaccctctgtccccggcttcctgcctgtgctggcgcatccaggagacacagctgcccgccttgagggtgtatgcgttcttgcaagtcaaatgatttactgcacattattctgccacttgcttccctctaggagggatgtccgtccaggtggggggagaggtcaaactcaagagtttaatagttgcatagcatcccctcatatgaataaactcttcctccactcatggacatccaggatctctcgtgtttttgcaattattaaacaaggctgtaataaacattcttggacatcaaaaaaccaagaagaaaaaacaaaagcgagaaacacgacaaagacaagaccacaacaacgatagcaataacacacaaccaataaggggg

SEQ ID NO: 239111 - DNA, 747 bp, Homo sapiens
cttaaatattggaaaaggtaacccagtgccataaagcagaaacagtgacctttaaaatgactaaaatttcaacccagtatagtttcatacctatttcatgctttctcgtaagaaagaatttcatgttttagaaacatttctttcactatgggattaataatatgacactgaaatggaattatatatgtcagctacaattcaggcattgttttgggatatggttagattgacaggcaacgttttggaatatggttagacggggagggaacacggtactgtttaacatcttaagagtatgtgggggtatgtgtatacagaatgtttttgtttttgctcatcacaaccaggtttcatcagtatttaaaatatttaagattgtggcttggaatgtggttcagccatttactcacttatacaaatattcagaagtgtaataaaaatgtgaatgaagaaaactttgatataactcttcttgcttagataaatggttgcagatgacatcacttttagtataacagaacatttctggttttgtttgtattatcttgtaaacatggccaacatggtgaaaccccatctctactaaaaatacaaaaaattagccgggagtggtggcatgcggctgtaatcccagctactcgggaggccgaggcaggagaatcacttgaacccgggaggcagaggttgcagtgagccgagatcgtaccactgcaccccagcctgggcgacagagtgagactccgtcac

SEQ ID NO: 239112 - DNA, 457 bp, Homo sapiens
gcctcaggcccttgcccagcgtccccattcaacactgaaaaccctctgcacccagcgccagcctctctgcctgcttcctttttccggggcacttaccatcatctgacacgtcctgggtgcttattccccgcagagtggggaagcccaggagcactttagtctgttcactgccaaggccgggatctggccctcagaaggtgcttcagagctgctcctccagggtctgtgaccccaggctgctctgggccagtgctctgaaatcttggagtgagcgctgtgcccagatcccagctggctcgcagagagcaggaactccccgctgcacacccacctgtcttttctccatttctccatcttgtgtttctggcttggtgggactcgtggctctactcaaatgggagtgttttgcacgggaacattttgcctgttaaggtaaaaatacagcacaaaggaactg

SEQ ID NO: 239113 - DNA, 209 bp, Homo sapiens
agagccagtagcacaatgctccagatccctccgatttcagcttaaactgttatatttccttcgatgaatcttaactctactccttctctcttatgaagaagatccttgtgattacaatgggctcactcatatattccaggataatctctccatcttgacatccttaacctaagcacatctgcaaattcccttctgccatttaaggtagc

SEQ ID NO: 239114 - DNA, 156 bp, Homo sapiens
gctccggcgagcgcaccggccccgcccccgagcccacgtgaccctgctcagccattttggagaaaagggcgcgctcctccgcctacctcttgagcgtggagggtagatgcttcaggtgaccttttacgagcgtggcgtgtcctggatggcggccgc

SEQ ID NO: 239115 - DNA, 437 bp, Homo sapiens
ctcaaaaaagaaaaataagaaagcaagatcaggagaaatgagactggagcagaactgtcatgcactgatcatctctgtgtggaatgcaaaaatggatatggatattaaactccaggagatgttatttgggaaaggtgactgcaagaagtcaagctattcagagactatacctgatcatgaacattgttctacctgtaatcgtgctgagagaataatatactggtgagggtgtgagggtgaaagtattatcacatttgcaaagtataatgcaatttctctctcatggagtaaaactctccctctctctctctctgtctgtgtctctctctctttcctacctccactgttctagtagaccttgacattctgaaactggcccaactgtcccatagaactgatgtttatggtttctttgaataaacacagaaattgatcct

SEQ ID NO: 239116 - DNA, 443 bp, Homo sapiens
ctaagagtacctaatcctgccatttatgctgcaaagctttgaaatgtcctcagagagaaaggagtcagttcaaatgattaatttaaaatgaaatcagaagaagcaaaaattataggaacaatggcccttgtatttcaggaggggactgatatcgtgcaagggcaatggagtttgcctgtaaatagtggttataattcctaccttaaggattggagaaatacagagtatagacctgtgctgtcaatatgtggctgctgcctatatggacttctgagctcttaaaatctgactagtctagaacaagttatatgtaaaacatacactggattttgaaatctgagtacaaaaaataatgtcaatatctcatcaataatttctgtataattacatgttgaaatgatagtatcttggatatgctggattaaataaattttattacaatt

SEQ ID NO: 239117 - DNA, 347 bp, Homo sapiens
caaagaagaggtttctttctttctcacgtaaaaatgaaaaaatcagctggcagcagtggctcacacctgtgatttcagcactttgggaggccgaggcaggaggatcgcttgagcccaggagttacagaccagcctgggcagtgtaatgagaccccatcgctgcaaaaaaaattttttttttctaattagctgggtgcggtagaatgcacctgtagtctcagctacttaggaggttgagatgggaagattgcttgagtcccagaagttcaagattgcagtgagctttgatcatgccattgcattccagtctgggtgacagagcaagaccctgtctcttaaaaaaaaaa

SEQ ID NO: 239118 - DNA, 1955 bp, Homo sapiens
  misc_feature (1397)..(1397): n is a, c, g, or t
ctcatatgctttttttaaaaaaagaaataattgctcataagaagaaaaaatacagaattattgaaaacaaaagtacctcaaccttcagttctcagatatagtactataaataattagttttcaatcttggcaggctttttacgtagtcacatatgatttgagcatttttttcctcttttttacacagataagattatatgtatggctatatgactttactcaaaaataagtcttgaagatctgtccataccaataaagatctgtgtaagattttaagagctgcaggagattgttattgattttgattagattgcactacagcctatacagtcttctatttagattttgaggttttacttgtggtctagaattgattgttttgtacaaaattcaatgtactcattcagcaaatacttactgaatgtctgctgtgttgcaggcactgacctaggtttcagggatatggtggcaaacaagaaagatgtgaaagacagtcccagccttcccaggccttataatcaatggcatttgaaactaacaggtctgctacatttgttctgtatacgcacacgtgcgtgcacacaagcacactcgcacgcgcacacacactgaatcttgccagttgtgtccatctagtccagggttctgcaaactttttctgaaagagccagatattaagtattttaggctttgtaggctacagatggtctctgtcacatattcttctttgttttggttttggtaaacatgtaaaaatgtaaaaactattcttagcttgtgggcagtaccaagacagaccattggccagatttggcacaggctatagtttgccaacccctgatctaggcactatcaggaattttttgatctgtggaatacagagagagatgtattaaagaattctactgtgattgtaacattcttatgtttgtttttctaaaatctcaatgtgcatctaatcatgtttcagttcactcctgttcttcacagtaattctttttaattgagctttctccatgcctggctttgtccccttttcatgtcattgaggctggtgatttttatggctgcagctgttgttggctacacgtatttatagacagcagtttgcttgattaggatgagaagcatgggtggctttctccatggttgtataggtcaggtcctgaatcccccagtgtgcttctgtggcctttggagtcagtcagggacagaccttgtcctgagccactgtgggcagtgaagacaggacaggctgaccaggtttgtagactggaaacagaccagtagacagagcaaagatgtctctccaccagtcatgaaatttggagatcaagggctgattcgagaagttgcttaggaagccactgagtattgtaagacccacctgtcacagngtccttgactttgaccaccaactgctctaagtctgtcactcttttagtctcttctggaatgatcttaggacagtctgtcttgttggagtgttggttgtccataggaagtaaagaaaggattccactattctactgagccatgacttcttcatggttgttgctttggcaacctactatctctgaccaacatgtggcctgcctcactgcagccagccattccatgtgcagggaacaggcacagctttcaccttaaaatccttcatctcctgcccttgctaccagtccctgccacttcaggcttcaggattctcatctatccctctgaggggttttctccttccactgagtagagtgcactgccctgagtgagccgcttccccatcagctggatcccatctcttataaaaatacaaaaattaaccaggcatggtggcacacacctgtaatcccagctacccaggaggctgaggcagaagaatcacttgaacctgggaggcagaggttgcagtgagctgagatcatgccatgcactccagcctgggagatggagggagactc

SEQ ID NO: 239119 - DNA, 550 bp, Homo sapiens
gagtgtaatggtgctttttctacagccatgaaagaggctgacacctgcacactcaggcacgacttaaaatagaacttgtcaaacagtgatcctctctggatcaagctcggaacaacaaacagctcttgaactcgcctcccagcctaaaaagactgcagtgtgtgacactgtggggtagtttggtgggaacgacaaatcccacactttcaaaatcctgacaatcctcaggtatgatgccaattattaatgtttccttttttcacaggcacgtacaattcagaggactttcgaaattatctaaaaacatgggtgattctcactgccagccttgtctgtgagaaaagtacatatctatgtctgcacagatacaagagacaaaaaataaacctttaatttttaaaaattaaaatgtacacagtaatcttgctgttagtattgaattaaaactaaataggcatgactgttccttgaaaggaatgatataattttctttaatatttcatgaggtcttcccttttcaataaagattattgcaagtcaccagaaaaaa

SEQ ID NO: 239120 - DNA, 465 bp, Homo sapiens
attcaagtaaggcttaaggaattcagtggattagtatatgctctcatctattttttcacattcctactatgaaaaaatttcaggcaatgccaataaagcaaaagtccctgtttgccctcatacagtctcactcccctcctcaaaggtagatcactgttatcaggtatgagctatctaggccttttttgaggtattcctatacaaatgtatttgaaaatctagaaatatatagcttgattttctttatataaatataaacattatttacatattttatttttcacttaagagaatgtcttagatctttcaaggttagtggcatcaatctcttatcttgtcaaaatatggttaaggtattacatattatgactgtgctgtagcatagggaattaacatttgactttttaatctgaatgtgttagagaatttacctgcagtattaaaatcacaagttattttctctcc

SEQ ID NO: 239121 - DNA, 474 bp, Homo sapiens
ttagtgatgctcataaccacattctctctgacccctgctgatagaggcttcagtccagggaaggagttaaggtttggagtcaggaaccagcatctcaccacagtccgcctgttgtttggtatgggctgctggatgtgccactgaatcttctgaaatcttaggttttttagctctaagtgggaaatgatgatgatgttacttgttttgccaacctcataggttggtggtaaatgtcaatggtcacgacgcaacatctgtaagctctaaactgttatactgaacatgaactgaacttaataaagtcagtggggcaagttctgcctttctggtttcccaatcctgctattgtcattgtcattttctcaggacacacagagattgcctaagttgcttgaaggtaagtttgactcacaaagtgaggaggaggtaagatgtgcgacaggaatgaagaaaaagaaatgagtcatactaaaa

SEQ ID NO: 239122 - DNA, 1657 bp, Homo sapiens
  misc_feature (22)..(22): n is a, c, g, or t
  misc_feature (1409)..(1409): n is a, c, g, or t
acagcgctaaaaaggcctggangttcggactgggtggagctcaacacagtgtggcaaagtggctgcagccagactgcctctctagattcctcttcactgggaagggcatctctgaaagaaaggcaccagccccagtcaaggggttatagataaaactcccatctcactggaccagcgtatctgggggaaggggcggctgtgggcacaacttcagcggactttaaacgttcctgcctgctgactctgaagagagcagcagatcctgacaaggagggctctcccagcacagcgcttgagctctgctaagggacagactgcctcctcaactgggtccctgacctccatacctcctgatggggagagacctcccaacagcgattgtcagacacctcatgcaggagagctctggctggcatcagcctggtgcccctctgggacaaagcttccagaagaaggagcaacagcaatctttgctgttctgcagcctacactagtaatacccaggcacataaggtctggaatggacctccagcaaactgcagcagacctgcagaagacgggcatgactgttagaagaaaaagtaacaaacagaaagcagtaacatcatcaacataaggaacccccatacagaaacaccatccaaagatcaaaggtaggtaaatccataaagatgaggacaaaccagcacaaaaacgctgaaaattccaaaaaccagaatgcctcttctcctccaaatgattgcaactcctctctagcaagggcacaaaactagacagagaatgagtttgatgatttgacagacgtaggcttcagaaggtgggtaataacaaactcctctgagctaaaggagcatgttctaacccaatgcaaagaagctaagaaccctgacaaaaggttacaggaactgctaatagaacaaccaatttagagaagaacataaatgacctgatggggctgaaaaacacggcacaagaacttcatgaagcatacacaagtatcaatagctgaatcaatcaagcagaagaaaggatatcagagattgaagttcaacttactgaaataagacatgaagacaggattagagacaaaagattgaaaaggaatgaacgaagcctccaagaaatatgggactatgtgaaaagaccaaacctacgattgattagggtccctgaaagtgacaggggagaatggaaccaaattggaaaacacacttcaggatattatctgggagaacttccccaatctagcaagacagggcaacattcaaattcaggaaatacagagaataccactaagatactccttgagaagagcaaccctaaggcacaaaatcatcagactctccacggttgaaatggaggaataaaagttggctgagcgtggtggctcacgcctgtaattccagcantttgggagcccgaggcgggcggatcacaaggtcaggagatcgagaccatcctggctaacacggtgaaaccccatctctactaaaaaaatacaaaaaattggccaggcgtggtggtgggcgcctgtagtcccagctacgtgggaggctgaggcaggagaatggcgtgaacccaggaggcggagcttgcagtgagcggagatgtgccactgcactccagcctgggcaacagagcgagactccttctcaat

SEQ ID NO: 239123 - DNA, 359 bp, Homo sapiens
ggaaatcataaacctatttaaatgtcatttgttttatatccctttatttttgccaggggtatgtcctttttctgttgttcaaagttatattactggccagaatggaaattataggaactagctatgtatgaaattgcatgttttccatccattgtggccaggtttggtattcccttaagatggcaacaaagtaagaggcatttcttctagcacttattcgtgaacccagtgacctccaatttcccattttaaaagtcatctttatcctcggaactttaacctactggcataagaacgtgggcttaagttcttttttatcactttttggagttaaaaaacctctgagaggccgggcgtgg

SEQ ID NO: 239124 - DNA, 703 bp, Homo sapiens
  misc_feature (508)..(508): n is a, c, g, or t
  misc_feature (561)..(561): n is a, c, g, or t
  misc_feature (643)..(643): n is a, c, g, or t
ttatatactttataccctggtctttgcatttagtaaataccagcataagaacctgctcattctttacgatgccataggaacattagcagattcagtaggacatcatttaaacaaaccagaatatattcagatgctaatgcctccactgatccagaaatggaacatgttaaaggatgaagataaagatctcttccctttacttgagtgcctatcttcagttgccacagcactgcagtctggattccttccgtactgtgaacctgtgtatcagcgttgtgtaaacctagtacagaagactcttgatttactgagtggcctggctgaaggacttggaggcaacattgaacagctggtagcccgaagtaacatcctgacactaatgtatcagtgcatgcaggataaaatgccagaagttcgacagagttcttttgccctgttaggtgacctcacgggaaccaacctaaatccagaattcatttcagtctgcaacaatgccacatgggcactnggagaaatctccattcaaatgggtatagagatgcaagcttatattcctatggngtgcaccagcttgtagaatcattaacagaccaacacacccaagacgttgttagagaatacagcaataacaatttgtcgtctngggtacgttggccctaaagagtggcccccattgcttcagaggttattaagaccctggtgc

SEQ ID NO: 239125 - DNA, 386 bp, Homo sapiens
gccttaggcctaaagcaacaaccagaagccttcctgggtgtttacattacagcacaccagactgcaggcaccgccaccccagactctgcctgcagctaaagtcaccaagtttgccgtgccccataactgaggtcattggcagcccagcaccaagcctcactggcatcaagggcagcgggttagtaagcatggctccacacgggtaagcagttctaggaaatgggaagaaacccagaccatccatctcagggccaggctctccttcccccatggtaagaaggtgaagacttggagattggtgagtcaggcaatcaaggtcaaattgacatactctagaagattacatgccgtgtggaacagtactgggcagtggacccactgggaca

SEQ ID NO: 239126 - DNA, 303 bp, Homo sapiens
cgtcctagatcgggaacaaaggagtcaacgtgtggccgggcggccaaaggtgagtcggtgccagggcccccaacttcctattcccccacccatggaccttctgttcccctcccctgggaatgggggccgtgatctaggtggctccgtaggggttaatcacgggcggtccagactgcgggcagcgagaccccagggatcaggaaccccccccaaggccccccgtggccgggccgtatctcccctctcctgcagctgagcgctgcggttggagaggaaggagccgcccccctccccctgcggccg

SEQ ID NO: 239127 - DNA, 502 bp, Homo sapiens
ggattttacagctgtcgagagggtgaagaaatagattcttgattaaggaaatggaaaacagctccaaaagccaaatgacagaacgtctccagcaatcaatagactgcagaatcagtcagaatcagaatccctgccacgttgagaagccacaacttcagctgctcactccagactcatgctgcttgaatcagaatctggcttgaaaaatgggcccctgtctcctcatttaacccagttcagaagtcaggactcacacaggtacatgacattggctgcgccagcatcacagctggaatcccggctataaagaagtctgagaaaggcagttcttagcttttccactttggactacaggaagatacagaaggaggttgaaatgattattttgtgatccagtccatacatgcaccacactctaaacattcaaattataagaaatgtattcaatggctttaaatgactctgaaatacttttgattaaacattttttaaaaagcatgaa

SEQ ID NO: 239128 - DNA, 428 bp, Homo sapiens
aggtggggagaccacaggatgacctggagccaaagaagaagggcccaggtcccagggtctctacagcactgccggccttccagccacagtttttctcaatcttcctgtcatatccctcaaggaagtaagtggacattgtaaagagcgagtaattatagcacaacaaaaatcaaaagtcatgattctggaaagcattatcaataaaaaatggagaaatagttgacatctcttcatgtttcctctggaaatttctgattatgtatgtatactcttccactctaatatccaaacaactctcttacttcttcatgcaaagaaacatgaaagaatgaaaaggttcatcacaagtgtatgattaattttgtatatataattttgcaaattaatagattttaatgtgttcaataaatgtacataaatacacatgt

SEQ ID NO: 239129 - DNA, 699 bp, Homo sapiens
gagagaactagtctcttaaaataaaaattagccatatgtggtggtgtgtgcctacagtcccagttacttgggaggtagagcaggaggatcacttgagcccaggagttcaaggctgcagtgagctatggtaatgccactgtactttagattggggtgacagagcaagacgcctcttaaaaaaagagagaaagagacagtatatttataactgtatgatcttagcacaaaaaattacacagtccagaaactgattcaagtacctattataatttgaaatacattaaaaacattttttacaacactgaagaaaagcagagttattcaataaatggtgcttggttaactgataggagtttggaaaaataataaaggtaaacttttattccttattctaaaattaactccacatggattaaatatttaaatataaaacatgaaaataaaagtattagaacaaaataatagagattaaaaacataattatctcgagagtgtgatcaaaacctgtctgttaaaaaggaacatttgatacattttaccatataagaactaaatgcatggtaaccatcaatagaatcaaaataaaaaacgaactgggagaatatttacacaaaatcatatcagaggtaaaggaataactcttcttaatatacaaagagatcttacaaattgtaagtatacattccagaacttcctaga

SEQ ID NO: 239130 - DNA, 678 bp, Homo sapiens
gcaaactgccactggtgacacctcacactcagtgccggttaaaattactgaagttagagagaattaaagactatcttctcatggaggaagaattcattagaaatcaggaacaaatgaaaccattagaagaaaagcaagaggaggaaagatcaaaagtggatgatctgagggggaccccgatgtcagtaggaaccttggaagagatcattgatgacaatcatgccatcgtgtctacatctgtgggctcagaacactacgtcagcattctttcatttgtagacaaggatctgctggaacctggctgctcggtcctgctcaaccacaaggtgcatgccgtgataggggtgctgatggatgacacggatcccctggtcacagtgatgaaggtagaagaaattaaggaatctgtggagcttcctctcacccatcctgaatattatgaagagatgggtataaagcctcctaagggggtcattctctatggtccacctggcacaggtaaaaccttgttagccaaagcagtagcaaaccaaacctcagccactttcttgagagtggttggctctgaacttattcagaagtacctaggtgatgggcccaaactcgtacgggaattgttccgagttgctgaagaacatgcaccgtccatcgtgtttattgatgaaattgacgccattg

SEQ ID NO: 239131 - DNA, 708 bp, Homo sapiens
tctgactgaagaaatacttgcagacattcaagaagtaattaatctttccttcctcttcatggtttgcatcatataaactactgcattattacatactcttctccttaggtcgtttaagtcattattagagatcctaaggttgtatcagcctctggttgatgatcacattttcagtctggttctaatgctattttcatatcatgccagacaagttggcaagtgctagacatttcccatgtatttgtactaagtctttgtctcccctttagctccttttgtaaccatttcacaatcaccatcaatattattaaacctgttgtatgtaggtcactgggatgctagaggcagggttaagtcggggtggggtttttttggttttttgttttcaaaggactaagaaacaattgcggccgcatgcggtggctcacacaggtaatcccagcactttgggaggctgagggggcgcggatcacttgaagtcggaagtttgagaccaatctggccaacgtggtgaaaccacatgtctactaaaaatgcaaaaatgagccagttgtgatggtgcatgcctgtaatcccagctacttgggaggctgagtggggagaatcacttaaacccgggtggcggaggttgcggtgagccgagctcatgcgactgcactccagcctgggtgacagagcgggactccatctcaaaaaaaaaaaaaaaaa

SEQ ID NO: 239132 - DNA, 1164 bp, Homo sapiens
ggtcagctgcacctagaaggggccccctcctggctcaaaaatggctgcaaccacatgagccatgtgactcaggatggagggtggcactgtccacaaatcggcttctctgcagagcccactctgcaaggctgcggtgaggggctgaggctggctgcctggtgggatggcctgagatcctgctcctgctagggccagaggccaactgcctctagggttgcttggtgcctcagtaacaggtggtttgagtggatgtctcctgcaggaaccatgactagaaatgtggttagacaagaatttgaggctccagggaagccacaggattctagccagcaggatgcctgcttaatcctcgtaaaaggaaactggacaacaaacgagatggaggtaaaatgaaatcccaaaggaacgcctccaaggatcccgtcttctacctgtcaggagatgttctatttttctaacttccccaccttcagcataacaggatttagtaactgtttagaccttttgaagaacaaagacaaaaataggaagttgtgtcagaggagtgcagtcatctcttattcatggtagtgttttggttcgattttggagcatccaccaggttcgcgtacaggagaagaaacacggatgatctctgtctttattttgggggaggacaatccggccttcttgggactgttccagcccacctcccagatgcttcggtcagtctgatccacgagatatctcaggctgggaagaacacatcttgggccaacttccacagcagccatgcgtccaaggatacagaatcaggcaggccgataaaaggattttgacttgggtttcacaggaaggaggtatgccatcaaaccccactgtagtcaaggatcagaaggtgcttttagcaggaactgaagctttttagtataaggcccacttagggtgccagcaccctgacagtgtccctttaatccacttcagatctggttgactcatcatcaggtgtttccattcactttcaaaattacacagtcacaggataacagtgagatccactgctaaagggtaaagggtcagaggctgaagagtactgtgtaatgtctgcatgagatttgttttaaaaaagtctgaattggcatggtattttgaatgctgctggaactgtaataaaggttcaccttt

SEQ ID NO: 239133 - DNA, 1271 bp, Homo sapiens
ggtcagctgcacctagaaggggccccctcctggctcaaaaatggctgcaaccacatgagccatgtgactcaggatggagggtggcactgtccacaaatcggcttctctgcagagcccactctgcaaggctgcggtgaggggctgaggctggctgcctggtgggatggcctgagatcctgctcctgctagggccagaggccaactgcctctagggttgcttggtgcctcagtaacaggtggtttgagtggatgtctcctgcaggaaccatgactagaaatgtggttagacaagaatttgaggctccagggaagccacaggattctagccagcaggatgcctgcttaatcctcgtaaaaggaaactggacaacaaacgagatggaggtaaaatgaaatcccaaaggaacgcctccaaggatcccgtcttctacctgtcaggagatgttctatttttctaacttccccaccttcagcataacaggatttagtaactgtttagaccttttgaagaacaaagacaaaaataggaagttgtgtcagaggagtgcagtcatctcttattcatggtagtgttttggttcgattttggagcatccaccaggttcgcgtacaggagaagaaacacggatgatctctgtctttattttgggggaggacaatccggccttcttgggactgttccagcccacctcccagatgcttcggtcagtctgatccacgagatatctcaggctgggaagaacacatcttgggccaacttccacagcagccatgcgtccaaggatacagaatcaggcaggccgataaaaggattttgacttgggtttcacaggaaggaggtatgccatcaaaccccactgtagtcaaggatcagaaggtgcttttagcaggaactgaagctttttagtataaggcccacttagggtgccagcaccctgacagtgtccctttaatccacttcagatctggttgactcatcatcaggtgtttccattcactttcaaaattacacagtcacaggataacagtgagatccactgctaaagggtaaagggtcagaggctgaagagtactgtgtaatgtctgcatgagatttgttttaaaaaagtctgaattggcatggtattttgaatgctgctggaactgtaataaaggttcacctttaggaagtgctgatggcacaccagggcccagcacaccgcatgcactattctatagaatttgcccaacaccctttgtgctacagattactattatacccattttacaga

SEQ ID NO: 239134 - DNA, 332 bp, Homo sapiens
ggggagccccactcagggcgtaaatacatttggttcactgtgagattctgggggtactgacagcggcaaacactgtcctagggaagtcacgtgacatgagggcaaagatggtgacggcagcactggttataagaaaagaaaatgaaaacagccgaaaacggctcaaaacagggacatgacgaaggaagggacactgtatagtgagcaggtttacaagatgcttccgggataagcaggagggaaaaggcagaaatgtccacataaccacagctgcggccaaatcctcagaattatataacagcacgaaacattaaagaggattttaaatctga

SEQ ID NO: 239135 - DNA, 407 bp, Homo sapiens
ggggagccccactcagggcgtaaatacatttggttcactgtgagattctgggggtactgacagcggcaaacactgtcctagggaagtcacgtgacatgagggcaaagatggtgacggcagcactggttataagaaaagaaaatgaaaacagccgaaaacggctcaaaacagggacatgacgaaggaagggacactgtatagtgagcaggtttacaagatgcttccgggataagcaggagggaaaaggcagaaatgtccacataaccacagctgcggccaaatcctcagaattatataacagcacgaaacattaaagaggattttaaatctgagagtctaagtgtttttctctacttttttgcattttcaaaattctgtacctgaacatctaattccttttaaaacta

SEQ ID NO: 239136 - DNA, 1032 bp, Homo sapiens
cccagaggatgggcacggtggcctgcacctgtaatcctagcactttgggaggtctagatgggaggatcgcttgaggcctggaatttgagactgctcactgcagtctctgcctctcgggctcaggtgattgtcctgcctcagctccctgagtagttgggattacaggcatacaccaccatgcccagctaattttgtatttttagtagagacagggttttgccatgttggccaggctggtcaggaactcctgaccccaggtgatccgcccgcctcggcctcccaaagtgctaggactacaggtgtgagccaccatgcctggccatgaatgagttttagaaatggatagtggtgatggttgtataatgttgtaaatggacttaatgccactgaattgcacagttaaaaatggttgaaatggtgaaatttgttatgtatattttaccgaaataaagaatagaaatgtcatactccatgagaaatctcatactctcatacttagtagtcactccccatttcctaacaaccaccctgaggcagctactcatctactttgtctttatagatttgcctatgctggatatttcttataaatgaaatcataaaatgtgtgggtttttttgtgattggcttctttcgttaagcataatgttttcaaagttaatctgtcttgtcacatcatatcagtacttcatctctttttattgttgaatagtaatttactgtctagacagacaatatttattcattcttcaactgatggatgtttgggttcgttctacttttggagattatgtataatgcttctgtgaacatttgtatacaagtttttgtgtggacatgttttcaggtttttttggtatatacccaggagtggaattgctgggttatataataactgtttaagcttttgaggagctgccagactgttttccaaatcagctgtaccattttacattcccaccaacactgtatggaggctccaatttctccacaacatgaactgcttttgaataaagatttaaatcattcttt

SEQ ID NO: 239137 - DNA, 1427 bp, Homo sapiens
  misc_feature (1383)..(1383): n is a, c, g, or t
gacacattgagcgaccctgcatgactacagagatgggaatttccagagtcaggctgcacacagatgtgcacacagccagctctgacctccagcagaagacagtcctcccctcctttgcctttcctctgcgggccttaactgccaaaggtcactctgggagcttggccactcctgcccctgccagactggcagagtgggtggcctgagtcctgcacttacatctggttcttcccttggccattgtgaccccacactgcgctctaccctcccacaaccagctcctgggccccagtgggtctcactgtccttatgtctgctggtggccttcctgtggctggcctggccagggaggggagtgggacccacacctcctggtgctgggcccagcagagacagtggtcctaggagaagccaccattaggtttctcatcaagatcaatgggagattgtgaaaaataaccttcctctcttgtggcagcagggactgtagtcagagctcaggttgggaggtgttctgactcctcagggtcacggtcagtggctgtcccccagtaacgccccatgactgcccggctccctagcctactccccagccattcatgaattctcacctcactcctatggggaggcggggaggcactgccattcctattctagacactgaggctcagaaaactggaacagctccaggactccatgagcttgatcccatgagctcttaggagaaaggagcgaaagacccgcagtttctgcgacaggcgctgctgtcgcggtgttgaggctgtggtgtcttcacagctcagcccgtgcactgggaaccccttttgcctggcttccagccttgttgcagggcactgtgcgagatgggccctaatttgctcccacatttcaaaagaccccaggctgcactgggaagaaaggggctctgcctcagccctccaggtagagcccaggagaagggcagagctgagagccagaagcctgagggtaccaacgcccatctaggacattgtctcccgcattatctccctggaccctcacgcagcccacaaggcagctgttggtatcatccccacttcacagatggggaaacagaggcctgccccagactgcaggctacaagagttgtggctgagatttgaaccctgctctgtcttactccagagcgcagcaagtccctagggcttgggggttgcggaagaagacgcaggaggagaagggcatgcctttaaccagatggcagaggaggggcccatcccagccgtgcggccggtggtctgttgtgccctctgagccctccagtgagtgcacacaagccagactccacctggccgcatcccctgcgttagccacgtgacctggagctagctgcctcccattttnggactgtggatccagagctaggaagtaaaggaccccaacatttt

SEQ ID NO: 239138 - DNA, 466 bp, Homo sapiens
cttatttacacattgcaatatagttaatagaaaaagaagctacattgcccatcaatgatagactggattaagaaaatgtggcacatatacaccatggaatactatgcagccataaaaaaagatgaattcatgtcctctgtagggacatggatgaagctgggaaccattattatcagcaaactatcacaaggacagaaaaccaaacaccgcatgttctcactcataggtgggaatcgaacaatgagaacacgtggacacaggaaggggaacatcacacaccggggcctgttgtggggtgacgggagtggggagggatagaattaggagatatacctaatgtaaacgacgagttaatgggtgcagcacaccaacgtggcacatgtatacatatgtaacaaacctgcacattatgcacatgtaccctagaacttaaagtataataaaaaataagtaaataaataaataa

SEQ ID NO: 239139 - DNA, 401 bp, Homo sapiens
aggtcattctaaatcatgtgtactatgttacctctactttgctgttggcattttggtatataacatgatgtgatttctttttatgccattttttttcttcccttaaaaaatagttaaatagcagtcttggtttcattggaaatcaaagtcaggcagtcattaatattgaatgactgcttcaccttgaaataataaatctgaggctgaaatggagctagagaatcattaaaaggaagtgtaacttattaattttgattttgaagtcgataaagtgacacacttatggcttgatcaggaatttgtttgaaacagtaaccatcataagttttagtactggattataagaaactcaaggacacagacaaactcttttcctttttgtaaacctagcatatagcaca

SEQ ID NO: 239140 - DNA, 331 bp, Homo sapiens
gagacagggtcttgctctgttgcccagtctggagtgcagtggtatgattgtagctcactgcagcctgtactgggctccagcgatcctcttgcctcagccttccgcctcccaagttgctgggtctacaggtgctgggagtacatgcttgcaccactatactggctaaacgagtatgaatattactttgcattacaatggaagcctctatttatgcttgtttcctaatattctcagtacattctgtgtttattttctcatttaagcttcttctcattcattttcttaaccaaatcccgctttcatcaaacccttcttcttgaagcctttttaa

SEQ ID NO: 239141 - DNA, 103 bp, Homo sapiens
gattcatataaactaattacaatgtatgtgtacatcatatttggattccgatttgatagcatatctgttaaaaaaataaacattggggaaatttgaacattca

SEQ ID NO: 239142 - DNA, 331 bp, Homo sapiens
tctttccactgtcccagtgcagccatccagcccagaacacaacaagaatagagttgatgagccctcttctcctcaacaaacacctgtgatgagaacattgaggcaagggaacaggtggccaaaaataccctcatagccttgagaaagtccatcttgatgttatccagtgaaacttaatggcaacgcaggagccagggagcctgctttattttggaaatgaaaaagtcagtacagttgatgagaatttgaagagaaaagacacaacaaagtagaaggctaacaccaattccaaacaatagtaaagaatcataataaagttactatgaatcaa

SEQ ID NO: 239143 - DNA, 1111 bp, Homo sapiens
ccttgaataaaattttttgaaaactgaataatgatataatacagctttcaaattacttcatgctgttaatttattcctgttttattcacatgtgaaagcatgtgatcaattgctgctgcattagagatattagatatttttaaaaattatttggatattatgaccttttctataaaagaataaggacattaaaatgtaagatgcataatgaaaatataagtggagaggttctttgtagtaaacctctattaagtataaggtaaatgttcagagcaatacttttctacattatagtgtcacaaggaaataattatagttaaaagtatattaaaataaaatagtatattattttactaattgtacttttatgtaatgaaatacagtacatttaaaaattgctagggctgggctcaatggcgcatgcctgtaatcccagcacttggggaggtcgaggtgggtggaacacctgaggtcaggagttcgagaccagcctgaccaacatggagaaaccccatctctactaaaaatacaaaaaatacaaaaaatacttaggaggctgaggcaggagaattgcttgaataagggaggcagaggttgtggtgagccaagatcttgccattgcactccaccctggacaaaaagaaaaaaactgcctccaccccccccaaaaaagttagattatgtgtgaacttaattttattattttttaaccatgttaagactactgtgcatttaatgaagcattattatgccactaactttaaacgatcctaccttactcaagggtgaagctacaagatggtaacaatacacaatttggcatatagtggaataacatttctagtaatcactttgcccgtggctttaaactgcaaatgagttaaagaatattgttcccacagattaaatttgtactctattttcttcttggaatttgttatttgtatttgtgcgtatatagtatgtgtatgtatttatgccttatatggcatcttttgactcaggcctacaatatgcagtaattacattagggtaaataaggtgtccgtcacctctagcatttatcctttgtattaccaaaagtgtaattatatgcttttgttcattttaa

SEQ ID NO: 239144 - DNA, 318 bp, Homo sapiens
gttttttatttgtgattcatgaatcaggaaagcatccattctacaaaatacagtgagcactttcatggggccatggaagaatagtgggttttgtaaggaacaaagaaacagaacagtaggaaaaaaactgattgattaacatcagattacttcaggttacttttctagaaagggtaaaagcagagagaaccggccagtgtggtggcttacgcctgtaatctcagcattttgggaggccaaggtaggaggattgctagagctaaggattttgagaccagccttggcaacatagtaagatctccatctctacaaaaaaat

SEQ ID NO: 239145 - DNA, 406 bp, Homo sapiens
agttggtggcctggatttgttccataggctacatttgccagtcttgctctagataatttaacaaaaatacttgaaatagcagtaactctgccaatttgttgaagaattaataagttacatatggccgggcgtggtggctcacacctgtaatcccagcactttgggaggctgtggcaggtggattacctgaggtcaggagttcaagaccagtttggccaacatggcaaagccccgtctctactaaaaataccaaaattagctgggcgtcgtgacgcacacctgtaattccagctactagggaggctgagacagaagaatcacttgaacccaggaggcagaggttgcagtgagccaagatcgcatgactgcactccagcttgggtaacagagcacgactctgtcttta

SEQ ID NO: 239146 - DNA, 945 bp, Homo sapiens
tcgcaatgtactgaatctgggatgtacaaaatcaaatgtgtatttatttattcaatcattcaaatatgtttgtaaagctttcaaaataggcattcgtccttttttaatgaggatcacaatctagtgggtaatacccatttatttcttgctgttaatcagattgattaaatgttaccctgtgtccttgtctcaaaatgcaaactctgtctacatctttagtggaaaatctgttaaaatgctgagaactagttttcagtcaagtcagtcagccaatggcttacatctttagaggaaaatctgttagaatgctgagaactagttttcagtcaaatcaattgaataaataaatacacatttgaaatgactttgtgggcattaataattcacttaatctttctgcttggtacattctcatctagatcagcgtttctcagccttagctgcaaatttgtatcatctggaagtaggacatgataaagagagagagagctagagatacacttaaagaaagtgaactatctctgggcatgaacaatctctgggcatcaggtagagatagagacagatagaaaatgagaaccatctctgggcatgaacctgagtatctaaactattaacaatcttgccagcttagtctgatggacagttgagaaccactggtgtatgcatgaagcaatgctaatcaatttaaataaaaatcccgtaaatatgtgtctcctaacacacacctacctaccgcagatatcatgagaataattaaaatggcttgtggaagtacattcaggggatttctttaaaattacaaaatagagcttggctataatcatcaagattatgactaaaaaggagaaaagaaatgcaaattatgttttggtcctataattggctgtgtaataacaatggattgactctgcatgtacacagcataaagggacagaaaatgag

SEQ ID NO: 239147 - DNA, 380 bp, Homo sapiens
aacgactctgtctcaaaaaaaaaaaaaagacaaatgcagcatctcagaaaccatgcggcgctggctagacactgaatcaccagcagcggcggtgacagcacgtgcccctcacaacagtgcccctgctccatcctttcaatgactatttttgaagtgtgcaagtggaagatgtcaacgataaaacaacacaggagcagcatgtgatgcaatcacagacatcctgtctgcttcgtgtgtctgacgttcattccttttcgtggtcgaatctgtccattgcactgatggactacagtctgttcgtctagtcaccattggatggacatttggggtcttcctagcttgaatttattacaaataaagctgttctgaacattcaaaaa

SEQ ID NO: 239148 - DNA, 1018 bp, Homo sapiens
gtgaacaggaaacctacagaatggaagaaaatgtttgcaatgtatccatctgacaaagggctaacatccagaatttacaaggaacttaaataaatttacaagaaaaaaataaccccaacaaaaagtagatgaacgatatgaacagacacttctcaaaagaaggcatttctgtggccaacaaacatatgaaaaaagctcgtcatcactggtcattagagaaatgcaaatcaaaaccgcaatgagataccatctcgtgccagttagaatggcaatcattaaaaagtcaggaaacaacagatgctggagaggatgtggagaaataggaacacttttacatttattatatattttaattttgtaatgatcagaataaaatactactaagcaataaaagtgaactactgatgattacagtgtggatgaatcttccccacattatgctgagccaaagaagcaggacaccaaagtatatactagtgataccatttatatcaatttctagaacaggcaaaactcatctatggtgaaaatatggtaggaatttattatggaggggcataaaagaactttcggaagtgatggaaatgttccatatcttgataaagacgtctattatacattagatttttgcttttcaacatatgtagattttccttaaaaaagtaacaaatgttggactctagatgacatagatatgtttgttttctgcagagatgggattagcagttgtgaaactactttttgtgtattctaagcttgaataaatatattgatgataatgggaaccaggtttctcatttttggagaaggtagtaacaagtgtgtgagggataagaccaaattgtttcctagaaaggaattataggtatcaacatgaattcatagtttgtgatagctagatatgaatctaatcacaaagaaacatcagcctaattcaaaatgagagatattctacaatataactcacctgtgccttttaaaactgtcaaggttaagaagtacaaagagagaaaaaatg

SEQ ID NO: 239149 - DNA, 651 bp, Homo sapiens
gtctgccaccctggttgtgtagtgcagtggtgtgatcatggctcactgcagcctcaaactcctgggcacaagtggtcctcctgcctgagcctcctgagttgctgggactacaagtgcataccatcatgctcagctaattaattttttttttaaagagagcttatgctagagacaagactgctataagcagtggttttcaaatgctgagccaagaggccaaaaggctgaatcagagtcaccaacgatgctttttaaaggaatgcagatttctgtccggacgccctgttggagattctgattcagtgtattctgggcaggactctaagattgcacattttgagtaagtgctccctggtgattctgacccacagccaggtttgggaaccaatgacttgaggtgagagaagtggggctgtgaaagtggaggcaagaccttgtccaaaccgttctacttttgactcagagtctgagtctgacttcctgatgaaaaatgacctgagagtttgaaactggccgtggtgagaatgtttcaaccacagaaattgctaaatggtgtgaatcaggtcagggttccctcccaccacgaaccctgccgcaaaagccagtacacaattatctaggaaggttattctcttttttctttctttcttt

SEQ ID NO: 239150 - DNA, 598 bp, Homo sapiens
gtctgccaccctggttgtgtagtgcagtggtgtgatcatggctcactgcagcctcaaactcctgggcacaagtggtcctcctgcctgagcctctttttaaagagagcttatgctagagacaagactgctataagcagtggttttcaaatgctgagccaagaggccaaaaggctgaatcagagtcaccaacgatgctttttaaaggaatgcagatttctgtccggacgccctgttggagattctgattcagtgtattctgggcaggactctaagattgcacattttgagtaagtgctccctggtgattctgacccacagccaggtttgggaaccaatgacttgaggtgagagaagtggggctgtgaaagtggaggcaagaccttgtccaaaccgttctacttttgactcagagtctgagtctgacttcctgatgaaaaatgacctgagagtttgaaactggccgtggtgagaatgtttcaaccacagaaattgctaaatggtgtgaatcaggtcagggttccctcccaccacgaaccctgccgcaaaagccagtacacaattatctaggaaggttattctcttttttctttctttcttt

SEQ ID NO: 239151 - DNA, 2444 bp, Homo sapiens
  misc_feature (75)..(75): n is a, c, g, or t
  misc_feature (491)..(491): n is a, c, g, or t
  misc_feature (2221)..(2221): n is a, c, g, or t
gaattgctttcctctggggttccacagtaaagcagccacttagggttgtccacctgtactcatggcttgctctgnacgatgacagtttccccagagcttatctcacaggcacccccggagcagtgagcaatgcactcaactgtgtgtagagaccatgggtattacagcggggtgctgggaacacccaccttggggagtggagagcctgcaagagaagtcacctcctggtcccaacacacctctcggctgcactgtggcctatgacagtgataagccacatagtgctgcttcctcctggcctgggagcacatgtggccttggccatgtctctactccctggggttcactcccacccacctggctccccactcctcaatcatttctggagcagcagtgtgcccaggggacttggggctcttttcttcaatctcttactgagattgttacacagataatcttattttgcagatgaagcttcaggtttagagacntgaggggcacctccagggctccctgctagttggcactagagcaaggaccaggactctaaggttgcctgtctcccaaagccttgtttgtgtgtggtcagccttaggtcacataatctgggttgccaggtgggctctgttctgcccccttttaagcgctctcagatgtcttaggaccaccaccaccagcagcagcagcccctgggtgcctgttacaaatgctcatccttgagctgcacctgcgccctactggattggaacctctgaaaggcaggcccagccatctgggttgtaacaagccctccaggggcttgtgaggcacactcaagtgtgaggatccctggcttagctcattggaggcacctgtggagattttaaacccaggtccaccccaggccaggaaaatctcagcctctgggactgggaagcaggtgtcagaggttttcaagcttccagggggttatagtctgagtgtttgtgtccctccagtattcatttgttgaaattctaactcccaaggtgatagtgttagaagatggagcttttaggggaacgattaggtcatgagatcagtcccctcaggaataggatttagtgttcttataaaagaggcctgagagaaagccctcaccccttccaccttgtgaggctagagtgagaaaatgtcatctatgaaccagcatgcaggccctccaccagacaccaagcctgctggcatcttgatcttggacttcccagccttcagagctgtgagaaataaatttctgttgtttataggccacccagtctatggtgttctattatagcagcgtgaacagcaggtgagaatggtggcctgagacccacctcttgcatgggtggtctctgtcaagctggctcagggtagaatagctgggcttgcaaggcctagaatcttcaacaagctggcaaacagatgaataaagggagaccgccagccacatgtaagacaccaaacctgtcttccagcagggtctatgtgtgttcagcactactcccaagccctgtgaacatttgtttcttcactctatcttggagaccacgggttttgtttctaagctttcttgccctgggaaacaccagggtgtgtttcacactagctgcattttaaaatctctttgtattgaagtcaacagggaatgttcctgccttgtcctatttgtgggtctaatcttgccatcgggtcctcagttgcctcagcacttgccactcccacccactcagaagccagggctggccgaggtaacagggcgaggtgcccctggggctgagggcagggccttggggcacatctcccggctgctctctgacactcccaggcctgggtggactctggtgcttcggggtggaatgaggcccagggaggcccaggtaggcctggtctctctccccaaaggctctccaggcctgaggagtttctcagcaggctccatgaacaatgggggtggcctgtctgagggctgtgaaggtcagggatggtctgagctacaccagtgagtgcgctttggtttggtcagaggcaccaagcacagtctatccctggctagtgggccacggccacacctcggtttgtgtgccctggagtaggttccactgaggcccaggactatgttcacattccaccttggagagtaagtttaaataggtacatgtctaggctatcctacggacgcttctgaggttcctgatagagtgtgactcccatttcttttggntgaaatgtctataatagaacaataaaatccttgaactaaagattagcagccttttttagaagctgactcagaacaaaatggatttgggcccagcccagtggctcatccatccctgtcaaaacctttgtgccaggagctcagcctggctccccagccctgggcctgcaggagacctcagggcccactcagtgtccacgttattgggatcagggacactgatatg

SEQ ID NO: 239152 - DNA, 481 bp, Homo sapiens
gcgcctgtagtctcagctacttgggaggctgaggcaggagaatcgcttgaaccggggaggcggagattgccccattgcactccagtttaggcgacagagtgagactccgtcccaaaacaaacaaaaacaaacagttgtaagagcagccgttactctttcacaccagaaatgtgaagcaataccaaggaaatactgtgtgggtgaatcctattttagaaaaatccaacatttaaaactagatcccttttagattacagaagaatttaccatataattcctttaatacacttaccttcgattcatactttacaagatgggtgtaaagttcagtatttacgttgcaaaagctggtggctatgctattaatgaagtggagaacttgaacctggaagattggagatctctctctaatccctaccccgcagctggttcggtgtgagtttatagaaaccttggggtctgagtttatgttaaaaaaaaa

SEQ ID NO: 239153 - DNA, 171 bp, Homo sapiens
gccaagtttgcttctctaacagatgtttatatagcaataacctggcttggctcttgggttcacctttggacgatttggggaaggggcttgttggctttgctgggttttggatgagtgacagtccatgactgttcctgctggaagggcgtgacttttaagtggtttctaata

SEQ ID NO: 239154 - DNA, 441 bp, Homo sapiens
cactgcagtattcacaatggatgaatggataaagaaaatgtggtatatactataatagaatattattcagccttaaaaaggaaggaaatcctgcagttgcaacaagatagataggcccaaaggacatgctaagtgaaataagccagacacagaaagacaaatattgcatgatctcacttatatgtggaatctaaaatagtcaaacttacagaagcagagagtagaatggtggttgccaggggctgaagggaggggaaaatggaaaaagttgcatgccaggggctgaagggagggtggccactggtcaaagggtaccaggtttcagtcatgcaaaataagttttgaagatctgtacaccataaggtctacaattaataatactatattatacacataaaaatttgctaagagaatagatctcacatcaagtgctcttaccac

SEQ ID NO: 239155 - DNA, 342 bp, Homo sapiens
tgaatttttctccactcaatctcatcatccttcagacaggcggagagagcgggatccatctatgagatttctctgctgagaaatctcctccctccctccaatgaagcaacagcaggtcatatctgaatgcagaagcatggccttgtgctgggaaaacacatcctggctgtagagctctcaggcttctagagtcaaagccaagggttcaaatcctctctgtcttactcagaagccacatggtcctgagacagtgaagtaactctgtgaacctcagtttaccaatctgtaagatggggatcataatgtaaaagatggcattaaaacttacattgggaaaaagca

SEQ ID NO: 239156 - DNA, 687 bp, Homo sapiens
ggaccttggtatgctgagcaccggtcccctgggcccactgttgttttctcacgttttctcacctttccaaacgtgtccatgcctagaagctggagaccccatccacactgcagtaccagggattcttcctgggcagtgtatagcaggtaaccatttgtgtcctggatgtctgtccacccaagaggccatgactttgcaaaggcaaggcaagggcagtgctggatctccggctctgcttcctcctcatcatccaaggagaggtcctgcctgccctggctccctggacatgggcttccaatgggctatcacagctatttccagggtagcaaaattcctggactagatgtggggtgactgctgctgaacagaggtgggccccagggtgaaggaccttgctcagcctcccctcagtttggtctaccaggcccttgtcaagcactctgctggagtctgggggtactgatctttggaaatgtcagtcctggaggctgagctgttccccagagccctagagacccctcaccaactactttattgagggacaaggcagtaggcaggagtgctgggaaatctggtttgcttggtatgccttcttgcacacccacctctccctgcacctggttctatttgtatctgagcttctcgaactgcaataatgatgcagcctagctggcttctggaagctgg

SEQ ID NO: 239157 - DNA, 170 bp, Homo sapiens
gagatcgcgccactgcactccagcctgggcgacagcacgagactccgtctcaacaaaacaaaacaaaacaaatcagaaagccagcattgtagatatagaaccaagtttgctttcctgggcttaacttttttagtcagttggattgcagacagctggtctaaggcgcattc

SEQ ID NO: 239158 - DNA, 387 bp, Homo sapiens
atttgtttgtgctttacttttcttatttgcaaatgagagaaccctggagttacactattatatggtctcattcagcattaacattcatgactttctaacaggccttgcttgaaatgatcagagccagagaatgttggagagaggatcttaagtagaaatgcctcagccagacaagcaacaattacttttgtgaaataagaaaagcaattgtgtaactttcttccttgtccagttactaaggatggttttatttacacctttagcatttcatttcaagaagttgatattaaagaaatcctcatcataataataacccatggagtaatgcatgtcaactctgcaaaactagaacgtagccactttaaatatacttaacacatgacagca

SEQ ID NO: 239159 - DNA, 347 bp, Homo sapiens
cttcaaaagccactgtagccaggtgataaaggttaacatcatcagtgataagtcacactgataccatctatctacccttgatatgaagtgaggaaaatggcagtttgcccacgtggtcttcctctcaaaaacacattactacagtctaatcaggagaaaaacatcagacaaactgaaattgagagagatttcacaaaatgcttgcccattactcctcggaactgttaagatcatcaaaccacagggaaagtctgtgaagccgtcacaggccagagaagcctaaggagatatgacagctagttacggtgcagtgtctcagatggggtcctgaaacagaaaaaaggaat

SEQ ID NO: 239160 - DNA, 350 bp, Homo sapiens
cacaagctcttttcaaaaggatatcaggattcaagcattacatcatctaaataaattctcattggatgttcagtccctgactggctggaatcgggttccctttatttaaccctttcccagccaagacatagcctgtcctaactttgagaatgtatctttcctgttatttgcagcagcatttagcatttgagcagaacgcatgtgaagaaagttgctttctataaaccccccacctcagtttaagtttttatacttagtatgtcaaaaaagttatttcaaatgctttgttgctatgtaattgcaaaagcagcattactgagagaaatgcttcaataaagcctttggaaaat

SEQ ID NO: 239161 - DNA, 769 bp, Homo sapiens
tacaacctggggatgattattctttgccagataaaatgacttccttctttgaagcttctgttttttcttaatagggtatatttaagttgtataacttgattatttcatatgtatacattgtggaataaccccacaatcaagttcttgcttaggcatctaaattacttaacgatccaaggttagtttatagagtaatttgtttttaagaacatgttttcctctcacttctatctaaaattcttcaggattttacttccttttgatatcactcccaaaactgtctcctcaagggcagggaaatacagtcctaggattagcagaatgcctatatttaatcagtggtgtgttaatgaaggtcataattaagtaataaagtgcctgttatttaaagtgtacagtttgataagttttgacctatgcatgcacccatgaaacggtcaccacaatctaattaacatacccatcacccccaacagttttctcatgcccttttgtaatttgcttaccacttccccatcccgaggcaaacactaatctgcttcctattactgtaaattagtttgcgtttcctagaattttacatatatggaatcttacagtatgtaagtatatatttttgaagggagaggtctggcttctttcactctgcataattattttgagattcatctatgcttacatgtatcagtagttcattctcttttaactgatgatgagtagtattccatttccagatatacatgccacaattactttgttcatttatggg

SEQ ID NO: 239162 - DNA, 351 bp, Homo sapiens
gagcaattactaaacaacaagacatctctagcccacagccagtgggggtaagcactggggttcgtgttccccaatatgaaagtccacttcctccaatatgaagggacttacgaatgtgcctctccccgctgggctgatctgtgatcagagcacagggctggtggccctgcaatctgggcacagggattcagattcacacctgcctcaggggctccgctggcagtgggacatccctattaataatgaggggccgtggctcataaggtgaattcagtgcagaaatgggccaccaagagaagccactgaaacaacagccctaagcacctgtcctaagtcagaacaaaactctcc

SEQ ID NO: 239163 - DNA, 378 bp, Homo sapiens
cagagggaaaagaaggctacttatggctttaaccagaagtgtaaatctatcaaattttcagagtggttactctggaaacattgtgggaaatgaattagaagtcagcaaataagaatcaggaagccctactaagaagctattaaaataactcaagcaagaaattatggtttcctggactagtgtgtggtagcagcaatgatgaggggaaaagaaggtgggacagatctgagagacagtggggggtggggaaatagaactgatagcccatgatgattggctggcagggttaaggaagtgggaagtcatcattctcaaccgatgactcaggtcacatccactcctcagctaaaaatcctttggtgtttcccatctcactca

SEQ ID NO: 239164 - DNA, 383 bp, Homo sapiens
ccagcaaaaagattatgacttctgaaggcagaggatgatttttagcattttttagcaataaagcatttttaaattaaggtatgtttgcatcttatttttagacataatgctattgcacacttagactacaatatagggtaaatataacttttatgtacattgggaaaacaaataattgacgtggcttgctttattgtgatattcacttttttgtggtgatctggaactgaacctgcaatatctctgaggtatggctgtatatattaaagtaaaactgtaaaggtaatttgaggttaattataatttgaggattgatgtattaaaattatagtgtgttatatgttctcataatatgcctcataattatcactatttgaactaaa

SEQ ID NO: 239165 - DNA, 543 bp, Homo sapiens
atgtattgagagggtattaatgggtgtggtaaaaactatagcaactgaagccagaagaaaagaggcataaaccagtgcacttggcttagcagtgaacacaaagtacgtagtcaaaataatgaccatattaggggatgaaggaagggagaggtgacaaagtgggtagggacagaggtttccaagaaagcgaactcttcatccaccacaatagtcggtcagtgataggtagttgacaaattgataaatcaagaaattaaatatgtttaactccttaagaaagaagtaaataccagatggatccactaacaaagttcaaaatgtgcctttgggaaagagcctcagaggtagagaagtatccaaagacattgctgctggtgttttactttatactatacaccttttggtgtcatgtattttaccaaacactgtgaacatattcctttgatgataaaaactattttagaaactaaatatatacatacacttatcagcaattctactcctagctatatgacctagcagaaatacatctgtatactcatc

SEQ ID NO: 239166 - DNA, 394 bp, Homo sapiens
ttccccgatcagtcactgctttgtcatttcctgtggctgcagttgtaggttcttatctcttcagctgtaggcgaagctcagacaacaggcccctccaagagggcttgctgcctcccctgcatacagcgagcctcatttatggcatcctgcgtgctcttgcagctgcagtggggtttgaagctccgggtctgtctcccagccaagaagggccccagtgttaatccttggtggggccatgattcatttgccagaagtggtgttagagggttaatcccaaagcacattttgaggccagaggaggggtgccactgataagaatttttaaaaattctgttggggattttagtatgaaagtcctgcctgtggctcagtggtttgactgtgggctcactct
